United States Patent Application Publication US 2026/0337666 A1 - sequence listing, part 8

SEQ ID NO: 10435 - DNA, 5447 bp, Homo sapiens
  source 1..5447: mol_type = unassigned DNA
cccagccacagccccgccccacctcccccaggccaatcagtttggttcctctcccctaagccacgcccccgctacctcgctcctcctcccacccaatcccgtcggtctctccccccgtgtccccgcccctgcgtccccgcccctcccgccccgccccccgtccaatgctgagctcagtctgcgtctcgtccttccgcgggcgccagggggccagcaagcagcagccggcgccaccgccgcagccgcccgagtccccgccgccgccaccgctgccgccgcagcagcagcagcctgcgcagcccggccccgccgcgtccccggcgggccccccggcaccccgcgggcccggggaccggcgcgccgagccatgccccgggctgccggcggcggccatggggcggcacggcggcggcggtggcgacagcggcaagatcgtgatcaacgtgggcggcgtgcgccatgagacgtaccgctcgacgctgcgcaccctgccggggacgcggctggccggcctgacggagcccgaggcggcggcacgcttcgactacgacccgggcgccgacgagttcttctttgaccggcacccgggagtcttcgcgtacgtgctcaactactaccgcaccggcaagctgcactgcccagccgacgtgtgcgggcccctgtttgaggaggagctcggcttctggggcatcgacgagaccgacgtggaggcctgctgctggatgacctaccggcagcatcgcgacgctgaggaggcgctcgactccttcgaggcgcccgaccccgcgggcgccgccaacgccgccaacgccgcaggcgcccacgacggaggcctggacgacgaggcgggcgcgggcggcggcggcctggacggagcgggcggcgagctcaagcgcctctgcttccaggacgcgggcggcggcgccggggggccgccagggggcgcgggcggcgcgggcggcacatggtggcgccgctggcagccccgcgtgtgggcgctcttcgaggacccctactcgtcgcgggctgccaggtatgtggccttcgcctccctcttcttcatcctcatctccatcaccaccttctgcctggaaacccatgagggcttcatccatattagcaacaagacggtgacccaggcctccccgatccccggggcacctccggagaacatcaccaacgtggaggtggagacggagcccttcctgacctacgtggagggggtgtgcgtggtctggttcaccttcgagttcctcatgcgcatcaccttctgcccagacaaggtggagtttcttaaaagcagcctcaacatcatcgactgtgtggccatcctgcccttctatctcgaggtgggcctctcgggcctcagctccaaggccgccaaagacgtgctgggcttcctgcgggtggtccgcttcgtccgcatcctgcgcatcttcaagctgacccggcacttcgtggggctgcgcgtgctgggacacacgctccgcgccagcaccaacgagttcctgctgctcatcatcttcctggccctgggggtgctcatcttcgccaccatgatttactacgctgagcgcattggcgccgaccccgatgacatcctgggctccaaccacacctacttcaagaacatccccattggcttctggtgggctgtggtcaccatgacgaccctgggctatggagacatgtaccccaagacgtggtcggggatgctggtcggggcgctgtgtgccctggcgggggtgctgaccatcgccatgcctgtgcccgtcattgtcaacaactttggcatgtactattcgctggccatggccaagcagaagctgcccaagaagaagaacaaacacatcccccggcccccgcaaccgggctcgcccaactactgcaagcctgacccacccccgccacccccgccccacccgcaccacggcagcgggggcatcagcccgccgccacccatcaccccaccctccatgggggtgactgtggccggggcctacccagcggggccccacacgcaccccgggctgctcagggggggagcgggtgggctggggatcatggggctgcctcctctgccagcccccggcgagccttgcccgttggctcaggaggaggtgattgagatcaaccgggcagatcctcgccccaatggggatccggcagcagctgcgcttgcccacgaggactgcccagccattgaccagcctgccatgtccccggaagacaagagccccatcacgcctggaagccgtggccgctatagccgggaccgagcctgcttcctcctcaccgactatgccccttcccctgatggctccatccgaaaagctcttgtcaccgcctgagacctcgcgagactttcggtcccccccgccccttccccccaggttacgagaaatcccgcagcctcagcagcatcgcgggcctgagcggggtgtccctgcgcctcgcgccccttgccaccccccctggctctccccgggccgcccgccgcgctcccccgaccctgccctccatcctttagcgctcccctcccccctgtggggggactcgggggtgaccgggaagaaggtcaaaggagctgggggtggggggtggggaaaagggtttttttaaaaaaaatcaaaaagtcattaataatatgcaaccgagatgacgatgccagcagacacccccgggcccctcacccccaacctgggcccccaggatggagagaggggccacagcccgtccccccaactcttccctccccaaaaaaagccttctcaggtctccacgagccataggacatccccctgccatcaacttgtgtaaataagtccaaattatgccagttacatcttggggcacctccccccacacactgcatgccttccctaacctggagcccccactccaagtccacctcagcaataagccgccaggggccgcatgcgcgggtttgaggggcaggcactctgggaagggggtggcacctcccgggggtcgggctggcctttaaggtctccagccttcccatccttcaccccaggaggacaaccaaccctgtgcgttgattaggagaaaacaaaccagaaactagaaacagtgtaggggaaggaggaacagttacccaagccccagatcggagttgagctcaggtggcgggagggcggggccgagttgagctcaggtggtgggagggcggggcgggctttggacctgctccctcagcctttaggagaattcctctggtgaatttcaccctctcatccgccccttcccccagggacctgctcgcctctattcttgctgcatggactcagacctcctatcccagaattcctgggatgatctggccctagcacacgaaattccccgactatctccctccattcccaggacatgagacctgcacccagaattctgagactgaccctggcacgccacatctcccaatccccacacactcctgcgacttaacctctgcacacagaggctccctgaaccaccctccctccccactcctgccaccccaaacacccccaccaaattccctgaactgcgtcccagcacttctcaaacctccaagacttgacccagctcttttcagctcaaattcagcctttgggatgctccaaatccttcccacaactgacatttcttggacacccccaaagcctcaggcctgttccgcacccatatccccaaagccctaacagacttgtccagcccaggttcccttgatgctagaacttccaagataggcgcaacctgtctgcaattccagggaaccagaccctccccaagcaccctctttgtcttacgcctaaccctgagtctcttccctgagatggtgccccaaaggtaccctcttcacagacaccagtgtttcccagagggttgtatttgtacctttggtggtgtgctaaggtttgaggcagtatgaggacaaacacttgttttaaaagttttgtctctaatacgcattttgtacagaagccgataagtgcaggcatcgctgcttggctaggacacggtttatttaggttaagagtgtttccatttaaagtagtccacagatgatcacagaggctgttcccgaagggaggaacactggagtatcagaagattgggaaccgacaacacccagctcggctgggatcccagccccccttccccagcggtcctcaccgcgtcacgctcgcgggtggaaaatcatttcccacctcctatcctggctcaaggatgcgctacctcccccaagcccagagaccacaccggtcccagactctttagcggaccccccttttggagccggggtcccacggaattagccacctccctccctctgctcccacggcctcaggaaccccccacccgagggtggatggggggcgtcactgagcacgattctcgatgcaacgattcctatgcaaggggcattttgagtcccccccatccttccctcggaccctaaaccctggtgaagcaggggtgaggggtggggcgggttttggtgggggcggggcaaagggctaggggctccagacaccagggtacggggtggggactgattatattgccaaagggttcaacttctttaacaagcccccccgtttcccctgaccttcacgaaagccgaaggaggcggggaaagggggtgagggtcttttccaaagggtactgacctcttcccaacgtctccccctgctcgccagtccgccacacgtacccagcttttgagttcagcttttcaaaataaccacaatcatgataaacttctacaaaacgtgattctcctcccctcccaccccatcccccaagtcaatagtgtgggattcggggagggagagagcgagctaaagggactctttccaagtccggctcccccttttccccccggccgccagggtgcctgcacctacacgcatgcgctgcatgacgcgccccccacacgcatgtcgcacccctcctgcgctccgggaacgcacggacacgggccagggggcggggcgattggggaggaatgaatggcggggggtcttcctgagctccgcggctcaccctccccaacacacacacacacacacacagagcaataagtttctctcactcaaatgtgggcggggcgggcctagcctgtcgctggtggggggagtggtgagggggcgctctcagggatgggggcggggttcggagacagtgtggggaggggaggtctgcaaatcgtccaactctggtgctaatggcgggtcttctcagcccacccgcagggcagggagggaggggtcggcgtggccccttccccaagcctcccccacgcccaccctgggtgcatgaaccgcccaatgcagaagctgccgcatgtcacccccctctccccaaagaaaaagtgtcatgcccccttcccacccaccctcactccccaccaaaataaacgtttccttttcatttaaaaa

SEQ ID NO: 10436 - DNA, 3347 bp, Homo sapiens
  source 1..3347: mol_type = unassigned DNA
aggtcgcgacggcagccacaggtggcagtcgggggtggctgtaattgatcctcgccccaatggggatccggcagcagctgcgcttgcccacgaggactgcccagccattgaccagcctgccatgtccccggaagacaagagccccatcacgcctggaagccgtggccgctatagccgggaccgagcctgcttcctcctcaccgactatgccccttcccctgatggctccatccgaaaagctcttgtcaccgcctgagacctcgcgagactttcggtcccccccgccccttccccccaggttacgagaaatcccgcagcctcagcagcatcgcgggcctgagcggggtgtccctgcgcctcgcgccccttgccaccccccctggctctccccgggccgcccgccgcgctcccccgaccctgccctccatcctttagcgctcccctcccccctgtggggggactcgggggtgaccgggaagaaggtcaaaggagctgggggtggggggtggggaaaagggtttttttaaaaaaaatcaaaaagtcattaataatatgcaaccgagatgacgatgccagcagacacccccgggcccctcacccccaacctgggcccccaggatggagagaggggccacagcccgtccccccaactcttccctccccaaaaaaagccttctcaggtctccacgagccataggacatccccctgccatcaacttgtgtaaataagtccaaattatgccagttacatcttggggcacctccccccacacactgcatgccttccctaacctggagcccccactccaagtccacctcagcaataagccgccaggggccgcatgcgcgggtttgaggggcaggcactctgggaagggggtggcacctcccgggggtcgggctggcctttaaggtctccagccttcccatccttcaccccaggaggacaaccaaccctgtgcgttgattaggagaaaacaaaccagaaactagaaacagtgtaggggaaggaggaacagttacccaagccccagatcggagttgagctcaggtggcgggagggcggggccgagttgagctcaggtggtgggagggcggggcgggctttggacctgctccctcagcctttaggagaattcctctggtgaatttcaccctctcatccgccccttcccccagggacctgctcgcctctattcttgctgcatggactcagacctcctatcccagaattcctgggatgatctggccctagcacacgaaattccccgactatctccctccattcccaggacatgagacctgcacccagaattctgagactgaccctggcacgccacatctcccaatccccacacactcctgcgacttaacctctgcacacagaggctccctgaaccaccctccctccccactcctgccaccccaaacacccccaccaaattccctgaactgcgtcccagcacttctcaaacctccaagacttgacccagctcttttcagctcaaattcagcctttgggatgctccaaatccttcccacaactgacatttcttggacacccccaaagcctcaggcctgttccgcacccatatccccaaagccctaacagacttgtccagcccaggttcccttgatgctagaacttccaagataggcgcaacctgtctgcaattccagggaaccagaccctccccaagcaccctctttgtcttacgcctaaccctgagtctcttccctgagatggtgccccaaaggtaccctcttcacagacaccagtgtttcccagagggttgtatttgtacctttggtggtgtgctaaggtttgaggcagtatgaggacaaacacttgttttaaaagttttgtctctaatacgcattttgtacagaagccgataagtgcaggcatcgctgcttggctaggacacggtttatttaggttaagagtgtttccatttaaagtagtccacagatgatcacagaggctgttcccgaagggaggaacactggagtatcagaagattgggaaccgacaacacccagctcggctgggatcccagccccccttccccagcggtcctcaccgcgtcacgctcgcgggtggaaaatcatttcccacctcctatcctggctcaaggatgcgctacctcccccaagcccagagaccacaccggtcccagactctttagcggaccccccttttggagccggggtcccacggaattagccacctccctccctctgctcccacggcctcaggaaccccccacccgagggtggatggggggcgtcactgagcacgattctcgatgcaacgattcctatgcaaggggcattttgagtcccccccatccttccctcggaccctaaaccctggtgaagcaggggtgaggggtggggcgggttttggtgggggcggggcaaagggctaggggctccagacaccagggtacggggtggggactgattatattgccaaagggttcaacttctttaacaagcccccccgtttcccctgaccttcacgaaagccgaaggaggcggggaaagggggtgagggtcttttccaaagggtactgacctcttcccaacgtctccccctgctcgccagtccgccacacgtacccagcttttgagttcagcttttcaaaataaccacaatcatgataaacttctacaaaacgtgattctcctcccctcccaccccatcccccaagtcaatagtgtgggattcggggagggagagagcgagctaaagggactctttccaagtccggctcccccttttccccccggccgccagggtgcctgcacctacacgcatgcgctgcatgacgcgccccccacacgcatgtcgcacccctcctgcgctccgggaacgcacggacacgggccagggggcggggcgattggggaggaatgaatggcggggggtcttcctgagctccgcggctcaccctccccaacacacacacacacacacacagagcaataagtttctctcactcaaatgtgggcggggcgggcctagcctgtcgctggtggggggagtggtgagggggcgctctcagggatgggggcggggttcggagacagtgtggggaggggaggtctgcaaatcgtccaactctggtgctaatggcgggtcttctcagcccacccgcagggcagggagggaggggtcggcgtggccccttccccaagcctcccccacgcccaccctgggtgcatgaaccgcccaatgcagaagctgccgcatgtcacccccctctccccaaagaaaaagtgtcatgcccccttcccacccaccctcactccccaccaaaataaacgtttccttttcattt

SEQ ID NO: 10437 - DNA, 3176 bp, Homo sapiens
  source 1..3176: mol_type = unassigned DNA
accggtcccgcctcccttgacgccccgccccgcccctcctccctgctctcttagaaagagccaatcgctccgtctcattggcggccccgactcgtccagctgggtcgcgttagagtgcccgccccactcctcccagccacagccccgccccacctcccccaggccaatcagtttggttcctctcccctaagccacgcccccgctacctcgctcctcctcccacccaatcccgtcggtctctccccccgtgtccccgcccctgcgtccccgcccctcccgccccgccccccgtccaatgctgagctcagtctgcgtctcgtccttccgcgggcgccagggggccagcaagcagcagccggcgccaccgccgcagccgcccgagtccccgccgccgccaccgctgccgccgcagcagcagcagcctgcgcagcccggccccgccgcgtccccggcgggccccccggcaccccgcgggcccggggaccggcgcgccgagccatgccccgggctgccggcggcggccatggggcggcacggcggcggcggtggcgacagcggcaagatcgtgatcaacgtgggcggcgtgcgccatgagacgtaccgctcgacgctgcgcaccctgccggggacgcggctggccggcctgacggagcccgaggcggcggcacgcttcgactacgacccgggcgccgacgagttcttctttgaccggcacccgggagtcttcgcgtacgtgctcaactactaccgcaccggcaagctgcactgcccagccgacgtgtgcgggcccctgtttgaggaggagctcggcttctggggcatcgacgagaccgacgtggaggcctgctgctggatgacctaccggcagcatcgcgacgctgaggaggcgctcgactccttcgaggcgcccgaccccgcgggcgccgccaacgccgccaacgccgcaggcgcccacgacggaggcctggacgacgaggcgggcgcgggcggcggcggcctggacggagcgggcggcgagctcaagcgcctctgcttccaggacgcgggcggcggcgccggggggccgccagggggcgcgggcggcgcgggcggcacatggtggcgccgctggcagccccgcgtgtgggcgctcttcgaggacccctactcgtcgcgggctgccaggtatgtggccttcgcctccctcttcttcatcctcatctccatcaccaccttctgcctggaaacccatgagggcttcatccatattagcaacaagacggtgacccaggcctccccgatccccggggcacctccggagaacatcaccaacgtggaggtggagacggagcccttcctgacctacgtggagggggtgtgcgtggtctggttcaccttcgagttcctcatgcgcatcaccttctgcccagacaaggtggagtttcttaaaagcagcctcaacatcatcgactgtgtggccatcctgcccttctatctcgaggtgggcctctcgggcctcagctccaaggccgccaaagacgtgctgggcttcctgcgggtggtccgcttcgtccgcatcctgcgcatcttcaagctgacccggcacttcgtggggctgcgcgtgctgggacacacgctccgcgccagcaccaacgagttcctgctgctcatcatcttcctggccctgggggtgctcatcttcgccaccatgatttactacgctgagcgcattggcgccgaccccgatgacatcctgggctccaaccacacctacttcaagaacatccccattggcttctggtgggctgtggtcaccatgacgaccctgggctatggagacatgtaccccaagacgtggtcggggatgctggtcggggcgctgtgtgccctggcgggggtgctgaccatcgccatgcctgtgcccgtcattgtcaacaactttggcatgtactattcgctggccatggccaagcagaagctgcccaagaagaagaacaaacacatcccccggcccccgcaaccgggctcgcccaactactgcaagcctgacccacccccgccacccccgccccacccgcaccacggcagcgggggcatcagcccgccgccacccatcaccccaccctccatgggggtgactgtggccggggcctacccagcggggccccacacgcaccccgggctgctcagggggggagcgggtgggctggggatcatggggctgcctcctctgccagcccccggcgagccttgcccgttggctcaggaggaggtgattgagatcaaccgggcagatcctcgccccaatggggatccggcagcagctgcgcttgcccacgaggactgcccagccattgaccagcctgccatgtccccggaagacaagagccccatcacgcctggaagccgtggccgctatagccgggaccgagcctgcttcctcctcaccgactatgccccttcccctgatggctccatccgaaaagccactggtgctcccccactgcccccccaagactggcgtaagccaggccccccaagcttcttgcccgacctcaacgccaacgccgcggcctggatatccccctagtggacgaaccccctccccccgggctcttgtcaccgcctgagacctcgcgagactttcggtcccccccgccccttccccccaggttagcaattgggaatggctgggagggggtgtccccaagacactgggcttcaaatctccccccaagccctccctcctacgatcaagacaccttttgtccagacagctcccttagcgttgcctggaaaagccacagagctccctgcgggggtgcagaaccctgcaggcagccccaggctttgcagaaaccacacacactgttgctggatcttgagtcccattagctgtgagatgcctgtgagagccttcccgcacccgtcagaagctcagagccttcttggaccctttaaagatgtccctctccccagccctccgcctcaccgccccccacccccgaccccgtccttagaatcttctggaggagcctccctccccccccacccccccccactgctcctggagttctcatcggattccccaagggcactgccagcttcgctccactcagcccccttgcagaccccaccccctgcctgctctctttccctacaactaggtcagcccccagccccgctacggcggccgc

SEQ ID NO: 10438 - DNA, 7396 bp, Homo sapiens
  source 1..7396: mol_type = unassigned DNA
tttgctgaactaactccaagctggtgtgcctagcgtccgcgcggctgccggcccaagagctggagtcaccatggcggccggagttgcggcctggctgccttttgcccgggctgcggccatcgggtggatgccggtggccaactgccccatgcccctggccccggccgacaagaacaagcggcaggatgagctgattgtcctcaacgtgagtgggcggaggttccagacctggaggaccacgctggagcgctacccggacaccctgctgggcagcacggagaaggagttcttcttcaacgaggacaccaaggagtacttcttcgaccgggaccccgaggtgttccgctgcgtgctcaacttctaccgcacggggaagctgcactacccgcgctacgagtgcatctctgcctacgacgacgagctggccttctacggcatcctcccggagatcatcggggactgctgctacgaggagtacaaggaccgcaagagggagaacgccgagcggctcatggacgacaacgactcggagaacaaccaggagtccatgccctcgctcagcttccgccagaccatgtggcgggccttcgagaacccccacaccagcacgctggccctggtcttctactacgtgactggcttcttcatcgctgtctcggtcatcaccaacgtggtggagacggtgccgtgcggcacggtcccgggcagcaaggagctgccgtgcggggagcgctactcggtggccttcttctgcctggacacggcgtgcgtcatgatcttcaccgtggagtacctcctgcggctcttcgcggctcccagccgctaccgcttcatccgcagcgtcatgagcatcatcgacgtggtggccatcatgccctactacatcggtctggtcatgaccaacaacgaggacgtgtccggcgccttcgtcacgctccgggtcttccgcgtcttcaggatcttcaagttttcccgccactcccagggcctgcggatcctgggctacacactgaagagctgtgcctccgaactgggctttcttctcttctccctcaccatggccatcatcatctttgccactgtgatgttttatgccgagaagggctcctcggccagcaagttcacaagcatccctgcctcgttttggtacaccattgtcaccatgaccacactgggatacggagacatggtgcctaagacgattgcagggaagatcttcggctccatctgctccttgagtggcgtcctggtcattgccctgccagtccctgtgattgtttccaactttagccggatttaccaccagaatcagagagctgataaacgcagggcacaaaagaaggcccgccttgccaggatccgtgtggccaaaacaggcagttcgaatgcatacctgcacagcaagcgcaacgggctcctcaacgaggcgctggagctgacgggcaccccagaagaggagcacatgggcaagaccacctcactcatcgagagccagcatcatcacctgctgcactgcctggaaaaaaccactaaccacgagtttattgatgagcagatgtttgagcagaactgcatggagagttcaatgcagaactacccatccacaagaagtccctcactgtccagccacccaggcctcactaccacctgctgctcccgtcgtagtaagaagaccacacacctgcccaattctaacctgccagctactcgcctgcgcagcatgcaagagctcagcacgatccacatccagggcagtgagcagccctccctcacaaccagtcgctccagccttaatttgaaagcagacgacggactgagaccaaactgcaaaacatcccagatcaccacagccatcatcagcatccccactcccccagcgctaaccccagagggggaaagtcggccaccccctgccagcccaggccccaacacgaacattccttccatagccagcaatgttgtcaaggtctccgccttgtaaaaccactggacagagggccagagtgggtagtggggaatgaaggggactggcatgttggtgggtggtcactgagaccactccctcccccctttccccactatttctgcctgccccattgtacccctagcactgagacttgtgcctggaaggaaaaagaggtagcaaaggggcacctgaggttcacgctgctagcgtggacatagccctgtgatactgcatctcactggggccagaggaagggagggagggtgggggggtcggggataggccgggggatataggctatgtgccaggacagggcctggatggaggagcctcagactcagaccaaataacagtcgtttctggagaccccagtgaggaaaatacaagaccaagagcagcaaagaggccaagttgtcacaagcaaaacaggaagaaaatataacactgtgtatttaagcacctttttcaaggctcttaatggataatatttattcatgggaaaaggtggaaaacaaaaacaccaacggatttttgtgaaatgtttttctccatggacccaacacctttgaaccaaaacaatgcattttgtgagggatttttttttctccttttatagcaaaagcttttaggctaagaagtcagttattgctgagttctctctccattcccccaggtgggtgaggtcaactgagcctgggcccccactgcccagctgacctgtgcagagctgccaagtgaccacacggcaatccttaccctttgtctgtccctgtctcccttgtctctgtacctctctgcttacccctagctgtttctgtgtccagccatctgtctctacctggatcccaatgatcctgaaacacatcagtaaagccttcttcatcactgccacgcacaacagacttgtgcctgggagttctatctgtgtgaatgcaactgcagaggaggaaagagtgaagcaaaaattgggagagtttaggggtaagggaagtctacctcacagaacagaggtacttcccttggggttggaaccactcgtgtttgcagtttcagtttctgggaaagaaagggaatgaacagatttatcacactggaatcttgaaaaggcaaatcgccaacacctgagacgcggtcaactctggtatgtgccagtgaggggagaacggaaggacccagggctcgcagcctcagccggtcattagggcaccttgctatggacccttccttcaagacccaccataaagcccatccagagcccttccaagaggccccgggagtagttttctccagagagggcagtggtacggggaccaagattcctctgacttatatcaaaccagaggcaactcccacacagaggctgtggaagggtaagcctgtgtgcctcaagaaaaatgcttcaaagcaaaagcaagtaagagattctagatgattcttacctgctatgaaagatgccttgatgtctgaagaggcttcggcctgatctccctgaagatgctgaaatgggggagaagcctcatcacctctgtgcaagcaaaggagtgaagattatttcttgaacacctggacaacatatctattcaactagcttgcaccctggtggagctgggggcagcatttctggaatcctcctaaccattgttcactgcttgtagcagagtaggtgggcctcagggttagtgacaagtcctttcctgcccttcccaacacccagccaccttgctgcagtctctgtagcctgggctctgaaatacatgagctcctcgggagctgcctatccatcctacagcttagtggttagctgtttaattgtaggccaagaatttctctccccaccacagccatctaaatgagttttactagccaggaacctaaaaacacccttcgtgggcttccctatgaccccagctcgattgaccctgtaggttcaaaaggtttcgaggtggcacctaaccagaatgtgggcagaaggcagaggagagggagccttctttctgtctttatctctttatgcttatcctcattgaccatgggctgagttctttctctgggtcccctaatgtgggaatggagtggttcttgccctctgagcttacagactaagaaggcagaaaagctttacaactacagagtacatgtgtatacacacaaccaacctaaacacatcagagaatacatacttaaatcaattcacttcatatacacatctcattagaagaccaagctaaacttcacttagagggcgggcaaaggactagaaaagaatttttctcttaaaaaaaatgagtactagagcaaaattatgagtgtctaagtatcttagttatgcttcataagatctgactggggtaagagataaagaggtaaatagggctgggcgcggtggctcacatctgtaatcccagcactttgggaagccgaggtgaacagatcacctgaagtcaggagttgaagaccaacttggccaacatggtgaaaccccatctctactaaaaatacaaaaattagccaggcatggtggtggacccctgtaatcccagctacttggaaggctgagggggaggattgcttaaacccaggaggcagaggttgcagtgagccgtgattgcaccactgcactccagcccaggtgacacagcaagactccgtctcaaaaaaaaaaaaaagaaaagaaaaaaaaaaaggaggtaaattagaactggttgcacacacatacaaacttcctgtgatgaatttaagaacagatcattacagggttagaatagtgacagattcaacaaaggatctgtttgatagggcaccaagggaacattttactggttcccacaaaaattaataaatgttaaatatcatgtcccaagcaatttcccatgtttttttattggtcctaatcaacagaatgttttgtgttccttccacttcacgttcagagcccacgtcatgccacttcctaaaagaccattagaccatccccttttcctccatcctccactgtagccttagccagagaaaagatccagctcacttctggtccaaaaaatgtcaacgtttggaaaatggctcatctacactacagaacacagccagatgacactgctaaagggtactgtaagaaaacacaaggtccaaagtatgctgaattggtttcataagtctaactcattggccagtgactgaaaaaccaggatatcaggattttctgggggccaatagccatgacccttgagctttcatagttcatgaaccactttgacataataaaatattcccaaaaccacctattccattcagtcccactcagcattaagagggggagggaaaaacaaaccaaccaaccaacctaacagttacattcaaatgtcaaatgaatgtgaacctagaaaatgtagtattaagagcatatcagaactagaaaagatttaagaatatctaattcattttacagtatagaaaactgagacccagagaaattaaatgacttgttcaaggtcatgcagttatttaatgacagatctgagaccagaacacgagtcttttggctattagtctaatgcattttctaccacacccactgcctctgagagcagtgatgctttggagaagatccatcaaagaatccatactgtaattggagacatagtcttatatgtcaatacgtatatgtcaatactacttggacacagcccttggaaatcacctgactgtaccaatacaaaccatactttggaaaccaccattctctgggtagaaacatctatggactatcaattttgtcagaaatcagtgaacaagtgaagagtcaattttttttagtcaaatattttctcttctcaatgaagagaagactaggacagtgacattttgaagcataccttttatactccttgtggttcttatgacagtctgtgatggtagtaggtaaagtagctaaatccttgattcagagaggggaaaacatgtggaaagaaactgaacgacttatccaagttcacatgacaagttagtggcagaaccattattgcaatccaggacttaagacatcttgtcctaggatttttcctccacattatattgcactgctctgaggcttgcttatatttttcatacctggatttccagggtggtgacgtgggggagggaagtattcaattcagaaccaccgtgaaccaagatctctggaaacaaactctgtactatttctccttcatctcctattttcataactagtgccaagctcaggactaactgcatagactccctttcaaaagaccaatagatattctcagtgacagttgaacacattagtttacaatcacacagaatttgaacagaacttaaagttgacagttaatgccgatctataattaacaaaaatgtcaacttgtggatatgctgatgattttatccagttttcaaaatatgattcctacagttcaggatatcacttattagattgtagacaaggaaaatgtacattgggacattatgtacttaagagtttttccttaagttttgcagaggaagtggttgaaaattgagctaacactagatttcgaggttactaaagaattccagttttccagtctcccacttcaattaccaggtaactataaggcaaaaatatcccaatgctgtgaacttaaggcaatattcatttcctttctacactacttggcatggtaaccatgacaaacttttattttctctttctgatttcctaatgaaatctcattatttgcaaagctttaaaatgactagatgaaggaaaaacattgttatgacccatgaccctcggagcccaaacagcaccatgaagagcatcattaaaactaagagaaagtggctatcagaaaatgaaacagctttaaaggggttccttttaagtcttgttttctattcagaatgttctgtgttttttctcaagtgtgggaatgacatttatcttagcaggttactcaactacactggatgatgtcactctaaccagtgtacggcactgacccaagtcctggggggctccttggaccaatggactattttacaaacctgggaggtgggagggatggtatatttttgataatcagacattccaatgtaatgttttccttagaggtcacacccttccccccattaatgtcatcgtgagatacatcaagtgtgttcttttctattttcgtataataaatgggctttgcttatcaacatcacaatggcaaagaagaaatatactgtacaaaactgcaggaagataaaacatgaaaactttctatgaaaaaaaaaaaacacccttgagtttcctgtcgtcttcttttgaaactgtagtgcatatgttaaaacatgtatatcatttacagtattgagtcgtgtgccactgctgtacctgatgtatccaatctggattaaacaaattatgtgccacaaaccctaaaa

SEQ ID NO: 10439 - DNA, 2716 bp, Homo sapiens
  source 1..2716: mol_type = unassigned DNA
ggagagaaatggctgaaagtggaaacccggagcggtttggggcgcttcgcaaagttctccagctcggcgagccggcggtgtgtctaccagaggctgggggccagtccatctggtcctgcccgacgccacttccaccccgcgagctctgggaaaggtctctacgtgacgccaagggccgtcgcggccccggggagagggatcgaaagactcactctgcgaggtgtttacactggaggtgggggacgggaagggactgggcaaagttacctggactcaactaaattcctgcgcttgcttagtgttgacatttgaataggatccgagatgttctgcttttatcccgggcagccctgatatgtcagcaacaggctgaggttccagacctgaaatcgcactgcaagaaaaaggggtttgctgaactaactccaagctggtgtgcctagcgtccgcgcggctgccggcccaagagctggagtcaccatggcggccggagttgcggcctggctgccttttgcccgggctgcggccatcgggtggatgccggtggccaactgccccatgcccctggccccggccgacaagaacaagcggcaggatgagctgattgtcctcaacgtgagtgggcggaggttccagacctggaggaccacgctggagcgctacccggacaccctgctgggcagcacggagaaggagttcttcttcaacgaggacaccaaggagtacttcttcgaccgggaccccgaggtgttccgctgcgtgctcaacttctaccgcacggggaagctgcactacccgcgctacgagtgcatctctgcctacgacgacgagctggccttctacggcatcctcccggagatcatcggggactgctgctacgaggagtacaaggaccgcaagagggagaacgccgagcggctcatggacgacaacgactcggagaacaaccaggagtccatgccctcgctcagcttccgccagaccatgtggcgggccttcgagaacccccacaccagcacgctggccctggtcttctactacgtgactggcttcttcatcgctgtctcggtcatcaccaacgtggtggagacggtgccgtgcggcacggtcccgggcagcaaggagctgccgtgcggggagcgctactcggtggccttcttctgcctggacacggcgtgcgtcatgatcttcaccgtggagtacctcctgcggctcttcgcggctcccagccgctaccgcttcatccgcagcgtcatgagcatcatcgacgtggtggccatcatgccctactacatcggtctggtcatgaccaacaacgaggacgtgtccggcgccttcgtcacgctccgggtcttccgcgtcttcaggatcttcaagttttcccgccactcccagggcctgcggatcctgggctacacactgaagagctgtgcctccgaactgggctttcttctcttctccctcaccatggccatcatcatctttgccactgtgatgttttatgccgagaagggctcctcggccagcaagttcacaagcatccctgcctcgttttggtacaccattgtcaccatgaccacactgggatacggagacatggtgcctaagacgattgcagggaagatcttcggctccatctgctccttgagtggcgtcctggtcattgccctgccagtccctgtgattgtttccaactttagccggatttaccaccagaatcagagagctgataaacgcagggcacaaaagaaggcccgccttgccaggatccgtgtggccaaaacaggcagttcgaatgcatacctgcacagcaagcgcaacgggctcctcaacgaggcgctggagctgacgggcaccccagaagaggagcacatgggcaagaccacctcactcatcgagagccagcatcatcacctgctgcactgcctggaaaaaaccactgggttgtcctatcttgtggatgatcccctgttatctgtacgaacctccaccatcaagaaccacgagtttattgatgagcagatgtttgagcagaactgcatggagagttcaatgcagaactacccatccacaagaagtccctcactgtccagccacccaggcctcactaccacctgctgctcccgtcgtagtaagaagaccacacacctgcccaattctaacctgccagctactcgcctgcgcagcatgcaagagctcagcacgatccacatccagggcagtgagcagccctccctcacaaccagtcgctccagccttaatttgaaagcagacgacggactgagaccaaactgcaaaacatcccagatcaccacagccatcatcagcatccccactcccccagcgctaaccccagagggggaaagtcggccaccccctgccagcccaggccccaacacgaacattccttccatagccagcaatgttgtcaaggtctccgccttgtaaaaccactggacagagggccagagtgggtagtggggaatgaaggggactggcatgttggtgggtggtcactgagaccactccctcccccctttccccactatttctgcctgccccattgtacccctagcactgagacttgtgcctggaaggaaaaagaggtagcaaaggggcacctgaggttcacgctgctagcgtggacatagccctgtgatactgcatctcactggggccagaggaagggagggagggtgggggggtcggggatagg

SEQ ID NO: 10440 - DNA, 2659 bp, Homo sapiens
  source 1..2659: mol_type = unassigned DNA
ggagagaaatggctgaaagtggaaacccggagcggtttggggcgcttcgcaaagttctccagctcggcgagccggcggtgtgtctaccagaggctgggggccagtccatctggtcctgcccgacgccacttccaccccgcgagctctgggaaaggtctctacgtgacgccaagggccgtcgcggccccggggagagggatcgaaagactcactctgcgaggtgtttacactggaggtgggggacgggaagggactgggcaaagttacctggactcaactaaattcctgcgcttgcttagtgttgacatttgaataggatccgagatgttctgcttttatcccgggcagccctgatatgtcagcaacaggctgaggttccagacctgaaatcgcactgcaagaaaaaggggtttgctgaactaactccaagctggtgtgcctagcgtccgcgcggctgccggcccaagagctggagtcaccatggcggccggagttgcggcctggctgccttttgcccgggctgcggccatcgggtggatgccggtggccaactgccccatgcccctggccccggccgacaagaacaagcggcaggatgagctgattgtcctcaacgtgagtgggcggaggttccagacctggaggaccacgctggagcgctacccggacaccctgctgggcagcacggagaaggagttcttcttcaacgaggacaccaaggagtacttcttcgaccgggaccccgaggtgttccgctgcgtgctcaacttctaccgcacggggaagctgcactacccgcgctacgagtgcatctctgcctacgacgacgagctggccttctacggcatcctcccggagatcatcggggactgctgctacgaggagtacaaggaccgcaagagggagaacgccgagcggctcatggacgacaacgactcggagaacaaccaggagtccatgccctcgctcagcttccgccagaccatgtggcgggccttcgagaacccccacaccagcacgctggccctggtcttctactacgtgactggcttcttcatcgctgtctcggtcatcaccaacgtggtggagacggtgccgtgcggcacggtcccgggcagcaaggagctgccgtgcggggagcgctactcggtggccttcttctgcctggacacggcgtgcgtcatgatcttcaccgtggagtacctcctgcggctcttcgcggctcccagccgctaccgcttcatccgcagcgtcatgagcatcatcgacgtggtggccatcatgccctactacatcggtctggtcatgaccaacaacgaggacgtgtccggcgccttcgtcacgctccgggtcttccgcgtcttcaggatcttcaagttttcccgccactcccagggcctgcggatcctgggctacacactgaagagctgtgcctccgaactgggctttcttctcttctccctcaccatggccatcatcatctttgccactgtgatgttttatgccgagaagggctcctcggccagcaagttcacaagcatccctgcctcgttttggtacaccattgtcaccatgaccacactgggatacggagacatggtgcctaagacgattgcagggaagatcttcggctccatctgctccttgagtggcgtcctggtcattgccctgccagtccctgtgattgtttccaactttagccggatttaccaccagaatcagagagctgataaacgcagggcacaaaagaaggcccgccttgccaggatccgtgtggccaaaacaggcagttcgaatgcatacctgcacagcaagcgcaacgggctcctcaacgaggcgctggagctgacgggcaccccagaagaggagcacatgggcaagaccacctcactcatcgagagccagcatcatcacctgctgcactgcctggaaaaaaccactaaccacgagtttattgatgagcagatgtttgagcagaactgcatggagagttcaatgcagaactacccatccacaagaagtccctcactgtccagccacccaggcctcactaccacctgctgctcccgtcgtagtaagaagaccacacacctgcccaattctaacctgccagctactcgcctgcgcagcatgcaagagctcagcacgatccacatccagggcagtgagcagccctccctcacaaccagtcgctccagccttaatttgaaagcagacgacggactgagaccaaactgcaaaacatcccagatcaccacagccatcatcagcatccccactcccccagcgctaaccccagagggggaaagtcggccaccccctgccagcccaggccccaacacgaacattccttccatagccagcaatgttgtcaaggtctccgccttgtaaaaccactggacagagggccagagtgggtagtggggaatgaaggggactggcatgttggtgggtggtcactgagaccactccctcccccctttccccactatttctgcctgccccattgtacccctagcactgagacttgtgcctggaaggaaaaagaggtagcaaaggggcacctgaggttcacgctgctagcgtggacatagccctgtgatactgcatctcactggggccagaggaagggagggagggtgggggggtcggggatagg

SEQ ID NO: 10441 - DNA, 2289 bp, Homo sapiens
  source 1..2289: mol_type = unassigned DNA
ttgtgtttagaaaaggctcgggcaaagccagcccaagttcgctctctgcacacctcgagcacctcgcggacggcgtgggtccgccagctccgggacctgccgccgctgcctgcgcgccccggggcggaggacggtgccagccgcccacgaggagaccccgctcccgcaggaggccgagctgaagcggcggagcgcgccgccagccagccggggtgagtgccccgggcgaggccggcggccgccaaagcccccgcgggctcgcccgggcgcccggatgccagccccgagccccgccgccgggtgcatgcctcccccgcggcgcgcccccgcaggctgctgcccgctgtgaccgcccttccccgcaggcgggcgccggccaggctctccccgagatcagcgcacgggtggcacccgccggacccccagcggcagcggcggcggcggctgcagggggcgcggggcggaggctgcgagggcgcgcgcggggaggatggacgggtccggggagcgcagcctcccggagccgggcagccagagctccgctgccagcgacgacatagagatagtcgtcaacgtggggggcgtgcggcaggtgctgtacggggacctcctcagtcagtaccctgagacccggctggcggagctcatcaactgcttggctgggggctacgacaccatcttctccctgtgcgacgactacgaccccggcaagcgcgagttctactttgacagggacccggacgccttcaagtgtgtcatcgaggtgtactatttcggggaggtccacatgaagaagggcatctgccccatctgcttcaagaacgagatggacttctggaaggtggacctcaagttcctggacgactgttgcaagagccacctgagcgagaagcgcgaggagctggaggagatcgcgcgccgcgtgcagctcatcctggacgacctgggcgtggacgcagccgagggccgctggcgccgctgccagaagtgcgtctggaagttcctggagaagcccgagtcgtcgtgcccggcgcgggtggtggccgtgctctccttcctgctcatcctcgtctcgtccgtggtcatgtgcatgggcaccatccccgagctgcaggtgctggacgccgagggcaaccgcgtggagcacccgacgctggagaacgtggagacggcgtgcattggctggttcaccctggagtacctgctgcgcctcttctcgtcacccaacaagctgcacttcgcgctgtccttcatgaacattgtggacgtgctggccatcctccccttctacgtgagcctcacgctcacgcacctgggtgcccgcatgatggagctgaccaacgtgcagcaggccgtgcaggcgctgcggatcatgcgcatcgcgcgcatcttcaagctggcccgccactcctcgggcctgcagaccctcacctatgccctcaagcgcagcttcaaggaactggggctgctgctcatgtacctggcagtgggtatcttcgtcttctctgccctgggctacaccatggagcagagccatccagagaccctgtttaagagcatcccccagtccttctggtgggccatcatcaccatgaccaccgtcggctacggcgacatctaccccaagaccacgctgggcaagctcaacgcggccatcagcttcttgtgtggtgtcatcgccatcgccctgcccatccaccccatcatcaacaactttgtcaggtactacaacaagcagcgcgtcctggagaccgcggccaagcacgagctggagctgatggaactcaactccagcagcgggggcgagggcaagaccgggggctcccgcagtgacctggacaacctccctccagagcctgcggggaaggaggcgccgagctgcagcagccggctgaagctctcccacagcgacaccttcatccccctcctgaccgaggagaagcaccacaggacccggctccagagttgcaagtgacaggagggcccctcaggcagagatggaccaggcggtggacagatgggtagatgtggcaggcatgtcatcgacagcacagaagggctgtcctgtgtccccccaaccctcccctggacagactctgaaggccctcccggcacctctgccaaggctgggtaagactcctctatgttgcctgctgtccaggagcccgggagggaggggtgtgcaggagccgcagggccgtgtgggacgagtggaggccgcggcctggctggcacgagagcccacgcccgcttctgtatctccctcaataaagcctcctgctctgtgca

SEQ ID NO: 10442 - DNA, 5179 bp, Homo sapiens
  source 1..5179: mol_type = unassigned DNA
gctggaaactggctccctgagacaagaagactggtaaacccagcgcttcctacctggtggtcttcagcaatgcccatgccttccagagacgggggcctgcatcccagacaccaccactatggttcccacagcccttggagtcagctcctgtccagccccatggagacgccgtccatcaagggcctttactaccggagggtgcggaaggtgggtgccctggacgcctccccagtggacctgaagaaggagatcctgatcaacgtggggggcaggaggtatctcctcccctggagcacactggaccggttcccgctgagccgcctgagcaaactcaggctctgtcggagctacgaggagatcgtgcagctctgcgatgattacgacgaggacagccaggagttcttcttcgacaggagccccagcgccttcggggtgatcgtgagcttcctggcggccgggaagctggtgcttctgcaggagatgtgcgcgctgtccttccaggaggagctggcctactggggcatcgaggaggcccacctggagaggtgctgcctgcggaagctgctgaggaagctggaggagctggaggagctggccaagctgcacagggaggacgtactgaggcagcagagggagacccgccgccccgcctcgcactcctcgcgctggggcctgtgcatgaaccggctgcgcgagatggtggaaaacccgcagtccgggctgcccgggaaggtcttcgcttgcctctccatcctcttcgtggccaccacagccgtcagcctgtgtgtcagcaccatgcccgacctcagggcagaggaggaccagggcgaatgctctcggaagtgctactatattttcatcgtggagaccatctgcgtggcctggttctccctggagttctgcctgcggtttgtccaggcccaagacaagtgtcagttcttccaggggcccctgaacatcatcgacatcctggccatctccccatactacgtgtcgctggcggtgtctgaggagcccccggaggacggcgagaggccgagcgggagctcctacctggagaaggtggggctggtcctgcgtgtgctgcgagcgctgcgcatcctctacgtgatgcgcctggctcgccactcgctggggctgcagacgctggggctcaccgtgcgccgttgcacacgtgagttcggcctgctccttctcttcctggccgtggccatcaccctcttctcccctttggtctacgtggccgagaaggagtccgggcgggtgctggagttcaccagcatccccgcctcctattggtgggccatcatctccatgacaacggtgggctacggggacatggtgccccgcagtgtgccaggccagatggtggccctcagcagcatcctgagcgggatcctcatcatggccttcccggccacgtctatcttccacaccttctcccactcctacctggagctcaagaaggagcaggagcagcttcaggcccgcctccgccacctccaaaacaccggtccagccagtgaatgtgaactcctggacccccatgtggccagtgaacatgagctcatgaacgatgtcaatgacctaatcctggagggcccagccttgcctatcatgcacatgtaactcagcaccccccatgactacatggtaacctcaacccatcaccctgcctgaaacacactcaagggtaccccgcatagaccacctggtggtgtttctagagcccagggaagactttcaaagctggaggggcataaggccacagaggctgtgtgtctgtgatccttgtccctcggggccccgatgtcccaggctgactgtgtccagcctgcttgccttttcctctctctgcccatctactgagcatgtccaatcttgctggagtagctcagtctcctttcattctcttttccttcccagcagaggctttaacatcccaggctgggttctggatgcccatagaactggtaaccattggtatttgcatactgagcctatgtaatttcatgatttccctaagaccctccttcctgggccatgccaccactggaaatcaaaggtccagtcactgcaaacccctctaatcagatctccccacccaacctttccacgggttccagagggatcaatatgttctccttctgctcaccaccaccagtgatatttccctaatgctgctacctcccgccagctctgaacacttgtagctaagaaggcagaatcagcctttttgcagtaaatctcatgttgaggctgatgcccccaagcctgccatcctttacctggagctcaagaaggagcaggcatccccaggcatgcctgggatctgtgacctgggacctgggacctgggacctgggcagaaactccactttccagcacagccaggccctccctggccgcctggactcttggtgtggtgttctccagttatccagtccttagccttgacagagacaaactctttcagggtccatgttgtcccttgagaggatcgttcctgctgctggttgctcccacactgcaggggccttagcttttcatccacagctgagcccccatggactcaatgtagctttggcacagaaacaaggggaattgtaggtgctgtcccttgctggcttcccagactagtcatctccatgctggaggatagacattcttagctcacatttcaatgtattcatttctgcattcatctgtgaacagagtctgtcctttgcatccaggggaggaggcagatggaggtctgagtcactggagataaaccagcatattctgagagcaggcaggaaggagcaatgacttccaagcagtgggctcccaaaggcctcacagagacatgggcagggctggagagtagaggtgtattttaggagatgaagctgaacagctgggttgggttgagaaggcgtgggccttgaatgctttatggagggcagagtgatgtgcacaggctgtgggttagggagatgatgaggctggattgggcatgagaagcccagtttgggatgaggagccattgagccattcaggcaagacagccctccctccttcacgggcttaatcctgcaagattctgtcaaatcctggcttctcccagcaggacacaccttggagacatcctgatggcacttccccagagtggcatggcccacataggagtttgctgttggctctaggactcttgaagaaagtgcacaagatcaaaacaggtgacagtgaagtggtttcggccctgccaatctgatatcgtgtacgtatgagagtggtcagcattttaccactggtaacaagttccttgctgttcattcattctgctagttttttgcgatttcccgctgtgtgccaggcatagtcctccactgatggcaatgccagacagcagcgtggcagagggctctggcccaggaagcaccctgcaccagcacctagcgtccagggagccttggcctcctggcgagcctgcctttccttggagtcctccaggtgtccccccaactatacaggcacatgtccccattcttttagaccccaatctttcccaagctgacatgtcaccaggtgacatagtggttcagtggccatgacacaaggaaagccccttcaccctataaaatccccagcctggatggccactccactccacaaagtgacaggcagattcccataagcgttgcgtagaaattccatgtcacaggcaccttggacagtagccatagaagtgtttctgttccagagtaacattttatttattacttatttatttatttatttattgacagagtctctctctgtccgccaggctggagtgcagtggcttgatcccagctcactgcaacctccgcctcctgggttcaagcaattctcctgcctcagcctcccaaatagcggggattacaggcacccaccacctgtaatcccagctatttggagatcaaatgctcagctaatttgatatttttagtagagacaaggtttcaccatgtggacaggctggtcttgaactcctgatgtcaggtgatccgcctgcctcggcctcccaaagtgctggaattacaggcacgagccaccgcacccggcccagactaacattttttttttttttttttttgagacagagtctccctctgtcacccaggctggagtgcagtggctcaatctcggctcactgcaagctccgcctcccaggttcacgccattctcctgcctcagcctcctgagtagctgtgactacaggtgccaccaccacgcctggataattttttgtatttttaggagagacggggtttcaccatgttagccaggatggtctccatctcctgacctcgtgatccgcccgcctcggcctcccaaagtgctgggattacaggcgtgagccaccgtgcccaagcctgactaacattttaataactacgcttaggcaaaatagtaaaaggacaaagtctcccacttactctctttctggggactgactggcttgggcgctggctgaaacccagtgtcttcactccctgtgtgacctcgggcaggccccttccccctcagttagctgcaggcaggtgttggactagatctgtggttttctgacctgggttccacaaagcaagctcagggactgtcctgcggatgaagaagaccagcagcaaagcaggcagagctctgcctcctggggcaaaacatttgcaattaatgacactgaaaagaatgtgcaaatccccagtctcctctccttcccgtcagtgtccagcccagccctttgaactgagtggtaagctcattctggaaccagagacaaagcctaaacagccactggaaggtctgggacccacatcagcccccacatctgccctgccttctcatcgaagacatattttgtgcgcatgcctggtgaaaacttcttaatgacagctctgcccatccctgtaactggcttctacccaggcatatcccttctcctctgcttcacctaccagacctcttcaccaaagtgtgccagcactaaaagaaacatttaaaatcaaaattaggtgaagcaccaccaccattatgagattctatagtgtcttaatgttcacccagttgagattctctgctaaattagacatggaaaattggaattgattgctcgcatgtggggcttaattaaacgctctattttttctccctggtaa

SEQ ID NO: 10443 - DNA, 2199 bp, Homo sapiens
  source 1..2199: mol_type = unassigned DNA
gtcccttccctgggcaccaagagatgggctccccttgcctggcagagaaacagctggaaactggctccctgagacaagaagactggtaaacccagcgcttcctacctggtggtcttcagcaatgcccatgccttccagagacgggggcctgcatcccagacaccaccactatggttcccacagcccttggagtcagctcctgtccagccccatggagacgccgtccatcaagggcctttactaccggagggtgcggaaggtgggtgccctggacgcctccccagtggacctgaagaaggagatcctgatcaacgtggggggcaggaggtatctcctcccctggagcacactggaccggttcccgctgagccgcctgagcaaactcaggctctgtcggagctacgaggagatcgtgcagctctgcgatgattacgacgaggacagccaggagttcttcttcgacaggagccccagcgccttcggggtgatcgtgagcttcctggcggccgggaagctggtgcttctgcaggagatgtgcgcgctgtccttccaggaggagctggcctactggggcatcgaggaggcccacctggagaggtgctgcctgcggaagctgctgaggaagctggaggagctggaggagctggccaagctgcacagggaggacgtactgaggcagcagagggagacccgccgccccgcctcgcactcctcgcgctggggcctgtgcatgaaccggctgcgcgagatggtggaaaacccgcagtccgggctgcccgggaaggtcttcgcttgcctctccatcctcttcgtggccaccacagccgtcagcctgtgtgtcagcaccatgcccgacctcagggcagaggaggaccaggtgagcggcctctgatggcattcacggctccatcccgcagggtgcctgggcggagatgtcttttaggggcccaagaaaatgtcttcagatcttaaaataagaagaaaaaaatgaatattatccaacatgggttatattcattattaggccatcagtcataaaagataattttccatcttttttttttttattggagtcctgcaaaggcaaaagtgcctaaggctcaccgtgaaaatcattacgtggccctcagccatgcgtggactcagtgggccacacagacacagtgtcacctctcccagctctcccgagtctgtgactacaggcaaatcacgccacctcctctctgagcctgtctcccactccgtgaaatgggtaacatcacctcgaaggtttactcacccagtgaactcaacatgtgtttactgaacaccactctgtgctaagccctagagcaggtcaaaaacataaaatccctgccttcttgagctaacattctcctgggcatccccactccattttcagatgaggaaactgaggcatgggccatttattttcctcggagctccacagtaaggatgccaatgatgcaaaggtccccggcctcagtttccctgcagtgctcagtgtctgggccagtctcactggatgggaaactcacagatgagctgatctgtaagtcactctgccccaggaggccagagtaaaaagtgctgcttgcccacaccttcgtcccctttgcagggagttacaggagaccccgagacaccctccctccactcgggagccagatggtctgagaagtgaaataagaacctagcatttggttgagagggttattggaaagcttcaaacagagaattagattgtttcctgatttaaaaaatcactcctctccagcaccgagctcccccagggctgcccatcatcttaatgtttggagcttgccttgtaatcaacagagagagaaactaaacacatacgtaagatggtgcttgctctatttggctcctaacagttgccagcccacctaagttctcttcgcttaaagatatgtcccagggcaagacaacaggatcagagaacttgccagatagaaaagacttaaatggagaaccagcccatgcctcacagacagtaggatcccagtaaatatgggttgaataaaatgtgtcttgtccaacctacaaaagtttggccctaaaaaaacccacaaaatatttggacctttaaacagcttgttttcccatggagaagatgacaatgccaatcataggcattttttcattctacagcataaaaacatgagatttaagagcctg

SEQ ID NO: 10444 - DNA, 3445 bp, Homo sapiens
  source 1..3445: mol_type = unassigned DNA
agggagggaggcgcgaagagggcgcgagggtagcagccagagggagccgccagccctgcctgcggatccccgccgggcgcatggggcgcttcgagccgggactgcgtgcgggccccgaggccagtttcctgctgtcgtaagaagccgcgccaggacgcccgccggaccccgagctgctgggaggatgaccatggctgggggcaggaggggactagtggcccctcaaaacacgtttctggagaatattgttcggcggtccaatgatactaattttgtgttggggaatgctcagatagtggactggcctattgtgtacagcaatgatggattttgcaagctgtctggctatcacagggcagaagtgatgcaaaaaagcagcacctgcagttttatgtatggggagctgactgataaagacacgattgaaaaagtgcggcaaacatttgagaactatgagatgaattcctttgaaattctgatgtacaagaagaacaggacacctgtgtggttctttgtgaaaattgctccaattcgaaacgaacaggataaagtggttttatttctttgcactttcagtgacataacagctttcaaacagccaattgaggatgattcatgtaaaggctgggggaagtttgctcggctgacaagagcactgacaagcagcaggggtgtcctgcagcagctggctccaagcgtgcaaaaaggcgagaatgtccacaagcactcccgcctggcagaggtcctacagctgggctcagacatccttccccagtacaagcaagaggcaccaaagactccccctcacatcatcttacattattgtgtttttaagaccacgtgggattggatcatcttgatcttgaccttctatacagccatcttggtcccttataatgtctccttcaaaaccaggcagaataatgtggcctggctggttgttgatagcatcgtggatgttatctttttggtggacattgtgctcaattttcataccacctttgttggaccagcaggggaggtgatttctgaccccaaacttatccgcatgaactacctgaagacgtggtttgtgattgaccttctgtcctgtttgccatatgatgtcatcaacgcttttgagaacgtggatgagggcatcagcagcctgttcagctctctaaaagttgtccggctgctccgtcttgggcgagtggcccgtaagctggaccactacattgaatatggagctgctgtgctggtcctgctggtgtgtgtgtttgggctggctgcacactggatggcctgcatctggtacagcattggggactatgagatctttgacgaggacaccaagacaatccgcaacaacagctggctgtaccaactagcgatggacattggcaccccttaccagtttaatgggtctggctcagggaagtgggaaggtggtcccagcaagaattctgtctacatctcctcgttgtatttcacaatgaccagcctcaccagtgtgggctttgggaacatcgccccatccacagacattgagaagatctttgcagtggccatcatgatgattggctcacttctctatgccaccatcttcgggaatgtgacgactattttccaacagatgtatgccaacaccaacagataccatgagatgctcaacagtgttcgggacttcctgaagctctaccaggtgccaaaaggattgagtgagcgagtaatggattatattgtgtccacttggtccatgtccagaggcattgacacagagaaggtcctgcagatctgccccaaggacatgagagccgacatctgcgtgcacctgaaccgcaaggtgttcaaggagcacccggccttccggctggccagtgatggctgcctccgggcactggccatggagttccagacggtgcactgtgccccaggggacctcatctaccatgcaggagagagcgttgacagcctctgctttgtggtttctggctccctggaggtgatccaagatgatgaggtggtggccattctaggaaaaggagacgtgtttggagatgtgttctggaaggaagccacccttgcccagtcctgtgccaatgttagggccttgacctactgtgatctgcatgtgatcaagcgggatgccctgcagaaagtgctggaattctacacggccttctcccattccttctcccggaacctgattctgacgtacaacttgaggaagaggattgtgttccggaagatcagcgatgtgaaacgtgaagaggaagaacgcatgaaacgaaagaatgaggcccccctgatcttgcccccggaccaccctgtccggcgcctcttccagagattccgacagcagaaagaggccaggctggcagctgagagagggggccgggacctggatgacctagatgtggagaagggcaatgtccttacagagcatgcctccgccaaccacagcctcgtgaaggccagcgtggtcaccgtgcgtgagagtcctgccacgcccgtatccttccaggcagcctccacctccggggtgccagaccacgcaaagctacaggcgccagggtccgagtgcctgggccccaaggggggcgggggcgattgtgccaagcgcaaaagctgggcccgcttcaaagatgcttgcgggaagagtgaggactggaacaaggtgtccaaggctgagtcgatggagacacttcccgagaggacaaaagcgtcaggcgaggccacactgaagaagacagactcgtgtgacagtggcatcaccaagagcgacttgcgcctggacaacgtgggtgaggccaggagtccccaggatcggagtcccatcctggcagaggtcaagcattcgttctaccccatccctgagcagacgctgcaggccacagtcctggagggtctcactctgttgcccaggctggtctcaaactcctgacctcaagtgatccatctgcctcagcctcccaaaagtgctgggattacaggtgtgagccaccacacacaacctaaagcattctgtctgatctcttcaatgttgcaaaacatctctgtgaatatgattcttgtaattagtcaaaaggacgagtaatatagagctaagtaatgaatgccatgttttgggtgccaaatggagttcaatgattttaaaaagagggttttttgttttaaaataaaaccatttccctgagaaagcctcagagaggctttctcaaaatgtgctgaggccagtagtatcatactttggcttctcatgttgtccacactgaagggaaccctattgtatggatatattctgatacatctgctaaaaaccaaactcattatattacggttaatttactatgtttagtcaatggttatattattattctaaataagcaagtgagcagtctcactttctgtcaggagaagccaccccctcccctacctaaactgctattctcccagtatatag

SEQ ID NO: 10445 - DNA, 3479 bp, Homo sapiens
  source 1..3479: mol_type = unassigned DNA
agagggagccgccagccctgcctgcggatccccgccgggcgcatggggcgcttcgagccgggactgcgtgcgggccccgaggccagtttcctgctgtcgtaagaagccgcgccaggacgcccgccggaccccgagctgctgggaggatgaccatggctgggggcaggaggggactagtggcccctcaaaacacgtttctggagaatattgttcggcggtccaatgatactaattttgtgttggggaatgctcagatagtggactggcctattgtgtacagcaatgatggattttgcaagctgtctggctatcacagggcagaagtgatgcaaaaaagcagcacctgcagttttatgtatggggagctgactgataaagacacgattgaaaaagtgcggcaaacatttgagaactatgagatgaattcctttgaaattctgatgtacaagaagaacaggacacctgtgtggttctttgtgaaaattgctccaattcgaaacgaacaggataaagtggttttatttctttgcactttcagtgacataacagctttcaaacagccaattgaggatgattcatgtaaaggctgggggaagtttgctcggctgacaagagcactgacaagcagcaggggtgtcctgcagcagctggctccaagcgtgcaaaaaggcgagaatgtccacaagcactcccgcctggcagaggtcctacagctgggctcagacatccttccccagtacaagcaagaggcaccaaagactccccctcacatcatcttacattattgtgtttttaagaccacgtgggattggatcatcttgatcttgaccttctatacagccatcttggtcccttataatgtctccttcaaaaccaggcagaataatgtggcctggctggttgttgatagcatcgtggatgttatctttttggtggacattgtgctcaattttcataccacctttgttggaccagcaggggaggtgatttctgaccccaaacttatccgcatgaactacctgaagacgtggtttgtgattgaccttctgtcctgtttgccatatgatgtcatcaacgcttttgagaacgtggatgaggttagtgcctttatgggtgatccagggaagattggttttgctgatcagattccaccaccactggaggggagagagagtcagggcatcagcagcctgttcagctctctaaaagttgtccggctgctccgtcttgggcgagtggcccgtaagctggaccactacattgaatatggagctgctgtgctggtcctgctggtgtgtgtgtttgggctggctgcacactggatggcctgcatctggtacagcattggggactatgagatctttgacgaggacaccaagacaatccgcaacaacagctggctgtaccaactagcgatggacattggcaccccttaccagtttaatgggtctggctcagggaagtgggaaggtggtcccagcaagaattctgtctacatctcctcgttgtatttcacaatgaccagcctcaccagtgtgggctttgggaacatcgccccatccacagacattgagaagatctttgcagtggccatcatgatgattggctcacttctctatgccaccatcttcgggaatgtgacgactattttccaacagatgtatgccaacaccaacagataccatgagatgctcaacagtgttcgggacttcctgaagctctaccaggtgccaaaaggattgagtgagcgagtaatggattatattgtgtccacttggtccatgtccagaggcattgacacagagaaggtcctgcagatctgccccaaggacatgagagccgacatctgcgtgcacctgaaccgcaaggtgttcaaggagcacccggccttccggctggccagtgatggctgcctccgggcactggccatggagttccagacggtgcactgtgccccaggggacctcatctaccatgcaggagagagcgttgacagcctctgctttgtggtttctggctccctggaggtgatccaagatgatgaggtggtggccattctaggaaaaggagacgtgtttggagatgtgttctggaaggaagccacccttgcccagtcctgtgccaatgttagggccttgacctactgtgatctgcatgtgatcaagcgggatgccctgcagaaagtgctggaattctacacggccttctcccattccttctcccggaacctgattctgacgtacaacttgaggaagaggattgtgttccggaagatcagcgatgtgaaacgtgaagaggaagaacgcatgaaacgaaagaatgaggcccccctgatcttgcccccggaccaccctgtccggcgcctcttccagagattccgacagcagaaagaggccaggctggcagctgagagagggggccgggacctggatgacctagatgtggagaagggcaatgtccttacagagcatgcctccgccaaccacagcctcgtgaaggccagcgtggtcaccgtgcgtgagagtcctgccacgcccgtatccttccaggcagcctccacctccggggtgccagaccacgcaaagctacaggcgccagggtccgagtgcctgggccccaaggggggcgggggcgattgtgccaagcgcaaaagctgggcccgcttcaaagatgcttgcgggaagagtgaggactggaacaaggtgtccaaggctgagtcgatggagacacttcccgagaggacaaaagcgtcaggcgaggccacactgaagaagacagactcgtgtgacagtggcatcaccaagagcgacttgcgcctggacaacgtgggtgaggccaggagtccccaggatcggagtcccatcctggcagaggtcaagcattcgttctaccccatccctgagcagacgctgcaggccacagtcctggagggtctcactctgttgcccaggctggtctcaaactcctgacctcaagtgatccatctgcctcagcctcccaaaagtgctgggattacaggtgtgagccaccacacacaacctaaagcattctgtctgatctcttcaatgttgcaaaacatctctgtgaatatgattcttgtaattagtcaaaaggacgagtaatatagagctaagtaatgaatgccatgttttgggtgccaaatggagttcaatgattttaaaaagagggttttttgttttaaaataaaaccatttccctgagaaagcctcagagaggctttctcaaaatgtgctgaggccagtagtatcatactttggcttctcatgttgtccacactgaagggaaccctattgtatggatatattctgatacatctgctaaaaaccaaactcattatattacggttaatttactatgtttagtcaatggttatattattattctaaataagcaagtgagcagtctcactttctgtcaggagaagccaccccctcccctacctaaactgctattctccc

SEQ ID NO: 10446 - DNA, 3831 bp, Homo sapiens
  source 1..3831: mol_type = unassigned DNA
actgcgaggcgggccgcagggagggaggcgcgaagagggcgcgagggtagcagccagagggagccgccagccctgcctgcggatccccgccgggcgcatggggcgcttcgagccgggactgcgtgcgggccccgaggccagtttcctgctgtcgtaagaagccgcgccaggacgcccgccggaccccgagctgctgggaggatgaccatggctgggggcaggaggggactagtggcccctcaaaacacgtttctggagaatattgttcggcggtccaatgatactaattttgtgttggggaatgctcagatagtggactggcctattgtgtacagcaatgatggattttgcaagctgtctggctatcacagggcagaagtgatgcaaaaaagcagcacctgcagttttatgtatggggagctgactgataaagacacgattgaaaaagtgcggcaaacatttgagaactatgagatgaattcctttgaaattctgatgtacaagaagaacaggacacctgtgtggttctttgtgaaaattgctccaattcgaaacgaacaggataaagtggttttatttctttgcactttcagtgacataacagctttcaaacagccaattgaggatgattcatgtaaaggctgggggaagtttgctcggctgacaagagcactgacaagcagcaggggtgtcctgcagcagctggctccaagcgtgcaaaaaggcgagaatgtccacaagcactcccgcctggcagaggtcctacagctgggctcagacatccttccccagtacaagcaagaggcaccaaagactccccctcacatcatcttacattattgtgtttttaagaccacgtgggattggatcatcttgatcttgaccttctatacagccatcttggtcccttataatgtctccttcaaaaccaggcagaataatgtggcctggctggttgttgatagcatcgtggatgttatctttttggtggacattgtgctcaattttcataccacctttgttggaccagcaggggaggtgatttctgaccccaaacttatccgcatgaactacctgaagacgtggtttgtgattgaccttctgtcctgtttgccatatgatgtcatcaacgcttttgagaacgtggatgagggcatcagcagcctgttcagctctctaaaagttgtccggctgctccgtcttgggcgagtggcccgtaagctggaccactacattgaatatggagctgctgtgctggtcctgctggtgtgtgtgtttgggctggctgcacactggatggcctgcatctggtacagcattggggactatgagatctttgacgaggacaccaagacaatccgcaacaacagctggctgtaccaactagcgatggacattggcaccccttaccagtttaatgggtctggctcagggaagtgggaaggtggtcccagcaagaattctgtctacatctcctcgttgtatttcacaatgaccagcctcaccagtgtgggctttgggaacatcgccccatccacagacattgagaagatctttgcagtggccatcatgatgattggctcacttctctatgccaccatcttcgggaatgtgacgactattttccaacagatgtatgccaacaccaacagataccatgagatgctcaacagtgttcgggacttcctgaagctctaccaggtgccaaaaggattgagtgagcgagtaatggattatattgtgtccacttggtccatgtccagaggcattgacacagagaaggtcctgcagatctgccccaaggacatgagagccgacatctgcgtgcacctgaaccgcaaggtgttcaaggagcacccggccttccggctggccagtgatggctgcctccgggcactggccatggagttccagacggtgcactgtgccccaggggacctcatctaccatgcaggagagagcgttgacagcctctgctttgtggtttctggctccctggaggtgatccaagatgatgaggtggtggccattctaggaaaaggagacgtgtttggagatgtgttctggaaggaagccacccttgcccagtcctgtgccaatgttagggccttgacctactgtgatctgcatgtgatcaagcgggatgccctgcagaaagtgctggaattctacacggccttctcccattccttctcccggaacctgattctgacgtacaacttgaggaagaggattgtgttccggaagatcagcgatgtgaaacgtgaagaggaagaacgcatgaaacgaaagaatgaggcccccctgatcttgcccccggaccaccctgtccggcgcctcttccagagattccgacagcagaaagaggccaggctggcagctgagagagggggccgggacctggatgacctagatgtggagaagggcaatgtccttacagagcatgcctccgccaaccacagcctcgtgaaggccagcgtggtcaccgtgcgtgagagtcctgccacgcccgtatccttccaggcagcctccacctccggggtgccagaccacgcaaagctacaggcgccagggtccgagtgcctgggccccaaggggggcgggggcgattgtgccaagcgcaaaagctgggcccgcttcaaagatgcttgcgggaagagtgaggactggaacaaggtgtccaaggctgagtcgatggagacacttcccgagaggacaaaagcgtcaggcgaggccacactgaagaagacagactcgtgtgacagtggcatcaccaagagcgacttgcgcctggacaacgtgggtgaggccaggagtccccaggatcggagtcccatcctggcagaggtcaagcattcgttctaccccatccctgagcagacgctgcaggccacagtcctggaggtgaggcacgagctgaaggaggacatcaaggccttaaacgccaaaatgaccaatattgagaaacagctctctgagatactcaggatattaacttccagaagatcctctcagtctcctcaggagttgtttgaaatatcgaggccacagtccccagaatcagagagagacatttttggagccagctgagaggtctatttaaaaaaaaagtcagagacagatacctccaaccctgccgtcaccaccacccctaccacatatgtccacatgaccaacaattttcaagtaggcttttcctaacagaaaaagtggggccagtggcttagacgtgctctttctctatctggaaaaagatatgggaagggtagcgtgcccctaccctgcaaggtggcagctgcatctgaaccgtctttgcacaattttggaagaagggacatgctgtctaaaggggtctcactctgttgcccaggctggtctcaaactcctgacctcaagtgatccatctgcctcagcctcccaaaagtgctgggattacaggtgtgagccaccacacacaacctaaagcattctgtctgatctcttcaatgttgcaaaacatctctgtgaatatgattcttgtaattagtcaaaaggacgagtaatatagagctaagtaatgaatgccatgttttgggtgccaaatggagttcaatgattttaaaaagagggttttttgttttaaaataaaaccatttccctgagaaagcctcagagaggctttctcaaaatgtgctgaggccagtagtatcatactttggcttctcatgttgtccacactgaagggaaccctattgtatggatatattctgatacatctgctaaaaaccaaactcattatattacggttaatttactatgtttagtcaatggttatattattattctaaataa

SEQ ID NO: 10447 - DNA, 8172 bp, Homo sapiens
  source 1..8172: mol_type = unassigned DNA
ggcggctgccgctagccgaggccggcgcgagtgcactgcgaggcgggccgcagggagggaggcgcgaagagggcgcgagggtagcagccagagggagccgccagccctgcctgcggatccccgccgggcgcatggggcgcttcgagccgggactgcgtgcgggccccgaggccagtttcctgctgtcgtaagaagccgcgccaggacgcccgccggaccccgagctgctgggaggatgaccatggctgggggcaggaggggactagtggcccctcaaaacacgtttctggagaatattgttcggcggtccaatgatactaattttgtgttggggaatgctcagatagtggactggcctattgtgtacagcaatgatggattttgcaagctgtctggctatcacagggcagaagtgatgcaaaaaagcagcacctgcagttttatgtatggggagctgactgataaagacacgattgaaaaagtgcggcaaacatttgagaactatgagatgaattcctttgaaattctgatgtacaagaagaacaggacacctgtgtggttctttgtgaaaattgctccaattcgaaacgaacaggataaagtggttttatttctttgcactttcagtgacataacagctttcaaacagccaattgaggatgattcatgtaaaggctgggggaagtttgctcggctgacaagagcactgacaagcagcaggggtgtcctgcagcagctggctccaagcgtgcaaaaaggcgagaatgtccacaagcactcccgcctggcagaggtcctacagctgggctcagacatccttccccagtacaagcaagaggcaccaaagactccccctcacatcatcttacattattgtgtttttaagaccacgtgggattggatcatcttgatcttgaccttctatacagccatcttggtcccttataatgtctccttcaaaaccaggcagaataatgtggcctggctggttgttgatagcatcgtggatgttatctttttggtggacattgtgctcaattttcataccacctttgttggaccagcaggggaggtgatttctgaccccaaacttatccgcatgaactacctgaagacgtggtttgtgattgaccttctgtcctgtttgccatatgatgtcatcaacgcttttgagaacgtggatgaggttagtgcctttatgggtgatccagggaagattggttttgctgatcagattccaccaccactggaggggagagagagtcagggcatcagcagcctgttcagctctctaaaagttgtccggctgctccgtcttgggcgagtggcccgtaagctggaccactacattgaatatggagctgctgtgctggtcctgctggtgtgtgtgtttgggctggctgcacactggatggcctgcatctggtacagcattggggactatgagatctttgacgaggacaccaagacaatccgcaacaacagctggctgtaccaactagcgatggacattggcaccccttaccagtttaatgggtctggctcagggaagtgggaaggtggtcccagcaagaattctgtctacatctcctcgttgtatttcacaatgaccagcctcaccagtgtgggctttgggaacatcgccccatccacagacattgagaagatctttgcagtggccatcatgatgattggctcacttctctatgccaccatcttcgggaatgtgacgactattttccaacagatgtatgccaacaccaacagataccatgagatgctcaacagtgttcgggacttcctgaagctctaccaggtgccaaaaggattgagtgagcgagtaatggattatattgtgtccacttggtccatgtccagaggcattgacacagagaaggtcctgcagatctgccccaaggacatgagagccgacatctgcgtgcacctgaaccgcaaggtgttcaaggagcacccggccttccggctggccagtgatggctgcctccgggcactggccatggagttccagacggtgcactgtgccccaggggacctcatctaccatgcaggagagagcgttgacagcctctgctttgtggtttctggctccctggaggtgatccaagatgatgaggtggtggccattctaggaaaaggagacgtgtttggagatgtgttctggaaggaagccacccttgcccagtcctgtgccaatgttagggccttgacctactgtgatctgcatgtgatcaagcgggatgccctgcagaaagtgctggaattctacacggccttctcccattccttctcccggaacctgattctgacgtacaacttgaggaagaggattgtgttccggaagatcagcgatgtgaaacgtgaagaggaagaacgcatgaaacgaaagaatgaggcccccctgatcttgcccccggaccaccctgtccggcgcctcttccagagattccgacagcagaaagaggccaggctggcagctgagagagggggccgggacctggatgacctagatgtggagaagggcaatgtccttacagagcatgcctccgccaaccacagcctcgtgaaggccagcgtggtcaccgtgcgtgagagtcctgccacgcccgtatccttccaggcagcctccacctccggggtgccagaccacgcaaagctacaggcgccagggtccgagtgcctgggccccaaggggggcgggggcgattgtgccaagcgcaaaagctgggcccgcttcaaagatgcttgcgggaagagtgaggactggaacaaggtgtccaaggctgagtcgatggagacacttcccgagaggacaaaagcgtcaggcgaggccacactgaagaagacagactcgtgtgacagtggcatcaccaagagcgacttgcgcctggacaacgtgggtgaggccaggagtccccaggatcggagtcccatcctggcagaggtcaagcattcgttctaccccatccctgagcagacgctgcaggccacagtcctggaggtgaggcacgagctgaaggaggacatcaaggccttaaacgccaaaatgaccaatattgagaaacagctctctgagatactcaggatattaacttccagaagatcctctcagtctcctcaggagttgtttgaaatatcgaggccacagtccccagaatcagagagagacatttttggagccagctgagaggtctatttaaaaaaaaagtcagagacagatacctccaaccctgccgtcaccaccacccctaccacatatgtccacatgaccaacaattttcaagtaggcttttcctaacagaaaaagtggggccagtggcttagacgtgctctttctctatctggaaaaagatatgggaagggtagcgtgcccctaccctgcaaggtggcagctgcatctgaaccgtctttgcacaattttggaagaagggacatgctgtctaaagggtattttccttcatttttaattttttactaccatgatatttgtaaaagattaaaactaccagaacagagcagcagccatctggggactggtgggaaagtgccgagaacctctcatgtatatactatgctgggctcctttgccaagaccccccatggactgcagtgggccaaggacttcccggcatccccgtccttgtacagcccgtgtctgacgtcaccatgttttcctgtagttgtcatttataactagctcgggacaagcagagcttgagggacaggagggtagagctcagaaactttctgtctcatggttaaggccagaaaagcagctgcaggtgtggtgcatgcctcccatagacacttgaagctgggaatcctcaggtctccttccccaaaggaggtgaggcaagggtaagagctggagaggggcccttaagatccaggggttctctgcggtgcaacccatagcctgctcctctgggacagttgacagggagggctctggagtgcctggctgagcctctggccctgctccatgctgctggcctcacacacaggctcccttgcttctgttccttcttggcctcttcccaagtgtccccatggcattcctcagggtatggagcatcggcaggaagggtcatgagcccagagttgctttattaacaaagcagacacacagacacacacaacctcagaactgtagcaagtgctatgtttatactttgattctcattgggattgccctgcagacctttgtattttgttcaccgcacggggtcattataggcacttgggagccatgctgggccttattttaaagccagtctctctatttcctattaaagtcagtaggatttcaagagaaaatggaaaaagactgcaggatcatgattgtactctcttcaggagctggaaagagaatgaagcagtgagtttccagctctctgtaaggtgatggagagaagtggccttggagctgtggctcccagtgatggtcacagaactgcgtatgggccatccaagcccctatgccacgatgctcggggacacttcactgcctcatggtcacctaagtcaggttattcatgtgcttgggcttctctcaatggcatctgagaaaggaaaggagtgaagtctcttccaggcacagtggagctggccggggcatatgccctagagagaggtgtcaggaccccaaatactgacacgcaaggttagaagttcagctctgaaaagtcaacttggagggaatggaattaggagtacaggtgacagcatggacttatccagggagcttacctttgcctgtgttagacggtgaccccattcctggtacctctgccctaccaaagatattcagtgtttctgagagcctccggtctgagactgcccaccaccccaccccaccccacctccttagtcctgcccagtgctcacggcgagtcccagggctgggccctcggttgtctgtgcaaggcagggctgacctctcctggttcgcagggttggcacagatggccctgggaagacaaggcctgcgagctcaagggagagtcctgctccatgagccctaacctcatatgtagcttctcacatcaggcttacaggggctgcccctggcttctccaggttgcgacataattagatttagcctcagatggcggcatacaagtaagaggaagtctaatttcctaaggccgagtcacaactatctgtgactttgaataaagctgtgaggccttcagcctctttcacttgagaagctgccaaccagtccttgggtaagaggccgtaaaatatctggaatcccatctgttggctgccccctaacattctagtctgccatttcttaaacatgctcctcaacctgcttctgaagtttaggacccaccacttttaaggcagggcaggcctctaatcacccccaaaacccagcctcagaagaacctgccactggagacacttttttgcctctcagctctccagggacttgatgacaggcttcttgtctggcacccaacggtcaatgtcaagaggccctgccatttccctccagctctgcctgagggagacggatgtccgtgaaatttctcagacctctgggtatgaggggcaaagatggtataaggctttgaagtccagacatgttcttggggggaatgtagctttaggaatgcactcgtgaatcagcgcaaactgggctcatgactggaagccagctcctgcggcaggaatctgttcatcttgggtcacaggtgcacgtgtgggtgcatgggctttattctcctgtaatcctccctaggatttgagggattttttgctgtaattgttttctttgaaaaaacattgtgtaaatgagccaaacctttctcccttccttttcgcaccatgaacttgaccgcaggctgctttgtgctgactgccttcccatgccaggatgccactctgggttcccgagccaggaccatgtgcctcagataccagtgacctgagccttccagtataaaccattatctggtggctggagagagattagggaaacaaaaagttactaggtatgggacagaacatttagacttcagaaaaagtatgccaagagagaacagatttgcccaggatgtatgtttttcctctttgaggagtcggggcatgatatgtggcaccattatctagtaagtgctggttatttgatttctactaaattctttactttgaatgtcattcatattgaagctccatttcccagagaatatcctgacaggctgctttgaagagggtaggtcctgtccctgtcacttggctgctggttgaacgtgctcctcccggctgatggaggggtgggtttaaggttaactctaagaactaagatggtcaatgaggtggtgtttgttcttggtgggggggcattgactccagcaatgggcgctgccatcccatatacttacaaagggctcctccactggacatgacaagatagccaaaggacggaaacagagacgaccatttggttgagaaaccaaattgtctagtgtacaattaatgcaactcattgcattcatgaatgcaactcattgcattaatgcaatgctacattatgctaataaggttacaacattaatgctacaggatagcccaagtatttaaaaagctgagcccatttagcagccttccagcaaacttttggaaatgcatttcttacttgatttcttcttgttatccaatccctggggactgttttacccacaacctcttcgatccagtgtgctgctgttggccaaacatcagcccctttcctggaatcctcctctttcaaaagtggggagggctgggcaggggtaaaaatgtactataccaccccatcccattcagcaagcttcctctccaaatccttaaatggaaggtagaagtattatgccaactgtcaagctctttgtccaggcccttgtggggactaaatgaactctttaggaatactaggtataggaagactaggtataggaagattctcatttccccttgttgcactgaccactatgtctcccatgcatactctgggaaattttaggagccctggtggagatacacgttgctgatgtgcatttgattaataggttttactatgtcttgcaataaagacgtttagccttaagacccttgaatggaactccagctgtgatagagctgccaatgccccttcctctctcctcccttatcacctagtgttgcttaaagaggaggccattgagggcacacttgatgccccagacagcctccctctgttgctaaatcattgttattgctctatatactgccttctcactcgcttcaattaaaaattaccttcaccagctcctgtgccctccacctgggggagacttcatgatcctctcagcactgactgcaaacatcagagaaaaaaacattttctcaccaaaggtgttcatgttgagaagttttaatttctaccccctacagctcaaaagaatcaatgtgaatttatctgcagcttaaattcaagtgaaacttcattctcatgcaagcatatcagacttattctggaacctctagaactggacttgaattccctgcaggtgccagactggtgggtgccctccctgcctgccattaaacttttcttacagccactgtccctttatctgtgacttctgagtcatccgacggatccattagttgttcaatgagaagttcacagatcttgtatcaggatataaactgatcttatgttgaaggatgcaccctcccctaatgaatgtattctcttaatattccgatgctgtatttgtgcatcagttggagactgtccacatccgacatttcaccgacacctcaaggacacttctacttatgagcagttcatcattctggggcttctccttatattaatactctttccattgagtcctgccaaatcctttattgggttttctttttcctttgcatctgtcactttgtccaaatgagcatgaataaacaaaagtgtaaatgagctgatactatttttgtggtcagctgaggatgctgccaagaacaccactgtatatctgtggcttgggaatgttaagaggaacgtgcaggcccttccattgatgatattcccttctcaacatttttaaacaagcacaaatgatatttgtaaaaaaaaaaagttttatttattatggtaataaactattttatacatga

SEQ ID NO: 10448 - DNA, 8075 bp, Homo sapiens
  source 1..8075: mol_type = unassigned DNA
ccgaggccggcgcgagtgcactgcgaggcgggccgcagggagggaggcgcgaagagggcgcgagggtagcagccagagggagccgccagccctgcctgcggatccccgccgggcgcatggggcgcttcgagccgggactgcgtgcgggccccgaggccagtttcctgctgtcgtaagaagccgcgccaggacgcccgccggaccccgagctgctgggaggatgaccatggctgggggcaggaggggactagtggcccctcaaaacacgtttctggagaatattgttcggcggtccaatgatactaattttgtgttggggaatgctcagatagtggactggcctattgtgtacagcaatgatggattttgcaagctgtctggctatcacagggcagaagtgatgcaaaaaagcagcacctgcagttttatgtatggggagctgactgataaagacacgattgaaaaagtgcggcaaacatttgagaactatgagatgaattcctttgaaattctgatgtacaagaagaacaggacacctgtgtggttctttgtgaaaattgctccaattcgaaacgaacaggataaagtggttttatttctttgcactttcagtgacataacagctttcaaacagccaattgaggatgattcatgtaaaggctgggggaagtttgctcggctgacaagagcactgacaagcagcaggggtgtcctgcagcagctggctccaagcgtgcaaaaaggcgagaatgtccacaagcactcccgcctggcagaggtcctacagctgggctcagacatccttccccagtacaagcaagaggcaccaaagactccccctcacatcatcttacattattgtgtttttaagaccacgtgggattggatcatcttgatcttgaccttctatacagccatcttggtcccttataatgtctccttcaaaaccaggcagaataatgtggcctggctggttgttgatagcatcgtggatgttatctttttggtggacattgtgctcaattttcataccacctttgttggaccagcaggggaggtgatttctgaccccaaacttatccgcatgaactacctgaagacgtggtttgtgattgaccttctgtcctgtttgccatatgatgtcatcaacgcttttgagaacgtggatgagggcatcagcagcctgttcagctctctaaaagttgtccggctgctccgtcttgggcgagtggcccgtaagctggaccactacattgaatatggagctgctgtgctggtcctgctggtgtgtgtgtttgggctggctgcacactggatggcctgcatctggtacagcattggggactatgagatctttgacgaggacaccaagacaatccgcaacaacagctggctgtaccaactagcgatggacattggcaccccttaccagtttaatgggtctggctcagggaagtgggaaggtggtcccagcaagaattctgtctacatctcctcgttgtatttcacaatgaccagcctcaccagtgtgggctttgggaacatcgccccatccacagacattgagaagatctttgcagtggccatcatgatgattggctcacttctctatgccaccatcttcgggaatgtgacgactattttccaacagatgtatgccaacaccaacagataccatgagatgctcaacagtgttcgggacttcctgaagctctaccaggtgccaaaaggattgagtgagcgagtaatggattatattgtgtccacttggtccatgtccagaggcattgacacagagaaggtcctgcagatctgccccaaggacatgagagccgacatctgcgtgcacctgaaccgcaaggtgttcaaggagcacccggccttccggctggccagtgatggctgcctccgggcactggccatggagttccagacggtgcactgtgccccaggggacctcatctaccatgcaggagagagcgttgacagcctctgctttgtggtttctggctccctggaggtgatccaagatgatgaggtggtggccattctaggaaaaggagacgtgtttggagatgtgttctggaaggaagccacccttgcccagtcctgtgccaatgttagggccttgacctactgtgatctgcatgtgatcaagcgggatgccctgcagaaagtgctggaattctacacggccttctcccattccttctcccggaacctgattctgacgtacaacttgaggaagaggattgtgttccggaagatcagcgatgtgaaacgtgaagaggaagaacgcatgaaacgaaagaatgaggcccccctgatcttgcccccggaccaccctgtccggcgcctcttccagagattccgacagcagaaagaggccaggctggcagctgagagagggggccgggacctggatgacctagatgtggagaagggcaatgtccttacagagcatgcctccgccaaccacagcctcgtgaaggccagcgtggtcaccgtgcgtgagagtcctgccacgcccgtatccttccaggcagcctccacctccggggtgccagaccacgcaaagctacaggcgccagggtccgagtgcctgggccccaaggggggcgggggcgattgtgccaagcgcaaaagctgggcccgcttcaaagatgcttgcgggaagagtgaggactggaacaaggtgtccaaggctgagtcgatggagacacttcccgagaggacaaaagcgtcaggcgaggccacactgaagaagacagactcgtgtgacagtggcatcaccaagagcgacttgcgcctggacaacgtgggtgaggccaggagtccccaggatcggagtcccatcctggcagaggtcaagcattcgttctaccccatccctgagcagacgctgcaggccacagtcctggaggtgaggcacgagctgaaggaggacatcaaggccttaaacgccaaaatgaccaatattgagaaacagctctctgagatactcaggatattaacttccagaagatcctctcagtctcctcaggagttgtttgaaatatcgaggccacagtccccagaatcagagagagacatttttggagccagctgagaggtctatttaaaaaaaaagtcagagacagatacctccaaccctgccgtcaccaccacccctaccacatatgtccacatgaccaacaattttcaagtaggcttttcctaacagaaaaagtggggccagtggcttagacgtgctctttctctatctggaaaaagatatgggaagggtagcgtgcccctaccctgcaaggtggcagctgcatctgaaccgtctttgcacaattttggaagaagggacatgctgtctaaagggtattttccttcatttttaattttttactaccatgatatttgtaaaagattaaaactaccagaacagagcagcagccatctggggactggtgggaaagtgccgagaacctctcatgtatatactatgctgggctcctttgccaagaccccccatggactgcagtgggccaaggacttcccggcatccccgtccttgtacagcccgtgtctgacgtcaccatgttttcctgtagttgtcatttataactagctcgggacaagcagagcttgagggacaggagggtagagctcagaaactttctgtctcatggttaaggccagaaaagcagctgcaggtgtggtgcatgcctcccatagacacttgaagctgggaatcctcaggtctccttccccaaaggaggtgaggcaagggtaagagctggagaggggcccttaagatccaggggttctctgcggtgcaacccatagcctgctcctctgggacagttgacagggagggctctggagtgcctggctgagcctctggccctgctccatgctgctggcctcacacacaggctcccttgcttctgttccttcttggcctcttcccaagtgtccccatggcattcctcagggtatggagcatcggcaggaagggtcatgagcccagagttgctttattaacaaagcagacacacagacacacacaacctcagaactgtagcaagtgctatgtttatactttgattctcattgggattgccctgcagacctttgtattttgttcaccgcacggggtcattataggcacttgggagccatgctgggccttattttaaagccagtctctctatttcctattaaagtcagtaggatttcaagagaaaatggaaaaagactgcaggatcatgattgtactctcttcaggagctggaaagagaatgaagcagtgagtttccagctctctgtaaggtgatggagagaagtggccttggagctgtggctcccagtgatggtcacagaactgcgtatgggccatccaagcccctatgccacgatgctcggggacacttcactgcctcatggtcacctaagtcaggttattcatgtgcttgggcttctctcaatggcatctgagaaaggaaaggagtgaagtctcttccaggcacagtggagctggccggggcatatgccctagagagaggtgtcaggaccccaaatactgacacgcaaggttagaagttcagctctgaaaagtcaacttggagggaatggaattaggagtacaggtgacagcatggacttatccagggagcttacctttgcctgtgttagacggtgaccccattcctggtacctctgccctaccaaagatattcagtgtttctgagagcctccggtctgagactgcccaccaccccaccccaccccacctccttagtcctgcccagtgctcacggcgagtcccagggctgggccctcggttgtctgtgcaaggcagggctgacctctcctggttcgcagggttggcacagatggccctgggaagacaaggcctgcgagctcaagggagagtcctgctccatgagccctaacctcatatgtagcttctcacatcaggcttacaggggctgcccctggcttctccaggttgcgacataattagatttagcctcagatggcggcatacaagtaagaggaagtctaatttcctaaggccgagtcacaactatctgtgactttgaataaagctgtgaggccttcagcctctttcacttgagaagctgccaaccagtccttgggtaagaggccgtaaaatatctggaatcccatctgttggctgccccctaacattctagtctgccatttcttaaacatgctcctcaacctgcttctgaagtttaggacccaccacttttaaggcagggcaggcctctaatcacccccaaaacccagcctcagaagaacctgccactggagacacttttttgcctctcagctctccagggacttgatgacaggcttcttgtctggcacccaacggtcaatgtcaagaggccctgccatttccctccagctctgcctgagggagacggatgtccgtgaaatttctcagacctctgggtatgaggggcaaagatggtataaggctttgaagtccagacatgttcttggggggaatgtagctttaggaatgcactcgtgaatcagcgcaaactgggctcatgactggaagccagctcctgcggcaggaatctgttcatcttgggtcacaggtgcacgtgtgggtgcatgggctttattctcctgtaatcctccctaggatttgagggattttttgctgtaattgttttctttgaaaaaacattgtgtaaatgagccaaacctttctcccttccttttcgcaccatgaacttgaccgcaggctgctttgtgctgactgccttcccatgccaggatgccactctgggttcccgagccaggaccatgtgcctcagataccagtgacctgagccttccagtataaaccattatctggtggctggagagagattagggaaacaaaaagttactaggtatgggacagaacatttagacttcagaaaaagtatgccaagagagaacagatttgcccaggatgtatgtttttcctctttgaggagtcggggcatgatatgtggcaccattatctagtaagtgctggttatttgatttctactaaattctttactttgaatgtcattcatattgaagctccatttcccagagaatatcctgacaggctgctttgaagagggtaggtcctgtccctgtcacttggctgctggttgaacgtgctcctcccggctgatggaggggtgggtttaaggttaactctaagaactaagatggtcaatgaggtggtgtttgttcttggtgggggggcattgactccagcaatgggcgctgccatcccatatacttacaaagggctcctccactggacatgacaagatagccaaaggacggaaacagagacgaccatttggttgagaaaccaaattgtctagtgtacaattaatgcaactcattgcattcatgaatgcaactcattgcattaatgcaatgctacattatgctaataaggttacaacattaatgctacaggatagcccaagtatttaaaaagctgagcccatttagcagccttccagcaaacttttggaaatgcatttcttacttgatttcttcttgttatccaatccctggggactgttttacccacaacctcttcgatccagtgtgctgctgttggccaaacatcagcccctttcctggaatcctcctctttcaaaagtggggagggctgggcaggggtaaaaatgtactataccaccccatcccattcagcaagcttcctctccaaatccttaaatggaaggtagaagtattatgccaactgtcaagctctttgtccaggcccttgtggggactaaatgaactctttaggaatactaggtataggaagactaggtataggaagattctcatttccccttgttgcactgaccactatgtctcccatgcatactctgggaaattttaggagccctggtggagatacacgttgctgatgtgcatttgattaataggttttactatgtcttgcaataaagacgtttagccttaagacccttgaatggaactccagctgtgatagagctgccaatgccccttcctctctcctcccttatcacctagtgttgcttaaagaggaggccattgagggcacacttgatgccccagacagcctccctctgttgctaaatcattgttattgctctatatactgccttctcactcgcttcaattaaaaattaccttcaccagctcctgtgccctccacctgggggagacttcatgatcctctcagcactgactgcaaacatcagagaaaaaaacattttctcaccaaaggtgttcatgttgagaagttttaatttctaccccctacagctcaaaagaatcaatgtgaatttatctgcagcttaaattcaagtgaaacttcattctcatgcaagcatatcagacttattctggaacctctagaactggacttgaattccctgcaggtgccagactggtgggtgccctccctgcctgccattaaacttttcttacagccactgtccctttatctgtgacttctgagtcatccgacggatccattagttgttcaatgagaagttcacagatcttgtatcaggatataaactgatcttatgttgaaggatgcaccctcccctaatgaatgtattctcttaatattccgatgctgtatttgtgcatcagttggagactgtccacatccgacatttcaccgacacctcaaggacacttctacttatgagcagttcatcattctggggcttctccttatattaatactctttccattgagtcctgccaaatcctttattgggttttctttttcctttgcatctgtcactttgtccaaatgagcatgaataaacaaaagtgtaaatgagctgatactatttttgtggtcagctgaggatgctgccaagaacaccactgtatatctgtggcttgggaatgttaagaggaacgtgcaggcccttccattgatgatattcccttctcaacatttttaaacaagcacaaatgatatttgtaaaaaaaaaaagttttatttattatggtaataaactattttatacatg

SEQ ID NO: 10449 - DNA, 4173 bp, Homo sapiens
  source 1..4173: mol_type = unassigned DNA
gggagggaggcgcgaagagggcgcgagggtagcagccagagggagccgccagccctgcctgcggatccccgccgggcgcatggggcgcttcgagccgggactgcgtgcgggccccgaggccagtttcctgctgtcgtaagaagccgcgccaggacgcccgccggaccccgagctgctgggaggatgaccatggctgggggcaggaggggactagtggcccctcaaaacacgtttctggagaatattgttcggcggtccaatgatactaattttgtgttggggaatgctcagatagtggactggcctattgtgtacagcaatgatggattttgcaagctgtctggctatcacagggcagaagtgatgcaaaaaagcagcacctgcagttttatgtatggggagctgactgataaagacacgattgaaaaagtgcggcaaacatttgagaactatgagatgaattcctttgaaattctgatgtacaagaagaacaggacacctgtgtggttctttgtgaaaattgctccaattcgaaacgaacaggataaagtggttttatttctttgcactttcagtgacataacagctttcaaacagccaattgaggatgattcatgtaaaggctgggggaagtttgctcggctgacaagagcactgacaagcagcaggggtgtcctgcagcagctggctccaagcgtgcaaaaaggcgagaatgtccacaagcactcccgcctggcagaggtcctacagctgggctcagacatccttccccagtacaagcaagaggcaccaaagactccccctcacatcatcttacattattgtgtttttaagaccacgtgggattggatcatcttgatcttgaccttctatacagccatcttggtcccttataatgtctccttcaaaaccaggcagaataatgtggcctggctggttgttgatagcatcgtggatgttatctttttggtggacattgtgctcaattttcataccacctttgttggaccagcaggggaggtgatttctgaccccaaacttatccgcatgaactacctgaagacgtggtttgtgattgaccttctgtcctgtttgccatatgatgtcatcaacgcttttgagaacgtggatgagggcatcagcagcctgttcagctctctaaaagttgtccggctgctccgtcttgggcgagtggcccgtaagctggaccactacattgaatatggagctgctgtgctggtcctgctggtgtgtgtgtttgggctggctgcacactggatggcctgcatctggtacagcattggggactatgagatctttgacgaggacaccaagacaatccgcaacaacagctggctgtaccaactagcgatggacattggcaccccttaccagtttaatgggtctggctcagggaagtgggaaggtggtcccagcaagaattctgtctacatctcctcgttgtatttcacaatgaccagcctcaccagtgtgggctttgggaacatcgccccatccacagacattgagaagatctttgcagtggccatcatgatgattggctcacttctctatgccaccatcttcgggaatgtgacgactattttccaacagatgtatgccaacaccaacagataccatgagatgctcaacagtgttcgggacttcctgaagctctaccaggtgccaaaaggattgagtgagcgagtaatggattatattgtgtccacttggtccatgtccagaggcattgacacagagaaggtcctgcagatctgccccaaggacatgagagccgacatctgcgtgcacctgaaccgcaaggtgttcaaggagcacccggccttccggctggccagtgatggctgcctccgggcactggccatggagttccagacggtgcactgtgccccaggggacctcatctaccatgcaggagagagcgttgacagcctctgctttgtggtttctggctccctggaggtgatccaagatgatgaggtggtggccattctaggaaaaggagacgtgtttggagatgtgttctggaaggaagccacccttgcccagtcctgtgccaatgttagggccttgacctactgtgatctgcatgtgatcaagcgggatgccctgcagaaagtgctggaattctacacggccttctcccattccttctcccggaacctgattctgacgtacaacttgaggaagaggattgtgttccggaagatcagcgatgtgaaacgtgaagaggaagaacgcatgaaacgaaagaatgaggcccccctgatcttgcccccggaccaccctgtccggcgcctcttccagagattccgacagcagaaagaggccaggctggcagctgagagagggggccgggacctggatgacctagatgtggagaagggcaatgtccttacagagcatgcctccgccaaccacagcctcgtgaaggccagcgtggtcaccgtgcgtgagagtcctgccacgcccgtatccttccaggcagcctccacctccggggtgccagaccacgcaaagctacaggcgccagggtccgagtgcctgggccccaaggggggcgggggcgattgtgccaagcgcaaaagctgggcccgcttcaaagatgcttgcgggaagagtgaggactggaacaaggtgtccaaggctgagtcgatggagacacttcccgagaggacaaaagcgtcaggcgaggccacactgaagaagacagactcgtgtgacagtggcatcaccaagagcgacttgcgcctggacaacgtgggtgaggccaggagtccccaggatcggagtcccatcctggcagaggtcaagcattcgttctaccccatccctgagcagacgctgcaggccacagtcctggaggtgaggcacgagctgaaggaggacatcaaggccttaaacgccaaaatgaccaatattgagaaacagctctctgagatactcaggatattaacttccagaagatcctctcagtctcctcaggagttgtttgaaatatcgaggccacagtccccagaatcagagagagacatttttggagccagctgagaggtctatttaaaaaaaaagtcagagacagatacctccaaccctgccgtcaccaccacccctaccacatatgtccacatgaccaacaattttcaagtaggcttttcctaacagaaaaagtggggccagtggcttagacgtgctctttctctatctggaaaaagatatgggaagggtagcgtgcccctaccctgcaaggtggcagctgcatctgaaccgtctttgcacaattttggaagaagggacatgctgtctaaaggctcctgtgccctccacctgggggagacttcatgatcctctcagcactgactgcaaacatcagagaaaaaaacattttctcaccaaaggtgttcatgttgagaagttttaatttctaccccctacagctcaaaagaatcaatgtgaatttatctgcagcttaaattcaagtgaaacttcattctcatgcaagcatatcagacttattctggaacctctagaactggacttgaattccctgcaggtgccagactggtgggtgccctccctgcctgccattaaacttttcttacagccactgtccctttatctgtgacttctgagtcatccgacggatccattagttgttcaatgagaagttcacagatcttgtatcaggatataaactgatcttatgttgaaggatgcaccctcccctaatgaatgtattctcttaatattccgatgctgtatttgtgcatcagttggagactgtccacatccgacatttcaccgacacctcaaggacacttctacttatgagcagttcatcattctggggcttctccttatattaatactctttccattgagtcctgccaaatcctttattgggttttctttttcctttgcatctgtcactttgtccaaatgagcatgaataaacaaaagtgtaaatgagctgatactatttttgtggtcagctgaggatgctgccaagaacaccactgtatatctgtggcttgggaatgttaagaggaacgtgcaggcccttccattgatgatattcccttctcaacatttttaaacaagcacaaatgatatttgtaaaaaaaaaaagttttatttattatggtaataaac

SEQ ID NO: 10450 - DNA, 4592 bp, Homo sapiens
  source 1..4592: mol_type = unassigned DNA
cgcgagtgcactgcgaggcgggccgcagggagggaggcgcgaagagggcgcgagggtagcagccagagggagccgccagccctgcctgcggatccccgccgggcgcatggggcgcttcgagccgggactgcgtgcgggccccgaggccagtttcctgctgtcgtaagaagccgcgccaggacgcccgccggaccccgagctgctgggaggatgaccatggctgggggcaggaggggactagtggcccctcaaaacacgtttctggagaatattgttcggcggtccaatgatactaattttgtgttggggaatgctcagatagtggactggcctattgtgtacagcaatgatggattttgcaagctgtctggctatcacagggcagaagtgatgcaaaaaagcagcacctgcagttttatgtatggggagctgactgataaagacacgattgaaaaagtgcggcaaacatttgagaactatgagatgaattcctttgaaattctgatgtacaagaagaacaggacacctgtgtggttctttgtgaaaattgctccaattcgaaacgaacaggataaagtggttttatttctttgcactttcagtgacataacagctttcaaacagccaattgaggatgattcatgtaaaggctgggggaagtttgctcggctgacaagagcactgacaagcagcaggggtgtcctgcagcagctggctccaagcgtgcaaaaaggcgagaatgtccacaagcactcccgcctggcagaggtcctacagctgggctcagacatccttccccagtacaagcaagaggcaccaaagactccccctcacatcatcttacattattgtgtttttaagaccacgtgggattggatcatcttgatcttgaccttctatacagccatcttggtcccttataatgtctccttcaaaaccaggcagaataatgtggcctggctggttgttgatagcatcgtggatgttatctttttggtggacattgtgctcaattttcataccacctttgttggaccagcaggggaggtgatttctgaccccaaacttatccgcatgaactacctgaagacgtggtttgtgattgaccttctgtcctgtttgccatatgatgtcatcaacgcttttgagaacgtggatgagggcatcagcagcctgttcagctctctaaaagttgtccggctgctccgtcttgggcgagtggcccgtaagctggaccactacattgaatatggagctgctgtgctggtcctgctggtgtgtgtgtttgggctggctgcacactggatggcctgcatctggtacagcattggggactatgagatctttgacgaggacaccaagacaatccgcaacaacagctggctgtaccaactagcgatggacattggcaccccttaccagtttaatgggtctggctcagggaagtgggaaggtggtcccagcaagaattctgtctacatctcctcgttgtatttcacaatgaccagcctcaccagtgtgggctttgggaacatcgccccatccacagacattgagaagatctttgcagtggccatcatgatgattggctcacttctctatgccaccatcttcgggaatgtgacgactattttccaacagatgtatgccaacaccaacagataccatgagatgctcaacagtgttcgggacttcctgaagctctaccaggtgccaaaaggattgagtgagcgagtaatggattatattgtgtccacttggtccatgtccagaggcattgacacagagaaggtcctgcagatctgccccaaggacatgagagccgacatctgcgtgcacctgaaccgcaaggtgttcaaggagcacccggccttccggctggccagtgatggctgcctccgggcactggccatggagttccagacggtgcactgtgccccaggggacctcatctaccatgcaggagagagcgttgacagcctctgctttgtggtttctggctccctggaggtgatccaagatgatgaggtggtggccattctaggaaaaggagacgtgtttggagatgtgttctggaaggaagccacccttgcccagtcctgtgccaatgttagggccttgacctactgtgatctgcatgtgatcaagcgggatgccctgcagaaagtgctggaattctacacggccttctcccattccttctcccggaacctgattctgacgtacaacttgaggaagaggattgtgttccggaagatcagcgatgtgaaacgtgaagaggaagaacgcatgaaacgaaagaatgaggcccccctgatcttgcccccggaccaccctgtccggcgcctcttccagagattccgacagcagaaagaggccaggctggcagctgagagagggggccgggacctggatgacctagatgtggagaagggcaatgtccttacagagcatgcctccgccaaccacagcctcgtgaaggccagcgtggtcaccgtgcgtgagagtcctgccacgcccgtatccttccaggcagcctccacctccggggtgccagaccacgcaaagctacaggcgccagggtccgagtgcctgggccccaaggggggcgggggcgattgtgccaagcgcaaaagctgggcccgcttcaaagatgcttgcgggaagagtgaggactggaacaaggtgtccaaggctgagtcgatggagacacttcccgagaggacaaaagcgtcaggcgaggccacactgaagaagacagactcgtgtgacagtggcatcaccaagagcgacttgcgcctggacaacgtgggtgaggccaggagtccccaggatcggagtcccatcctggcagaggtcaagcattcgttctaccccatccctgagcagacgctgcaggccacagtcctggaggtgaggcacgagctgaaggaggacatcaaggccttaaacgccaaaatgaccaatattgagaaacagctctctgagatactcaggatattaacttccagaagatcctctcagtctcctcaggagttgtttgaaatatcgaggccacagtccccagaatcagagagagacatttttggagccagctgagaggtctatttaaaaaaaaagtcagagacagatacctccaaccctgccgtcaccaccacccctaccacatatgtccacatgaccaacaattttcaagtaggcttttcctaacagaaaaagtggggccagtggcttagacgtgctctttctctatctggaaaaagatatgggaagggtagcgtgcccctaccctgcaaggtggcagctgcatctgaaccgtctttgcacaattttggaagaagggacatgctgtctaaagggtattttccttcatttttaattttttactaccatgatatttgtaaaagattaaaactaccagaacagagcagcagccatctggggactggtgggaaagtgccgagaacctctcatgtatatactatgctgggctcctttgccaagaccccccatggactgcagtgggccaaggacttcccggcatccccgtccttgtacagcccgtgtctgacgtcaccatgttttcctgtagttgtcatttataactagctcgggacaagcagagcttgagggacaggagggtagagctcagaaactttctgtctcatggttaaggccagaaaagcagctgcaggtgtggtgcatgcctcccatagacacttgaagctgggaatcctcaggtctccttccccaaaggagctcctgtgccctccacctgggggagacttcatgatcctctcagcactgactgcaaacatcagagaaaaaaacattttctcaccaaaggtgttcatgttgagaagttttaatttctaccccctacagctcaaaagaatcaatgtgaatttatctgcagcttaaattcaagtgaaacttcattctcatgcaagcatatcagacttattctggaacctctagaactggacttgaattccctgcaggtgccagactggtgggtgccctccctgcctgccattaaacttttcttacagccactgtccctttatctgtgacttctgagtcatccgacggatccattagttgttcaatgagaagttcacagatcttgtatcaggatataaactgatcttatgttgaaggatgcaccctcccctaatgaatgtattctcttaatattccgatgctgtatttgtgcatcagttggagactgtccacatccgacatttcaccgacacctcaaggacacttctacttatgagcagttcatcattctggggcttctccttatattaatactctttccattgagtcctgccaaatcctttattgggttttctttttcctttgcatctgtcactttgtccaaatgagcatgaataaacaaaagtgtaaatgagctgatactatttttgtggtcagctgaggatgctgccaagaacaccactgtatatctgtggcttgggaatgttaagaggaacgtgcaggcccttccattgatgatattcccttctcaacatttttaaacaagcacaaatgatatttgtaaaaaaaaaaagttttatttattatgg

SEQ ID NO: 10451 - DNA, 1214 bp, Homo sapiens
  source 1..1214: mol_type = unassigned DNA
gcatgcctccgccaaccacagcctcgtgaaggccagcgtggtcaccgtgcgtgagagtcctgccacgcccgtatccttccaggcagcctccacctccggggtgccagaccacgcaaagctacaggcgccagggtccgagtgcctgggccccaaggggggcgggggcgattgtgccaagcgcaaaagctgggcccgcttcaaagatgcttgcgggaagagtgaggactggaacaaggtgtccaaggctgagtcgatggagacacttcccgagaggacaaaagcgtcaggcgaggccacactgaagaagacagactcgtgtgacagtggcatcaccaagagcgacttgcgcctggacaacgtgggtgaggccaggagtccccaggatcggagtcccatcctggcagaggtcaagcattcgttctaccccatccctgagcagacgctgcaggccacagtcctggagctcctgtgccctccacctgggggagacttcatgatcctctcagcactgactgcaaacatcagagaaaaaaacattttctcaccaaaggtgttcatgttgagaagttttaatttctaccccctacagctcaaaagaatcaatgtgaatttatctgcagcttaaattcaagtgaaacttcattctcatgcaagcatatcagacttattctggaacctctagaactggacttgaattccctgcaggtgccagactggtgggtgccctccctgcctgccattaaacttttcttacagccactgtccctttatctgtgacttctgagtcatccgacggatccattagttgttcaatgagaagttcacagatcttgtatcaggatataaactgatcttatgttgaaggatgcaccctcccctaatgaatgtattctcttaatattccgatgctgtatttgtgcatcagttggagactgtccacatccgacatttcaccgacacctcaaggacacttctacttatgagcagttcatcattctggggcttctccttatattaatactctttccattgagtcctgccaaatcctttattgggttttctttttcctttgcatctgtcactttgtccaaatgagcatgaataaacaaaagtgtaaatgagctgatactatttttgtggtcagctgaggatgctgccaagaacaccactgtatatctgtggcttgggaatgttaagaggaacgtgcaggccct

SEQ ID NO: 10452 - DNA, 3740 bp, Homo sapiens
  source 1..3740: mol_type = unassigned DNA
cccagtacaagcaagaggcaccaaagactccccctcacatcatcttacattattgtgtttttaagaccacgtgggattggatcatcttgatcttgaccttctatacagccatcttggtcccttataatgtctccttcaaaaccaggcagaataatgtggcctggctggttgttgatagcatcgtggatgttatctttttggtggacattgtgctcaattttcataccacctttgttggaccagcaggggaggtgatttctgaccccaaacttatccgcatgaactacctgaagacgtggtttgtgattgaccttctgtcctgtttgccatatgatgtcatcaacgcttttgagaacgtggatgagggcatcagcagcctgttcagctctctaaaagttgtccggctgctccgtcttgggcgagtggcccgtaagctggaccactacattgaatatggagctgctgtgctggtcctgctggtgtgtgtgtttgggctggctgcacactggatggcctgcatctggtacagcattggggactatgagatctttgacgaggacaccaagacaatccgcaacaacagctggctgtaccaactagcgatggacattggcaccccttaccagtttaatgggtctggctcagggaagtgggaaggtggtcccagcaagaattctgtctacatctcctcgttgtatttcacaatgaccagcctcaccagtgtgggctttgggaacatcgccccatccacagacattgagaagatctttgcagtggccatcatgatgattggctcacttctctatgccaccatcttcgggaatgtgacgactattttccaacagatgtatgccaacaccaacagataccatgagatgctcaacagtgttcgggacttcctgaagctctaccaggtgccaaaaggattgagtgagcgagtaatggattatattgtgtccacttggtccatgtccagaggcattgacacagagaaggtcctgcagatctgccccaaggacatgagagccgacatctgcgtgcacctgaaccgcaaggtgttcaaggagcacccggccttccggctggccagtgatggctgcctccgggcactggccatggagttccagacggtgcactgtgccccaggggacctcatctaccatgcaggagagagcgttgacagcctctgctttgtggtttctggctccctggaggtgatccaagatgatgaggtggtggccattctagattgtgttccggaagatcagcgatgtgaaacgtgaagaggaagaacgcatgaaacgaaagaatgaggcccccctgatcttgcccccggaccaccctgtccggcgcctcttccagagattccgacagcagaaagaggccaggctggcagctgagagagggggccgggacctggatgacctagatgtggagaagggcaatgtccttacagagcatgcctccgccaaccacagcctcgtgaaggccagcgtggtcaccgtgcgtgagagtcctgccacgcccgtatccttccaggcagcctccacctccggggtgccagaccacgcaaagctacaggcgccagggtccgagtgcctgggccccaaggggggcgggggcgattgtgccaagcgcaaaagctgggcccgcttcaaagatgcttgcgggaagagtgaggactggaacaaggtgtccaaggctgagtcgatggagacacttcccgagaggacaaaagcgtcaggcgaggccacactgaagaagacagactcgtgtgacagtggcatcaccaagagcgacttgcgcctggacaacgtgggtgaggccaggagtccccaggatcggagtcccatcctggcagaggtcaagcattcgttctaccccatccctgagcagacgctgcaggccacagtcctggaggtgaggcacgagctgaaggaggacatcaaggccttaaacgccaaaatgaccaatattgagaaacagctctctgagatactcaggatattaacttccagaagatcctctcagtctcctcaggagttgtttgaaatatcgaggccacagtccccagaatcagagagagacatttttggagccagctgagaggtctatttaaaaaaaaagtcagagacagatacctccaaccctgccgtcaccaccacccctaccacatatgtccacatgaccaacaattttcaagtaggcttttcctaacagaaaaagtggggccagtggcttagacgtgctctttctctatctggaaaaagatatgggaagggtagcgtgcccctaccctgcaaggtggcagctgcatctgaaccgtctttgcacaattttggaagaagggacatgctgtctaaagggtattttccttcatttttaattttttactaccatgatatttgtaaaagattaaaactaccagaacagagcagcagccatctggggactggtgggaaagtgccgagaacctctcatgtatatactatgctgggctcctttgccaagaccccccatggactgcagtgggccaaggacttcccggcatccccgtccttgtacagcccgtgtctgacgtcaccatgttttcctgtagttgtcatttataactagctcgggacaagcagagcttgagggacaggagggtagagctcagaaactttctgtctcatggttaaggccagaaaagcagctgcaggtgtggtgcatgcctcccatagacacttgaagctgggaatcctcaggtctccttccccaaaggaggtgaggcaagggtaagagctggagaggggcccttaagatccaggggttctctgcggtgcaacccatagcctgctcctctgggacagttgacagggagggctctggagtgcctggctgagcctctggccctgctccatgctgctggcctcacacacaggctcccttgcttctgttccttcttggcctcttcccaagtgtccccatggcattcctcagggtatggagcatcggcaggaagggtcatgagcccagagttgctttattaacaaagcagacacacagacacacacaacctcagaactgtagcaagtgctatgtttatactttgattctcattgggattgccctgcagacctttgtattttgttcaccgcacggggtcattataggcacttgggagccatgctgggccttattttaaagccagtctctctatttcctattaaagtcagtaggatttcaagagaaaatggaaaaagactgcaggatcatgattgtactctcttcaggagctggaaagagaatgaagcagtgagtttccagctctctgtaaggtgatggagagaagtggccttggagctgtggctcccagtgatggtcacagaactgcgtatgggccatccaagcccctatgccacgatgctcggggacacttcactgcctcatggtcacctaagtcaggttattcatgtgcttgggcttctctcaatggcatctgagaaaggaaaggagtgaagtctcttccaggcacagtggagctggccggggcatatgccctagagagaggtgtcaggaccccaaatactgacacgcaaggttagaagttcagctctgaaaagtcaacttggagggaatggaattaggagtacaggtgacagcatggacttatccagggagcttacctttgcctgtgttagacggtgaccccattcctggtacctctgccctaccaaagatattcagtgtttctgaga

SEQ ID NO: 10453 - DNA, 3027 bp, Homo sapiens
  source 1..3027: mol_type = unassigned DNA
agccagagggagccgccagccctgcctgcggatccccgccgggcgcatggggcgcttcgagccgggactgcgtgcgggccccgaggccagtttcctgctgtcgtaagaagccgcgccaggacgcccgccggaccccgagctgctgggaggatgaccatggctgggggcaggaggggactagtggcccctcaaaacacgtttctggagaatattgttcggcggtccaatgatactaattttgtgttggggaatgctcagatagtggactggcctattgtgtacagcaatgatggattttgcaagctgtctggctatcacagggcagaagtgatgcaaaaaagcagcacctgcagttttatgtatggggagctgactgataaagacacgattgaaaaagtgcggcaaacatttgagaactatgagatgaattcctttgaaattctgatgtacaagaagaacaggacacctgtgtggttctttgtgaaaattgctccaattcgaaacgaacaggataaagtggttttatttctttgcactttcagtgacataacagctttcaaacagccaattgaggatgattcatgtaaaggctgggggaagtttgctcggctgacaagagcactgacaagcagcaggggtgtcctgcagcagctggctccaagcgtgcaaaaaggcgagaatgtccacaagcactcccgcctggcagaggtcctacagctgggctcagacatccttccccagtacaagcaagaggcaccaaagactccccctcacatcatcttacattattgtgtttttaagaccacgtgggattggatcatcttgatcttgaccttctatacagccatcttggtcccttataatgtctccttcaaaaccaggcagaataatgtggcctggctggttgttgatagcatcgtggatgttatctttttggtggacattgtgctcaattttcataccacctttgttggaccagcaggggaggtgatttctgaccccaaacttatccgcatgaactacctgaagacgtggtttgtgattgaccttctgtcctgtttgccatatgatgtcatcaacgcttttgagaacgtggatgagcacttctctatgccaccatcttcgggaatgtgacgactattttccaacagatgtatgccaacaccaacagataccatgagatgctcaacagtgttcgggacttcctgaagctctaccaggtgccaaaaggattgagtgagcgagtaatggattatattgtgtccacttggtccatgtccagaggcattgacacagagaaggtcctgcagatctgccccaaggacatgagagccgacatctgcgtgcacctgaaccgcaaggtgttcaaggagcacccggccttccggctggccagtgatggctgcctccgggcactggccatggagttccagacggtgcactgtgccccaggggacctcatctaccatgcaggagagagcgttgacagcctctgctttgtggtttctggctccctggaggtgatccaagatgatgaggtggtggccattctaggaaaaggagacgtgtttggagatgtgttctggaaggaagccacccttgcccagtcctgtgccaatgttagggccttgacctactgtgatctgcatgtgatcaagcgggatgccctgcagaaagtgctggaattctacacggccttctcccattccttctcccggaacctgattctgacgtacaacttgaggaagaggattgtgttccggaagatcagcgatgtgaaacgtgaagaggaagaacgcatgaaacgaaagaatgaggcccccctgatcttgcccccggaccaccctgtccggcgcctcttccagagattccgacagcagaaagaggccaggctggcagctgagagagggggccgggacctggatgacctagatgtggagaagggcaatgtccttacagagcatgcctccgccaaccacagcctcgtgaaggccagcgtggtcaccgtgcgtgagagtcctgccacgcccgtatccttccaggcagcctccacctccggggtgccagaccacgcaaagctacaggcgccagggtccgagtgcctgggccccaaggggggcgggggcgattgtgccaagcgcaaaagctgggcccgcttcaaagatgcttgcgggaagagtgaggactggaacaaggtgtccaaggctgagtcgatggagacacttcccgagaggacaaaagcgtcaggcgaggccacactgaagaagacagactcgtgtgacagtggcatcaccaagagcgacttgcgcctggacaacgtgggtgaggccaggagtccccaggatcggagtcccatcctggcagaggtcaagcattcgttctaccccatccctgagcagacgctgcaggccacagtcctggaggtgaggcacgagctgaaggaggacatcaaggccttaaacgccaaaatgaccaatattgagaaacagctctctgagatactcaggatattaacttccagaagatcctctcagtctcctcaggagttgtttgaaatatcgaggccacagtccccagaatcagagagagacatttttggagccagctgagaggtctatttaaaaaaaaagtcagagacagatacctccaaccctgccgtcaccaccacccctaccacatatgtccacatgaccaacaattttcaagtaggcttttcctaacagaaaaagtggggccagtggcttagacgtgctctttctctatctggaaaaagatatgggaagggtagcgtgcccctaccctgcaaggtggcagctgcatctgaaccgtctttgcacaattttggaagaagggacatgctgtctaaagggtattttccttcatttttaattttttactaccatgatatttgtaaaagattaaaactaccagaacagagcagcagccatctggggactggtgggaaagtgccgagaacctctcatgtatatactatgctgggctcctttgccaagaccccccatggac

SEQ ID NO: 10454 - DNA, 1818 bp, Homo sapiens
  source 1..1818: mol_type = unassigned DNA
atgaccatggctgggggcaggaggggactagtggcccctcaaaacacgtttctggagaatattgttcggcggtccaatgatactaattttgtgttggggaatgctcagatagtggactggcctattgtgtacagcaatgatggattttgcaagctgtctggctatcacagggcagaagtgatgcaaaaaagcagcacctgcagttttatgtatggggagctgactgataaagacacgattgaaaaagtgcggcaaacatttgagaactatgagatgaattcctttgaaattctgatgtacaagaagaacacacttctctatgccaccatcttcgggaatgtgacgactattttccaacagatgtatgccaacaccaacagataccatgagatgctcaacagtgttcgggacttcctgaagctctaccaggtgccaaaaggattgagtgagcgagtaatggattatattgtgtccacttggtccatgtccagaggcattgacacagagaaggtcctgcagatctgccccaaggacatgagagccgacatctgcgtgcacctgaaccgcaaggtgttcaaggagcacccggccttccggctggccagtgatggctgcctccgggcactggccatggagttccagacggtgcactgtgccccaggggacctcatctaccatgcaggagagagcgttgacagcctctgctttgtggtttctggctccctggaggtgatccaagatgatgaggtggtggccattctaggaaaaggagacgtgtttggagatgtgttctggaaggaagccacccttgcccagtcctgtgccaatgttagggccttgacctactgtgatctgcatgtgatcaagcgggatgccctgcagaaagtgctggaattctacacggccttctcccattccttctcccggaacctgattctgacgtacaacttgaggaagaggattgtgttccggaagatcagcgatgtgaaacgtgaagaggaagaacgcatgaaacgaaagaatgaggcccccctgatcttgcccccggaccaccctgtccggcgcctcttccagagattccgacagcagaaagaggccaggctggcagctgagagagggggccgggacctggatgacctagatgtggagaagggcaatgtccttacagagcatgcctccgccaaccacagcctcgtgaaggccagcgtggtcaccgtgcgtgagagtcctgccacgcccgtatccttccaggcagcctccacctccggggtgccagaccacgcaaagctacaggcgccagggtccgagtgcctgggccccaaggggggcgggggcgattgtgccaagcgcaaaagctgggcccgcttcaaagatgcttgcgggaagagtgaggactggaacaaggtgtccaaggctgagtcgatggagacacttcccgagaggacaaaagcgtcaggcgaggccacactgaagaagacagactcgtgtgacagtggcatcaccaagagcgacttgcgcctggacaacgtgggtgaggccaggagtccccaggatcggagtcccatcctggcagaggtcaagcattcgttctaccccatccctgagcagacgctgcaggccacagtcctggaggtgaggcacgagctgaaggaggacatcaaggccttaaacgccaaaatgaccaatattgagaaacagctctctgagatactcaggatattaacttccagaagatcctctcagtctcctcaggagttgtttgaaatatcgaggccacagtccccagaatcagagagagacatttttggagccagctga

SEQ ID NO: 10455 - DNA, 1365 bp, Homo sapiens
  source 1..1365: mol_type = unassigned DNA
atgaccatggctgggggcaggaggggactagtggcccctcaaaacacgtttctggagaatattgttcggcggtccaatgatactaattttgtgttggggaatgctcagatagtggactggcctattgtgtacagcaatgatggattttgcaagctgtctggctatcacagggcagaagtgatgcaaaaaagcagcacctgcagttttatgtatggggagctgactgataaagacacgattgaaaaagtgcggcaaacatttgagaactatgagatgaattcctttgaaattctgatgtacaagaagaacagaaaaggagacgtgtttggagatgtgttctggaaggaagccacccttgcccagtcctgtgccaatgttagggccttgacctactgtgatctgcatgtgatcaagcgggatgccctgcagaaagtgctggaattctacacggccttctcccattccttctcccggaacctgattctgacgtacaacttgaggaagaggattgtgttccggaagatcagcgatgtgaaacgtgaagaggaagaacgcatgaaacgaaagaatgaggcccccctgatcttgcccccggaccaccctgtccggcgcctcttccagagattccgacagcagaaagaggccaggctggcagctgagagagggggccgggacctggatgacctagatgtggagaagggcaatgtccttacagagcatgcctccgccaaccacagcctcgtgaaggccagcgtggtcaccgtgcgtgagagtcctgccacgcccgtatccttccaggcagcctccacctccggggtgccagaccacgcaaagctacaggcgccagggtccgagtgcctgggccccaaggggggcgggggcgattgtgccaagcgcaaaagctgggcccgcttcaaagatgcttgcgggaagagtgaggactggaacaaggtgtccaaggctgagtcgatggagacacttcccgagaggacaaaagcgtcaggcgaggccacactgaagaagacagactcgtgtgacagtggcatcaccaagagcgacttgcgcctggacaacgtgggtgaggccaggagtccccaggatcggagtcccatcctggcagaggtcaagcattcgttctaccccatccctgagcagacgctgcaggccacagtcctggaggtgaggcacgagctgaaggaggacatcaaggccttaaacgccaaaatgaccaatattgagaaacagctctctgagatactcaggatattaacttccagaagatcctctcagtctcctcaggagttgtttgaaatatcgaggccacagtccccagaatcagagagagacatttttggagccagctga

SEQ ID NO: 10456 - DNA, 1817 bp, Homo sapiens
  source 1..1817: mol_type = unassigned DNA
gcactgcgaggcgggccgcagggagggaggcgcgaagagggcgcgagggtagcagccagagggagccgccagccctgcctgcggatccccgccgggcgcatggggcgcttcgagccgggactgcgtgcgggccccgaggccagtttcctgctgtcgtaagaagccgcgccaggacgcccgccggaccccgagctgctgggaggatgaccatggctgggggcaggaggggactagtggcccctcaaaacacgtttctggagaatattgttcggcggtccaatgatactaattttgtgttggggaatgctcagatagtggactggcctattgtgtacagcaatgatggattttgcaagctgtctggctatcacagggcagaagtgatgcaaaaaagcagcacctgcagttttatgtatggggagctgactgataaagacacgattgaaaaagtgcggcaaacatttgagaactatgagatgaattcctttgaaattctgatgtacaagaagaacaggacacctgtgtggttctttgtgaaaattgctccaattcgaaacgaacaggataaagtggttttatttctttgcactttcagtgacataacagctttcaaacagccaattgaggatgattcatgtaaaggctgggggaagtttgctcggctgacaagagcactgacaagcagcaggggtgtcctgcagcagctggctccaagcgtgcaaaaaggcgagaatgtccacaagcactcccgcctggcagaggtcctacagctgggctcagacatccttccccagtacaagcaagaggcaccaaagactccccctcacatcatcttacattattgtgtttttaagaccacgtgggattggatcatcttgatcttgaccttctatacagccatcttggtcccttataatgtctccttcaaaaccaggcagaataatgtggcctggctggttgttgatagcatcgtggatgttatctttttggtggacattgtgctcaattttcataccacctttgttggaccagcaggggaggtgatttctgaccccaaacttatccgcatgaactacctgaagacgtggtttgtgattgaccttctgtcctgtttgccatatgatgtcatcaacgcttttgagaacgtggatgaggttagtgcctttatgggtgatccagggaagattggttttgctgatcagattccaccaccactggaggggagagagagtcagcacttctctatgccaccatcttcgggaatgtgacgactattttccaacagatgtatgccaacaccaacagataccatgagatgctcaacagtgttcgggacttcctgaagctctaccaggtgccaaaaggattgagtgagcgagtaatggattatattgtgtccacttggtccatgtccagaggcattgacacagagaaggtcctgcagatctgccccaaggacatgagagccgacatctgcgtgcacctgaaccgcaaggtgttcaaggagcacccggccttccggctggccagtgatggctgcctccgggcactggccatggagttccagacggtgcactgtgccccaggggacctcatctaccatgcaggagagagcgttgacagcctctgctttgtggtttctggctccctggaggtgatccaagatgatgaggtggtggccattctaggaaaaggagacgtgtttggagatgtgttctggaaggaagccacccttgcccagtcctgtgccaatgttagggccttgacctactgtgatctgcatgtgatcaagcgggatgccctgcagaaagtgctgg

SEQ ID NO: 10457 - DNA, 2401 bp, Homo sapiens
  source 1..2401: mol_type = unassigned DNA
gcactgcgaggcgggccgcagggagggaggcgcgaagagggcgcgagggtagcagccagagggagccgccagccctgcctgcggatccccgccgggcgcatggggcgcttcgagccgggactgcgtgcgggccccgaggccagtttcctgctgtcgtaagaagccgcgccaggacgcccgccggaccccgagctgctgggaggatgaccatggctgggggcaggaggggactagtggcccctcaaaacacgtttctggagaatattgttcggcggtccaatgatactaattttgtgttggggaatgctcagatagtggactggcctattgtgtacagcaatgatggattttgcaagctgtctggctatcacagggcagaagtgatgcaaaaaagcagcacctgcagttttatgtatggggagctgactgataaagacacgattgaaaaagtgcggcaaacatttgagaactatgagatgaattcctttgaaattctgatgtacaagaagaacaggacacctgtgtggttctttgtgaaaattgctccaattcgaaacgaacaggataaagtggttttatttctttgcactttcagtgacataacagctttcaaacagccaattgaggatgattcatgtaaaggctgggggaagtttgctcggctgacaagagcactgacaagcagcaggggtgtcctgcagcagctggctccaagcgtgcaaaaaggcgagaatgtccacaagcactcccgcctggcagaggtcctacagctgggctcagacatccttccccagtacaagcaagaggcaccaaagactccccctcacatcatcttacattattgtgtttttaagaccacgtgggattggatcatcttgatcttgaccttctatacagccatcttggtcccttataatgtctccttcaaaaccaggcagaataatgtggcctggctggttgttgatagcatcgtggatgttatctttttggtggacattgtgctcaattttcataccacctttgttggaccagcaggggaggtgatttctgaccccaaacttatccgcatgaactacctgaagacgtggtttgtgattgaccttctgtcctgtttgccatatgatgtcatcaacgcttttgagaacgtggatgaggttagtgcctttatgggtgatccagggaagattggttttgctgatcagattccaccaccactggaggggagagagagtcagggcatcagcagcctgttcagctctctaaaagttgtccggctgctccgtcttgggcgagtggcccgtaagctggaccactacattgaatatggagctgctgtgctggtcctgctggtgtgtgtgtttgggctggctgcacactggatggcctgcatctggtacagcattggggactatgagatctttgacgaggacaccaagacaatccgcaacaacagctggctgtaccaactagcgatggacattggcaccccttaccagtttaatgggtctggctcagggaagtgggaaggtggtcccagcaagaattctgtctacatctcctcgttgtatttcacaatgaccagcctcaccagtgtgggctttgggaacatcgccccatccacagacattgagaagatctttgcagtggccatcatgatgattggctgtaagtatgacagtgctggggtggggttggccatctcttctgttagctggaaacagggaaatggctacagtgccagcaggatcaggagaataataacttaaaacaaggaagagtttttttaagactaggcttacagttaccctgataattaaagcagtatatgcttactgcaaaaaaatttagaaaatacaaaagagtgcaaagtagaaagtaaagactatccataattctgcttttcagagataactactaatactgttggtgtcttctcttacagactattttctttgcatatctgaatacatatagatttttataaacttaaaatgagatcttgctgcatacgcactttagtaaactactcatagaacagtgaattatggaagtcttttcatgtcaatttttttctttttaataaaaattgtatatatttaaagtatgaaatgagattttgatatagtgaaatgattatgacagcaaagcaaattaacatatccattcctttacatcattaccttttttttggtgaaagcacttgaaatctgctctctcagcaaatttcctgtaggcattacagtattattaactatagccgtcatgctacatgtcctacatgtcaatttgaacatagctgtagcttggcatatagtctaatgtagtatgagaaaaagaatgtatgaaaaatgaatgcaaaacatctcattaattgtattttatattgattatatattgaaat

SEQ ID NO: 10458 - DNA, 1948 bp, Homo sapiens
  source 1..1948: mol_type = unassigned DNA
ggggcgcttcgagccgggactgcgtgcgggccccgaggccagtttcctgctgtcgtaagaagccgcgccaggacgcccgccggaccccgagctgctgggaggatgaccatggctgggggcaggaggggactagtggcccctcaaaacacgtttctggagaatattgttcggcggtccaatgatactaattttgtgttggggaatgctcagatagtggactggcctattgtgtacagcaatgatggattttgcaagctgtctggctatcacagggcagaagtgatgcaaaaaagcagcacctgcagttttatgtatggggagctgactgataaagacacgattgaaaaagtgcggcaaacatttgagaactatgagatgaattcctttgaaattctgatgtacaagaagaacaggacacctgtgtggttctttgtgaaaattgctccaattcgaaacgaacaggataaagtggttttatttctttgcactttcagtgacataacagctttcaaacagccaattgaggatgattcatgtaaaggctgggggaagtttgctcggctgacaagagcactgacaagcagcaggggtgtcctgcagcagctggctccaagcgtgcaaaaaggcgagaatgtccacaagcactcccgcctggcagaggtcctacagctgggctcagacatccttccccagtacaagcaagaggcaccaaagactccccctcacatcatcttacattattgtgtttttaagaccacgtgggattggatcatcttgatcttgaccttctatacagccatcttggtcccttataatgtctccttcaaaaccaggcagaataatgtggcctggctggttgttgatagcatcgtggatgttatctttttggtggacattgtgctcaattttcataccacctttgttggaccagcaggggaggtgatttctgaccccaaacttatccgcatgaactacctgaagacgtggtttgtgattgaccttctgtcctgtttgccatatgatgtcatcaacgcttttgagaacgtggatgagggcatcagcagcctgttcagctctctaaaagttgtccggctgctccgtcttgggcgagtggcccgtaagctggaccactacattgaatatggagctgctgtgctggtcctgctggtgtgtgtgtttgggctggctgcacactggatggcctgcatctggtacagcattggggactatgagatctttgacgaggacaccaagacaatccgcaacaacagctggctgtaccaactagcgatggacattggcaccccttaccagtttaatgggtctggctcagggaagtgggaaggtggtcccagcaagaattctgtctacatctcctcgttgtatttcacaatgaccagcctcaccagtgtgggctttgggaacatcgccccatccacagacattgagaagatctttgcagtggccatcatgatgattggctgtaagtatgacagtgctggggtggggttggccatctcttctgttagctggaaacagggaaatggctacagtgccagcaggatcaggagaataataacttaaaacaaggaagagtttttttaagactaggcttacagttaccctgataattaaagcagtatatgcttactgcaaaaaaatttagaaaatacaaaagagtgcaaagtagaaagtaaagactatccataattctgcttttcagagataactactaatactgttggtgtcttctcttacagactattttctttgcatatctgaatacatatagatttttataaacttaaaatgagatcttgctgcatacgcactttagtaaactactcatagaacagtgaattatggaagtcttttcatgtcaatttttttctttttaataaaaattgtatatatttaaagtatgaaatgagattttgatatagtgaaa

SEQ ID NO: 10459 - DNA, 711 bp, Homo sapiens
  source 1..711: mol_type = unassigned DNA
atcatcttacattattgtgtttttaagaccacgtgggattggatcatcttgatcttgaccttctatacagccatcttggtcccttataatgtctccttcaaaaccaggcagaataatgtggcctggctggttgttgatagcatcgtggatgttatctttttggtggacattgtgctcaattttcataccacctttgttggaccagcaggggaggtgatttctgaccccaaacttatccgcatgaactacctgaagacgtggtttgtgattgaccttctgtcctgtttgccatatgatgtcatcaacgcttttgagaacgtggatgaggttagtgcctttatgggtgatccagggaagattggttttgctgatcagattccaccaccactggaggggagagagagtcagcagcctgttcagctctctaaaagttgtccggctgctccgtcttgggcgagtggcccgtaagctggaccactacattgaatatggagctgctgtgctggtcctgctggtgtgtgtgtttgggctggctgcacactggatggcctgcatctggtacagcattggggactatgagatctttgacgaggacaccaagacaatccgcaacaacagctggctgtaccaactagcgatggacattggcaccccttaccagtttaatgggtctggctcagggaagtgggaaggtggtcccagcaagaattc

SEQ ID NO: 10460 - DNA, 614 bp, Homo sapiens
  source 1..614: mol_type = unassigned DNA
tctgatgtacaagaagaacaggacacctgtgtggttctttgtgaaaattgctccaattcgaaacgaacaggataaagtggttttatttctttgcactttcagtgacataacagctttcaaacagccaattgaggatgattcatgtaaaggctgggggaagtttgctcggctgacaagagcactgacaagcagcaggggtgtcctgcagcagctggctccaagcgtgcaaaaaggcgagaatgtccacaagcactcccgcctggcagagatggagtcttggtctgtcacccaggctggagcacagtggcgtgatcttggctcagtgcaacctctgcctcccaggttcaagggattctcctgcctcagcctcctgagtagccagaactacaggcatgcgctgctacaccgggctaatttttgtatttttagtagagaagggttttcattatgttagccagggtggtctcgaactcccgacttcaagtgatctgctcaccttggcctctcaaagtgctaggattacaggtgtgagccactgcaccgggccgaaccatctcttctttatcgccccctttcctctctatctctccctccactaccatctcctctttagc

SEQ ID NO: 10461 - DNA, 3445 bp, Homo sapiens; identical to SEQ ID NO: 10444
  source 1..3445: mol_type = unassigned DNA

SEQ ID NO: 10462 - DNA, 3479 bp, Homo sapiens; identical to SEQ ID NO: 10445
  source 1..3479: mol_type = unassigned DNA

SEQ ID NO: 10463 - DNA, 3831 bp, Homo sapiens; identical to SEQ ID NO: 10446
  source 1..3831: mol_type = unassigned DNA

SEQ ID NO: 10464 - DNA, 8172 bp, Homo sapiens; identical to SEQ ID NO: 10447
  source 1..8172: mol_type = unassigned DNA

SEQ ID NO: 10465 - DNA, 8075 bp, Homo sapiens; identical to SEQ ID NO: 10448
  source 1..8075: mol_type = unassigned DNA

SEQ ID NO: 10466 - DNA, 4173 bp, Homo sapiens; identical to SEQ ID NO: 10449
  source 1..4173: mol_type = unassigned DNA

SEQ ID NO: 10467 - DNA, 4592 bp, Homo sapiens; identical to SEQ ID NO: 10450
  source 1..4592: mol_type = unassigned DNA

SEQ ID NO: 10468 - DNA, 1214 bp, Homo sapiens; identical to SEQ ID NO: 10451
  source 1..1214: mol_type = unassigned DNA

SEQ ID NO: 10469 - DNA, 3740 bp, Homo sapiens; identical to SEQ ID NO: 10452
  source 1..3740: mol_type = unassigned DNA

SEQ ID NO: 10470 - DNA, 3027 bp, Homo sapiens; identical to SEQ ID NO: 10453
  source 1..3027: mol_type = unassigned DNA

SEQ ID NO: 10471 - DNA, 1818 bp, Homo sapiens; identical to SEQ ID NO: 10454
  source 1..1818: mol_type = unassigned DNA

SEQ ID NO: 10472 - DNA, 1365 bp, Homo sapiens; identical to SEQ ID NO: 10455
  source 1..1365: mol_type = unassigned DNA

SEQ ID NO: 10473 - DNA, 1817 bp, Homo sapiens; identical to SEQ ID NO: 10456
  source 1..1817: mol_type = unassigned DNA

SEQ ID NO: 10474 - DNA, 2401 bp, Homo sapiens; identical to SEQ ID NO: 10457
  source 1..2401: mol_type = unassigned DNA

SEQ ID NO: 10475 - DNA, 1948 bp, Homo sapiens; identical to SEQ ID NO: 10458
  source 1..1948: mol_type = unassigned DNA

SEQ ID NO: 10476 - DNA, 711 bp, Homo sapiens; identical to SEQ ID NO: 10459
  source 1..711: mol_type = unassigned DNA

SEQ ID NO: 10477 - DNA, 614 bp, Homo sapiens; identical to SEQ ID NO: 10460
  source 1..614: mol_type = unassigned DNA

SEQ ID NO: 10478 - DNA, 11290 bp, Homo sapiens
  source 1..11290: mol_type = unassigned DNA
gttcccgagccccgtgtgcggcaccgccacagtctgggcagcggcggccgggggagcgctactaccatgaactgcctggtcctcctccccagagctgctcatccgggtcgggctggagacacagtcaggggaccccgtcgccgccgccgcgccccctcttctttcggctcaatcttctcttccaccttttcctcctcttcctccaccttctttgcctgcatccccccctcccccgccgcggatcctggccgctgctctccagacccaggatgccggggggcaagagagggctggtggcaccgcagaacacatttttggagaacatcgtcaggcgctccagtgaatcaagtttcttactgggaaatgcccagattgtggattggcctgtagtttatagtaatgacggtttttgtaaactctctggatatcatcgagctgacgtcatgcagaaaagcagcacttgcagttttatgtatggggaattgactgacaagaagaccattgagaaagtcaggcaaacttttgacaactacgaatcaaactgctttgaagttcttctgtacaagaaaaacagaacccctgtttggttttatatgcaaattgcaccaataagaaatgaacatgaaaaggtggtcttgttcctgtgtactttcaaggatattacgttgttcaaacagccaatagaggatgattcaacaaaaggttggacgaaatttgcccgattgacacgggctttgacaaatagccgaagtgttttgcagcagctcacgccaatgaataaaacagaggtggtccataaacattcaagactagctgaagttcttcagctgggatcagatatccttcctcagtataaacaagaagcgccaaagacgccaccacacattattttacattattgtgcttttaaaactacttgggattgggtgattttaattcttaccttctacaccgccattatggttccttataatgtttccttcaaaacaaagcagaacaacatagcctggctggtactggatagtgtggtggacgttatttttctggttgacatcgttttaaattttcacacgactttcgtggggcccggtggagaggtcatttctgaccctaagctcataaggatgaactatctgaaaacttggtttgtgatcgatctgctgtcttgtttaccttatgacatcatcaatgcctttgaaaatgtggatgagggaatcagcagtctcttcagttctttaaaagtggtgcgtctcttacgactgggccgtgtggctaggaaactggaccattacctagaatatggagcagcagtcctcgtgctcctggtgtgtgtgtttggactggtggcccactggctggcctgcatatggtatagcatcggagactacgaggtcattgatgaagtcactaacaccatccaaatagacagttggctctaccagctggctttgagcattgggactccatatcgctacaataccagtgctgggatatgggaaggaggacccagcaaggattcattgtacgtgtcctctctctactttaccatgacaagccttacaaccataggatttggaaacatagctcctaccacagatgtggagaagatgttttcggtggctatgatgatggttggctctcttctttatgcaactatttttggaaatgttacaacaattttccagcaaatgtatgccaacaccaaccgataccatgagatgctgaataatgtacgggacttcctaaaactctatcaggtcccaaaaggccttagtgagcgagtcatggattatattgtctcaacatggtccatgtcaaaaggcattgatacagaaaaggtcctctccatctgtcccaaggacatgagagctgatatctgtgttcatctaaaccggaaggtttttaatgaacatcctgcttttcgattggccagcgatgggtgtctgcgcgccttggcggtagagttccaaaccattcactgtgctcccggggacctcatttaccatgctggagaaagtgtggatgccctctgctttgtggtgtcaggatccttggaagtcatccaggatgatgaggtggtggctattttagggaagggtgatgtatttggagacatcttctggaaggaaaccacccttgcccatgcatgtgcgaacgtccgggcactgacgtactgtgacctacacatcatcaagcgggaagccttgctcaaagtcctggacttttatacagcttttgcaaactccttctcaaggaatctcactcttacttgcaatctgaggaaacggatcatctttcgtaagatcagtgatgtgaagaaagaggaggaggagcgcctccggcagaagaatgaggtgaccctcagcattcccgtggaccacccagtcagaaagctcttccagaagttcaagcagcagaaggagctgcggaatcagggctcaacacagggtgaccctgagaggaaccaactccaggtagagagccgctccttacagaatggagcctccatcaccggaaccagcgtggtgactgtgtcacagattactcccattcagacgtctctggcctatgtgaaaaccagtgaatcccttaagcagaacaaccgtgatgccatggaactcaagcccaacggcggtgctgaccaaaaatgtctcaaagtcaacagcccaataagaatgaagaatggaaatggaaaagggtggctgcgactcaagaataatatgggagcccatgaggagaaaaaggaagactggaataatgtcactaaagctgagtcaatggggctattgtctgaggaccccaagagcagtgattcagagaacagtgtgaccaaaaacccactaagaaaaacagattcttgtgacagtggaattacaaaaagtgaccttcgtttggataaggctggggaggcccgaagtccgctagagcacagtcccatccaggctgatgccaagcaccccttttatcccatccccgagcaggccttacagaccacactgcaggaagtcaaacacgaactcaaagaggacatccagctgctcagctgcagaatgactgccctagaaaagcaggtggcagaaattttaaaaatactgtcggaaaaaagcgtaccccaggcctcatctcccaaatcccaaatgccactccaagtacccccccagataccatgtcaggatatttttagtgtctcaaggcctgaatcacctgaatctgacaaagatgaaatccacttttaatatatatacatatatatttgttaatatattaaaacagtatatacatatgtgtgtatatacagtatatacatatatatattttcacttgctttcaagatgatgaccacacatggattttgatatgtaaatattgcatgtccagctggattctggcctgccaaagaagatgatgattaaaaacatagatattgcttgtatattatgcagttgactgcatgcacactttacatttatttataatctctattctataataaaagagtatgatttttgttacccaaggcaatgtaatatttgaagaatcagggtccaacctgccaatgttgccatgacaaatttgatctcaggctgagtatgtatatcgagctatcattttctcactgttctgttaagttaaaagtatagattaatgccaaggaagagttcagtcttttaaactattagtaccatgttatgatctctttccataggatatttttctgtaacttagtgttaggttcttttcccctacaggcagtgtttgctccatttaaatgactgtttagttgcctaagtcagataagagtgtgggatattgaaaacttattgctatgggttttgtgcatgaattacatttttgatcaactatacctctcgttttttaacattatacttagatagtaatcattagctcttatgtaaggaaatccctactccctccttcttggagaacagctgccatcttgtaagctgacattatcaacatcataaatactaaactattaatatagagtatgttattatagaaacactgcaccacagggtataagggccttttgacaattcatgtaagagatgctgaatttccaaagctgataaatgctctaaatttgtatttccaaaacatgttcaagagtgacattgaaaggcttgttagcaaagaaacatacaaaaaataaagcatttaagtaatcatatcaaaatgctaactattatggtataaaataaaaaagaatgtaaacagatagataaatttttgtggcatgtatataacttagaaagaatgaaacactggtacggattgttgacacatgaatcctagtgtttgtagtgataacacatgaaatgtggtaaaacaaacaaaccaaccaaccaagaagtagacattaagttgctcgactcagataactgcttttctatcattttattgtggttatagttttttaaagctttttgcacacagttctactgctggacttctgctgagttgattcaataagctattgtggctcaggcaggtccatttgtgaaagggggatactaaagactgaattttagtcttttgaattcaaatcctctttgtagaaagtgcctattatcaagtttttaaaaaaagtcacaaagagttgtcctgtatatagctagtcccttaaatgataaggattgagaataaaatacacattcacttgtaagaacccaggagaacttatttcttttgactaaactgtattttaggaagtcgttcagggaagcatacttttcagtcagtgcatgcacagcatttaatatggggagcaggggagttagtgtttgcatgaagttgaaaaaaatgtgtgagtaatttatatattacgggaccatctgtacatatatgttaacaatatgcaaaagatgatggcaaaatcgaaggagatatcttgatctattatacccatttgtatgagcttttctatctcccagtattcccaaccaaagccactagaactgaaagacatgttatcacattcagacttgagaagtgcaaaacagtgatttataaaaacagttgctattttagaatttctattgaacttcacatgcccacaagatgtgcctctttaatctaggagtctcaaaacatatgagccatgggctccattttcctttctttatgcgtataacttccattaaccataatggaagttttcaggggaacacgtctccatgtaatgctacaatatctacctaccacaaacacaagaaaatgaaataattatggagtaaagaatcagccttgaaattggaattttgttgctttcatggtgaggatgatatctttttcgtgacctctgacatttattgaatttcagggtatttttctatttgtttaagtcaagtttggcttaagcttttaaaggtgaatgtgtggttaaaataagaatctgattatagaagttgttagtttaactttagccagtgcttcaaaactaactattggtgtaaagctataaaagaatgactgtgaacaacatgatgatttgaagttctaattcatggctttgcatattagtggtgcaaatatttactgtgttctgacattgacgtagagtttcacctaatcgacctacaatgttattgttcatatatgtgagaaacataatggttttgaattactccagattgttaggaaggagggaaagtatcaattgtttaattatggtgcagttatcatagtgtcttttcagccatctctgttctctgtgtgcatgatatgaagaggtgctgaatgcaccctgctgttttcagcaggaatgcatgttttcagcaaacattgtatatagagtagtcttttaggttcccagattccacaaatcttagcagttgaatttactcagatttgaatgaagggagaatatttgctttaatacatgcaataatgataaaatcatgttctatgttgcctcaactagcacatagacagtagatgctcttttgaggaccagataactgcatgttttattcctacactgtatagatgctcttggtgcatccagaataaaaattttaatattatatttctaaataatatattaataggagtaaatggatatgtattagaaatccaaacattttccaaagcaatttacacaccttcaatatttttctatgatgttattaataggtaagatcagatgctgtatcctcgacaggtggttgtaacaaaatagcaaaagtcaaattagaatggaaatgtgagtgatgtatcataatggcaggttttatcagtctgtatcaggatattgttgcactaaatgtgatctagcagatggaagagattatgataaaaagcaaataggcacacaaaagccagatgacaataccaaagctatatgaatggtactgaaaatggttcaggcacagtggttgaattgaatgacgtggttgaatacaggcccatgcttcattgttaaaatggaaaatttttatgacactagttgcatcttgcattaagtataggactaaaaatgtcctaagtattttttacaaacaactttatgtatatcagagaaaaaaatggaaaatctggggtttgaaattgctctagaaaaaatgtgtacttctgttgtactcaacactttaataggaaaattagttgtgaccgctaactaaagtaccattatcaaaattaaccttattggagcccaaatgaaaatcacattttcccttctgtttaaggagattttgttcaccctgtgatatctggtccatttgatatcttattttaaatagctaaagtcatttggaattttttttaatattagccttcagagcagtgactgttttgaagtgtgcagtggcagatatttgtgaaattattcatcatatttctaatgaattccactatcttgtataatttttatcttttaagcaattttctatgagtttgttttccaaaattccatgtaggtaatgagaacatttatctagaatgtgcatatcatacatggataactttcaaatatgaatattttataatcatgtgaatgttgtgctataattttttctattaggtgtaaaagtatttctcttctcatcttaatggaaagggggaaaagacaaaaacagtcttttggaaaacaccttaagtcttagtatctgagctttgtcttgtgttctgaatttagctttaccacaaactagaagtgtaattatgggcaagttaacctttcctagtgtaccaaatggtaccatttccccgccaataaataagaaaacaaagataacagctgttgcttccttatatcaacatgctattggtcaatgaaaaaattatctttcttgcaggtgaaaatcacattatgacaagtgatcactttttcattctttcatagaagagtatccacgatgtactctctatcaaaatattcttctagattttagaagagatttcagggattgacggtgatgtgatttttatctaaatattcttttaggttttagaagagatttatctggtcagaggttaatggagagaggcatagtttgctagtggcaggtaagcataaaacttcatacttatgtgggaatttagaactacaaatcaaataaacgtggaaagaatgaagctcctttgacagaagagagagagaagagaaagataggtaaattttgtgatttttcttatttctacttaatcatactgcttggcagaaattctcaattttgtgaaaaaattggtaagtggccaaggtatagagtagttcaccaatgtatctatgtaacaaaactgaatgtgtaccccttaaatttatacaaataaaaactagagtagttcatccttcaactttttatattaaaataatcatgacctgttcaagatatatgattccacatgggcagacactcttataacaaaattcttaactatgtgctatgtgttgtaagttttggcctatattctgacttgagattttctatcacttcatttgtaggataagacccctgtgtttgcattctttatgagggtcaggaccactgaggatttggactgggaactagaaagatgatgaaggcaagggttgagaaaagactgattagaatctatctgcttctttactcttaggcttagaagttaaataagttaactaagcttatatttaccaaggtctcactatgataagcattttatttaggttatcaaatttaattcttgcagcaaccccatgaaggtataggttaaggaacttgtccaggatggcatacttgttacatggtaaagttgagtttctaacacaggcagtcagaccttagggagaaacctttattttgtagaatactgacattacaagaactatctagttcaaccatctagtctaggtttttccagacacatacttttaaagatttcttaaaataattcttaaaaattgcactcgataatgtgaatgtaaatgtttggtttttcttgataggtcagagtcaatgacagagtttgaaatcatactgtcttaagcaaaaggtgccctgtcccaacagtggaattttcctttacttctcctaacagttgaaagacatcggccaaagtaaactgtcaaatgtggtatgtttgatatatggtcactggtatcaacattttcttttccagttgaattttaacctaaagaggtaatgcctaatggttaaggaaagcaagagtcattcaggattttttttctataatttctttttctttttaatagtgggatttggatgagactccagaatttatttttaaaatttattttttgactcattgggttttaagtagattattcagatatttttattgattgcactgatgttggcttcttggccaaaccactattaaatacattatccaaatgaactatttctgtttagaatggcaacttgtatccttatttccaaaattaatgagctcacagtatgtatatttacttcagagagtttcaataattttctctaatgaaaaaatgttaattttctgaatgtgatttatttgttctaccctttgagatttctaaagcaagtgtcttgagataaggagaaaaaaacaagatattacaacactacatgctggaatcttcagcccaaaccatcttgttttcacttggctaataactgagccagaggtaatcatagaaaggaagaatcctacttttaaaataatgactgtgaaggaccccactgacaccatccaaagctttttatagtcagctcacttccatcctggcttttacattaccactgcatgattatttaaatgaggtcatgtcttgtactacttgtaaaggcacttggtcaaagaagagtaaaccaaaaagtgcagcttatgaccagagttataactgaggaaaaaggagtgtggagaagggacagcagttgcttccttttaatgagttttctgtatgtggtgccttttaaatagcttttgtttatttgtttttaagatgacacattgtcattaaggttttaacaaaaacctttggaagcagtttgaaagcttgtcaaatgctggggccttctttagaaataagtgttctcccaccaaccaatgagtttagaacctctggttctgacctacaaacccaatcccctaagcacttggctggttgggctgcattttgatgggaggaaacaaaaagatctgatcactctctctcattcatgcggaatcactgactgttgaatgaccaaagcagtcaaagccaaaatattcaccttgaagcttcaataaaccagattgagtatccataataactaatttaagtaattttatccccattctctgctaaatcatatttcataatataaaatgtaaccacttccctctatccaaagcttttggtcagactctccattgagttagagaaattggactttggcaaaaagcaacataaagattattgttgttcctagaaccattgttgccatggacccctcatttgctcctcaactttttcaaccaaattatagcgggaaagattcctgatgaagccaagactgcaaacaggaagaatacctagctagtaaactatgcaaaatcacaacaaagattcatttataattccatgttacagtgtttgatagtcctaagtatttaatattggtatattatgtcacagccatgaactgtcaacttacacaaaatccaaacgcactttcatttaaaatcaagattagcctatttcattttcaggaaaaaacagttgtcagaattgcttttttgacctctgcagggatgttttcacattgctattcttatgaccctttatcagagagggaataagtgtagtgttcactttcatctccttagggttgactgcaccagcatcttccatcaagcagtcgccttccaccttagaacctgttcacagttaataaagcaagggggaatatgcatttcatattaggaacagatttcttaagtgattgttatgaaaagtggaaaccagtttagaaccatttttttaccctaaaacatccattgtagtttgttgaaagagcaatgacttttagaagtgcttggtactcaaacaacacaaaatgtgcagattcacgatatattgaaaattatagagttctttttagtctatgttctagtgactttgtttacactagttgtggcattttgtatactacaatgtaaattctactataacactaatgttactatgggaattaattttgcaacttcttaaatgtttttgtcactgcaaccatattggtgagatattgggggtattaaaaatgcctctgcctttaagggttaattcaccagaaataattgattcatgcattgacaaaggaaacaatgcaaaaatttcatgtgggatgtttttaataccattatgctaagcagtacttgttggcttttttcaaaatctgattcatgctaagcagatccttttttctacttaaacaaagatactgcaatgtataatatagaaattttgtatgtactgttgacctatcacctgactgctgacaggatgtgtgaaaatattttaactttgtgactttagggtcaattatgaaacaattgtgatcaaaattcagttgcttctgggaagtttgtggtgattatcactttatttaacgtttgttctcaaaaaatggtcattttgaaaagtgaattggcaggtggaagcttttagcccaaaagaaatctgggtttcagcacaataaactgtatttcatcagggaggactaactttgctttttttcacactttatttaaatgtggatattttttcatgatacagaataaaatgtgcattttatggaattaatttgaa

SEQ ID NO: 10479 - DNA, 2711 bp, Homo sapiens
  source 1..2711: mol_type = unassigned DNA
atgccggggggcaagagagggctggtggcaccgcagaacacatttttggagaacatcgtcaggcgctccagtgaatcaagtttcttactgggaaatgcccagattgtggattggcctgtagtttatagtaatgacggtttttgtaaactctctggatatcatcgagctgacgtcatgcagaaaagcagcacttgcagttttatgtatggggaattgactgacaagaagaccattgagaaagtcaggcaaacttttgacaactacgaatcaaactgctttgaagttcttctgtacaagaaaaacagaacccctgtttggttttatatgcaaattgcaccaataagaaatgaacatgaaaaggtggtcttgttcctgtgtactttcaaggatattacgttgttcaaacagccaatagaggatgattcaacaaaaggttggacgaaatttgcccgattgacacgggctttgacaaatagccgaagtgttttgcagcagctcacgccaatgaataaaacagaggtggtccataaacattcaagactagctgaagttcttcagctgggatcagatatccttcctcagtataaacaagaagcgccaaagacgccaccacacattattttacattattgtgcttttaaaactacttgggattgggtgattttaattcttaccttctacaccgccattatggttccttataatgtttccttcaaaacaaagcagaacaacatagcctggctggtactggatagtgtggtggacgttatttttctggttgacatcgttttaaattttcacacgactttcgtggggcccggtggagaggtcatttctgaccctaagctcataaggatgaactatctgaaaacttggtttgtgatcgatctgctgtcttgtttaccttatgacatcatcaatgcctttgaaaatgtggatgagggaatcagcagtctcttcagttctttaaaagtggtgcgtctcttacgactgggccgtgtggctaggaaactggaccattacctagaatatggagcagcagtcctcgtgctcctggtgtgtgtgtttggactggtggcccactggctggcctgcatatggtatagcatcggagactacgaggtcattgatgaagtcactaacaccatccaaatagacagttggctctaccagctggctttgagcattgggactccatatcgctacaataccagtgctgggatatgggaaggaggacccagcaaggattcattgtacgtgtcctctctctactttaccatgacaagccttacaaccataggatttggaaacatagctcctaccacagatgtggagaagatgttttcggtggctatgatgatggttggctctcttctttatgcaactatttttggaaatgttacaacaattttccagcaaatgtatgccaacaccaaccgataccatgagatgctgaataatgtacgggacttcctaaaactctatcaggtcccaaaaggccttagtgagcgagtcatggattatattgtctcaacatggtccatgtcaaaaggcattgatacagaaaaggtcctctccatctgtcccaaggacatgagagctgatatctgtgttcatctaaaccggaaggtttttaatgaacatcctgcttttcgattggccagcgatgggtgtctgcgcgccttggcggtagagttccaaaccattcactgtgctcccggggacctcatttaccatgctggagaaagtgtggatgccctctgctttgtggtgtcaggatccttggaagtcatccaggatgatgaggtggtggctattttagatcatctttcgtaagatcagtgatgtgaagaaagaggaggaggagcgcctccggcagaagaatgaggtgaccctcagcattcccgtggaccacccagtcagaaagctcttccagaagttcaagcagcagaaggagctgcggaatcagggctcaacacagggtgaccctgagaggaaccaactccaggtagagagccgctccttacagaatggagcctccatcaccggaaccagcgtggtgactgtgtcacagattactcccattcagacgtctctggcctatgtgaaaaccagtgaatcccttaagcagaacaaccgtgatgccatggaactcaagcccaacggcggtgctgaccaaaaatgtctcaaagtcaacagcccaataagaatgaagaatggaaatggaaaagggtggctgcgactcaagaataatatgggagcccatgaggagaaaaaggaagactggaataatgtcactaaagctgagtcaatggggctattgtctgaggaccccaagagcagtgattcagagaacagtgtgaccaaaaacccactaagaaaaacagattcttgtgacagtggaattacaaaaagtgaccttcgtttggataaggctggggaggcccgaagtccgctagagcacagtcccatccaggctgatgccaagcaccccttttatcccatccccgagcaggccttacagaccacactgcaggaagtcaaacacgaactcaaagaggacatccagctgctcagctgcagaatgactgccctagaaaagcaggtggcagaaattttaaaaatactgtcggaaaaaagcgtaccccaggcctcatctcccaaatcccaaatgccactccaagtacccccccagataccatgtcaggata

SEQ ID NO: 10480 - DNA, 2490 bp, Homo sapiens
  source 1..2490: mol_type = unassigned DNA
tgagcaaatgaaagacaccaacaaaatccaacacataaagattcacacttgaaacagattaatcaggaatcaagtttcttactgggaaatgcccagattgtggattggcctgtagtttatagtaatgacggtttttgtaaactctctggatatcatcgagctgacgtcatgcagaaaagcagcacttgcagttttatgtatggggaattgactgacaagaagaccattgagaaagtcaggcaaacttttgacaactacgaatcaaactgctttgaagttcttctgtacaagaaaaacagaacccctgtttggttttatatgcaaattgcaccaataagaaatgaacatgaaaaggtggtcttgttcctgtgtactttcaaggatattacgttgttcaaacagccaatagaggatgattcaacaaaaggttggacgaaatttgcccgattgacacgggctttgacaaatagccgaagtgttttgcagcagctcacgccaatgaataaaacagaggtggtccataaacattcaagactagctgaagttcttcagctgggatcagatatccttcctcagtataaacaagaagcgccaaagacgccaccacacattattttacattattgtgcttttaaaactacttgggattgggtgattttaattcttaccttctacaccgccattatggttccttataatgtttccttcaaaacaaagcagaacaacatagcctggctggtactggatagtgtggtggacgttatttttctggttgacatcgttttaaattttcacacgactttcgtggggcccggtggagaggtcatttctgaccctaagctcataaggatgaactatctgaaaacttggtttgtgatcgatctgctgtcttgtttaccttatgacatcatcaatgcctttgaaaatgtggatgagggaatcagcagtctcttcagttctttaaaagtggtgcgtctcttacgactgggccgtgtggctaggaaactggaccattacctagaatatggagcagcagtcctcgtgctcctggtgtgtgtgtttggactggtggcccactggctggcctgcatatggtatagcatcggagactacgaggtcattgatgaagtcactaacaccatccaaatagacagttggctctaccagctggctttgagcattgggactccatatcgctacaataccagtgctgggatatgggaaggaggacccagcaaggattcattgtacgtgtcctctctctactttaccatgacaagccttacaaccataggatttggaaacatagctcctaccacagatgtggagaagatgttttcggtggctatgatgatggttggctctcttctttatgcaactatttttggaaatgttacaacaattttccagcaaatgtatgccaacaccaaccgataccatgagatgctgaataatgtacgggacttcctaaaactctatcaggtcccaaaaggccttagtgagcgagtcatggattatattgtctcaacatggtccatgtcaaaaggcattgatacagaaaaggtcctctccatctgtcccaaggacatgagagctgatatctgtgttcatctaaaccggaaggtttttaatgaacatcctgcttttcgattggccagcgatgggtgtctgcgcgccttggcggtagagttccaaaccattcactgtgctcccggggacctcatttaccatgctggagaaagtgtggatgccctctgctttgtggtgtcaggatccttggaagtcatccaggatgatgaggtggtggctattttagggaagggtgatgtatttggagacatcttctggaaggaaaccacccttgcccatgcatgtgcgaacgtccgggcactgacgtactgtgacctacacatcatcaagcgggaagccttgctcaaagtcctggacttttatacagcttttgcaaactccttctcaaggaatctcactcttacttgcaatctgaggaaacggggatggttctccatggcaaacgctctgtgaagggtgacctgctgggtgtgaaactgctgcacgacttcctacttcacccattcatctatccgagttttcacggagtccaggagaaagtataaaagttaccttgaggagcaggagagtggaatggttaagactgtttggaatctgaccccttggatttgcatcctggacacacagttgtgtgacctaagggaaaccacttaaactctttatgcctcaatttgcttctctgtgataaaagaataatatgacctgtgtcctacagtagagaataataggtcctagctcgtaaaatgttctcattccatgacacttaaatgagaaaatacgtgtgtggaagtgaccactttgctatatacagatattttattatcattttacaatgccattattttgttccatagtcaaaagtaaaataaaacaaatgtcaatttgtcttattctaatcct

SEQ ID NO: 10481 - DNA, 1849 bp, Homo sapiens
  source 1..1849: mol_type = unassigned DNA
acgtcacgctatttttttttttttttttttttgtatttttagtagagacggagtttcacgtgttagccaggatggtctggatcttctgaccttgtgatctgcccgcctcggcctcccaaagtgctgggattacaggcgtgagccaccgcgcccggccgaagactgaatttttgagcaaatgaaagacaccaacaaaatccaacacataaagattcacacttgaaacagattaatcaggaatcaagtttcttactgggaaatgcccagattgtggattggcctgtagtttatagtaatgacggtttttgtaaactctctggatatcatcgagctgacgtcatgcagaaaagcagcacttgcagttttatgtatggggaattgactgacaagaagaccattgagaaagtcaggcaaacttttgacaactacgaatcaaactgctttgaagttcttctgtacaagaaaaacagaacccctgtttggttttatatgcaaattgcaccaataagaaatgaacatgaaaaggtggtcttgttcctgtgtactttcaaggatattacgttgttcaaacagccaatagaggatgattcaacaaaaggttggacgaaatttgcccgattgacacgggctttgacaaatagccgaagtgttttgcagcagctcacgccaatgaataaaacagaggtggtccataaacattcaagactagctgaagttcttcagctgggatcagatatccttcctcagtataaacaagaagcgccaaagacgccaccacacattattttacattattgtgcttttaaaactacttgggattgggtgattttaattcttaccttctacaccgccattatggttccttataatgtttccttcaaaacaaagcagaacaacatagcctggctggtactggatagtgtggtggacgttatttttctggttgacatcgttttaaattttcacacgactttcgtggggcccggtggagaggtcatttctgaccctaagctcataaggatgaactatctgaaaacttggtttgtgatcgatctgctgtcttgtttaccttatgacatcatcaatgcctttgaaaatgtggatgagggaatcagcagtctcttcagttctttaaaagtggtgcgtctcttacgactgggccgtgtggctaggaaactggaccattacctagaatatggagcagcagtcctcgtgctcctggtgtgtgtgtttggactggtggcccactggctggcctgcatatggtatagcatcggagactacgaggtcattgatgaagtcactaacaccatccaaatagacagttggctctaccagctggctttgagcattgggactccatatcgctacaataccagtgctgggatatgggaaggaggacccagcaaggattcattgtacgtgtcctctctctactttaccatgacaagccttacaaccataggatttggaaacatagctcctaccacagatgtggagaagatgttttcggtggctatgatgatggttggctgtaagtattttaattttttcattgaaaattattgttattggcaattttcctggctacaatctcagataggatgaaaacgaactactttgtttacagaaaggtatttaatccatcttatttgcaattgttttttttaatctaccttagaaaatagaaatgcaaaataatatattttactcttcaggacataataatgtgtgaaaaacatattaatgtgtgtacccagcagtgctctcttgaaggaaccaggaccagcatccagagaggtggcgtttcgcacattccatagattttgttggtaatgtgttaaattcc

SEQ ID NO: 10482 - DNA, 4113 bp, Homo sapiens
  source 1..4113: mol_type = unassigned DNA
caaagagcggctcgcgcgctggcctgggctctagccgaggagagatcccgggagaactccagagctccgggggagcgctcctcggaagaccggggccaacatgcctgtgcgcagggggcatgtggcaccacaaaatacatttctggggaccatcattcggaaatttgaagggcaaaataaaaaatttatcattgcaaatgccagagtgcagaactgtgccatcatttattgcaacgatgggttctgtgagatgactggtttctccaggccagatgtcatgcaaaagccatgcacctgcgactttctccatggacccgagaccaagaggcatgatattgcccaaattgcccaggcattgctggggtcagaagagaggaaagtggaggtcacctactatcacaaaaatgggtccacttttatttgtaacactcacataattccagtgaaaaaccaagagggcgtggctatgatgttcatcattaattttgaatatgtgacggataatgaaaacgctgccaccccagagagggtaaacccaatattaccaatcaaaactgtaaaccggaaattttttgggttcaaattccctggtctgagagttctcacttacagaaagcagtccttaccacaagaagaccccgatgtggtggtcatcgattcatctaaacacagtgatgattcagtagccatgaagcattttaagtctcctacaaaagaaagctgcagcccctctgaagcagatgacacaaaagctttgatacagcccagcaaatgttctcccttggtgaatatatccggacctcttgaccattcctctcccaaaaggcaatgggaccgactctaccctgacatgctgcagtcaagttcccagctgtcccattccagatcaagggaaagcttatgtagtatacggagagcatcttcggtccatgatatagaaggattcggcgtccaccccaagaacatatttagagaccgacatgccagcgaagacaatggtcgcaatgtcaaagggccttttaatcatatcaagtcaagcctcctgggatccacatcagattcaaacctcaacaaatacagcaccattaacaagattccacagctcactctgaatttttcagaggtcaaaactgagaaaaagaattcatcacctccttcttcagataaaaccattattgcacccaaggttaaagatcgaacacacaatgtgactgagaaagtgacccaggttctctctttaggagcagatgtcctacctgaatacaaactgcagacaccacgcatcaacaagtttacgatattgcactacagccctttcaaggcagtctgggactggcttatcctgctgttggtcatatacactgctatatttactccctactctgcagccttcctcctcaatgacagagaagaacagaaaagacgagaatgtggctattcttgtagccctttgaatgtggtagacttgattgtggatattatgtttatcatagatattttaataaacttcagaacaacatatgtaaatcagaatgaagaagtggtaagtgatcccgccaaaatagcaatacactacttcaaaggctggttcctgattgacatggttgcagcaattccttttgacttgctgatttttggatcaggttctgatgagacaacaacattaattggtcttttgaagactgcccgactcctccgtcttgtgcgcgtggccaggaaactggatcgatattcagaatatggcgctgctgttctaatgctcttaatgtgcatctttgccctgattgctcactggctggcttgcatttggtatgcgattgggaatgtagaaaggccttacctgactgacaaaatcggatggttggattccttaggacagcaaattgggaaacgttacaatgacagtgactcaagttctggaccatccattaaagacaaatacgtcacagcactttattttaccttcagcagtttaaccagtgtaggattcgggaatgtgtctcctaacacgaattcggagaaaatcttttcaatttgtgtcatgttgattggctcactaatgtatgcaagcatttttgggaatgtatctgcaattatccaaagactatactcgggaactgccaggtaccacatgcagatgctgcgagtaaaagagttcattcgctttcaccaaatccccaaccctctgaggcaacgtcttgaagaatatttccagcacgcatggacttacaccaatggcattgacatgaacatggtcctaaagggtttcccagaatgcttacaagcagacatttgtctacatctcaaccagacattgctgcaaaactgcaaagcctttcggggggcaagtaaaggttgccttagagctttggcaatgaagttcaaaaccacccatgcacctccaggagacaccctcgttcactgtggggatgtcctcactgcactttatttcttatccagaggctccattgaaattctcaaagatgacattgtggtggctattctgggaaaaaatgatatatttggagaaatggttcatctttatgccaaacctggaaagtctaatgcagatgtaagagccctcacatactgtgacttgcataagattcagcgagaagacttgttagaggttttggatatgtatcctgagttttctgatcactttctaacaaacctagagttgactttcaacctaaggcatgagagcgcaaaggctgatctcctacgatcacaatccatgaatgattcagaaggagacaactgtaaactaagaagaaggaaattgtcatttgaaagtgaaggagagaaagaaaacagtacaaatgatcctgaagactctgcagataccataagacattatcagagttccaagagacactttgaagagaaaaaaagcagatcctcatctttcatctcctccattgatgatgaacaaaagccgctcttctcaggaatagtagactcttctccaggaatagggaaagcatctgggctcgattttgaagaaacagtgcccacctcaggaagaatgcacatagataaaagaagtcactcttgcaaagatatcactgacatgcgaagctgggaacgagaaaatgcacatccccagcctgaagactccagtccatctgcacttcagcgagctgcctggggtatctctgaaaccgaaagcgacctcacctacggggaagtggaacaaagattagatctgctccaggagcaacttaacaggcttgaatcccaaatgaccactgacatccagaccatcttacagttgctgcagaaacaaaccactgtggtccccccagcctacagtatggtaacagcaggatcagaatatcagagacccatcatccagctgatgagaaccagtcaaccggaagcatccatcaaaactgaccgaagtttcagcccttcctcacaatgtcctgaatttctagaccttgaaaaatctaaacttaaatccaaagaatccctttcaagtggggtgcatctgaacacagcttcagaagacaacttgacttcacttttaaaacaagacagtgatctctctttagagcttcacctgcggcaaagaaaaacttacgttcatccaattaggcatccttctttgccagattcatccctaagcactgtaggaatcgtgggtcttcataggcatgtttctgatcctggtcttccagggaaataatcattttgtactatttactccacatacaatgtaagtgcttttaatggctgttttcctttttctatttaaatcctctctacttgactcaggggctcacaaggtaccattatatgcaaaagtactgtatattttcctaaattgaagcttgtaaggtaaaactgagcagttaggatgtaaatatacataagaacttttggttccaaatgttaaaactgccagcatctcacggcaccttattttttatttttattttttaaatcacatgcatgttaggaaactccaatttctcttgcatggagactcctatttactgcttttactaaaccagtacttcgttatgaaaatgccttccacgcaaataagaaaccaagggataaaactgttcatggatgcaactcaaattcagatgatcctcaactcat

SEQ ID NO: 10483 - DNA, 2434 bp, Homo sapiens
  source 1..2434: mol_type = unassigned DNA
ggccccctccggaaggtgaggggaatggattggactccggtggggaaagcgggtgtctagaagtggtgctaatgggaagagaattctggtttcaaaagaggatgctctgccacaaagagcggctcgcgcgctggcctgggctctagccgaggagagatcccgggagaactccagagctccgggggagcgctcctcggaagaccggggccaacatgcctgtgcgcagggggcatgtggcaccacaaaatacatttctggggaccatcattcggaaatttgaagggcaaaataaaaaatttatcattgcaaatgccagagtgcagaactgtgccatcatttattgcaacgatgggttctgtgagatgactggtttctccaggccagatgtcatgcaaaagccatgcacctgcgactttctccatggacccgagaccaagaggcatgatattgcccaaattgcccaggcattgctggggtcagaagagaggaaagtggaggtcacctactatcacaaaaatgggtccacttttatttgtaacactcacataattccagtgaaaaaccaagagggcgtggctatgatgttcatcattaattttgaatatgtgacggataatgaaaacgctgccaccccagagagggtaaacccaatattaccaatcaaaactgtaaaccggaaattttttgggttcaaattccctggtctgagagttctcacttacagaaagcagtccttaccacaagaagaccccgatgtggtggtcatcgattcatctaaacacagtgatgattcagtagccatgaagcattttaagtctcctacaaaagaaagctgcagcccctctgaagcagatgacacaaaagctttgatacagcccagcaaatgttctcccttggtgaatatatccggacctcttgaccattcctctcccaaaaggcaatgggaccgactctaccctgacatgctgcagtcaagttcccagctgtcccattccagatcaagggaaagcttatgtagtatacggagagcatcttcggtccatgatatagaaggattcggcgtccaccccaagaacatatttagagaccgacatgccagcgaagggccttttaatcatatcaagtcaagcctcctgggatccacatcagattcaaacctcaacaaatacagcaccattaacaagattccacagctcactctgaatttttcagaggtcaaaactgagaaaaagaattcatcacctccttcttcagataaaaccattattgcacccaaggttaaagatcgaacacacaatgtgactgagaaagtgacccaggttctctctttaggagcagatgtcctacctgaatacaaactgcagacaccacgcatcaacaagtttacgatattgcactacagccctttcaaggcagtctgggactggcttatcctgctgttggtcatatacactgctatatttactccctactctgcagccttcctcctcaatgacagagaagaacagaaaagacgagaatgtggctattcttgtagccctttgaatgtggtagacttgattgtggatattatgtttatcatagatattttaataaacttcagaacaacatatgtaaatcagaatgaagaagtggtaagtgatcccgccaaaatagcaatacactacttcaaaggctggttcctgattgacatggttgcagcaattccttttgacttgctgatttttggatcaggttctgatgagacaacaacattaattggtcttttgaagactgcccgactcctccgtcttgtgcgcgtggccaggaaactggatcgatattcagaatatggcgctgctgttctaatgctcttaatgtgcatctttgccctgattgctcactggctggcttgcatttggtatgcgattgggaatgtagaaaggccttacctgactgacaaaatcggatggttggattccttaggacagcaaattgggaaacgttacaatgacagtgactcaagttctggaccatccattaaagacaaatacgtcacagcactttattttaccttcagcagtttaaccagtgtaggattcgggaatgtgtctcctaacacgaattcggagaaaatcttttcaatttgtgtcatgttgattggctcactaatgtatgcaagcatttttgggaatgtatctgcaattatccaaagactatactcgggaactgccaggtaccacatgcagatgctgcgagtaaaagagttcattcgctttcaccaaatccccaaccctctgaggcaacgtcttgaagaatatttccagcacgcatggacttacaccaatggcattgacatgaacatggtatgtatgtctgttttccaaaatgaaagtgccgcaggcattatagtgatagccaaaatggaataaaagccggaatcaccagctttgaa

SEQ ID NO: 10484 - DNA, 1296 bp, Homo sapiens
  source 1..1296: mol_type = unassigned DNA
gcttagtaaacaagtaacatgaatgaagaaggccaggagtaaaaatatagagagaagtgaagactggaaaactggagaacatctttatcttatttgaagtggcccataacccttcagctctacttcatggcagggacattttattttcttccatatagacctaatattttgcaaataattgcctgccaatggttcttcaagtgtgagaccatcagcatcaccttgcaatgtgtttgaagtgcaagttcttgggccctacaccagaacaactgattcggaaacacagaaattcaccaagctgtgttttaacaaacacttcaggtcattctgatgcccaagaagggaaattttttgggttcaaattccctggtctgagagttctcacttacagaaagcagtccttaccacaagaagaccccgatgtggtggtcatcgattcatctaaacacagtgatgattcagtagccatgaagcattttaagtctcctacaaaagaaagctgcagcccctctgaagcagatgacacaaaagctttgatacagcccagcaaatgttctcccttggtgaatatatccggacctcttgaccattcctctcccaaaaggcaatgggaccgactctaccctgacatgctgcagtcaagttcccagctgtcccattccagatcaagggaaagcttatgtagtatacggagagcatcttcggtccatgatatagaaggattcggcgtccaccccaagaacatatttagagaccgacatgccagcgaagggccttttaatcatatcaagtcaagcctcctgggatccacatcagattcaaacctcaacaaatacagcaccattaacaagattccacagctcactctgaatttttcagaggtcaaaactgagaaaaagaattcatcacctccttcttcagataaaaccattattgcacccaaggttaaagatcgaacacacaatgtgactgagaaagtgacccaggatctctttatccctacatcacgagggccttagtagaacacctggcagaatggagttcatcaaatgtttgctgaataaatgagtgcataaatggatggaagagttagccaagggaagggataagaattccaggtagaaaaaaacacaagaacaaagttatgaaagcagtaaagtccatatgactttttagaacaagtggttttctgagctggcgagaggctagtctggaaaatttaccttcaaaataacacttttctaccttttcacataagtgccatgggggtttgagtaaaatgcaacagtttccatc

SEQ ID NO: 10485 - DNA, 1893 bp, Homo sapiens
  source 1..1893: mol_type = unassigned DNA
gggtccacttttatttgtaacactcacataattccagtgaaaaaccaagagggcgtggctatgatgttcatcattaattttgaatatgtgacggataatgaaaacgctgccaccccagagagggtaaacccaatattaccaatcaaaactgtaaaccggaaattttttgggttcaaattccctggtctgagagttctcacttacagaaagcagtccttaccacaagaagaccccgatgtggtggtcatcgattcatctaaacacagtgatgattcagtagccatgaagcattttaagtctcctacaaaagaaagctgcagcccctctgaagcagatgacacaaaagctttgatacagcccagcaaatgttctcccttggtgaatatatccggacctcttgaccattcctctcccaaaaggcaatgggaccgactctaccctgacatgctgcagtcaagttcccagctgtcccattccagatcaagggaaagcttatgtagtatacggagagcatcttcggtccatgatatagaaggattcggcgtccaccccaagaacatatttagagaccgacatgccagcgaagggccttttaatcatatcaagtcaagcctcctgggatccacatcagattcaaacctcaacaaatacagcaccattaacaagattccacagctcactctgaatttttcagaggtcaaaactgagaaaaagaattcatcacctccttcttcagataaaaccattattgcacccaaggttaaagatcgaacacacaatgtgactgagaaagtgacccaggttctctctttaggagcagatgtcctacctgaatacaaactgcagacaccacgcatcaacaagtttacgatattgcactacagccctttcaaggcagtctgggactggcttatcctgctgttggtcatatacactgctatatttactccctactctgcagccttcctcctcaatgacagagaagaacagaaaagacgagaatgtggctattcttgtagccctttgaatgtggtagacttgattgtggatattatgtttatcatagatattttaataaacttcagaacaacatatgtaaatcagaatgaagaagtggtaagtgatcccgccaaaatagcaatacactacttcaaaggctggttcctgattgacatggttgcagcaattccttttgacttgctgatttttggatcaggttctgatgagacaacaacattaattggtcttttgaagactgcccgactcctccgtcttgtgcgcgtggccaggaaactggatcgatattcagaatatggcgctgctgttctaatgctcttaatgtgcatctttgccctgattgctcactggctggcttgcatttggtatgcgattgggaatgtagaaaggccttacctgactgacaaaatcggatggttggattccttaggacagcaaattgggaaacgttacaatgacagtgactcaagttctggaccatccattaaagacaaatacgtcacagcactttattttaccttcagcagtttaaccagtgtaggattcgggaatgtgtctcctaacacgaattcggagaaaatcttttcaatttgtgtcatgttgattggctcactaatgtatgcaagcatttttgggaatgtatctgcaattatccaaagactatactcgggaactgccaggtaccacatgcagatgctgcgagtaaaagagttcattcgctttcaccaaatccccaaccctctgaggcaacgtcttgaagaatatttccagcacgcatggacttacaccaatggcattgacatgaacatggtatgtatgtctgttttccaaaatgaaagtgccgcaggcattatagtgatagccaaaatggaataa

SEQ ID NO: 10486 - DNA, 3713 bp, Homo sapiens
  source 1..3713: mol_type = unassigned DNA
aaaaataggtccacttttatttgtaacactcacataattccagtgaaaaaccaagagggcgtggctatgatgttcatcattaattttgaatatgtgacggataatgaaaacgctgccaccccagagagggtaaacccaatattaccaatcaaaactgtaaaccggaaattttttgggttcaaattccctggtctgagagttctcacttacagaaagcagtccttaccacaagaagaccccgatgtggtggtcatcgattcatctaaacacagtgatgattcagtagccatgaagcattttaagtctcctacaaaagaaagctgcagcccctctgaagcagatgacacaaaagctttgatacagcccagcaaatgttctcccttggtgaatatatccggacctcttgaccattcctctcccaaaaggcaatgggaccgactctaccctgacatgctgcagtcaagttcccagctgtcccattccagatcaagggaaagcttatgtagtatacggagagcatcttcggtccatgatatagaaggattcggcgtccaccccaagaacatatttagagaccgacatgccagcgaagacaatggtcgcaatgtcaaagggccttttaatcatatcaagtcaagcctcctgggatccacatcagattcaaacctcaacaaatacagcaccattaacaagattccacagctcactctgaatttttcagaggtcaaaactgagaaaaagaattcatcacctccttcttcagataaaaccattattgcacccaaggttaaagatcgaacacacaatgtgactgagaaagtgacccaggttctctctttaggagcagatgtcctacctgaatacaaactgcagacaccacgcatcaacaagtttacgatattgcactacagccctttcaaggcagtctgggactggcttatcctgctgttggtcatatacactgctatatttactccctactctgcagccttcctcctcaatgacagagaagaacagaaaagacgagaatgtggctattcttgtagccctttgaatgtggtagacttgattgtggatattatgtttatcatagatattttaataaacttcagaacaacatatgtaaatcagaatgaagaagtggtaagtgatcccgccaaaatagcaatacactacttcaaaggctggttcctgattgacatggttgcagcaattccttttgacttgctgatttttggatcaggttctgatgagacaacaacattaattggtcttttgaagactgcccgactcctccgtcttgtgcgcgtggccaggaaactggatcgatattcagaatatggcgctgctgttctaatgctcttaatgtgcatctttgccctgattgctcactggctggcttgcatttggtatgcgattgggaatgtagaaaggccttacctgactgacaaaatcggatggttggattccttaggacagcaaattgggaaacgttacaatgacagtgactcaagttctggaccatccattaaagacaaatacgtcacagcactttattttaccttcagcagtttaaccagtgtaggattcgggaatgtgtctcctaacacgaattcggagaaaatcttttcaatttgtgtcatgttgattggctcactaatgtatgcaagcatttttgggaatgtatctgcaattatccaaagactatactcgggaactgccaggtaccacatgcagatgctgcgagtaaaagagttcattcgctttcaccaaatccccaaccctctgaggcaacgtcttgaagaatatttccagcacgcatggacttacaccaatggcattgacatgaacatggtcctaaagggtttcccagaatgcttacaagcagacatttgtctacatctcaaccagacattgctgcaaaactgcaaagcctttcggggggcaagtaaaggttgccttagagctttggcaatgaagttcaaaaccacccatgcacctccaggagacaccctcgttcactgtggggatgtcctcactgcactttatttcttatccagaggctccattgaaattctcaaagatgacattgtggtggctattctgggaaaaaatgatatatttggagaaatggttcatctttatgccaaacctggaaagtctaatgcagatgtaagagccctcacatactgtgacttgcataagattcagcgagaagacttgttagaggttttggatatgtatcctgagttttctgatcactttctaacaaacctagagttgactttcaacctaaggcatgagagcgcaaaggctgatctcctacgatcacaatccatgaatgattcagaaggagacaactgtaaactaagaagaaggaaattgtcatttgaaagtgaaggagagaaagaaaacagtacaaatgatcctgaagactctgcagataccataagacattatcagagttccaagagacactttgaagagaaaaaaagcagatcctcatctttcatctcctccattgatgatgaacaaaagccgctcttctcaggaatagtagactcttctccaggaatagggaaagcatctgggctcgattttgaagaaacagtgcccacctcaggaagaatgcacatagataaaagaagtcactcttgcaaagatatcactgacatgcgaagctgggaacgagaaaatgcacatccccagcctgaagactccagtccatctgcacttcagcgagctgcctggggtatctctgaaaccgaaagcgacctcacctacggggaagtggaacaaagattagatctgctccaggagcaacttaacaggcttgaatcccaaatgaccactgacatccagaccatcttacagttgctgcagaaacaaaccactgtggtccccccagcctacagtatggtaacagcaggatcagaatatcagagacccatcatccagctgatgagaaccagtcaaccggaagcatccatcaaaactgaccgaagtttcagcccttcctcacaatgtcctgaatttctagaccttgaaaaatctaaacttaaatccaaagaatccctttcaagtggggtgcatctgaacacagcttcagaagacaacttgacttcacttttaaaacaagacagtgatctctctttagagcttcacctgcggcaaagaaaaacttacgttcatccaattaggcatccttctttgccagattcatccctaagcactgtaggaatcgtgggtcttcataggcatgtttctgatcctggtcttccagggaaataatcattttgtactatttactccacatacaatgtaagtgcttttaatggctgttttcctttttctatttaaatcctctctacttgactcaggggctcacaaggtaccattatatgcaaaagtactgtatattttcctaaattgaagcttgtaaggtaaaactgagcagttaggatgtaaatatacataagaacttttggttccaaatgttaaaactgccagcatctcacggcaccttattttttatttttattttttaaatcacatgcatgttaggaaactccaatttctcttgcatggagactcctatttactgcttttactaaaccagtacttcgttatgaaaatgccttccacgcaaataagaaaccaagggataaaactgttcatggatgcaactcaaattcagatgatcctcaactcat

SEQ ID NO: 10487 - DNA, 5137 bp, Homo sapiens
  source 1..5137: mol_type = unassigned DNA
gggagagggagcctgcgccgggctgagcctggaggtgcggggcgggctcggggagcgctcttggggctcctcctgccacagccggggcggctggaactctctccctttctccctccatccttccacttcccctgctcggccccgccgtcaggccgggtcccccttccctgccgtcatcaggttccccttctcccttcttggcactttcctttcgaaccatccttctggacaaactttgatggagaatttcacaccacgctggaaaaatgccggttatgaaaggattactggcgccgcaaaacaccttcctggacaccatcgccacccgttttgacggaacacatagcaacttcatccttgccaatgcccaggtggctaagggtttccccatagtctactgttccgatggcttctgcgagcttgctggatttgcccgaactgaagtcatgcagaagagttgtagctgcaagttcttatttggggttgaaaccaatgagcaactgatgcttcaaatagaaaagtcactggaggagaaaacagaattcaaaggagaaattatgttctacaagaaaaacgggtctccattttggtgcctactggatattgttcccataaagaatgaaaaaggagatgtagtactttttctggcctcgttcaaagatataacagatacaaaagtgaagattactccagaagataaaaaagaagacaaagtcaaaggaagatcaagagcagggacccactttgactcagcccggagacggagtcgagcagtcctttatcacatctctgggcacctgcaaagaagagaaaagaacaaattgaaaataaataacaatgtttttgtagataaaccagcatttccggagtataaagtttctgatgcaaaaaagtccaaattcatacttctgcattttagcacttttaaagctggctgggactggcttattttgttggcaacgttttatgttgctgtgactgtaccttacaacgtttgctttattggcaatgacgacctgtccacaactcggagcacaaccgtcagtgacattgcagtggagattctttttattatagatattattttaaatttccgaacaacttatgtcagcaagtctggccaagttatctttgaagcaagatcaatttgcatccactatgtcacaacctggttcatcattgatttaatcgctgccctgccttttgatcttctgtatgctttcaacgtcacagtggtgtctctcgtgcatcttctaaagacagtgcgcctcttgcgtcttttgcgtctgctgcagaagttagaccgctattcccaacacagtactatcgtcctgactctgctcatgtccatgtttgcactccttgcacactggatggcgtgtatctggtacgtcattggaaaaatggagagggaagacaacagccttctgaagtgggaagttggttggcttcatgagttgggaaagagactggaatctccatactatggcaacaataccttggggggcccgtcgatccgaagtgcctatattgccgctctgtacttcacgctgagcagcctcaccagcgtgggttttgggaacgtctctgctaatacagatgcagaaaagatcttctccatctgcaccatgctgattggtgccttgatgcacgccttggtgtttggaaacgtgacagcaatcatacagaggatgtactccagatggtccctctatcacactagaactaaggatctgaaagatttcatccgtgtccatcacttgccccaacaactcaagcagaggatgctcgaatattttcaaacaacctggtcagtcaacaatggaatagattcaaatgagcttttgaaagactttccagatgaactgcgttctgacatcactatgcacttgaacaaggagatcttacagttgtccctttttgaatgtgccagccggggctgcctcaggtctctgtctctacacatcaaaacctctttctgtgctccgggggagtatctgctgcgtcaaggggatgctttgcaggccatctactttgtatgctcgggctccatggaagttcttaaagacagcatggtgctggctattcttgggaaaggggatttaattggagcaaatctatcaattaaggaccaagtgatcaagaccaatgcagatgtaaaggctttaacctactgtgatctccagtgtatcatcctcaaaggactctttgaagtgctagacctttacccagaatatgctcacaaattcgtggaagacattcagcatgacctcacatacaacctccgagaaggtcatgagagtgatgtgatatcaagactatcaaacaaatctatggtctcacagtcagagcccaagggaaatggcaacatcaacaagcgactcccatccattgtggaagatgaggaagaggaggaggagggggaggaagaggaggcagtctccctctctcccatctgcacaaggggatcttcttcgcgcaacaagaaggttggaagcaataaagcctacctgggcttaagcttaaagcaactggcctcgggaacggtgccctttcactcgcctatcagagtctccaggtcaaattcccccaaaaccaagcaggaaattgacccccccaaccataataaaaggaaagagaagaacttgaaattgcaactttcaactttgaataatgctggacccccagacctcagtccaaggattgttgatggaattgaagatggaaacagcagtgaagaaagtcagacttttgattttggctctgaacgaatcagatcagagcccagaatttctcctcctcttggagatccagagattggagctgctgttctcttcatcaaagcagaggagaccaagcagcagataaacaaactcaacagtgaggtaacaacattgactcaggaagtttctcagttgggtaaagacatgagaaatgtgatccagcttctggaaaacgttctgtcacctcagcagccatcacggttttgctctttgcacagcacctctgtgtgtccctccagggagagcttacagaccagaacgagctggagtgcacaccagccttgcctacacttgcaaacaggcggggctgcttatacccaagcacaactttgtagcagtaatatcacctcagacatttggagtgtggatccctcctctgtggggagcagcccccaacgaactggagctcatgagcaaaatcctgcagacagtgaactttatcattctccaagccttgattattcaccttcccactaccaggttgtccaagaaggtcatttgcaatttttaaggtgcatctctccacattcagattctacgttgacgcctctgcagtccatttcagcaactctctcatcttctgtctgctcctcttcggaaacatctttgcacctagttctcccaagcagatcagaggagggcagcttcagtcagggaactgtgagttccttcagtctggaaaacttaccaggatcttggaaccaggaaggaatggcatcagcttctacaaaacctttggagaaccttccactggaagttgtcacaagcacagcagaagtgaaagataacaaagccataaatgtatgatattagtgcccatgatgcagcagctaatttcaaacctaccactgcatgacagttttagtttgcctttttgcctctggtgggcatgaagactgagcaaagctgggaatcctgcagaaaagagtgtgaggagccagggaaaggcagaaccacctccatgctgtagcaaacaatttctagatactagaagcataatagaaacatttttctgtacaggtattaaactactggtctgtttgacagactttggtaacaatccaaagaccctgagggtctgagcagctagaagtcctagacaaagaacttgtggatgacttttgtcccatgtggcttttgtgaagtatggcaaaggtttttcatgagtgcctgattgttattcctgaacaatatccatagcactgttggcctcaggagtgcacagctcctgctgatgtatttttctttttgtgaaggcaaagggacaattatcactgcatgtcatctcctagacaatcagtcaaatagagctggtggccagtggttagctattcgcacgttatttgccatgtaaatgaaaacgtctttatttatcaaaaaaacacagaggctatttttatatccttggtatgaaatatgtatttaaactatttaaatatttataaagaaatgaatgttttcttttcattttggtaaaaaaaaagcttgctgttttaacaagaaatgcactactgttgtgtatagtagatcaaaaattatttattactaagaggatgtagtttccaaaggaatcccccattttttctgcatgcagtttgcaacaaatgtattctcatgcttctggattataaaagaaaagtgaagtcatattttgttaatgaaataaaaacatggactgagtgtcaactacatgagctttggcatggggatagagaggctccatctaggctctgccaactcatgtcaatgacatgatttaaggtcgttgtgccagcagaaatgtctctcctctaggtatcgtattttgttgctcaagaatccaaaatgggtctgtggacatagggcaatttggggctcaaagtgagggagaaaacctgggtgtgtcctttcccagtgcttttcttttacaagaggtagtagactagtggaaatccccaaatggagccaagacttctgagctataacttgtgggagtaataccagcttgcaatgggtcagcactttaccttttttctttaaggctcccaacaatgctatacagcgcagttgtttccattcctatttttaataaatctcaggggaagcctcagagattacacagttaggatgctgacacagtctagaatccataatgctccctacatctcacactaacaggcaaattcagatgctgggattggcaatgatttaagcaccttcactaaagtcttattttatgttttagaacagttacagtctaattgtcttggacattttgggaagatatattgggttcacattctggagttctctttattttccaccacaaaaaataatctgagaattgtatcattaaaagtatctaaacacaccaa

SEQ ID NO: 10488 - DNA, 5082 bp, Homo sapiens
  source 1..5082: mol_type = unassigned DNA
gccggggcggctggaactctctccctttctccctccatccttccacttcccctgctcggccccgccgtcaggccgggtcccccttccctgccgtcatcaggttccccttctcccttcttggcactttcctttcgaaccatccttctggacaaactttgatggagaatttcacaccacgctggaaaaatgccggttatgaaaggattactggcgccgcaaaacaccttcctggacaccatcgccacccgttttgacggaacacatagcaacttcatccttgccaatgcccaggtggctaagggtttccccatagtctactgttccgatggcttctgcgagcttgctggatttgcccgaactgaagtcatgcagaagagttgtagctgcaagttcttatttggggttgaaaccaatgagcaactgatgcttcaaatagaaaagtcactggaggagaaaacagaattcaaaggagaaattatgttctacaagaaaaacgggtctccattttggtgcctactggatattgttcccataaagaatgaaaaaggagatgtagtactttttctggcctcgttcaaagatataacagatacaaaagtgaagattactccagaagataaaaaagaagacaaagtcaaaggaagatcaagagcagggacccactttgactcagcccggagacggagtcgagcagtcctttatcacatctctgggcacctgcaaagaagagaaaagaacaaattgaaaataaataacgtacttcaggatccctgaacacatcacattaatctgcccttccctcaatgagtgagacaagaacacaacattgtgacctacaaaatgtttttgtagataaaccagcatttccggagtataaagtttctgatgcaaaaaagtccaaattcatacttctgcattttagcacttttaaagctggctgggactggcttattttgttggcaacgttttatgttgctgtgactgtaccttacaacgtttgctttattggcaatgacgacctgtccacaactcggagcacaaccgtcagtgacattgcagtggagattctttttattatagatattattttaaatttccgaacaacttatgtcagcaagtctggccaagttatctttgaagcaagatcaatttgcatccactatgtcacaacctggttcatcattgatttaatcgctgccctgccttttgatcttctgtatgctttcaacgtcacagtggtgtctctcgtgcatcttctaaagacagtgcgcctcttgcgtcttttgcgtctgctgcagaagttagaccgctattcccaacacagtactatcgtcctgactctgctcatgtccatgtttgcactccttgcacactggatggcgtgtatctggtacgtcattggaaaaatggagagggaagacaacagccttctgaagtgggaagttggttggcttcatgagttgggaaagagactggaatctccatactatggcaacaataccttggggggcccgtcgatccgaagtgcctatattgccgctctgtacttcacgctgagcagcctcaccagcgtgggttttgggaacgtctctgctaatacagatgcagaaaagatcttctccatctgcaccatgctgattggtgccttgatgcacgccttggtgtttggaaacgtgacagcaatcatacagaggatgtactccagatggtccctctatcacactagaactaaggatctgaaagatttcatccgtgtccatcacttgccccaacaactcaagcagaggatgctcgaatattttcaaacaacctggtcagtcaacaatggaatagattcaaatgaggtaatgttcatttctcatgttgttttcaggcagaaagcacatattctaaggtaaacgcaagatgttctaatgcaggtatcagaagtgaaaagcataccaacttctttattcctttacatttttaattattcatgaatcccaatccatcttctttcacttgctttggcttgtgttttcacaatgccaatttggattgaccgaagttttatattaacttgctgcttattcgatcaggtggatttattttccttcttattgtctcttttcaaaggaatcaattcttacgataatttaacagtgtaatctgggataattatattaatcaagtttctgtttcccttaacatcaataaagttaaaaaattccatcaaaggggttatctttatacttccagaaacaccccagactgccactataaaaacagtattatataaatcaacgaaccatttcatcaacccaccagccaaacctgtaaccaacattttagtagtgattaattggtttctcctctcttcgcataatcaccagtgggtccaaattccatatcttctgtcctgactaggactctctgtgagaaggaagtcacaatgagttatatgttttcctgctagaggcttttttaatttgttctgtttctccagacttcttatcagctgattattcagtagcacataattcacagtcactgaaaaatctctccaggattatacatacttagatttcctcttctgtatgctggatggccaaacagcaggagacagtaggaagagcatccctgctgtcttgcaaagtaaatcagttagactacacttaccccaatttgatttcctccttcatcttctctgacagcttttgaaagactttccagatgaactgcgttctgacatcactatgcacttgaacaaggagatcttacagttgtccctttttgaatgtgccagccggggctgcctcaggtctctgtctctacacatcaaaacctctttctgtgctccgggggagtatctgctgcgtcaaggggatgctttgcaggccatctactttgtatgctcgggctccatggaagttcttaaagacagcatggtgctggctattcttgggaaaggggatttaattggagcaaatctatcaattaaggaccaagtgatcaagaccaatgcagatgtaaaggctttaacctactgtgatctccagtgtatcatcctcaaaggactctttgaagtgctagacctttacccagaatatgctcacaaattcgtggaagacattcagcatgacctcacatacaacctccgagaaggtcatgagagtgatgtgatatcaagactatcaaacaaatctatggtctcacagtcagagcccaagggaaatggcaacatcaacaagcgactcccatccattgtggaagatgaggaagaggaggaggagggggaggaagaggaggcagtctccctctctcccatctgcacaaggggatcttcttcgcgcaacaagaaggttggaagcaataaagcctacctgggcttaagcttaaagcaactggcctcgggaacggtgccctttcactcgcctatcagagtctccaggtcaaattcccccaaaaccaagcaggaaattgacccccccaaccataataaaaggaaagagaagaacttgaaattgcaactttcaactttgaataatgctggacccccagacctcagtccaaggattgttgatggaattgaagatggaaacagcagtgaagaaagtcagacttttgattttggctctgaacgaatcagatcagagcccagaatttctcctcctcttggagatccagagattggagctgctgttctcttcatcaaagcagaggagaccaagcagcagataaacaaactcaacagtgaggtaacaacattgactcaggaagtttctcagttgggtaaagacatgagaaatgtgatccagcttctggaaaacgttctgtcacctcagcagccatcacggttttgctctttgcacagcacctctgtgtgtccctccagggagagcttacagaccagaacgagctggagtgcacaccagccttgcctacacttgcaaacaggcggggctgcttatacccaagcacaactttgtagcagtaatatcacctcagacatttggagtgtggatccctcctctgtggggagcagcccccaacgaactggagctcatgagcaaaatcctgcagacagtgaactttatcattctccaagccttgattattcaccttcccactaccaggttgtccaagaaggtcatttgcaatttttaaggtgcatctctccacattcagattctacgttgacgcctctgcagtccatttcagcaactctctcatcttctgtctgctcctcttcggaaacatctttgcacctagttctcccaagcagatcagaggagggcagcttcagtcagggaactgtgagttccttcagtctggaaaacttaccaggatcttggaaccaggaaggaatggcatcagcttctacaaaacctttggagaaccttccactggaagttgtcacaagcacagcagaagtgaaagataacaaagccataaatgtatgatattagtgcccatgatgcagcagctaatttcaaacctaccactgcatgacagttttagtttgcctttttgcctctggtgggcatgaagactgagcaaagctgggaatcctgcagaaaagagtgtgaggagccagggaaaggcagaaccacctccatgctgtagcaaacaatttctagatactagaagcataatagaaacatttttctgtacaggtattaaactactggtctgtttgacagactttggtaacaatccaaagaccctgagggtctgagcagctagaagtcctagacaaagaacttgtggatgacttttgtcccatgtggcttttgtgaagtatggcaaaggtttttcatgagtgcctgattgttattcctgaacaatatccatagcactgttggcctcaggagtgcacagctcctgctgatgtatttttctttttgtgaaggcaaagggacaattatcactgcatgtcatctcctagacaatcagtcaaatagagctggtggccagtggttagctattcgcacgttatttgccatgtaaatgaaaacgtctttatttatcaaaaaaacacagaggctatttttatatccttggtatgaaatatgtatttaaactatttaaatatttataaag

SEQ ID NO: 10489 - DNA, 652 bp, Homo sapiens
  source 1..652: mol_type = unassigned DNA
acagaatgtttttgtagataaaccagcatttccggagtataaagtttctgatgcaaaaaagtccaaattcatacttctgcattttagcacttttaaagctggctgggactggcttattttgttggcaacgttttatgttgctgtgactgtaccttacaacgtttgctttattggcaatgacgacctgtccacaactcggagcacaaccgtcagtgacattgcagtggagattctttttattatagatattattttaaatttccgaacaacttatgtcagcaagtctggccaagttatctttgaagcaagatcaatttgcatccactatgtcacaacctggttcatcattgatttaatcgctgccctgccttttgatcttctgtatgctttcaacgtcacagtgttgggaggttgacagtgccaacatctttaaaacgtttatgactcaactgaaaggaaagctcccaggaaaaatctagtgtctctcgtgcatcttctaaagacagtgcgcctcttgcgtcttttgcgtctgctgcagaagttagaccgctattcccaacacagtactatcgtcctgactctgctcatgtccatgtttgcactccttgcacactggatggcgtgtatctggtacgtcattggaaaaatggag

SEQ ID NO: 10490 - DNA, 576 bp, Homo sapiens
  source 1..576: mol_type = unassigned DNA
aagaaagacagtcagcaaagcctgggagagctccagctcctccctccctgctctgctcaacttcactctcctcctcggttcccttggagtaccttgtgccccggcagtgctgtcccggccctggcatcctgaggtcctcccgtggtgaggacttaagtggacagcaggagtgggtggagagagggagggagagtttgccctgcaggctctctggatgcagaagccagactcgctgcagaggcagctgtgctgttcccggagcctggcttcaggggtgcatccgtcactcagggttcattcacccaggcaggctccaagttcctggggtgcacaaggtgggcactgtcccttctgggtgctgacagcagagcctggctcccctccgccaccatgagcggctgctccaaaagatgcaagcttgggttcgtgaaatttgcccagaccatctttaagctcatcactgggaccctcagcaaagatggagtcaaaagtggaactggggcccgcagagccggatagcttgggcagtacgtgtgtgcacctgcaggctgtggagacaggtatttccatggagct

SEQ ID NO: 10491 - DNA, 1197 bp, Homo sapiens
  source 1..1197: mol_type = unassigned DNA
aagaaagacagtcagcaaagcctgggagagctccagctcctccctccctgctctgctcaacttcactctcctcctcggttcccttggagtaccttgtgccccggcagtgctgtcccggccctggcatcctgaggtcctcccgtggtgaggacttaagtggacagcaggagtgggtggagagagggagggagagtttgccctgcaggctctctggatgcagaagccagactcgctgcagaggcagctgtgctgttcccggagcctggcttcaggggtgcatccgtcactcagggttcattcacccaggcaggctccaagttcctggggtgcacaaggtgggcactgtcccttctgggtgctgacagcagagcctggctcccctccgccaccatgagcggctgctccaaaagatgcaagcttgggttcgtgaaatttgcccagaccatctttaagctcatcactgggaccctcagcaaagataagattgaagatgagctggagatgaccatggtttgccatcggcccgagggactggagcagctcgaggcccagaccaacttcaccaagagggagctgcaggtcctttatcgaggcttcaaaaatgagtgccccagtggtgtggtcaacgaagacacattcaagcagatctatgctcagtttttccctcatggagatgccagcacgtatgcccattacctcttcaatgccttcgacaccactcagacaggctccgtgaagttcgaggactttgtaaccgctctgtcgattttattgagaggaactgtccacgagaaactaaggtggacatttaatttgtatgacatcaacaaggacggatacataaacaaagaggagatgatggacattgtcaaagccatctatgacatgatggggaaatacacatatcctgtgctcaaagaggacactccaaggcagcatgtggacgtcttcttccagaaaatggacaaaaataaagatggcatcgtaactttagatgaatttcttgaatcatgtcaggaggacgacaacatcatgaggtctctccagctgtttcaaaatgtcatgtaactggtgacactcagccattcagctctcagagacattgtactaaacaaccaccttaacaccctgatctgcccttgttctgattttacacaccaactcttgggacagaaacaccttttacactttggaaga

SEQ ID NO: 10492 - DNA, 639 bp, Homo sapiens
  source 1..639: mol_type = unassigned DNA
caggctctctggatgcagaagccagactcgctgcagaggcagctgtgctgttcccggagcctggcttcaggggtgcatccgtcactcagggttcattcacccaggcaggctccaagttcctggggtgcacaaggtgggcactgtcccttctgggtgctgacagcagagcctggctcccctccgccaccatgagcggctgctccaaaagatgcaagcttgggttcgtgaaatttgcccagaccatctttaagctcatcactgggaccctcagcaaagatggagtcaaaagtggaactggggcccgcagagccggatagcttgggcagtacgtgtgtgcacctgcaggctgtggagacaggtatttccatggagctcactcgccctgcctctcatccaggcctgaaaatcatagagcatcccgctggccatctgcatcagcccgacccccacaggatagaagactggcacatccaagttgctccttccacaccctctccccactgaggcctcgtctcctccgccctgtggccaattgaagactcagcatcatcaagactggagggacagagcatttgaatcatcagacgctgggccagacgtcaccccacgcgttttctcattttatcgtcctaagaagcc

SEQ ID NO: 10493 - DNA, 2014 bp, Homo sapiens
  source 1..2014: mol_type = unassigned DNA
gctggcagcaggcagcaggcagcaggcgggcgcgctgtggctccgcgccgcgcggtccgggctctgttcattcatgattggtactcggccctccgagacccagcccgagcgcagggaggggagccgagtgtgcggcaggaggggcgggcggacggcggctcccgcaccgcacgcggcgctggctcggcagcctcggccgggcggccgctctggccccgtgtccagtgccaggcaggcttcagggcaccgtcctcggccctgggcgagggaaccgccgggccgggtcctcgcgcggggaagcggttccgaaggctcgcggggagcggctagccctgagtccctgcatgtgcggggctgaagaaggaagccagaagcctcctagcctcgcctccacgcttgctgaataccaagctgcaggcgagctgccgggcgcttttctctcctccaattcagagtagacaaaccacggggatttctttccagggtaggggaggggccgggcccggggtcccaactcgcactcaagtcttcgctgccatgggggccgtcatgggcaccttctcatctctgcaaaccaaacaaaggcgaccctcgaaagataagattgaagatgagctggagatgaccatggtttgccatcggcccgagggactggagcagctcgaggcccagaccaacttcaccaagagggagctgcaggtcctttatcgaggcttcaaaaatgagtgccccagtggtgtggtcaacgaagacacattcaagcagatctatgctcagtttttccctcatggagatgccagcacgtatgcccattacctcttcaatgccttcgacaccactcagacaggctccgtgaagttcgaggactttgtaaccgctctgtcgattttattgagaggaactgtccacgagaaactaaggtggacatttaatttgtatgacatcaacaaggacggatacataaacaaagaggagatgatggacattgtcaaagccatctatgacatgatggggaaatacacatatcctgtgctcaaagaggacactccaaggcagcatgtggacgtcttcttccagaaaatggacaaaaataaagatggcatcgtaactttagatgaatttcttgaatcatgtcaggaggacgacaacatcatgaggtctctccagctgtttcaaaatgtcatgtaactggtgacactcagccattcagctctcagagacattgtactaaacaaccaccttaacaccctgatctgcccttgttctgattttacacaccaactcttgggacagaaacaccttttacactttggaagaattctctgctgaagactttctatggaacccagcatcatgtggctcagtctctgattgccaactcttcctctttcttcttcttgagagagacaagatgaaatttgagtttgttttggaagcatgctcatctcctcacactgctgccctatggaaggtccctctgcttaagcttaaacagtagtgcacaaaatatgctgcttacgtgcccccagcccactgcctccaagtcaggcagaccttggtgaatctggaagcaagaggacctgagccagatgcacaccatctctgatggcctcccaaaccaatgtgcctgtttctcttcctttggtgggaagaatgagagttatccagaacaattaggatctgtcatgaccagattgggagagccagcacctaacatatgtgggataggactgaattattaagcatgatattgtctgatgacccaaactgcccatgtcatttgtttccagaaacgaggaccaataattctctcacactggcatttgtgctggtagtacaagtcctttaatatgtccaggaagggagccattgcccagtggtccatatctccaccacatcccctgcttgagcccagcgctgcatgtccctcccaagaagtccagaatgcctgcaaattgctgtaattttataccatgttctaaccaataaacagaactatttcttacactctcaa

SEQ ID NO: 10494 - DNA, 1845 bp, Homo sapiens
  source 1..1845: mol_type = unassigned DNA
ggctagccctgagtccctgcatgtgcggggctgaagaaggaagccagaagcctcctagcctcgcctccacgcttgctgaataccaagctgcaggcgagctgccgggcgcttttctctcctccaattcagagtagacaaaccacggggatttctttccagggtaggggaggggccgggcccggggtcccaactcgcactcaagtcttcgctgccatgggggccgtcatgggcaccttctcatctctgcaaaccaaacaaaggcgaccctcgaaagaactaccttaaattaatttgttgaaaggacagatggatggatggttgatggaagtagcaggcttccagcagcaggggatggagtgagtgtgtggataccgctggatcagcagaaggttataccattttagagtaactatctcggacttcggagagttcctggataagattgaagatgagctggagatgaccatggtttgccatcggcccgagggactggagcagctcgaggcccagaccaacttcaccaagagggagctgcaggtcctttatcgaggcttcaaaaatgagtgccccagtggtgtggtcaacgaagacacattcaagcagatctatgctcagtttttccctcatggagatgccagcacgtatgcccattacctcttcaatgccttcgacaccactcagacaggctccgtgaagttcgaggactttgtaaccgctctgtcgattttattgagaggaactgtccacgagaaactaaggtggacatttaatttgtatgacatcaacaaggacggatacataaacaaagaggagatgatggacattgtcaaagccatctatgacatgatggggaaatacacatatcctgtgctcaaagaggacactccaaggcagcatgtggacgtcttcttccagaaaatggacaaaaataaagatggcatcgtaactttagatgaatttcttgaatcatgtcaggaggacgacaacatcatgaggtctctccagctgtttcaaaatgtcatgtaactggtgacactcagccattcagctctcagagacattgtactaaacaaccaccttaacaccctgatctgcccttgttctgattttacacaccaactcttgggacagaaacaccttttacactttggaagaattctctgctgaagactttctatggaacccagcatcatgtggctcagtctctgattgccaactcttcctctttcttcttcttgagagagacaagatgaaatttgagtttgttttggaagcatgctcatctcctcacactgctgccctatggaaggtccctctgcttaagcttaaacagtagtgcacaaaatatgctgcttacgtgcccccagcccactgcctccaagtcaggcagaccttggtgaatctggaagcaagaggacctgagccagatgcacaccatctctgatggcctcccaaaccaatgtgcctgtttctcttcctttggtgggaagaatgagagttatccagaacaattaggatctgtcatgaccagattgggagagccagcacctaacatatgtgggataggactgaattattaagcatgatattgtctgatgacccaaactgcccatgtcatttgtttccagaaacgaggaccaataattctctcacactggcatttgtgctggtagtacaagtcctttaatatgtccaggaagggagccattgcccagtggtccatatctccaccacatcccctgcttgagcccagcgctgcatgtccctcccaagaagtccagaatgcctgcaaattgctgtaattttataccatgttctaaccaataaacagaactatttcttaca

SEQ ID NO: 10495 - DNA, 726 bp, Homo sapiens
  source 1..726: mol_type = unassigned DNA
atgggggccgtcatgggcaccttctcatctctgcaaaccaaacaaaggcgaccctcgaaagataagattgaagatgagctggagatgaccatggtttgccatcggcccgagggactggagcagctcgaggcccagaccaacttcaccaagagggagctgcaggtcctttatcgaggcttcaaaaatgagtgccccagtggtgtggtcaacgaagacacattcaagcagatctatgctcagtttttccctcatggagccctgccttgtttggaaggttctccctgtgtggaattcctgcccccatcacctgccctccttttctgccttgtagatgccagcacgtatgcccattacctcttcaatgccttcgacaccactcagacaggctccgtgaagttcgaggactttgtaaccgctctgtcgattttattgagaggaactgtccacgagaaactaaggtggacatttaatttgtatgacatcaacaaggacggatacataaacaaagaggagatgatggacattgtcaaagccatctatgacatgatggggaaatacacatatcctgtgctcaaagaggacactccaaggcagcatgtggacgtcttcttccagaaaatggacaaaaataaagatggcatcgtaactttagatgaatttcttgaatcatgtcaggaggacgacaacatcatgaggtctctccagctgtttcaaaatgtcatgtaa

SEQ ID NO: 10496 - DNA, 684 bp, Homo sapiens
  source 1..684: mol_type = unassigned DNA
atgggggccgtcatgggcaccttctcatctctgcaaaccaaacaaaggcgaccctcgaaagacatcgcctggtggtattaccagtatcagagagataagattgaagatgagctggagatgaccatggtttgccatcggcccgagggactggagcagctcgaggcccagaccaacttcaccaagagggagctgcaggtcctttatcgaggcttcaaaaatgagtgccccagtggtgtggtcaacgaagacacattcaagcagatctatgctcagtttttccctcatggagatgccagcacgtatgcccattacctcttcaatgccttcgacaccactcagacaggctccgtgaagttcgaggactttgtaaccgctctgtcgattttattgagaggaactgtccacgagaaactaaggtggacatttaatttgtatgacatcaacaaggacggatacataaacaaagaggagatgatggacattgtcaaagccatctatgacatgatggggaaatacacatatcctgtgctcaaagaggacactccaaggcagcatgtggacgtcttcttccagaaaatggacaaaaataaagatggcatcgtaactttagatgaatttcttgaatcatgtcaggaggacgacaacatcatgaggtctctccagctgtttcaaaatgtcatgtaa

SEQ ID NO: 10497 - DNA, 1613 bp, Homo sapiens
  source 1..1613: mol_type = unassigned DNA
gactggtggaaaataaaccgtgcactttagaacagcaggaagggaggcttggaagcctggttttctggctttgaatgaccgcctagcgcttgccggtgcgccagggtgctgtgaggatgtgggcagagggcgagtccgaagggctccagacactgggaatagtggtggtcgtgtgctcctccctgaaacttttgcactacctcggactgattgacttgtcagacgataagattgaagatgagctggagatgaccatggtttgccatcggcccgagggactggagcagctcgaggcccagaccaacttcaccaagagggagctgcaggtcctttatcgaggcttcaaaaatgagtgccccagtggtgtggtcaacgaagacacattcaagcagatctatgctcagtttttccctcatggagatgccagcacgtatgcccattacctcttcaatgccttcgacaccactcagacaggctccgtgaagttcgaggactttgtaaccgctctgtcgattttattgagaggaactgtccacgagaaactaaggtggacatttaatttgtatgacatcaacaaggacggatacataaacaaagaggagatgatggacattgtcaaagccatctatgacatgatggggaaatacacatatcctgtgctcaaagaggacactccaaggcagcatgtggacgtcttcttccagaaaatggacaaaaataaagatggcatcgtaactttagatgaatttcttgaatcatgtcaggaggacgacaacatcatgaggtctctccagctgtttcaaaatgtcatgtaactggtgacactcagccattcagctctcagagacattgtactaaacaaccaccttaacaccctgatctgcccttgttctgattttacacaccaactcttgggacagaaacaccttttacactttggaagaattctctgctgaagactttctatggaacccagcatcatgtggctcagtctctgattgccaactcttcctctttcttcttcttgagagagacaagatgaaatttgagtttgttttggaagcatgctcatctcctcacactgctgccctatggaaggtccctctgcttaagcttaaacagtagtgcacaaaatatgctgcttacgtgcccccagcccactgcctccaagtcaggcagaccttggtgaatctggaagcaagaggacctgagccagatgcacaccatctctgatggcctcccaaaccaatgtgcctgtttctcttcctttggtgggaagaatgagagttatccagaacaattaggatctgtcatgaccagattgggagagccagcacctaacatatgtgggataggactgaattattaagcatgatattgtctgatgacccaaactgcccatgtcatttgtttccagaaacgaggaccaataattctctcacactggcatttgtgctggtagtacaagtcctttaatatgtccaggaagggagccattgcccagtggtccatatctccaccacatcccctgcttgagcccagcgctgcatgtccctcccaagaagtccagaatgcctgcaaattgctgtaattttataccatgttctaaccaa

SEQ ID NO: 10498 - DNA, 2249 bp, Homo sapiens
  source 1..2249: mol_type = unassigned DNA
gctggcagcaggcagcaggcagcaggcgggcgcgctgtggctccgcgccgcgcggtccgggctctgttcattcatgattggtactcggccctccgagacccagcccgagcgcagggaggggagccgagtgtgcggcaggaggggcgggcggacggcggctcccgcaccgcacgcggcgctggctcggcagcctcggccgggcggccgctctggccccgtgtccagtgccaggcaggcttcagggcaccgtcctcggccctgggcgagggaaccgccgggccgggtcctcgcgcggggaagcggttccgaaggctcgcggggagcggctagccctgagtccctgcatgtgcggggctgaagaaggaagccagaagcctcctagcctcgcctccacgcttgctgaataccaagctgcaggcgagctgccgggcgcttttctctcctccaattcagagtagacaaaccacggggatttctttccagggtaggggaggggccgggcccggggtcccaactcgcactcaagtcttcgctgccatgggggccgtcatgggcaccttctcatctctgcaaaccaaacaaaggcgaccctcgaaagaactaccttaaattaatttgttgaaaggacagatggatggatggttgatggaagtagcaggcttccagcagcaggggatggagtgagtgtgtggataccgctggatcagcagaaggttataccattttagagtaactatctcggacttcggagagttcctggataagattgaagatgagctggagatgaccatggtttgccatcggcccgagggactggagcagctcgaggcccagaccaacttcaccaagagggagctgcaggtcctttatcgaggcttcaaaaatgagtgccccagtggtgtggtcaacgaagacacattcaagcagatctatgctcagtttttccctcatggagccctgccttgtttggaaggttctccctgtgtggaattcctgcccccatcacctgccctccttttctgccttgtagatgccagcacgtatgcccattacctcttcaatgccttcgacaccactcagacaggctccgtgaagttcgaggactttgtaaccgctctgtcgattttattgagaggaactgtccacgagaaactaaggtggacatttaatttgtatgacatcaacaaggacggatacataaacaaagaggagatgatggacattgtcaaagccatctatgacatgatggggaaatacacatatcctgtgctcaaagaggacactccaaggcagcatgtggacgtcttcttccagaaaatggacaaaaataaagatggcatcgtaactttagatgaatttcttgaatcatgtcaggaggacgacaacatcatgaggtctctccagctgtttcaaaatgtcatgtaactggtgacactcagccattcagctctcagagacattgtactaaacaaccaccttaacaccctgatctgcccttgttctgattttacacaccaactcttgggacagaaacaccttttacactttggaagaattctctgctgaagactttctatggaacccagcatcatgtggctcagtctctgattgccaactcttcctctttcttcttcttgagagagacaagatgaaatttgagtttgttttggaagcatgctcatctcctcacactgctgccctatggaaggtccctctgcttaagcttaaacagtagtgcacaaaatatgctgcttacgtgcccccagcccactgcctccaagtcaggcagaccttggtgaatctggaagcaagaggacctgagccagatgcacaccatctctgatggcctcccaaaccaatgtgcctgtttctcttcctttggtgggaagaatgagagttatccagaacaattaggatctgtcatgaccagattgggagagccagcacctaacatatgtgggataggactgaattattaagcatgatattgtctgatgacccaaactgcccatgtcatttgtttccagaaacgaggaccaataattctctcacactggcatttgtgctggtagtacaagtcctttaatatgtccaggaagggagccattgcccagtggtccatatctccaccacatcccctgcttgagcccagcgctgcatgtccctcccaagaagtccagaatgcctgcaaattgctgtaattttataccatgttctaaccaataaacagaactatttcttacactctc

SEQ ID NO: 10499 - DNA, 1448 bp, Homo sapiens
  source 1..1448: mol_type = unassigned DNA
gacatcgcctggtggtattaccagtatcagagagataagattgaagatgagctggagatgaccatggtttgccatcggcccgagggactggagcagctcgaggcccagaccaacttcaccaagagggagctgcaggtcctttatcgaggcttcaaaaatgagtgccccagtggtgtggtcaacgaagacacattcaagcagatctatgctcagtttttccctcatggagatgccagcacgtatgcccattacctcttcaatgccttcgacaccactcagacaggctccgtgaagttcgaggactttgtaaccgctctgtcgattttattgagaggaactgtccacgagaaactaaggtggacatttaatttgtatgacatcaacaaggacggatacataaacaaagaggagatgatggacattgtcaaagccatctatgacatgatggggaaatacacatatcctgtgctcaaagaggacactccaaggcagcatgtggacgtcttcttccagaaaatggacaaaaataaagatggcatcgtaactttagatgaatttcttgaatcatgtcaggaggacgacaacatcatgaggtctctccagctgtttcaaaatgtcatgtaactggtgacactcagccattcagctctcagagacattgtactaaacaaccaccttaacaccctgatctgcccttgttctgattttacacaccaactcttgggacagaaacaccttttacactttggaagaattctctgctgaagactttctatggaacccagcatcatgtggctcagtctctgattgccaactcttcctctttcttcttcttgagagagacaagatgaaatttgagtttgttttggaagcatgctcatctcctcacactgctgccctatggaaggtccctctgcttaagcttaaacagtagtgcacaaaatatgctgcttacgtgcccccagcccactgcctccaagtcaggcagaccttggtgaatctggaagcaagaggacctgagccagatgcacaccatctctgatggcctcccaaaccaatgtgcctgtttctcttcctttggtgggaagaatgagagttatccagaacaattaggatctgtcatgaccagattgggagagccagcacctaacatatgtgggataggactgaattattaagcatgatattgtctgatgacccaaactgcccatgtcatttgtttccagaaacgaggaccaataattctctcacactggcatttgtgctggtagtacaagtcctttaatatgtccaggaagggagccattgcccagtggtccatatctccaccacatcccctgcttgagcccagcgctgcatgtccctcccaagaagtccagaatgcctgcaaattgctgtaattttataccatgttctaaccaataaacagaactatttcttacactctc

SEQ ID NO: 10500 - DNA, 2089 bp, Homo sapiens
  source 1..2089: mol_type = unassigned DNA
tggagcttagacgccgagctcgccgccaaaccatgaaccgatgcccccgcaggtgccggagcccgctggggcaggcagcgcgatccctctaccagctggtgactgggtcgctgtccccagacagcgtggacgatgaatttgaattgtccaccgtgtgtcaccggcctgagggtctggagcagctgcaggagcaaaccaaattcacgcgcaaggagttgcaggtcctgtaccggggcttcaagaacgaatgtcccagcggaattgtcaatgaggagaacttcaagcagatttactcccagttctttcctcaaggagactccagcacctatgccacttttctcttcaatgcctttgacaccaaccatgatggctcggtcagttttgaggactttgtggctggtttgtccgtgattcttcggggaactgtagatgacaggcttaattgggccttcaacctgtatgaccttaacaaggacggctgcatcaccaaggaggaaatgcttgacatcatgaagtccatctatgacatgatgggcaagtacacgtaccctgcactccgggaggaggccccaagggaacacgtggagagcttcttccagaagatggacagaaacaaggatggtgtggtgaccattgaggaattcattgagtcttgtcaaaaggatgagaacatcatgaggtccatgcagctctttgacaatgtcatctagcccccaggagagggggtcagtgtttcctggggggaccatgctctaaccctagtccaggcggacctcacccttctcttcccaggtctatcctcatcctacgcctccctgggggctggagggatccaagagcttggggattcagtagtccagatctctggagctgaaggggccagagagtgggcagagtgcatctcggggggtgttcccaactcccaccagctctcacccccttcctgcctgacacccagtgttgagagtgcccctcctgtaggaattgagcggttccccacctcctacccctactctagaaacacactagacagatgtctcctgctatggtgcttcccccatccctgacctcataaacatttcccctaagactcccctctcagagagaatgctccattcttggcactggctggcttctcagaccagccattgagagccctgtgggagggggacaagaatgtatagggagaaatcttgggcctgagtcaatggataggtcctaggaggtggctggggttgagaatagaagggcctggacagattatgattgctcaggcataccaggttatagctccaagttccacaggtctgctaccacaggccatcaaaatataagtttccaggctttgcagaagaccttgtctccttagaaatgccccagaaattttccacaccctcctcggtatccatggagagcctggggccagatatctggctcatctctggcattgcttcctctccttccttcctgcatgtgttggtggtggttgtggtgggggaatgtggatgggggatgtcctggctgatgcctgccaaaatttcatcccaccctccttgcttatcgtccctgttttgagggctatgacttgagtttttgtttcccatgttctctatagacttgggaccttcctgaacttggggcctatcactccccacagtggatgccttagaagggagagggaaggagggaggcaggcatagcatctgaacccagtgtgggggcattcactagaatcttcaatcaacctgggctctccccaccccaccccagataacctcctcagttccctagggtctcttcttgcttgactcaatctacccagagatgccccttagcacacctagagggcagggaccataggacccaggttccaaccccattgtcagcaccccagccatgcggccaccccttagcacacctgctcgtcccatttagcttaccctcccagttggccagaatctgaggggagagcccccagagagcccccttccccatcagaagactgttgactgctttgcattttgggctcttctatatattttgtaaagtaagaaatataccagatctaataaaacacaatggctatgca

SEQ ID NO: 10501 - DNA, 2617 bp, Homo sapiens
  source 1..2617: mol_type = unassigned DNA
aaagggtggggggcgggggtagggggagccaatcccggcagcgccaaagaggggaggaggcggtgacagccgcggggagggggcgggaggagagaggcagctcggctcggctccgcgctcagctccgctctgcctccggctctgcgctcacctgctgcctagtgttccctctcctgctccaggacctccgggtagacctcagaccccgggcccattcccagactcagcctcagcccggacttccccagccccgacagcacagtaggccgccagggggcgccgtgtgagcgccctatcccggccacccggcgccccctcccacggcccgggcgggagcggggcgccgggggccatgcggggccagggccgcaaggagagtttgtccgattcccgagacctggacggctcctacgaccagctcacgggccaccctccagggcccactaaaaaagcgctgaagcagcgattcctcaagctgctgccgtgctgcgggccccaagccctgccctcagtcagtgaaattggccgggtcttccgctttctcggtgacagttcgctcccttcagcattagccgccccagcctccctccgcccccacagaccccgcctgctggacccagacagcgtggacgatgaatttgaattgtccaccgtgtgtcaccggcctgagggtctggagcagctgcaggagcaaaccaaattcacgcgcaaggagttgcaggtcctgtaccggggcttcaagaactcttccctcccatcacatgagccacgtggaatgtcccagcggaattgtcaatgaggagaacttcaagcagatttactcccagttctttcctcaaggagactccagcacctatgccacttttctcttcaatgcctttgacaccaaccatgatggctcggtcagttttgaggactttgtggctggtttgtccgtgattcttcggggaactgtagatgacaggcttaattgggccttcaacctgtatgaccttaacaaggacggctgcatcaccaaggaggaaatgcttgacatcatgaagtccatctatgacatgatgggcaagtacacgtaccctgcactccgggaggaggccccaagggaacacgtggagagcttcttccagaagatggacagaaacaaggatggtgtggtgaccattgaggaattcattgagtcttgtcaaaaggatgagaacatcatgaggtccatgcagctctttgacaatgtcatctagcccccaggagagggggtcagtgtttcctggggggaccatgctctaaccctagtccaggcggacctcacccttctcttcccaggtctatcctcatcctacgcctccctgggggctggagggatccaagagcttggggattcagtagtccagatctctggagctgaaggggccagagagtgggcagagtgcatctcggggggtgttcccaactcccaccagctctcacccccttcctgcctgacacccagtgttgagagtgcccctcctgtaggaattgagcggttccccacctcctacccctactctagaaacacactagacagatgtctcctgctatggtgcttcccccatccctgacctcataaacatttcccctaagactcccctctcagagagaatgctccattcttggcactggctggcttctcagaccagccattgagagccctgtgggagggggacaagaatgtatagggagaaatcttgggcctgagtcaatggataggtcctaggaggtggctggggttgagaatagaagggcctggacagattatgattgctcaggcataccaggttatagctccaagttccacaggtctgctaccacaggccatcaaaatataagtttccaggctttgcagaagaccttgtctccttagaaatgccccagaaattttccacaccctcctcggtatccatggagagcctggggccagatatctggctcatctctggcattgcttcctctccttccttcctgcatgtgttggtggtggttgtggtgggggaatgtggatgggggatgtcctggctgatgcctgccaaaatttcatcccaccctccttgcttatcgtccctgttttgagggctatgacttgagtttttgtttcccatgttctctatagacttgggaccttcctgaacttggggcctatcactccccacagtggatgccttagaagggagagggaaggagggaggcaggcatagcatctgaacccagtgtgggggcattcactagaatcttcaatcaacctgggctctccccaccccaccccagataacctcctcagttccctagggtctcttcttgcttgactcaatctacccagagatgccccttagcacacctagagggcagggaccataggacccaggttccaaccccattgtcagcaccccagccatgcggccaccccttagcacacctgctcgtcccatttagcttaccctcccagttggccagaatctgaggggagagcccccagagagcccccttccccatcagaagactgttgactgctttgcattttgggctcttctatatattttgtaaagtaagaaatataccagatctaataaaacacaatggctatgca

SEQ ID NO: 10502 - DNA, 1989 bp, Homo sapiens
  source 1..1989: mol_type = unassigned DNA
gagggggcgggaggagagaggcagctcggctcggctccgcgctcagctccgctctgcctccggctctgcgctcacctgctgcctagtgttccctctcctgctccaggacctccgggtagacctcagaccccgggcccattcccagactcagcctcagcccggacttccccagccccgacagcacagtaggccgccagggggcgccgtgtgagcgccctatcccggccacccggcgccccctcccacggcccgggcgggagcggggcgccgggggccatgcggggccagggccgcaaggagagtttgtccgattcccgagacctggacggctcctacgaccagctcacgggccaccctccagggcccactaaaaaagcgctgaagcagcgattcctcaagctgctgccgtgctgcgggccccaagccctgccctcagtcagtgaaacattagccgccccagcctccctccgcccccacagaccccgcctgctggacccagacagcgtggacgatgaatttgaattgtccaccgtgtgtcaccggcctgagggtctggagcagctgcaggagcaaaccaaattcacgcgcaaggagttgcaggtcctgtaccggggcttcaagaacgaatgtcccagcggaattgtcaatgaggagaacttcaagcagatttactcccagttctttcctcaaggagactccagcacctatgccacttttctcttcaatgcctttgacaccaaccatgatggctcggtcagttttgaggactttgtggctggtttgtccgtgattcttcggggaactgtagatgacaggcttaattgggccttcaacctgtatgaccttaacaaggacggctgcatcaccaaggaggaaatgcttgacatcatgaagtccatctatgacatgatgggcaagtacacgtaccctgcactccgggaggaggccccaagggaacacgtggagagcttcttccagaagatggacagaaacaaggatggtgtggtgaccattgaggaattcattgagtcttgtcaaaaggatgagaacatcatgaggtccatgcagctctttgacaatgtcatctagcccccaggagagggggtcagtgtttcctggggggaccatgctctaaccctagtccaggcggacctcacccttctcttcccaggtctatcctcatcctacgcctccctgggggctggagggatccaagagcttggggattcagtagtccagatctctggagctgaaggggccagagagtgggcagagtgcatctcggggggtgttcccaactcccaccagctctcacccccttcctgcctgacacccagtgttgagagtgcccctcctgtaggaattgagcggttccccacctcctacccctactctagaaacacactagacagatgtctcctgctatggtgcttcccccatccctgacctcataaacatttcccctaagactcccctctcagagagaatgctccattcttggcactggctggcttctcagaccagccattgagagccctgtgggagggggacaagaatgtatagggagaaatcttgggcctgagtcaatggataggtcctaggaggtggctggggttgagaatagaagggcctggacagattatgattgctcaggcataccaggttatagctccaagttccacaggtctgctaccacaggccatcaaaatataagtttccaggctttgcagaagaccttgtctccttagaaatgccccagaaattttccacaccctcctcggtatccatggagagcctggggccagatatctggctcatctctggcattgcttcctctccttccttcctgcatgtgttggtggtggttgtggtgggggaatgtggatgggggatgtcctggctgatgcctgccaaaatttcatcccaccctccttgcttatcgtccctgttttgagggctatgacttgagtttttgtttcccatgttctc

SEQ ID NO: 10503 - DNA, 428 bp, Homo sapiens
  source 1..428: mol_type = unassigned DNA
gggcaagtacacgtaccctgcactccgggaggaggccccaagggaacacgtggagagcttcttccagaagatggacagaaacaaggatggtgtggtgaccattgaggaattcattgagtcttgtcaaaaggtctatcctcatcctacgcctccctgggggctggagggatccaagagcttggggattcagtagtccagatctctggagctgaaggggccagagagtgggcagagtgcatctcggggggtgttcccaactcccaccagctctcacccccttcctgcctgacacccagtgttgagagtgcccctcctgtaggaattgagcggttccccacctcctacccctactctagaaacacactagacagatgtctcctgctatggtgcttcccccatccctgacctcataaacatttcccctaaga

SEQ ID NO: 10504 - DNA, 923 bp, Homo sapiens
  source 1..923: mol_type = unassigned DNA
ctgctgcctagtgttccctctcctgctccaggacctccgggtagacctcagaccccgggcccattcccagactcagcctcagcccggacttccccagccccgacagcacagtaggccgccagggggcgccgtgtgagcgccctatcccggccacccggcgccccctcccacggcccgggcgggagcggggcgccgggggccatgcggggccagggccgcaaggagagtttgtccgattcccgagacctggacggctcctacgaccagctcacggacagcgtggacgatgaatttgaattgtccaccgtgtgtcaccggcctgagggtctggagcagctgcaggagcaaaccaaattcacgcgcaaggagttgcaggtcctgtaccggggcttcaagaacgaatgtcccagcggaattgtcaatgaggagaacttcaagcagatttactcccagttctttcctcaaggagactccagcacctatgccacttttctcttcaatgcctttgacaccaaccatgatggctcggtcagttttgaggaaatgcttgacatcatgaagtccatctatgacatgatgggcaagtacacgtaccctgcactccgggaggaggccccaagggaacacgtggagagcttcttccagaagatggacagaaacaaggatggtgtggtgaccattgaggaattcattgagtcttgtcaaaaggatgagaacatcatgaggtccatgcagctctttgacaatgtcatctagcccccaggagagggggtcagtgtttcctggggggaccatgctctaaccctagtccaggcggacctcacccttctcttcccaggtctatcctcatcctacgcctccctgggggctggagggatccaagagcttggggattcagtagtccagatctctggagctgaagg

SEQ ID NO: 10505 - DNA, 847 bp, Homo sapiens
  source 1..847: mol_type = unassigned DNA
atgcggggccagggccgcaaggagagtttgtccgattcccgagacctggacggctcctacgaccagctcacgggccaccctccagggcccactaaaaaagcgctgaagcagcgattcctcaagctgctgccgtgctgcgggccccaagccctgccctcagtcagtgaaaacagcgtggacgatgaatttgaattgtccaccgtgtgtcaccggcctgagggtctggagcagctgcaggagcaaaccaaattcacgcgcaaggagttgcaggtcctgtaccggggcttcaagaacaagtcttccctcccatcacatgagccacgtggaatgtcccagcggaattgtcaatgaggagaacttcaagcagatttactcccagttctttcctcaaggagactccagcacctatgccacttttctcttcaatgcctttgacaccaaccatgatggctcggtcagttttgaggactttgtggctggtttgtccgtgattcttcggggaactgtagatgacaggcttaattgggccttcaacctgtatgaccttaacaaggacggctgcatcaccaaggaggaaatgcttgacatcatgaagtccatctatgacatgatgggcaagtacacgtaccctgcactccgggaggaggccccaagggaacacgtggagagcttcttccagaagatggacagaaacaaggatggtgtggtgaccattgaggaattcattgagtcttgtcaaaaggatgagaacatcatgaggtccatgcagctctttgacaatgtcatctagcccccaggagagggggtcagtgtttcctggggggaccatgctctaaccctagtccag

SEQ ID NO: 10506 - DNA, 534 bp, Homo sapiens
  source 1..534: mol_type = unassigned DNA
atgtggcttagctggacagcgtggacgatgaatttgaattgtccaccgtgtgtcaccggcctgagggtctggagcagctgcaggagcaaaccaaattcacgcgcaaggagttgcaggtcctgtaccggggcttcaagaacgaatgtcccagcggaattgtcaatgaggagaacttcaagcagatttactcccagttctttcctcaaggaggactttgtggctggtttgtccgtgattcttcggggaactgtagatgacaggcttaattgggccttcaacctgtatgaccttaacaaggacggctgcatcaccaaggaggaaatgcttgacatcatgaagtccatctatgacatgatgggcaagtacacgtaccctgcactccgggaggaggccccaagggaacacgtggagagcttcttccagaagatggacagaaacaaggatggtgtggtgaccattgaggaattcattgagtcttgtcaaaaggatgagaacatcatgaggtccatgcagctctttgacaatgtcatctag

SEQ ID NO: 10507 - DNA, 684 bp, Homo sapiens
  source 1..684: mol_type = unassigned DNA
atgcggggccagggccgcaaggagagtttgtccgattcccgagacctggacggctcctacgaccagctcacggacagcgtggacgatgaatttgaattgtccaccgtgtgtcaccggcctgagggtctggagcagctgcaggagcaaaccaaattcacgcgcaaggagttgcaggtcctgtaccggggcttcaagaaccctggtgccctctccttccaggaatgtcccagcggaattgtcaatgaggagaacttcaagcagatttactcccagttctttcctcaaggagactccagcacctatgccacttttctcttcaatgcctttgacaccaaccatgatggctcggtcagttttgaggactttgtggctggtttgtccgtgattcttcggggaactgtagatgacaggcttaattgggccttcaacctgtatgaccttaacaaggacggctgcatcaccaaggaggaaatgcttgacatcatgaagtccatctatgacatgatgggcaagtacacgtaccctgcactccgggaggaggccccaagggaacacgtggagagcttcttccagaagatggacagaaacaaggatggtgtggtgaccattgaggaattcattgagtcttgtcaaaaggatgagaacatcatgaggtccatgcagctctttgacaatgtcatctag

SEQ ID NO: 10508 - DNA, 858 bp, Homo sapiens
  source 1..858: mol_type = unassigned DNA
atgcggggccagggccgcaaggagagtttgtccgattcccgagacctggacggctcctacgaccagctcacgggccaccctccagggcccactaaaaaagcgctgaagcagcgattcctcaagctgctgccgtgctgcgggccccaagccctgccctcagtcagtgaaattggccgggtcttccgctttctcggtgacagttcgctcccttcagcattagccgccccagcctccctccgcccccacagaccccgcctgctggacccagacagcgtggacgatgaatttgaattgtccaccgtgtgtcaccggcctgagggtctggagcagctgcaggagcaaaccaaattcacgcgcaaggagttgcaggtcctgtaccggggcttcaagaacgaatgtcccagcggaattgtcaatgaggagaacttcaagcagatttactcccagttctttcctcaaggagactccagcacctatgccacttttctcttcaatgcctttgacaccaaccatgatggctcggtcagttttgaggactttgtggctggtttgtccgtgattcttcggggaactgtagatgacaggcttaattgggccttcaacctgtatgaccttaacaaggacggctgcatcaccaaggaggaaatgcttgacatcatgaagtccatctatgacatgatgggcaagtacacgtaccctgcactccgggaggaggccccaagggaacacgtggagagcttcttccagaagatggacagaaacaaggatggtgtggtgaccattgaggaattcattgagtcttgtcaaaaggatgagaacatcatgaggtccatgcagctctttgacaatgtcatctag

SEQ ID NO: 10509 - DNA, 663 bp, Homo sapiens
  source 1..663: mol_type = unassigned DNA
atgcggggccagggccgcaaggagagtttgtccgattcccgagacctggacggctcctacgaccagctcacggacagcgtggacgatgaatttgaattgtccaccgtgtgtcaccggcctgagggtctggagcagctgcaggagcaaaccaaattcacgcgcaaggagttgcaggtcctgtaccggggcttcaagaacgaatgtcccagcggaattgtcaatgaggagaacttcaagcagatttactcccagttctttcctcaaggagactccagcacctatgccacttttctcttcaatgcctttgacaccaaccatgatggctcggtcagttttgaggactttgtggctggtttgtccgtgattcttcggggaactgtagatgacaggcttaattgggccttcaacctgtatgaccttaacaaggacggctgcatcaccaaggaggaaatgcttgacatcatgaagtccatctatgacatgatgggcaagtacacgtaccctgcactccgggaggaggccccaagggaacacgtggagagcttcttccagaagatggacagaaacaaggatggtgtggtgaccattgaggaattcattgagtcttgtcaaaaggatgagaacatcatgaggtccatgcagctctttgacaatgtcatctag

SEQ ID NO: 10510 - DNA, 555 bp, Homo sapiens
  source 1..555: mol_type = unassigned DNA
atgcggggccagggccgcaaggagagtttgtccgattcccgagacctggacggctcctacgaccagctcacggacagcgtggacgatgaatttgaattgtccaccgtgtgtcaccggcctgagggtctggagcagctgcaggagcaaaccaaattcacgcgcaaggagttgcaggtcctgtaccggggcttcaagaacgaatgtcccagcggaattgtcaatgaggagaacttcaagcagatttactcccagttctttcctcaaggagactccagcacctatgccacttttctcttcaatgcctttgacaccaaccatgatggctcggtcagttttgaggaaatgcttgacatcatgaagtccatctatgacatgatgggcaagtacacgtaccctgcactccgggaggaggccccaagggaacacgtggagagcttcttccagaagatggacagaaacaaggatggtgtggtgaccattgaggaattcattgagtcttgtcaaaaggtacagctccctgccctctacattaccctgacctggactcaggcctga

SEQ ID NO: 10511 - DNA, 736 bp, Homo sapiens
  source 1..736: mol_type = unassigned DNA
ctcagacgccccctcttgaactggcttttcccactcctccctttctaaaacgaagatgcggctgggggccttcccctccaacgagggatcgagggccgcggggcgagcactgagtcggatccctggctctggggccaggccaggccttggcccgctgatagacctcgaagatggccatcatcttttctccttacctcagtgtccttggctcggggcccagggaactggcagcctggtctccggcatcggatgggaccggggggcggggagggggtgaatggggcagtgatttgaagaggggtcgcggaggctgggcctgaggcgcggctgtcctcaccgctcccgcagacagcgtggacgatgaatttgaattgtccaccgtgtgtcaccggcctgagggtctggagcagctgcaggagcaaaccaaattcacgcgcaaggagttgcaggtcctgtaccggggcttcaagaacgaatgtcccagcggaattgtcaatgaggagaacttcaagcagatttactcccagttctttcctcaaggagactccagcacctatgccacttttctcttcaatgcctttgacaccaaccatgatggctcggtcagttttgaggtgagctgggcgaggtgggccagggaagcctgtttcctggagttcagggccaggatctccaggccaaacccagagaaggagttgggtgaagagtacccgaggacacagctccctcctgcctc

SEQ ID NO: 10512 - DNA, 2489 bp, Homo sapiens
  source 1..2489: mol_type = unassigned DNA
aaagggtggggggcgggggtagggggagccaatcccggcagcgccaaagaggggaggaggcggtgacagccgcggggagggggcgggaggagagaggcagctcggctcggctccgcgctcagctccgctctgcctccggctctgcgctcacctgctgcctagtgttccctctcctgctccaggacctccgggtagacctcagaccccgggcccattcccagactcagcctcagcccggacttccccagccccgacagcacagtaggccgccagggggcgccgtgtgagcgccctatcccggccacccggcgccccctcccacggcccgggcgggagcggggcgccgggggccatgcggggccagggccgcaaggagagtttgtccgattcccgagacctggacggctcctacgaccagctcacgggccaccctccagggcccactaaaaaagcgctgaagcagcgattcctcaagctgctgccgtgctgcgggccccaagccctgccctcagtcagtgaaaacagcgtggacgatgaatttgaattgtccaccgtgtgtcaccggcctgagggtctggagcagctgcaggagcaaaccaaattcacgcgcaaggagttgcaggtcctgtaccggggcttcaagaacgaatgtcccagcggaattgtcaatgaggagaacttcaagcagatttactcccagttctttcctcaaggagactccagcacctatgccacttttctcttcaatgcctttgacaccaaccatgatggctcggtcagttttgaggactttgtggctggtttgtccgtgattcttcggggaactgtagatgacaggcttaattgggccttcaacctgtatgaccttaacaaggacggctgcatcaccaaggaggaaatgcttgacatcatgaagtccatctatgacatgatgggcaagtacacgtaccctgcactccgggaggaggccccaagggaacacgtggagagcttcttccagaagatggacagaaacaaggatggtgtggtgaccattgaggaattcattgagtcttgtcaaaaggatgagaacatcatgaggtccatgcagctctttgacaatgtcatctagcccccaggagagggggtcagtgtttcctggggggaccatgctctaaccctagtccaggcggacctcacccttctcttcccaggtctatcctcatcctacgcctccctgggggctggagggatccaagagcttggggattcagtagtccagatctctggagctgaaggggccagagagtgggcagagtgcatctcggggggtgttcccaactcccaccagctctcacccccttcctgcctgacacccagtgttgagagtgcccctcctgtaggaattgagcggttccccacctcctacccctactctagaaacacactagacagatgtctcctgctatggtgcttcccccatccctgacctcataaacatttcccctaagactcccctctcagagagaatgctccattcttggcactggctggcttctcagaccagccattgagagccctgtgggagggggacaagaatgtatagggagaaatcttgggcctgagtcaatggataggtcctaggaggtggctggggttgagaatagaagggcctggacagattatgattgctcaggcataccaggttatagctccaagttccacaggtctgctaccacaggccatcaaaatataagtttccaggctttgcagaagaccttgtctccttagaaatgccccagaaattttccacaccctcctcggtatccatggagagcctggggccagatatctggctcatctctggcattgcttcctctccttccttcctgcatgtgttggtggtggttgtggtgggggaatgtggatgggggatgtcctggctgatgcctgccaaaatttcatcccaccctccttgcttatcgtccctgttttgagggctatgacttgagtttttgtttcccatgttctctatagacttgggaccttcctgaacttggggcctatcactccccacagtggatgccttagaagggagagggaaggagggaggcaggcatagcatctgaacccagtgtgggggcattcactagaatcttcaatcaacctgggctctccccaccccaccccagataacctcctcagttccctagggtctcttcttgcttgactcaatctacccagagatgccccttagcacacctagagggcagggaccataggacccaggttccaaccccattgtcagcaccccagccatgcggccaccccttagcacacctgctcgtcccatttagcttaccctcccagttggccagaatctgaggggagagcccccagagagcccccttccccatcagaagactgttgactgctttgcattttgggctcttctatatattttgtaaagtaagaaatataccagatctaataaaacacaatggctatgc

SEQ ID NO: 10513 - DNA, 2481 bp, Homo sapiens
  source 1..2481: mol_type = unassigned DNA
aactgcttctggagaggggatgccgagccgaaccagagctgggttactacaagtgtgaaccggcagcctgtctgttgccacagaagaacttggtcaccacactgagaagccgtgttttctcacctccctgttactgttgtagctgtatctggcttctctagcattttaaaggaatttctgattgaggcgctaacagctaattccacaggagttgtaaggcagcctgtgcataaactgagacagaagtttctcctcagagactctctttttattattattattattattattggcaaagacttctggctctcctcagaggaataccttgttgcttaagatgagtggctgtagaaagcggtgtaaacgtgaaatactgaaatttgcccagtaccttctcagactattaacaggttctcttcatacagacagcgtggaagatgaactggagatggccaccgtcaggcatcggcctgaagcccttgagcttctggaagcccagagcaaatttaccaagaaagagcttcagatcctttacagaggatttaagaatgaatgccccagtggtgttgttaatgaagaaaccttcaaagagatttactcgcagttctttccacagggagactctacaacatatgcacattttctgttcaatgcatttgatacagaccacaatggagctgtgagtttcgaggatttcatcaaaggtctttccattttgctccgggggacagtacaagaaaaactcaattgggcatttaatctgtatgacataaataaagatggctacatcactaaagaggaaatgcttgatataatgaaagcaatatacgatatgatgggtaaatgtacatatcctgtcctcaaagaagatgctcccagacaacacgttgaaacattttttcagaaaatggacaaaaataaagatggggttgttaccatagatgagttcattgaaagctgccaaaaagatgaaaacataatgcgctccatgcagctctttgaaaatgtgatttaacttgtcaaatagatcctgaatccaacagacaaatgtgaactattctaccacccttaaagttggagctaccacttttagcatagattgctcagcttgacactgaagcatattatgcaaacaagctttgttttaatataaagcaatccccaaaagatttgagctttcagttataaatttgcatccttttcataatgccactgagttcaggggatggtctaactcatttcatactctgtgaatattcaaaagtaatagaatctggcatatagttttattggttccttagccatgggattattgaggctttcacatatcagtgattttaaaatatcagtgttttttgctactcatttgtatgtattcagtcctaggattttgaatggttttctaatatagtgacatctgcatttaatttccagaaattaaattaattttcatgtttgaatgctgtaattccatttaaattccatttatatactttaaggaaacaagattacaacaattaaaaaaacacatagttccagtttctatggccttcccaccttctgttagaaattagttttatctggcatttttaaacatttaaaaattattaaacatttaaaaattagtttattatcagatatcagcatatgcctaataaaacttattttaataagcatttaattttccataatatgttacagccaaggcctatataataattttggatttgttcaatctttcttacaggctgttttctattgtatcaatcattagtatcaatcattaagtggaagttgaagaaggcatcaaacaaaacaaggatgtttacagacatatgcaaagggtcaggatatctatcctccagtatatagtaatgcttaataacaagtaatcctaacagcattaaaggccaaatctgtcctctttcccctgacttccttacagcatgtttatttatattacaagccattcagggacaaagaaagaaaccttgactaccccactgtctactaagaacaaacagcaagcaaaattagcaagcaaaattcactttgaaagcaccagtggttccattacattgacaactactaccaagatttagtagaaaataagtgctcaacaactaatccagattacagtatgatttagctcatcataattcagattatttttaatcatcttagccaaaactgtaaagttgccacattactaaagccacacacatcgtccctgttttgtagaaatatcacaaagaccaagaggctacagaaggaggaaatttgcaactgtctttgcaacaataaatcaggtatctattctggtgtagagataggatgttgaaagctgccctgctatcaccagtgtagaaattaagagtagtacaatacatgtacactgaaatttgccatcacgtgtttgtgtaaactcaatgtgcacattttgtatttcaaaaagaaaaaataaaagcaaaataaaatgtt

SEQ ID NO: 10514 - DNA, 1641 bp, Homo sapiens
  source 1..1641: mol_type = unassigned DNA
agcgccacggacgcccccgggccgagcggcggtgcgctcccgtgcagacccgtggacagacgcccctggccggtggactctcgagtctcgcttctgcaccctgcgtccctagacatgaatgtgaggagggtggaaagcatttcggctcagctggaggaggccagctctacaggcgacagcgtggaagatgaactggagatggccaccgtcaggcatcggcctgaagcccttgagcttctggaagcccagagcaaatttaccaagaaagagcttcagatcctttacagaggatttaagaatgaatgccccagtggtgttgttaatgaagaaaccttcaaagagatttactcgcagttctttccacagggagactctacaacatatgcacattttctgttcaatgcatttgatacagaccacaatggagctgtgagtttcgaggatttcatcaaaggtctttccattttgctccgggggacagtacaagaaaaactcaattgggcatttaatctgtatgacataaataaagatggctacatcactaaagaggaaatgcttgatataatgaaagcaatatacgatatgatgggtaaatgtacatatcctgtcctcaaagaagatgctcccagacaacacgttgaaacattttttcagaaaatggacaaaaataaagatggggttgttaccatagatgagttcattgaaagctgccaaaaagatgaaaacataatgcgctccatgcagctctttgaaaatgtgatttaacttgtcaaatagatcctgaatccaacagacaaatgtgaactattctaccacccttaaagttggagctaccacttttagcatagattgctcagcttgacactgaagcatattatgcaaacaagctttgttttaatataaagcaatccccaaaagatttgagctttcagttataaatttgcatccttttcataatgccactgagttcaggggatggtctaactcatttcatactctgtgaatattcaaaagtaatagaatctggcatatagttttattggttccttagccatgggattattgaggctttcacatatcagtgattttaaaatatcagtgttttttgctactcatttgtatgtattcagtcctaggattttgaatggttttctaatatagtgacatctgcatttaatttccagaaattaaattaattttcatgtttgaatgctgtaattccatttaaattccatttatatactttaaggaaacaagattacaacaattaaaaaaacacatagttccagtttctatggccttcccaccttctgttagaaattagttttatctggcatttttaaacatttaaaaattattaaacatttaaaaattagtttattatcagatatcagcatatgcctaataaaacttattttaataagcatttaattttccataatatgttacagccaaggcctatataataattttggatttgttcaatctttcttacaggctgttttctattgtatcaatcattagtatcaatcattaagtggaagttgaagaaggcatcaaacaaaacaaggatgtttacagacatatgcaaagggtcaggatatctatcctccagtatatagtaatgcttaataacaagta

SEQ ID NO: 10515 - DNA, 1645 bp, Homo sapiens
  source 1..1645: mol_type = unassigned DNA
aatgtagtttaatggctttacaaagaaagccaggcagaggagcacttctcagtggctgtggtcggaccatgacctagctgaccatgaacttggaagggcttgaaatgatagcagttctgatcgtcattgtgctttttgttaaattattggaacagtttgggctgattgaagcaggtttagaagacagcgtggaagatgaactggagatggccaccgtcaggcatcggcctgaagcccttgagcttctggaagcccagagcaaatttaccaagaaagagcttcagatcctttacagaggatttaagaatgaatgccccagtggtgttgttaatgaagaaaccttcaaagagatttactcgcagttctttccacagggagactctacaacatatgcacattttctgttcaatgcatttgatacagaccacaatggagctgtgagtttcgaggatttcatcaaaggtctttccattttgctccgggggacagtacaagaaaaactcaattgggcatttaatctgtatgacataaataaagatggctacatcactaaagaggaaatgcttgatataatgaaagcaatatacgatatgatgggtaaatgtacatatcctgtcctcaaagaagatgctcccagacaacacgttgaaacattttttcagaaaatggacaaaaataaagatggggttgttaccatagatgagttcattgaaagctgccaaaaagatgaaaacataatgcgctccatgcagctctttgaaaatgtgatttaacttgtcaaatagatcctgaatccaacagacaaatgtgaactattctaccacccttaaagttggagctaccacttttagcatagattgctcagcttgacactgaagcatattatgcaaacaagctttgttttaatataaagcaatccccaaaagatttgagctttcagttataaatttgcatccttttcataatgccactgagttcaggggatggtctaactcatttcatactctgtgaatattcaaaagtaatagaatctggcatatagttttattggttccttagccatgggattattgaggctttcacatatcagtgattttaaaatatcagtgttttttgctactcatttgtatgtattcagtcctaggattttgaatggttttctaatatagtgacatctgcatttaatttccagaaattaaattaattttcatgtttgaatgctgtaattccatttaaattccatttatatactttaaggaaacaagattacaacaattaaaaaaacacatagttccagtttctatggccttcccaccttctgttagaaattagttttatctggcatttttaaacatttaaaaattattaaacatttaaaaattagtttattatcagatatcagcatatgcctaataaaacttattttaataagcatttaattttccataatatgttacagccaaggcctatataataattttggatttgttcaatctttcttacaggctgttttctattgtatcaatcattagtatcaatcattaagtggaagttgaagaaggcatcaaacaaaacaaggatgtttacagacatatgcaaagggtcaggatatctatcctccagtatatagtaatgcttaataaca

SEQ ID NO: 10516 - DNA, 1767 bp, Homo sapiens
  source 1..1767: mol_type = unassigned DNA
ctgcagcccgctccgcgcgccctgcccgcagccgccgccgaagctctcgctcccagcgccacggacgcccccgggccgagcggcggtgcgctcccgtgcagacccgtggacagacgcccctggccggtggactctcgagtctcgcttctgcaccctgcgtccctagacatgaatgtgaggagggtggaaagcatttcggctcagctggaggaggccagctctacaggcggtttcctgtacgctcagaacagcaccaagcgcagcattaaagagcggctcatgaagctcttgccctgctcagctgccaaaacgtcgtctcctgctattcaaaacagcgtggaagatgaactggagatggccaccgtcaggcatcggcctgaagcccttgagcttctggaagcccagagcaaatttaccaagaaagagcttcagatcctttacagaggatttaagaatgaatgccccagtggtgttgttaatgaagaaaccttcaaagagatttactcgcagttctttccacagggagactctacaacatatgcacattttctgttcaatgcatttgatacagaccacaatggagctgtgagtttcgaggatttcatcaaaggtctttccattttgctccgggggacagtacaagaaaaactcaattgggcatttaatctgtatgacataaataaagatggctacatcactaaagaggaaatgcttgatataatgaaagcaatatacgatatgatgggtaaatgtacatatcctgtcctcaaagaagatgctcccagacaacacgttgaaacattttttcagaaaatggacaaaaataaagatggggttgttaccatagatgagttcattgaaagctgccaaaaagatgaaaacataatgcgctccatgcagctctttgaaaatgtgatttaacttgtcaaatagatcctgaatccaacagacaaatgtgaactattctaccacccttaaagttggagctaccacttttagcatagattgctcagcttgacactgaagcatattatgcaaacaagctttgttttaatataaagcaatccccaaaagatttgagctttcagttataaatttgcatccttttcataatgccactgagttcaggggatggtctaactcatttcatactctgtgaatattcaaaagtaatagaatctggcatatagttttattggttccttagccatgggattattgaggctttcacatatcagtgattttaaaatatcagtgttttttgctactcatttgtatgtattcagtcctaggattttgaatggttttctaatatagtgacatctgcatttaatttccagaaattaaattaattttcatgtttgaatgctgtaattccatttaaattccatttatatactttaaggaaacaagattacaacaattaaaaaaacacatagttccagtttctatggccttcccaccttctgttagaaattagttttatctggcatttttaaacatttaaaaattattaaacatttaaaaattagtttattatcagatatcagcatatgcctaataaaacttattttaataagcatttaattttccataatatgttacagccaaggcctatataataattttggatttgttcaatctttcttacaggctgttttctattgtatcaatcattagtatcaatcattaagtggaagttgaagaaggcatcaaacaaaacaaggatgtttacagacatatgcaaagggtcaggatatctatcct

SEQ ID NO: 10517 - DNA, 1301 bp, Homo sapiens
  source 1..1301: mol_type = unassigned DNA
aagatggaggctctgtgtgagaaggaatgcagggcagcctctggttgcagagagcagcacccggtttgacagctagcaatgcaattgtgacctcagacctacaatgtcaaggaattggcttctgccaacaaccagaatgagcatgaaagtggattagtccttggaacttccagataagagcccagccagctatacttggatttcagcctgtgagattctcagcagagaacccagtcaagtgtgtccagacgtccaacctacagaactacagcgtggaagatgaactggagatggccaccgtcaggcatcggcctgaagcccttgagcttctggaagcccagagcaaatttaccaagaaagagcttcagatcctttacagaggatttaagaatgaatgccccagtggtgttgttaatgaagaaaccttcaaagagatttactcgcagttctttccacagggagactctacaacatatgcacattttctgttcaatgcatttgatacagaccacaatggagctgtgagtttcgaggatttcatcaaaggtctttccattttgctccgggggacagtacaagaaaaactcaattgggcatttaatctgtatgacataaataaagatggctacatcactaaagaggaaatgcttgatataatgaaagcaatatacgatatgatgggtaaatgtacatatcctgtcctcaaagaagatgctcccagacaacacgttgaaacattttttcagaaaatggacaaaaataaagatggggttgttaccatagatgagttcattgaaagctgccaaaaagatgaaaacataatgcgctccatgcagctctttgaaaatgtgatttaacttgtcaaatagatcctgaatccaacagacaaatgtgaactattctaccacccttaaagttggagctaccacttttagcatagattgctcagcttgacactgaagcatattatgcaaacaagctttgttttaatataaagcaatccccaaaagatttgagctttcagttataaatttgcatccttttcataatgccactgagttcaggggatggtctaactcatttcatactctgtgaatattcaaaagtaatagaatctggcatatagttttattggttccttagccatgggattattgaggctttcacatatcagtgattttaaaatatcagtgttttttgctactcatttgtatgtattcagtcctaggattttgaatggttttctaatatagtgacatctgcatttaatttccagaaattaaattaattttcatgtttga

SEQ ID NO: 10518 - DNA, 868 bp, Homo sapiens
  source 1..868: mol_type = unassigned DNA
atgttgactctggagtgggagtccgaaggactgcaaacagtgggtattgttgtgattatatgtgcatctctgaagcttcttcatttgctgggactgattgatttttcggaagacagcgtggaagatgaactggagatggccaccgtcaggcatcggcctgaagcccttgagcttctggaagcccagagcaaatttaccaagaaagagcttcagatcctttacagaggatttaagaatgaatgccccagtggtgttgttaatgaagaaaccttcaaagagatttactcgcagttctttccacagggagactctacaacatatgcacattttctgttcaatgcatttgatacagaccacaatggagctgtgagtttcgaggatttcatcaaaggtctttccattttgctccgggggacagtacaagaaaaactcaattgggcatttaatctgtatgacataaataaagatggctacatcactaaagaggaaatgcttgatataatgaaagcaatatacgatatgatgggtaaatgtacatatcctgtcctcaaagaagatgctcccagacaacacgttgaaacattttttcagaaaatggacaaaaataaagatggggttgttaccatagatgagttcattgaaagctgccaaaaagatgaaaacataatgcgctccatgcagctctttgaaaatgtgatttaacttgtcaaatagatcctgaatccaacagacaaatgtgaactattctaccacccttaaagttggagctaccacttttagcatagattgctcagcttgacactgaagcatattatgcaaacaagctttgttttaatataaagcaatccccaaaagatttgagctttca

SEQ ID NO: 10519 - DNA, 763 bp, Homo sapiens
  source 1..763: mol_type = unassigned DNA
atgaatgtgaggagggtggaaagcatttcggctcagctggaggaggccagctctacaggcgaagcggttattgagcattcgctgtgtaccaagtgctgtccttgacaagaagacttacacccagtggtcccagagggagacttcggaagtgggagcacctgtcagatcatcatacagcgtggaagatgaactggagatggccaccgtcaggcatcggcctgaagcccttgagcttctggaagcccagagcaaatttaccaagaaagagcttcagatcctttacagaggatttaagaatgaatgccccagtggtgttgttaatgaagaaaccttcaaagagatttactcgcagttctttccacagggagactctacaacatatgcacattttctgttcaatgcatttgatacagaccacaatggagctgtgagtttcgaggatttcatcaaaggtctttccattttgctccgggggacagtacaagaaaaactcaattgggcatttaatctgtatgacataaataaagatggctacatcactaaagaggaaatgcttgatataatgaaagcaatatacgatatgatgggtaaatgtacatatcctgtcctcaaagaagatgctcccagacaacacgttgaaacattttttcagaaaatggacaaaaataaagatggggttgttaccatagatgagttcattgaaagctgccaaaaagatgaaaacataatgcgctccatgcagctctttgaaaatgtgatttaa

SEQ ID NO: 10520 - DNA, 456 bp, Homo sapiens
  source 1..456: mol_type = unassigned DNA
ggtttcctgtacgctcagaacagcaccaagcgcagcattaaagagcggctcatgaagctcttgccctgctcagctgccaaaacgtcgtctcctgctattcaaagcaacgtggaagatgaactggagatggccaccgtcaggcatcggcctgaagcccttgagcttctggaagcccagagcaaatttaccaagaaagagcttcagatcctttacagaggatttaagaatgtaagaactttctttttgactttaccttcacacaattcccagaggagcattgagaaatgagaggaaaagggggaaaatatcccattctatgagagccccatcatatgtatatttcatactgatccttcccagataggaatataatcagtatctgtggactttgattctctgtggcacacccatgctggcatactgtgattgcccattaaacaaagagtttctgagaaa

SEQ ID NO: 10521 - DNA, 421 bp, Homo sapiens
  source 1..421: mol_type = unassigned DNA
aatgaagaataaagagtgggctagcgacttccaggggatagaacagaagcggttattgagcattcgctgtgtaccaagtgctgtccttgacaagaagacttacacccagtggtcccagagggagacttcggaagtgggagcacctgtcagatcatcatcaaggaaccagatttacctcccacctgaaacaaatgatgaacaagcaaaaccataaaataactgtttttagacattgagcttcaggcattgaagaacagtgattcttcaatcactgttgattgaacagtgatattgggaagcaagccaacaatttgtgcttcagggagagttttccaaaccaattgttattaatgagtcacacatcatatctgatttatgatttattaaactttatgcattaaatactttccaaacaagacaa

SEQ ID NO: 10522 - DNA, 2168 bp, Homo sapiens
  source 1..2168: mol_type = unassigned DNA
gtggacagtcacagacattagcagacatgttcttccgttttcctttgttgctctgtgtaagcatcggtgagcagtggctggtcctaagactctttcttgttttcctccacagacagcgtggaagatgaactggagatggccaccgtcaggcatcggcctgaagcccttgagcttctggaagcccagagcaaatttaccaagaaagagcttcagatcctttacagaggatttaagaatgaatgccccagtggtgttgttaatgaagaaaccttcaaagagatttactcgcagttctttccacagggagactctacaacatatgcacattttctgttcaatgcatttgatacagaccacaatggagctgtgagtttcgaggatttcatcaaaggtctttccattttgctccgggggacagtacaagaaaaactcaattgggcatttaatctgtatgacataaataaagatggctacatcactaaagaggaaatgcttgatataatgaaagcaatatacgatatgatgggtaaatgtacatatcctgtcctcaaagaagatgctcccagacaacacgttgaaacattttttcagaaaatggacaaaaataaagatggggttgttaccatagatgagttcattgaaagctgccaaaaagatgaaaacataatgcgctccatgcagctctttgaaaatgtgatttaacttgtcaaatagatcctgaatccaacagacaaatgtgaactattctaccacccttaaagttggagctaccacttttagcatagattgctcagcttgacactgaagcatattatgcaaacaagctttgttttaatataaagcaatccccaaaagatttgagctttcagttataaatttgcatccttttcataatgccactgagttcaggggatggtctaactcatttcatactctgtgaatattcaaaagtaatagaatctggcatatagttttattggttccttagccatgggattattgaggctttcacatatcagtgattttaaaatatcagtgttttttgctactcatttgtatgtattcagtcctaggattttgaatggttttctaatatagtgacatctgcatttaatttccagaaattaaattaattttcatgtttgaatgctgtaattccatttaaattccatttatatactttaaggaaacaagattacaacaattaaaaaaacacatagttccagtttctatggccttcccaccttctgttagaaattagttttatctggcatttttaaacatttaaaaattattaaacatttaaaaattagtttattatcagatatcagcatatgcctaataaaacttattttaataagcatttaattttccataatatgttacagccaaggcctatataataattttggatttgttcaatctttcttacaggctgttttctattgtatcaatcattagtatcaatcattaagtggaagttgaagaaggcatcaaacaaaacaaggatgtttacagacatatgcaaagggtcaggatatctatcctccagtatatagtaatgcttaataacaagtaatcctaacagcattaaaggccaaatctgtcctctttcccctgacttccttacagcatgtttatttatattacaagccattcagggacaaagaaagaaaccttgactaccccactgtctactaagaacaaacagcaagcaaaattagcaagcaaaattcactttgaaagcaccagtggttccattacattgacaactactaccaagatttagtagaaaataagtgctcaacaactaatccagattacagtatgatttagctcatcataattcagattatttttaatcatcttagccaaaactgtaaagttgccacattactaaagccacacacatcgtccctgttttgtagaaatatcacaaagaccaagaggctacagaaggaggaaatttgcaactgtctttgcaacaataaatcaggtatctattctggtgtagagataggatgttgaaagctgccctgctatcaccagtgtagaaattaagagtagtacaatacatgtacactgaaatttgccatcacgtgtttgtgtaaactcaatgtgcacattttgtatttcaaaaagaaaaaataaaagcaaaataaaatgtt

SEQ ID NO: 10523 - DNA, 267 bp, Homo sapiens
  source 1..267: mol_type = unassigned DNA
aagatggaggctctgtgtgagaaggaatgcagggcagcctctggttgcagagagcagcacccggtttgacagctagcaatgcaattgtgacctcagacctacaatgtcaaggaattggcttctgccaacaaccagaatgagcatgaaagtggattagtccttggaacttccagataagagcccagccagctatacttggatttcagcctgtgagattctcagcagagaacccagtcaagtgtgtccagacgtccaacctacagaact

SEQ ID NO: 10524 - DNA, 425 bp, Homo sapiens
  source 1..425: mol_type = unassigned DNA
aactgcttctggagaggggatgccgagccgaaccagagctgggttactacaagtgtgaaccggcagcctgtctgttgccacagaagaacttggtcaccacactgagaagccgtgttttctcacctccctgttactgttgtagctgtatctggcttctctagcattttaaaggaatttctgattgaggcgctaacagctaattccacaggagttgtaaggcagcctgtgcataaactgagacagaagtttctcctcagagactctctttttattattattattattattattggcaaagacttctggctctcctcagaggaataccttgttgcttaagatgagtggctgtagaaagcggtgtaaacgtgaaatactgaaatttgcccagtaccttctcagactattaacaggttctcttcatacag

SEQ ID NO: 10525 - DNA, 263 bp, Homo sapiens
  source 1..263: mol_type = unassigned DNA
caaggaaccagatttacctcccacctgaaacaaatgatgaacaagcaaaaccataaaataactgtttttagacattgagcttcaggcattgaagaacagtgattcttcaatcactgttgattgaacagtgatattgggaagcaagccaacaatttgtgcttcagggagagttttccaaaccaattgttattaatgagtcacacatcatatctgatttatgatttattaaactttatgcattaaatactttccaaacaagacaa

SEQ ID NO: 10526 - DNA, 1546 bp, Homo sapiens
  source 1..1546: mol_type = unassigned DNA
gagtcctggcccggcccgtcgcacagctctgctcctaactcctgcccgccccgtccgtccatctgtcccgctgccccgcggcccatccaaggggccactccacctcggacccaagatgacgtcagttgccaaggtgtattacagtcagaccactcagacagaaagccggcccctaatgggcccagggatacgacggcggagagtcctgacaaaagatggtcgcagcaacgtgagaatggagcacattgccgacaagcgcttcctctacctcaaggacctgtggacaaccttcattgacatgcagtggcgctacaagcttctgctcttctctgcgacctttgcaggcacatggttcctctttggcgtggtgtggtatctggtagctgtggcacatggggacctgctggagctggaccccccggccaaccacaccccctgtgtggtacaggtgcacacactcactggagccttcctcttctcccttgaatcccaaaccaccattggctatggcttccgctacatcagtgaggaatgtccactggccattgtgcttcttattgcccagctggtgctcaccaccatcctggaaatcttcatcacaggcagcccagagaagatctgtttccctgtgtcctgtgaatggaaggacccaagccaatatgttcctttgaaaagagtccagtacccaggccccatggaaagggcatggaaagaggaggtgggactaacagagcagtgaatcactccacacaaaacagcaaaacaggagggaactgagttatttgttggcagctcaagatactggagaagatgacgggccaggaagttgaaagaaggtgagaggttgaggagagaagaggggagctggggagaagctctggccacgtgaaaaccggtagagcctccagaagactgcagccaaggaggaattccttgtggcaaggaatgtctgatgttgaatgttagatggttttctgcgctgtgctgggatgatacaacttgactcaactcttcagttgattgttccctactaacagcaccctggggttagtgttgctttggttgaaaggaagcatgaaaaagttcttctatgatttcattttttttaatccaactctttaatccatttagaatttattttgatataaagaatgaggtggaacattagcttaatttttctcctgaagtttagccaatgatctgaccatcttttaaatgattttaaatgccaccttgatattatgttaaattatactaaatgctcaagtatactttggtctatgcttgtctggaagagacattccaatgttccctctctcttttagctttagtaataaactttcaaattcatctggactcatgggtcttctaaatcattactatgtctcccaacttcttttgctgctagctatggctgttgatatagaagcaggaatattgtatgtaactttcaggatggtcctgaataagaggggccatgctccttttcaccccttttcctcctttctgacaactgtgatgtaaataaaaagaactctggcagcca

SEQ ID NO: 10527 - DNA, 1239 bp, Homo sapiens
  source 1..1239: mol_type = unassigned DNA
gtcgcacagctctgctcctaactcctgcccgccccgtccgtccatctgtcccgctgccccgcggcccatccaaggggccactccacctcggacccaagatgacgtcagttgccaaggtgtattacagtcagaccactcagacagaaagccggcccctaatgggcccagggatacgacggcggagagtcctgacaaaagatggtcgcagcaacgtgagaatggagcacattgccgacaagcgcttcctctacctcaaggacctgtggacaaccttcattgacatgcagtggcgctacaagcttctgctcttctctgcgacctttgcaggcacatggttcctctttggcgtggtgtggtatctggtagctgtggcacatggggacctgctggagctggaccccccggccaaccacaccccctgtgtggtacaggtgcacacactcactggagccttcctcttctcccttgaatcccaaaccaccattggctatggcttccgctacatcagtgaggaatgtccactggccattgtgcttcttattgcccagctggtgctcaccaccatcctggaaatcttcatcacagggcatggaaagaggaggtgggactaacagagcagtgaatcactccacacaaaacagcaaaacaggagggaactgagttatttgttggcagctcaagatactggagaagatgacgggccaggaagttgaaagaaggtgagaggttgaggagagaagaggggagctggggagaagctctggccacgtgaaaaccggtagagcctccagaagactgcagccaaggaggaattccttgtggcaaggaatgtctgatgttgaatgttagatggttttctgcgctgtgctgggatgatacaacttgactcaactcttcagttgattgttccctactaacagcaccctggggttagtgttgctttggttgaaaggaagcatgaaaaagttcttctatgatttcattttttttaatccaactctttaatccatttagaatttattttgatataaagaatgaggtggaacattagcttaatttttctcctgaagtttagccaatgatctgaccatcttttaaatgattttaaatgccaccttgatattatgttaaattatactaaatgctcaagtatactttggtctatgcttgtctggaagagacattccaatgttccctctctcttttagctttagtaataaactttcaaattcatctgga

SEQ ID NO: 10528 - DNA, 565 bp, Homo sapiens
  source 1..565: mol_type = unassigned DNA
caagccctgcctcatgatccgagttgccaatatgcgcaaaagcctcctcattggctgccaggtgacaggaaaactgcttcagacccaccaaaccaaggaaggggagaacatccggctcaaccaggcagcccagagaagatctgtttccctgtgtcctgtgaatggaaggacccaagccaatatgttcctttgaaaagagtccagtacccaggccccatggaaagggcatggaaagaggaggtgggactaacagagcagtgaatcactccacacaaaacagcaaaacaggagggaactgagttatttgttggcagctcaagatactggagaagatgacgggccaggaagttgaaagaaggtgagaggttgaggagagaagaggggagctggggagaagctctggccacgtgaaaaccggtagagcctccagaagactgcagccaaggaggaattccttgtggcaaggaatgtctgatgttgaatgttagatggttttctgcgctgtgctgggatgatacaacttgactcaactcttcagttgattgttccctactaacagcaccct

SEQ ID NO: 10529 - DNA, 870 bp, Homo sapiens
  source 1..870: mol_type = unassigned DNA
gtcagaccactcagacagaaagccggcccctaatgggcccagggatacgacggcggagagtcctgacaaaagatggtcgcagcaacgtgagaatggagcacattgccgacaagcgcttcctctacctcaaggacctgtggacaaccttcattgacatgcagtggcgctacaagcttctgctcttctctgcgacctttgcaggcacatggttcctctttggcgtggtgtggtatctggtagctgtggcacatggggacctgctggagctggaccccccggccaaccacaccccctgtgtggtacaggtgcacacactcactggagccttcctcttctcccttgaatcccaaaccaccattggctatggcttccgctacatcagtgaggaatgtccactggccattgtgcttcttattgcccagctggtgctcaccaccatcctggaaatcttcatcacaggtaccttcctggcgaagattgcccggcccaagaagcgggctgagaccattcgtttcagccagcatgcagttgtggcctcccacaatggcaagccctgcctcatgatccgagttgccaatatgcgcaaaagcctcctcattggctgccaggtgacaggaaaactgcttcagacccaccaaaccaaggaaggggagaacatccggctcaaccagggcatggaaagaggaggtgggactaacagagcagtgaatcactccacacaaaacagcaaaacaggagggaactgagttatttgttggcagctcaagatactggagaagatgacgggccaggaagttgaaagaaggtgagaggttgaggagagaagaggggagctggggagaagctctggccacgtgaaaaccggtagag

SEQ ID NO: 10530 - DNA, 5528 bp, Homo sapiens
  source 1..5528: mol_type = unassigned DNA
atctctctttctccccgggtctgtctgggtctctgtctttggatatttctctctgcgcctgcagctgtctgggtctccgcttccttgccccgcacgccccgccccctgcccaagaccctccaatctcggcggctcgagcctggcgctccactctcccattggtctgttcggagccccccgcccccgcctgcccggcccccctccgggcccctccattcacacaaagtttggctccggcgctgcggagggagggggcggcccggcccggcccagctctgcccccggccggcccgaccccggccccggcccccggacaagcccttatctgatcccagctccgggtttaagagtcctggcccggcccgtcgcacagctctgctcctaactcctgcccgccccgtccgtccatctgtcccgctgccccgcggcccatccaaggggccactccacctcggacccaagatgacgtcagttgccaaggtgtattacagtcagaccactcagacagaaagccggcccctaatgggcccagggatacgacggcggagagtcctgacaaaagatggtcgcagcaacgtgagaatggagcacattgccgacaagcgcttcctctacctcaaggacctgtggacaaccttcattgacatgcagtggcgctacaagcttctgctcttctctgcgacctttgcaggcacatggttcctctttggcgtggtgtggtatctggtagctgtggcacatggggacctgctggagctggaccccccggccaaccacaccccctgtgtggtacaggtgcacacactcactggagccttcctcttctcccttgaatcccaaaccaccattggctatggcttccgctacatcagtgaggaatgtccactggccattgtgcttcttattgcccagctggtgctcaccaccatcctggaaatcttcatcacaggtaccttcctggcgaagattgcccggcccaagaagcgggctgagaccattcgtttcagccagcatgcagttgtggcctcccacaatggcaagccctgcctcatgatccgagttgccaatatgcgcaaaagcctcctcattggctgccaggtgacaggaaaactgcttcagacccaccaaaccaaggaaggggagaacatccggctcaaccaggtcaatgtgactttccaagtagacacagcctctgacagccccttccttattctaccccttaccttctatcatgtggtagatgagaccagtcccttgaaagatctccctcttcgcagtggtgagggtgactttgagctggtgctgatcctaagtgggacagtggagtccaccagtgccacctgtcaggtgcgcacttcctacctgccagaggagatcctttggggctacgagttcacacctgccatctcactgtcagccagtggtaaatacatagctgactttagcctttttgaccaagttgtgaaagtggcctctcctagtggcctccgtgacagcactgtacgctacggagaccctgaaaagctcaagttggaggagtcattaagggagcaagctgagaaggagggcagtgcccttagtgtgcgcatcagcaatgtctgatgacctgttcccactcccccattcctctggtctcttttcctctcttccaatgccctggtaaggaatactacccgggtttactggagatcccccgaagcacccatcctccactccctcttctttaacccagtggcctgttggtagcttaggccaactggagtccaggttcgcctcccactgtcccctttccacttccccagcttctgccccaatacacatacctcccttaagccaggatgggggaaagagtgggattaggctgaagtggcttagaaggcctcagccatgcttggatactcacattaggaggaccatgtggttggaaggatagactgccccctacctcccaccaccaccatgaagtttggtgacttgaggctggagctccctctgttacctttccatctagcaagttcccaaaggcaagactctctctgatggtcactttgtggtctgtgctttcagaaatacaggaatctgatatcaacatatcctagggtttctaccaatctctgttgaaagaagccagggtttgccactgtgaagcttgatttctgctggtgacttctgaccataagctagaaccatggtcgccactgttttccctctgtagtttctcaagtgaacactctcaggatacccagttccctcatagcctctgttctcagagaattggagttggcccaagaaacataaacatataaccacccatatctatcctggattctgaactcttcaatttggagtgactaacacaagttgttatctaaacctttaaacctatcttccaggcagcccagagaagatctgtttccctgtgtcctgtgaatggaaggacccaagccaatatgttcctttgaaaagagtccagtacccaggccccatggaaaggtctgaaaataatattccagattacactgtacctggcttctcttcttcctttcctgctcagcctagatccttcttccttaaccccaactctttgggagaagggagggaaaatgcaagggccttcctctcttaacacggatgctcaagtaaaactagattcacagggcacagattccccagaaagttaacacaatcccaccatgagggatgggtaaattctcagatttccaaactgctgtacagagcctctgagaattggtgatgctttgttaaggtttgggcaggagcagaactctgtggctggcagccactattctcagttacacctcccagtgcccttctgaaaagtgccagctatttcattaggcaatgctggaaggaaatgaaattataccttctgatcaaataaccatggcttccctcagccattcctgagacttggtataaaatgaagaaatcagtgtcatctctactctcctctgccatgaggccattttcagacaagttaaaaagtagactttaagagatcaaactcagcctattccttgttccctggtggggtctgtggtaagggtcagggaagggcatataggcaccagagctttatccaaagccccaaatccctagagtgctttctggtctcactttggtaccaaggaagcctcacatagtggtactgcatagtcccactataagtcaagttgcagtttaaggtggtctcagccaattgttacaagctacagaatatatacatgcatctatgtacagagccttgcagagaaacacaaaattttgaggctagacccatgatcaccaccaactataattgcacaaggtcttgttatattgatctctcctcgaactcaactaactatatcttgaaaacaaagacccttcggtgtccatctacagtaaaccccaccattaccttctagttggcataaaaacaagaaccacaaaaacttgaaaaatctgaaacagagaacagaaggccaagagccagcttctgcgttctcaactttattcaacattagacttaccttatttctttcagtgtgtagggacaagatgtactgctgtgtgtgtgtgtgtgtgtgtgtgtgtgtgtgtgtgtgtgtgtgtgtgtgtctataccttcctatccattgccaagttaacctccatctggtttatttggccatgctatgctttcttcccattcccctgctgtctattctaagcccccagactcaagcctctagactcttggatgaaacagtgagaagaaaacattttctgacttacccttttggaatctcctccattattacccaggctttgctttaagttgcactttaaatcacactgtcctattaatgcgatctggcatcttctcccacaagccccctacagggaacaactaccccctaccttaactctaaatggttctttagactatagtctgtctcctctgacctgaaatcctcttttaggcaataggccgagctttagaagcagccaggtctggtgagaaatgggcccccataccaactgtggacttggaatatcagcagagtagtaggcacagttgtaaaaaggggagatttcggtaggcacaggtgtaaaaaggggagatttcagaagacgggcgaaacaactgatgggggaagatacctggggtgagaagatgagaaagaaatgatgctgagggacctagtgaaatcaatgaaactcttgagtcttgcttaggctcgcaaacaagaagtggggaggcttgggaaattaggatatgacatatatgaaaggtttatctaagaagaaagaaacagagataatatatatatagaaagatgtatatagatgtatatatgcccaaatatattgaatgtacagaaaggaaatattcagagactttagcattgggggcagatatcttggcctggttatggggtaggacacccagattttcagacttacaatcagtggtcctggtttcaacatggaagtgagatagctgatgaaggatttcaagtctggaaatgggaaagggaggggtagaagttccttttcagaaataaagaggcattcatgaaggcttttgttgaatcctatgctactgataggaccaggaagagaggaactcggaggacaatagggaggggaagtcttggaaaatctaccacttacactgtgtgtccccatccccagcagcgtcctgccactgtagcgcctttttaaaataaataaaataaaataaagcaccattttgtttccctttcatgaagtacactgtatttccgtcttccacaggggtgggagctgctattgctctagcccctgaaatcaaactcaggagctgaacactttggtgtatgggaggcactaatgggaagcctcaaccctggaatccaaatgccaggactaatagctgttaggctgaagatctcccaaggtcaaggcccagccttttgtgtggctgcaagcagcccaaagagaaagccatggattccagaagagttccaatcctggcatttgggcatggagggtgatgctttggttttgatgcttctgaatgaaaatgaggagtggggttaccagctgctctaggggatggtgaagttccatgagaggcttccgaaatctctgcaatgtgcttcaccccattattcccccaacccctgtcagcctaataaaatcatccagtagtttccctataaggtctgagcagagaaagaaagccagttatactattgctacaagtccaggacactgtgccctctccatggctgctgccctggtcctttattcttgctagctaacctagttcacttgtacagtaacacactacctttgctggaaagttagcatgggtctccaggctcagtaatggccaactctactgatgcagaagtatttagggatgttttttccattcattgcactaaagactaaaccaggtcaaatttatctaggaaaaaaaaggtgtgtaagatttgttttgtttttgtctgttaaaaataagctactaaataaaatggatgactctttggttgtca

SEQ ID NO: 10531 - DNA, 1184 bp, Homo sapiens
  source 1..1184: mol_type = unassigned DNA
cacagctctgctcctaactcctgcccgccccgtccgtccatctgtcccgctgccccgcggcccatccaaggggccactccacctcggacccaagttaacctccatctggtttatttggccatgctatgctttcttcccattcccctgctgtctattctaagcccccagactcaagcctctagactcttggatgaaacagtgagaagaaaacattttctgacttacccttttggaatctcctccattattacccaggctttgctttaagttgcactttaaatcacactgtcctattaatgcgatctggcatcttctcccacaagccccctacagggaacaactaccccctaccttaactctaaatggttctttagactatagtctgtctcctctgacctgaaatcctcttttaggcaataggccgagctttagaagcagccaggtctggtgagaaatgggcccccataccaactgtggacttggaatatcagcagagtagtaggcacagttgtaaaaaggggagatttcggtaggcacaggtgtaaaaaggggagatttcagaagacgggcgaaacaactgatgggggaagatacctggggtgagaagatgagaaagaaatgatgctgagggacctagtgaaatcaatgaaactcttgagtcttgcttaggctcgcaaacaagaagtggggaggcttgggaaattaggatatgacatatatgaaaggtttatctaagaagaaagaaacagagataatatatatatagaaagatgtatatagatgtatatatgcccaaatatattgaatgtacagaaaggaaatattcagagactttagcattgggggcagatatcttggcctggttatggggtaggacacccagattttcagacttacaatcagtggtcctggtttcaacatggaagtgagatagctgatgaaggatttcaagtctggaaatgggaaagggaggggtagaagttccttttcagaaataaagaggcattcatgaaggcttttgttgaatcctatgctactgataggaccaggaagagaggaactcggaggacaatagggaggggaagtcttggaaaatctaccacttacactgtgtgtccccatccccagcagcgtcctgccactgtagcgcctttttaaaataaataaaataaaataaagcacca

SEQ ID NO: 10532 - DNA, 3260 bp, Homo sapiens
  source 1..3260: mol_type = unassigned DNA
tggggacctgctggagctggaccccccggccaaccacaccccctgtgtggtacaggtgcacacactcactggagccttcctcttctcccttgaatcccaaaccaccattggctatggcttccgctacatcagtgaggaatgtccactggccattgtgcttcttattgcccagctggtgctcaccaccatcctggaaatcttcatcacaggtaccttcctggcgaagattgcccggcccaagaagcgggctgagaccattcgtttcagccagcatgcagttgtggcctcccacaatggcaagccctgcctcatgatccgagttgccaatatgcgcaaaagcctcctcattggctgccaggtgacaggaaaactgcttcagacccaccaaaccaaggaaggggagaacatccggctcaaccaggtcaatgtgactttccaagtagacacagcctctgacagccccttccttattctaccccttaccttctatcatgtggtagatgagaccagtcccttgaaagatctccctcttcgcagtggtgagggtgactttgagctggtgctgatcctaagtgggacagtggagtccaccagtgccacctgtcaggtgcgcacttcctacctgccagaggagatcctttggggctacgagttcacacctgccatctcactgtcagccagtggtaaatacatagctgactttagcctttttgaccaagttgtgaaagtggcctctcctagtggcctccgtgacagcactgtacgctacggagaccctgaaaagctcaagttggaggagtcattaagggagcaagctgagaaggagggcagtgcccttagtgtgcgcatcagcaatgtctgatgacctgttcccactcccccattcctctggtctcttttcctctcttccaatgccctggcagcccagagaagatctgtttccctgtgtcctgtgaatggaaggacccaagccaatatgttcctttgaaaagagtccagtacccaggccccatggaaaggtctgaaaataatattccagattacactgtacctggcttctcttcttcctttcctgctcagcctagatccttcttccttaaccccaactctttgggagaagggagggaaaatgcaagggccttcctctcttaacacggatgctcaagtaaaactagattcacagggcacagattccccagaaagttaacacaatcccaccatgagggatgggtaaattctcagatttccaaactgctgtacagagcctctgagaattggtgatgctttgttaaggtttgggcaggagcagaactctgtggctggcagccactattctcagttacacctcccagtgcccttctgaaaagtgccagctatttcattaggcaatgctggaaggaaatgaaattataccttctgatcaaataaccatggcttccctcagccattcctgagacttggtataaaatgaagaaatcagtgtcatctctactctcctctgccatgaggccattttcagacaagttaaaaagtagactttaagagatcaaactcagcctattccttgttccctggtggggtctgtggtaagggtcagggaagggcatataggcaccagagctttatccaaagccccaaatccctagagtgctttctggtctcactttggtaccaaggaagcctcacatagtggtactgcatagtcccactataagtcaagttgcagtttaaggtggtctcagccaattgttacaagctacagaatatatacatgcatctatgtacagagccttgcagagaaacacaaaattttgaggctagacccatgatcaccaccaactataattgcacaaggtcttgttatattgatctctcctcgaactcaactaactatatcttgaaaacaaagacccttcggtgtccatctacagtaaaccccaccattaccttctagttggcataaaaacaagaaccacaaaaacttgaaaaatctgaaacagagaacagaaggccaagagccagcttctgcgttctcaactttattcaacattagacttaccttatttctttcagtgtgtagggacaagatgtactgctgtgtgtgtgtgtgtgtgtgtgtgtgtgtgtgtgtgtgtgtgtgtgtgtgtctataccttcctatccattgccaagttaacctccatctggtttatttggccatgctatgctttcttcccattcccctgctgtctattctaagcccccagactcaagcctctagactcttggatgaaacagtgagaagaaaacattttctgacttacccttttggaatctcctccattattacccaggctttgctttaagttgcactttaaatcacactgtcctattaatgcgatctggcatcttctcccacaagccccctacagggaacaactaccccctaccttaactctaaatggttctttagactatagtctgtctcctctgacctgaaatcctcttttaggcaataggccgagctttagaagcagccaggtctggtgagaaatgggcccccataccaactgtggacttggaatatcagcagagtagtaggcacagttgtaaaaaggggagatttcggtaggcacaggtgtaaaaaggggagatttcagaagacgggcgaaacaactgatgggggaagatacctggggtgagaagatgagaaagaaatgatgctgagggacctagtgaaatcaatgaaactcttgagtcttgcttaggctcgcaaacaagaagtggggaggcttgggaaattaggatatgacatatatgaaaggtttatctaagaagaaagaaacagagataatatatatatagaaagatgtatatagatgtatatatgcccaaatatattgaatgtacagaaaggaaatattcagagactttagcattgggggcagatatcttggcctggttatggggtaggacacccagattttcagacttacaatcagtggtcctggtttcaacatggaagtgagatagctgatgaaggatttcaagtctggaaatgggaaagggaggggtagaagttccttttcagaaataaagaggcattcatgaaggcttttgttgaatcctatgctactgataggaccaggaagagaggaactcggaggacaatagggaggggaagtcttggaaaatctaccacttacactgtgtgtccccatccccagcagcgtcctgccactgtagcgcctttttaaaataaataaaataaaataaagcac

SEQ ID NO: 10533 - DNA, 2968 bp, Homo sapiens
  source 1..2968: mol_type = unassigned DNA
cagaccactcagacagaaagccggcccctaatgggcccagggatacgacggcggagagtcctgacaaaagatggtcgcagcaacgtgagaatggagcacattgccgacaagcgcttcctctacctcaaggacctgtggacaaccttcattgacatgcagtggcgctacaagcttctgctcttctctgcgacctttgcaggcacatggttcctctttggcgtggtgtggtatctggtagctgtggcacatggggacctgctggagctggaccccccggccaaccacaccccctgtgtggtacaggtgcacacactcactggagccttcctcttctcccttgaatcccaaaccaccattggctatggcttccgctacatcagtgaggaatgtccactggccattgtgcttcttattgcccagctggtgctcaccaccatcctggaaatcttcatcacaggtaccttcctggcgaagattgcccggcccaagaagcgggctgagaccattcgtttcagccagcatgcagttgtggcctcccacaatggcaagccctgcctcatgatccgagttgccaatatgcgcaaaagcctcctcattggctgccaggtgacaggaaaactgcttcagacccaccaaaccaaggaaggggagaacatccggctcaaccaggcagcccagagaagatctgtttccctgtgtcctgtgaatggaaggacccaagccaatatgttcctttgaaaagagtccagtacccaggccccatggaaaggtctgaaaataatattccagattacactgtacctggcttctcttcttcctttcctgctcagcctagatccttcttccttaaccccaactctttgggagaagggagggaaaatgcaagggccttcctctcttaacacggatgctcaagtaaaactagattcacagggcacagattccccagaaagttaacacaatcccaccatgagggatgggtaaattctcagatttccaaactgctgtacagagcctctgagaattggtgatgctttgttaaggtttgggcaggagcagaactctgtggctggcagccactattctcagttacacctcccagtgcccttctgaaaagtgccagctatttcattaggcaatgctggaaggaaatgaaattataccttctgatcaaataaccatggcttccctcagccattcctgagacttggtataaaatgaagaaatcagtgtcatctctactctcctctgccatgaggccattttcagacaagttaaaaagtagactttaagagatcaaactcagcctattccttgttccctggtggggtctgtggtaagggtcagggaagggcatataggcaccagagctttatccaaagccccaaatccctagagtgctttctggtctcactttggtaccaaggaagcctcacatagtggtactgcatagtcccactataagtcaagttgcagtttaaggtggtctcagccaattgttacaagctacagaatatatacatgcatctatgtacagagccttgcagagaaacacaaaattttgaggctagacccatgatcaccaccaactataattgcacaaggtcttgttatattgatctctcctcgaactcaactaactatatcttgaaaacaaagacccttcggtgtccatctacagtaaaccccaccattaccttctagttggcataaaaacaagaaccacaaaaacttgaaaaatctgaaacagagaacagaaggccaagagccagcttctgcgttctcaactttattcaacattagacttaccttatttctttcagtgtgtagggacaagatgtactgctgtgtgtgtgtgtgtgtgtgtgtgtgtgtgtgtgtgtgtgtgtgtgtgtgtctataccttcctatccattgccaagttaacctccatctggtttatttggccatgctatgctttcttcccattcccctgctgtctattctaagcccccagactcaagcctctagactcttggatgaaacagtgagaagaaaacattttctgacttacccttttggaatctcctccattattacccaggctttgctttaagttgcactttaaatcacactgtcctattaatgcgatctggcatcttctcccacaagccccctacagggaacaactaccccctaccttaactctaaatggttctttagactatagtctgtctcctctgacctgaaatcctcttttaggcaataggccgagctttagaagcagccaggtctggtgagaaatgggcccccataccaactgtggacttggaatatcagcagagtagtaggcacagttgtaaaaaggggagatttcggtaggcacaggtgtaaaaaggggagatttcagaagacgggcgaaacaactgatgggggaagatacctggggtgagaagatgagaaagaaatgatgctgagggacctagtgaaatcaatgaaactcttgagtcttgcttaggctcgcaaacaagaagtggggaggcttgggaaattaggatatgacatatatgaaaggtttatctaagaagaaagaaacagagataatatatatatagaaagatgtatatagatgtatatatgcccaaatatattgaatgtacagaaaggaaatattcagagactttagcattgggggcagatatcttggcctggttatggggtaggacacccagattttcagacttacaatcagtggtcctggtttcaacatggaagtgagatagctgatgaaggatttcaagtctggaaatgggaaagggaggggtagaagttccttttcagaaataaagaggcattcatgaaggcttttgttgaatcctatgctactgataggaccaggaagagaggaactcggaggacaatagggaggggaagtcttggaaaatctaccacttacactgtgtgtccccatccccagcagcgtcctgcc

SEQ ID NO: 10534 - DNA, 4351 bp, Homo sapiens
  source 1..4351: mol_type = unassigned DNA
gctcctaactcctgcccgccccgtccgtccatctgtcccgctgccccgcggcccatccaaggggccactccacctcggacccaaggatggttttgaacttctgatctcaagtgatcctcctgcctcagcctcccaaagtgctgggatacagatgacgtcagttgccaaggtgtattacagtcagaccactcagacagaaagccggcccctaatgggcccagggatacgacggcggagagtcctgacaaaagatggtcgcagcaacgtgagaatggagcacattgccgacaagcgcttcctctacctcaaggacctgtggacaaccttcattgacatgcagtggcgctacaagcttctgctcttctctgcgacctttgcaggcacatggttcctctttggcgtggtgtggtatctggtagctgtggcacatggggacctgctggagctggaccccccggccaaccacaccccctgtgtggtacaggtgcacacactcactggagccttcctcttctcccttgaatcccaaaccaccattggctatggcttccgctacatcagtgaggaatgtccactggccattgtgcttcttattgcccagctggtgctcaccaccatcctggaaatcttcatcacaggtaccttcctggcgaagattgcccggcccaagaagcgggctgagaccattcgtttcagccagcatgcagttgtggcctcccacaatggcaagccctgcctcatgatccgagttgccaatatgcgcaaaagcctcctcattggctgccaggtgacaggaaaactgcttcagacccaccaaaccaaggaaggggagaacatccggctcaaccaggtcaatgtgactttccaagtagacacagcctctgacagccccttccttattctaccccttaccttctatcatgtggtagatgagaccagtcccttgaaagatctccctcttcgcagtggtgagggtgactttgagctggtgctgatcctaagtgggacagtggagtccaccagtgccacctgtcaggtgcgcacttcctacctgccagaggagatcctttggggctacgagttcacacctgccatctcactgtcagccagtggtaaatacatagctgactttagcctttttgaccaagttgtgaaagtggcctctcctagtggcctccgtgacagcactgtacgctacggagaccctgaaaagctcaagttggaggagtcattaagggagcaagctgagaaggagggcagtgcccttagtgtgcgcatcagcaatgtctgatgacctgttcccactcccccattcctctggtctcttttcctctcttccaatgccctggtaaggaatactacccgggtttactggagatcccccgaagcacccatcctccactccctcttctttaacccagtggcctgttggtagcttaggccaactggagtccaggttcgcctcccactgtcccctttccacttccccagcttctgccccaatacacatacctcccttaagccaggatgggggaaagagtgggattaggctgaagtggcttagaaggcctcagccatgcttggatactcacattaggaggaccatgtggttggaaggatagactgccccctacctcccaccaccaccatgaagtttggtgacttgaggctggagctccctctgttacctttccatctagcaagttcccaaaggcaagactctctctgatggtcactttgtggtctgtgctttcagaaatacaggaatctgatatcaacatatcctagggtttctaccaatctctgttgaaagaagccagggtttgccactgtgaagcttgatttctgctggtgacttctgaccataagctagaaccatggtcgccactgttttccctctgtagtttctcaagtgaacactctcaggatacccagttccctcatagcctctgttctcagagaattggagttggcccaagaaacataaacatataaccacccatatctatcctggattctgaactcttcaatttggagtgactaacacaagttgttatctaaacctttaaacctatcttccaggcagcccagagaagatctgtttccctgtgtcctgtgaatggaaggacccaagccaatatgttcctttgaaaagagtccagtacccaggccccatggaaaggtctgaaaataatattccagattacactgtacctggcttctcttcttcctttcctgctcagcctagatccttcttccttaaccccaactctttgggagaagggagggaaaatgcaagggccttcctctcttaacacggatgctcaagtaaaactagattcacagggcacagattccccagaaagttaacacaatcccaccatgagggatgggtaaattctcagatttccaaactgctgtacagagcctctgagaattggtgatgctttgttaaggtttgggcaggagcagaactctgtggctggcagccactattctcagttacacctcccagtgcccttctgaaaagtgccagctatttcattaggcaatgctggaaggaaatgaaattataccttctgatcaaataaccatggcttccctcagccattcctgagacttggtataaaatgaagaaatcagtgtcatctctactctcctctgccatgaggccattttcagacaagttaaaaagtagactttaagagatcaaactcagcctattccttgttccctggtggggtctgtggtaagggtcagggaagggcatataggcaccagagctttatccaaagccccaaatccctagagtgctttctggtctcactttggtaccaaggaagcctcacatagtggtactgcatagtcccactataagtcaagttgcagtttaaggtggtctcagccaattgttacaagctacagaatatatacatgcatctatgtacagagccttgcagagaaacacaaaattttgaggctagacccatgatcaccaccaactataattgcacaaggtcttgttatattgatctctcctcgaactcaactaactatatcttgaaaacaaagacccttcggtgtccatctacagtaaaccccaccattaccttctagttggcataaaaacaagaaccacaaaaacttgaaaaatctgaaacagagaacagaaggccaagagccagcttctgcgttctcaactttattcaacattagacttaccttatttctttcagtgtgtagggacaagatgtactgctgtgtgtgtgtgtgtgtgtgtgtgtgtgtgtgtgtgtgtgtgtgtgtgtgtctataccttcctatccattgccaagttaacctccatctggtttatttggccatgctatgctttcttcccattcccctgctgtctattctaagcccccagactcaagcctctagactcttggatgaaacagtgagaagaaaacattttctgacttacccttttggaatctcctccattattacccaggctttgctttaagttgcactttaaatcacactgtcctattaatgcgatctggcatcttctcccacaagccccctacagggaacaactaccccctaccttaactctaaatggttctttagactatagtctgtctcctctgacctgaaatcctcttttaggcaataggccgagctttagaagcagccaggtctggtgagaaatgggcccccataccaactgtggacttggaatatcagcagagtagtaggcacagttgtaaaaaggggagatttcggtaggcacaggtgtaaaaaggggagatttcagaagacgggcgaaacaactgatgggggaagatacctggggtgagaagatgagaaagaaatgatgctgagggacctagtgaaatcaatgaaactcttgagtcttgcttaggctcgcaaacaagaagtggggaggcttgggaaattaggatatgacatatatgaaaggtttatctaagaagaaagaaacagagataatatatatatagaaagatgtatatagatgtatatatgcccaaatatattgaatgtacagaaaggaaatattcagagactttagcattgggggcagatatcttggcctggttatggggtaggacacccagattttcagacttacaatcagtggtcctggtttcaacatggaagtgagatagctgatgaaggatttcaagtctggaaatgggaaagggaggggtagaagttccttttcagaaataaagaggcattcatgaaggcttttgttgaatcctatgctactgataggaccaggaagagaggaactcggaggacaatagggaggggaagtcttggaaaatctaccacttacact

SEQ ID NO: 10535 - DNA, 3883 bp, Homo sapiens
  source 1..3883: mol_type = unassigned DNA
gcatcactgtgcataagctcatttacagctccagcttggttggcttgagctacaaggaagtgactggcagaggacccggggaccttccttcccttgaccttccttgggaccagagaggctgggacacttggatcacggatggttttgaacttctgatctcaagtgatcctcctgcctcagcctcccaaagtgctgggatacagatgacgtcagttgccaaggtgtattacagtcagaccactcagacagaaagccggcccctaatgggcccagggatacgacggcggagagtcctgacaaaagatggtcgcagcaacgtgagaatggagcacattgccgacaagcgcttcctctacctcaaggacctgtggacaaccttcattgacatgcagtggcgctacaagcttctgctcttctctgcgacctttgcaggcacatggttcctctttggcgtggtgtggtatctggtagctgtggcacatggggacctgctggagctggaccccccggccaaccacaccccctgtgtggtacaggtgcacacactcactggagccttcctcttctcccttgaatcccaaaccaccattggctatggcttccgctacatcagtgaggaatgtccactggccattgtgcttcttattgcccagctggtgctcaccaccatcctggaaatcttcatcacaggtaccttcctggcgaagattgcccggcccaagaagcgggctgagaccattcgtttcagccagcatgcagttgtggcctcccacaatggcaagccctgcctcatgatccgagttgccaatatgcgcaaaagcctcctcattggctgccaggtgacaggaaaactgcttcagacccaccaaaccaaggaaggggagaacatccggctcaaccaggtcaatgtgactttccaagtagacacagcctctgacagccccttccttattctaccccttaccttctatcatgtggtagatgagaccagtcccttgaaagatctccctcttcgcagtggtgagggtgactttgagctggtgctgatcctaagtgggacagtggagtccaccagtgccacctgtcaggtgcgcacttcctacctgccagaggagatcctttggggctacgagttcacacctgccatctcactgtcagccagtggtaaatacatagctgactttagcctttttgaccaagttgtgaaagtggcctctcctagtggcctccgtgacagcactgtacgctacggagaccctgaaaagctcaagttggaggagtcattaagggagcaagctgagaaggagggcagtgcccttagtgtgcgcatcagcaatgtctgatgacctgttcccactcccccattcctctggtctcttttcctctcttccaatgccctggtaaggaatactacccgggtttactggagatcccccgaagcacccatcctccactccctcttctttaacccagtggcctgttggtagcttaggccaactggagtccaggttcgcctcccactgtcccctttccacttccccagcttctgccccaatacacatacctcccttaagccaggatgggggaaagagtgggattaggctgaagtggcttagaaggcctcagccatgcttggatactcacattaggaggaccatgtggttggaaggatagactgccccctacctcccaccaccaccatgaagtttggtgacttgaggctggagctccctctgttacctttccatctagcaagttcccaaaggcaagactctctctgatggtcactttgtggtctgtgctttcagaaatacaggaatctgatatcaacatatcctagggtttctaccaatctctgttgaaagaagccagggtttgccactgtgaagcttgatttctgctggtgacttctgaccataagctagaaccatggtcgccactgttttccctctgtagtttctcaagtgaacactctcaggatacccagttccctcatagcctctgttctcagagaattggagttggcccaagaaacataaacatataaccacccatatctatcctggattctgaactcttcaatttggagtgactaacacaagttgttatctaaacctttaaacctatcttccaggcagcccagagaagatctgtttccctgtgtcctgtgaatggaaggacccaagccaatatgttcctttgaaaagagtccagtacccaggccccatggaaaggtctgaaaataatattccagattacactgtacctggcttctcttcttcctttcctgctcagcctagatccttcttccttaaccccaactctttgggagaagggagggaaaatgcaagggccttcctctcttaacacggatgctcaagtaaaactagattcacagggcacagattccccagaaagttaacacaatcccaccatgagggatgggtaaattctcagatttccaaactgctgtacagagcctctgagaattggtgatgctttgttaaggtttgggcaggagcagaactctgtggctggcagccactattctcagttacacctcccagtgcccttctgaaaagtgccagctatttcattaggcaatgctggaaggaaatgaaattataccttctgatcaaataaccatggcttccctcagccattcctgagacttggtataaaatgaagaaatcagtgtcatctctactctcctctgccatgaggccattttcagacaagttaaaaagtagactttaagagatcaaactcagcctattccttgttccctggtggggtctgtggtaagggtcagggaagggcatataggcaccagagctttatccaaagccccaaatccctagagtgctttctggtctcactttggtaccaaggaagcctcacatagtggtactgcatagtcccactataagtcaagttgcagtttaaggtggtctcagccaattgttacaagctacagaatatatacatgcatctatgtacagagccttgcagagaaacacaaaattttgaggctagacccatgatcaccaccaactataattgcacaaggtcttgttatattgatctctcctcgaactcaactaactatatcttgaaaacaaagacccttcggtgtccatctacagtaaaccccaccattaccttctagttggcataaaaacaagaaccacaaaaacttgaaaaatctgaaacagagaacagaaggccaagagccagcttctgcgttctcaactttattcaacattagacttaccttatttctttcagtgtgtagggacaagatgtactgctgtgtgtgtgtgtgtgtgtgtgtgtgtgtgtgtgtgtgtgtgtgtgtgtgtctataccttcctatccattgccaagttaacctccatctggtttatttggccatgctatgctttcttcccattcccctgctgtctattctaagcccccagactcaagcctctagactcttggatgaaacagtgagaagaaaacattttctgacttacccttttggaatctcctccattattacccaggctttgctttaagttgcactttaaatcacactgtcctattaatgcgatctggcatcttctcccacaagccccctacagggaacaactaccccctaccttaactctaaatggttctttagactatagtctgtctcctctgacctgaaatcctcttttaggcaataggccgagctttagaagcagccaggtctggtgagaaatgggcccccataccaactgtggacttggaatatcagcagagtagtaggcacagttgtaaaaaggggagatttcggtaggcacaggtgtaaaaaggggagatttcagaagacgggcgaaacaactgatgggggaag

SEQ ID NO: 10536 - DNA, 5425 bp, Homo sapiens
  source 1..5425: mol_type = unassigned DNA
cgcgcgcgtcccagtgcgcaagtggctggcggtgtgtgtgtagggggcggcccgggactaggaggggctcggggccaggccggagccgtggtaggctggtgcagcggctgcgcggcgcggcgcggcgcggggcgggcgtgctctccgcggagagttagaggagttgccgagctgagctccggtggagcgaggcgcggagctgggtgcgcgccgagcctctgcctcccgccgcctcctcgccctccattcctcgctccccgtcttctcccggccacaccgccactgctgccgcctccctgggaacagtagccgggggagggggactggcgcggtcagagcctgcgaggaggtgcggggcgccggggcgtaggggagcgcgccgggccctgcccgagatcagataacagccggcgggggagggggtgggccggccgtgctcacagccggaccgagggaccgacgccagccgccccggcccaagcgagcgcccagcggccgggggcgccgtccaggcgcgcgcccccgacccgtggctggaccagggcgatccgctttgcagagaagacgcgcccctcggcatggagcgcccccgggagctgccctgaggcggtggcggcagcggcggcgatgcagccagcgcggcagctgccggggccaggaacggccgcccggagcttggaggacgccgagcgcgccgcgcccgggccactgaccgaggatgttctagtgactggatcctttccagttggtgcctgggaaatggcagccactactaattcagccttgaagacagtaccgtgcccactcagcaccattacatagaagatagaactcaagaggagccgccctgcctggagctagcctgggggcgagccagggtcccccaacccccgggatgaccgcggccagccgggccaacccctacagcatcgtgtcatcggaggaggacgggctgcacctggtcaccatgtcgggcgccaacggcttcggcaacggcaaggtgcacacgcggcgcaggtgccgcaaccgcttcgtcaagaagaatggccagtgcaacattgagttcgccaacatggacgagaagtcacagcgctacctggctgacatgttcaccacctgtgtggacatccgctggcggtacatgctgctcatcttctcgctggccttccttgcctcctggctgctgttcggcatcatcttctgggtcatcgcggtggcacacggtgacctggagccggctgagggccggggccgcacaccctgtgtgatgcaggtgcacggcttcatggcggccttcctcttctccatcgagacgcagaccaccatcggctacgggctgcgctgtgtgacggaggagtgcccggtggccgtcttcatggtggtggcccagtccatcgtgggctgcatcatcgactccttcatgattggtgccatcatggccaagatggcaaggcccaagaagcgggcacagacgctgctgttcagccacaacgccgtggtggccctgcgtgacggcaagctctgcctcatgtggcgtgtgggtaacctgcgcaagagccacattgtggaggcccatgtgcgcgcgcagctcatcaagccgcgggtcaccgaggagggcgagtacatcccgctggaccagatcgacatcgatgtgggcttcgacaagggcctggaccgcatctttctggtgtcgcccatcaccatcttgcatgagattgacgaggccagcccgctcttcggcatcagccggcaggacctggagacggacgactttgagatcgtggtcatcctggaaggcatggtggaggccacagccatgaccacccaggcccgcagctcctacctggccaatgagatcctgtggggtcaccgctttgagcccgtgctcttcgaggagaagaaccagtacaagattgactactcgcacttccacaagacctatgaggtgccctctacgccccgctgcagtgcgaaggatctggtagagaacaagttcctgctgcccagcgccaactccttctgctacgagaacgagctggccttcctgagccgtgacgaggaggatgaggcggacggagaccaggacggccgaagccgggacggcctcagcccccaggccaggcatgactttgacagactccaggctggcggcggggtcctggagcagcggccctacagacgggagtcagagatctgagccaaccttggccgacatgcagcatccacccccggctggggagaggccccgcggtcgctcaggggccccgggtttgagcagaacgggcccagtgccctgggttgcagactcagtagcgttttagtcgttttatgtttctttgcaacggcctcagaagtttggccggagagggggcagccagagcggcagcccccggcctcagaggctatcacaggctcagggcaaagaagtggcctcctggggggccaggccacgagggccagggcttctgcctgaagatggagctgcagcctgcggggaagcagctcagctcgatggtgggcccagcctctgctgtccaaggctggctagctgcggtgctccttgctggtttttaacttggggagaaacaccgggtttcagctttcttgaccttagcttgggtgagactgtttacaaaaaaaaaaaattaccatgcaattgaaaaaatttttttttaattcacagggggcaaaaagaacaattagaattccatgggtctgccaggatgcagcagctggctgaaggctccagagggttccccgaggtgggactggcctctccccgtgtgtgtgggcaccacagtccctgggcaagcagggtgctctgggaccgcacttcatcgagctcacgagccagctaggctctgtttgtgatagaaaaatcaagaccatgttaatgatcgtaataaaagctttctactgtcgttggggtggtgggtggggctgggaagaaactggtttgagcttttagagtttgcctttgtaccttagagatgtgtctcagggccaggcatgggacctgccatcgagggttcctccccgcaccctcgattttcctgttttgcttctctctccatttctgtccaggcctccgcccaattccacagtgaggggtggttaggagctataggccgggatggctccttgggaagggaagtcgggatcccaggctaggaggaagctggcagccccgtccccactgggcccacagtgtgagtcgtgccttagagactccgggttgtcctgttctttctgggcttgctcatctccccccaaccctgtcccaccccacccctcccatacctccactgctgaagttcctccagcccctctgtctgccttgtgaaggtggcaggggccaggtctgcctgacataggaccacatcctgtccctccctcacctggagcagcacagcagagttcaggcagggcacagccaggccctggtcagcgctgaatggcagaggaaagatcttaggaaaggagaggaatcgccaccccctcctgccaactgggatgactggggagggccacgctcattcaaagctgaatcagaaaccagccgtggaacagaattcctgccgagtcttccagggccgctcctccaccaccctcccccaggttgaggcactatggcaccctcatcaggaagaggtttggggtccccttgttgtcactgctggctctgccaccccatcttgttcatggcagctggttgggtcaggtccatggtagagccaggcccttcccagggctgcggagaaaacctgctctcttctagtcgggcttctccagaagccagtaatcagaaaggatgtgtctcctgctccaactctgcccccgagacagctcagagccagaaggcaccccgagacagctcagagccagaaggcaccccgagacagctcagagccagaaggcaccgaggactctggcccaagtggggaagctgaggcagagagcagagggggtcatgcagtgagtgggtggggtgcaggagacagagaggggctgggggcgtggggtgggggtgtctgcctcttccctccacctcctcccctccttagcagctgaagactcagccctgaggtctggggcaatggaagtcaagacacccgacccctacatcctggggtaggcccgactcagcatcctgtcccagcttcagccccacactcatttctggcatagaagattccgccgaggcagctctttcctctcggggtctgccaggggtgcctcagctggttcctgctcccaggcctagccccgaagccttaggggccttctcagccttagccctgggtactggggtgaagttggcaggggagagcttgacacttcgcctccctgatggccatgctgagggacagtggtgaccctggtcacttggtgctggtgtaggggcctgtgcccttccagggccagtgagacagccttctactcccccgacccagagctgagtccgaggaccccaggcccacctcctggccctcttggaggtctgtgctcttacctcccagcccccaccctgcgggagagcagccccagcgcctcatctccccaaaggcggcagatgcttgattctcctgccctctttcttccttccctcgtatttatttatttatttattgcttgtgctaaagaccaaaatagtctccctctttagtgcacttgaagcgggagggcggatgggatgagccaggagcgaggaagacttggcccctggggagtgtgtgtgtggaggcgtgtgcctgtgtgagcctgcatgcatacatgtgtggtgcacacatgcacactcggctcttcatgtgtatgactgggttagtaatacagatacgtgatctatacgtgtgtgtgtgtgtgtgtgtgtgtgtgtgtgtgtatgcaggcggttatgtgtctgtctacccccaggtgtttccgtgtacaagtttcctgtgagggagggcacccacccatcaggttgggcactggcacaggtgaaccccacagtccccgaccctctgccctgattatgcacgtctgctcctgagtggagcttgtgttccaggatgagacatctggaggtgagcgtgtgcgtccggctcgtgtgtaggaggctgtgtgtgtgcccatgtgaaaccgtgtacttgagtgtgtgtctgtgtgcagcctatgcctgctgctcagagcacggtggccaccccctgagcctctgctggtgctgtgctgcgtggtccccacccagagggtcctggggggcggggaggagccaccgttgggaggcccctgtacggggtgtctgccctgcgtgagggcatagaatgtcaaattattttaaatggtgaaactggagagttttcatgttattttcaatacatagcagtatctaaagacgtaggcgatgagactagaccacattaaatgcattttgatctctttgagg

SEQ ID NO: 10537 - DNA, 2198 bp, Homo sapiens
  source 1..2198: mol_type = unassigned DNA
agcaggccacagggaggcttgggcacagccagctttccgtcctgttgggaagcctgtttctgctttcagtgcccacgtggtgtcaggaacgccggtcacagtgaacgcctgcaggacccacactgctgcatcgtctctgtgggacagatactgaagccagggcttggcttacccttgtgacagtctcccgaggatgttctagtgactggatcctttccagttggtgcctgggaaatggcagccactactaattcagccttgaagacagtaccgtgcccactcagcaccattacatagaagatagaactcaagaggagccgccctgcctggagctagcctgggggcgagccagggtcccccaacccccgggatgaccgcggccagccgggccaacccctacagcatcgtgtcatcggaggaggacgggctgcacctggtcaccatgtcgggcgccaacggcttcggcaacggcaaggtgcacacgcggcgcaggtgccgcaaccgcttcgtcaagaagaatggccagtgcaacattgagttcgccaacatggacgagaagtcacagcgctacctggctgacatgttcaccacctgtgtggacatccgctggcggtacatgctgctcatcttctcgctggccttccttgcctcctggctgctgttcggcatcatcttctgggtcatcgcggtggcacacggtgacctggagccggctgagggccggggccgcacaccctgtgtgatgcaggtgcacggcttcatggcggccttcctcttctccatcgagacgcagaccaccatcggctacgggctgcgctgtgtgacggaggagtgcccggtggccgtcttcatggtggtggcccagtccatcgtgggctgcatcatcgactccttcatgattggtgccatcatggccaagatggcaaggcccaagaagcgggcacagacgctgctgttcagccacaacgccgtggtggccctgcgtgacggcaagctctgcctcatgtggcgtgtgggtaacctgcgcaagagccacattgtggaggcccatgtgcgcgcgcagctcatcaagccgcgggtcaccgaggagggcgagtacatcccgctggaccagatcgacatcgatgtgggcttcgacaagggcctggaccgcatctttctggtgtcgcccatcaccatcttgcatgagattgacgaggccagcccgctcttcggcatcagccggcaggacctggagacggacgactttgagatcgtggtcatcctggaaggcatggtggaggccacagccatgaccacccaggcccgcagctcctacctggccaatgagatcctgtggggtcaccgctttgagcccgtgctcttcgaggagaagaaccagtacaagattgactactcgcacttccacaagacctatgaggtgccctctacgccccgctgcagtgcgaaggatctggtagagaacaagttcctgctgcccagcgccaactccttctgctacgagaacgagctggccttcctgagccgtgacgaggaggatgaggcggacggagaccaggacggccgaagccgggacggcctcagcccccaggccaggcatgactttgacagactccaggctggcggcggggtcctggagcagcggccctacagacgggagtcagagatctgagccaaccttggccgacatgcagcatccacccccggctggggagaggccccgcggtcgctcaggggccccgggtttgagcagaacgggcccagtgccctgggttgcagactcagtagcgttttagtcgttttatgtttctttgcaacggcctcagaagtttggccggagagggggcagccagagcggcagcccccggcctcagaggctatcacaggctcagggcaaagaagtggcctcctggggggccaggccacgagggccagggcttctgcctgaagatggagctgcagcctgcggggaagcagctcagctcgatggtgggcccagcctctgctgtccaaggctggctagctgcggtgctccttgctggtttttaacttggggagaaacaccgggtttcagctttcttgaccttagcttgggtgagactgtttacaaaaaaaaaaaattaccatgcaattgaaaaaatttttttttaattcacagggggcaaaaagaacaattagaattccatgggtctgccagg

SEQ ID NO: 10538 - DNA, 569 bp, Homo sapiens
  source 1..569: mol_type = unassigned DNA
ttatccagacaggggaattgcaatggagagagagtaattcaagcagagtcagctgtgtgggagatcggagttttattattactcaaatcagtctcccagatcagagtttttaaggatagtttgtcgggtatgggcttggaaagtgaggagtgctaattggttgggttgaaggtaaaatcatagggggtcgaaacatccacattccaccctgggccttgcccgtctggtgagcccaatctctgctggtcagtcacgcagttgaggtcagggaaggagtaactcaagatgattttgatgttgcagttttaaatttcactttgacttgagctgggaaatcctttggcctattataccatggatgctaaaaatggttctaactgaaaacccaaaccaagaaatagcaacaagtctagaattcttactactacaaaactcacctggatccctaagggcacagcaaagaatgagctattacggcagcagctatcatattatcaatgcggacgcaaaatacccaggctacccgccagagcacattatagctgagaagagaagagcaagaagacgat

SEQ ID NO: 10539 - DNA, 1698 bp, Homo sapiens
  source 1..1698: mol_type = unassigned DNA
aggaacaaaccggtgtcaatggttaacccaggttcttggtgtctggagcttttctttcctttattattaactaaagagcattctctaccattgcccagctgaaagcacctagctcatagattctctgtggggagagtgaataaagaatgggggattgaggcacagagtgttaaaatagtgagacacaggattctaactggcagactggcactttatctcaattcttaactgctgtgttgcctctcactttaaaggtaagaaattaaaccaattttaacatgattctccgaaaaaccaatacttgcactccttcctccatgaaaatgtgctttatccctacgcatttttccagaagtccagctttctacttatacgtttatattttcataaactttgctacagagcaaattcggtgttacaaacattgcttccttttgttcacattttacacgtttactgcctccttaaatcattcaccttcactgtattttaggaaagaaatgctatttatatattttgtgaatccacagtctattatacattctgctaactaagaataaaacttgtctacttggttatttgagtctagagaatgattttcaacctggagtgactttgctcaccaagggacatctggcaatgtctggtcacatttttggatgtctctactggggtttggggtcatactggcatctagtgggaagagtttagggatgctgttaaactaaatgccataaccacaggtcatcttcccacaacaaagaattttctggccctaaatattgaggttgagaaacccagatctaggatattctgtgcatttaaaatgattccgttcagaacaatttaggtactttctcaatagtactgcaaaagctatatgaaaactatatgtatataaaaattatatctatctgtctctagctacattaacatatcaatctgctaggttaagtagactcaatttaaccatctggtgtttcatgtttgcttttgatttgtaaaagactcagacctataacatagccttaatgctaatatcattcttgagataaacgattataattgcagatttctttttttttgagaaagagtctcgctctgtcacccaggctggagtgcagtggcaccatctcagctcactgcaaactccacctcccaggttcaaacaattctcctgcctcagcttcccgagtagctgggattacaggtgcccgctaccaatacttgcagatttctttagtgttatgttatttagccactcatccatttttttaaagatttaagtattaagcattcactgtacaccaagcaatgttcttagtgaacaagtaatttagaattagattacaattaaattgtggattttaggacattttagttaacgtttactgaaaagtattatcacagaatttatattttctatagtttatgttgttttatatgattataaaagcaatgatttaagaattaagtgaagtattttacatgatgtggaaaaaatgagagaaaaagatggaaaagagttgattgaattattcattttcacctgattagttgaagccagtggttagtaacatcacatgcacaaaggacccagtggctgattcaaaatagtattccattctctccccatgattttacaatgaaactacgagaccaatcaggacaccttcttctttcttcttgttcaccaaa

SEQ ID NO: 10540 - DNA, 3684 bp, Homo sapiens
  source 1..3684: mol_type = unassigned DNA
gagcattctctaccattgcccagctgaaagcacctagctcatagattctctgtggggagagtgaataaaggttctaactgaaaacccaaaccaagaaatagcaacaagtctagaattcttactactacaaaactcacctggatccctaagggcacagcaaagaatgagctattacggcagcagctatcatattatcaatgcggacgcaaaatacccaggctacccgccagagcacattatagctgagaagagaagagcaagaagacgattacttcacaaagatggcagctgtaatgtctacttcaagcacatttttggagaatggggaagctatgtggttgacatcttcaccactcttgtggacaccaagtggcgccatatgtttgtgatattttctttatcttatattctctcgtggttgatatttggctctgtcttttggctcatagcctttcatcatggcgatctattaaatgatccagacatcacaccttgtgttgacaacgtccattctttcacaggggcctttttgttctccctagagacccaaaccaccataggatatggttatcgctgtgttactgaagaatgttctgtggccgtgctcatggtgatcctccagtccatcttaagttgcatcataaatacctttatcattggagctgccttggccaaaatggcaactgctcgaaagagagcccaaaccattcgtttcagctactttgcacttataggtatgagagatgggaagctttgcctcatgtggcgcattggtgattttcggccaaaccacgtggtagaaggaacagttagagcccaacttctccgctatacagaagacagtgaagggaggatgacgatggcatttaaagacctcaaattagtcaacgaccaaatcatcctggtcaccccggtaactattgtccatgaaattgaccatgagagccctctgtatgcccttgaccgcaaagcagtagccaaagataactttgagattttggtgacatttatctatactggtgattccactggaacatctcaccaatctagaagctcctatgttccccgagaaattctctggggccataggtttaatgatgtcttggaagttaagaggaagtattacaaagtgaactgcttacagtttgaaggaagtgtggaagtatatgcccccttttgcagtgccaagcaattggactggaaagaccagcagctccacatagaaaaagcaccaccagttcgagaatcctgcacgtcggacaccaaggcgagacgaaggtcatttagtgcagttgccattgtcagcagctgtgaaaaccctgaggagaccaccacttccgccacacatgaatatagggaaacaccttatcagaaagctctcctgactttaaacagaatctctgtagaatcccaaatgtagtcctaaattgcaattatgagggctaccactgaatcattttatctttcagccaatcaagtcgttgtaaacgtggcttttttgaaagtgttatggctatgttttatgatgatgctgggtaagtagagtaagttaaacttggtaaaagataatctaaaaattccatagttctcagttattaaaatttttcttgttcgccaattttgtattaagaatgctattaagcctaattgattaaaatttatcttttttattatcttacatgcttgtatcttcagttggaggtgtagtattcaaaaacggggaatgaaggcaggaaggaggctggaataaataaaaataaaaatagacaagtaagacagcataaataatacatttttaaacatgtcaacattgataatacaatgaagatttaccataaaaagtatcatatctaaccaagatatgcaaaagatgcattcagtaagctgtaacgttgagaaatgtaactgtgaaatcagctcaccagttcaagtcactaggtttgccacttggaccgtcttggtttcagcgagcatagcgagtggctgtaagaaattgtccatgccaccaattccactgctacttgcccaggtagtgatcagtgagagttagaagcaattttttctctaaccgatgaggcagaagaaaagttaacagtatttaaagcagcatttctctcttaacgttcctgggagactccaacaaatggagaccagaaacaaggcaaccacgaccttgctaggttctctgaggaggggactttctatgttcacgtcccaccttcttcgaggacatgaccaagggacaggatcatacagatgaggtgaggggatggttagcagcgataaacattctcagacccttggagagaaaccgttgctagcttgctggtcccgaaagattgcaactttggctgctacagaaaggatagaacctttttggggggagggtggggagggagatatttatttgtgcccagaagcagttatgtatgcttcttgtcttggttactgtacaagatacaaatgactcgagttgtggattgcaagaaactcttttattaaacttggaacaaccatttaaatgaaggattttgtgagatagaattcaattaaagcgatttgaatgcacagtaagtggataatctgagtacaatgaaatttcttaagttttagaacatgagataaagttgtatactctactttcatgttaaaatgttaatcatgattactttaagcccacatccactgagtaaagagtcactttaaactttataaatcaaagagatattaggaacattcagaattatttgtgttttgtttttgttttacattgttgctgcactggcaataagtatgtggcactgtttttatttgtttatgttatttaaatacacacccagacacacacacacacagtttttgctttttctggaaaatctttctttctcttctctctccatgaaaattaaaacacacaagtgaatgaagtaattacatagtccaagattagaaatacaagtaaaatatataggtataggtagatagagtgcctttctgtttcttttcttttcttttttctttttttgttcttccttcctttcttccctcctccccctcatccttccctttctccttcttttcccttttttttttttttttgacctgggagtaataaagttactttttaaatgcacgtatgcaatcttttattcctcttgttttatggataagagatttgttcaggtcaaaagttgcaaaactgttctgaagcttaatattagagacccaagtaagattgtttttagtcttgcttgaggaatgcacactccatttaaaaaattgtgcgctctgtagatttggattttacagcagcaattacttggctaaattagagtactgcaatcttgtaagtagaaaacagccaccatgacaataaacaaaaacacttaaaaatatttttagcttgttttacctacatctagtttcatttcatcttgctttgctttgttgactctgctaccgctgatgtttgccttgtcaatatcagaataggggcatcagtgtcccgtgaaatacattttgttgtgctatgagcctctgtaatcaaatgcttgtactcagaagagagtgtaaaatcagcatttctatgtaacatatatctctaattatctgtgtaattttataacatactttgacaaccccagtgagttacttaataataaagatcttaaaataatgcaaaaa

SEQ ID NO: 10541 - DNA, 1897 bp, Homo sapiens
  source 1..1897: mol_type = unassigned DNA
acaatcttttgtactattgatgtgacaatatgtacattaagtggggtgaagaattaagtcattctcttcataatcaggtgataacaaccttctcctttattgagaatcaagcatctcagagcgagcgtgaatggatattagagtttctgcctcagtgttctcaacagcttctactggtaaagcaagttacagctagtaacttggtcagggtttttggatataaactttattgtttagagtgtagaccaacctacatttaaaatatgatacttcagaagtgcagaaaggttctaactgaaaacccaaaccaagaaatagcaacaagtctagaattcttactactacaaaactcacctggatccctaagggcacagcaaagaatgagctattacggcagcagctatcatattatcaatgcggacgcaaaatacccaggctacccgccagagcacattatagctgagaagagaagagcaagaagacgattacttcacaaagatggcagctgtaatgtctacttcaagcacatttttggagaatggggaagctatgtggttgacatcttcaccactcttgtggacaccaagtggcgccatatgtttgtgatattttctttatcttatattctctcgtggttgatatttggctctgtcttttggctcatagcctttcatcatggcgatctattaaatgatccagacatcacaccttgtgttgacaacgtccattctttcacaggggcctttttgttctccctagagacccaaaccaccataggatatggttatcgctgtgttactgaagaatgttctgtggccgtgctcatggtgatcctccagtccatcttaagttgcatcataaatacctttatcattggagctgccttggccaaaatggcaactgctcgaaagagagcccaaaccattcgtttcagctactttgcacttataggtatgagagatgggaagctttgcctcatgtggcgcattggtgattttcggccaaaccacgtggtagaaggaacagttagagcccaacttctccgctatacagaagacagtgaagggaggatgacgatggcatttaaagacctcaaattagtcaacgaccaaatcatcctggtcaccccggtaactattgtccatgaaattgaccatgagagccctctgtatgcccttgaccgcaaagcagtagccaaagataactttgagattttggtgacatttatctatactggtgattccactggaacatctcaccaatctagaagctcctatgttccccgagaaattctctggggccataggtttaatgatgtcttggaagttaagaggaagtattacaaagtgaactgcttacagtttgaaggaagtgtggaagtatatgcccccttttgcagtgccaagcaattggactggaaagaccagcagctccacatagaaaaagcaccaccagttcgagaatcctgcacgtcggacaccaaggcgagacgaaggtcatttagtgcagttgccattgtcagcagctgtgaaaaccctgaggagaccaccacttccgccacacatgaatatagggaaacaccttatcagaaagctctcctgactttaaacagaatctctgtagaatcccaaatgtagtcctaaattgcaattatgagggctaccactgaatcattttatctttcagccaatcaagtcgttgtaaacgtggcttttttgaaagtgttatggctatgttttatgatgatgctgggtaagtagagtaagttaaacttggtaaaagataatctaaaaattccatagttctcagttattaaaatttttcttgttcgccaattttgtattaagaatgctattaagcctaattgattaaaatttatcttttttattatcttaca

SEQ ID NO: 10542 - DNA, 4014 bp, Homo sapiens
  source 1..4014: mol_type = unassigned DNA
gagaactcagtggcctttgtctgtggtgaatgtatccggaaaggcaaagaagagagagattctcctgtggggtttctcatctccatggcggtaggtgctgacagcttcagaagggtactaacagggccaagagaaaagggccctgagatgctcagctacggtgctcttacaagatgaaaaggacatggggttcagatctgcacttcatcatctttcactaagacatccacattccaccctgggccttgcccgtctggtgagcccaatctctgctggtcagtcacgcagttgaggtcagggaaggagtaactcaagatgattttgatgttgcagttttaaatttcactttgacttgagctgggaaatcctttggcctattataccatggatgctaaaaatggttctaactgaaaacccaaaccaagaaatagcaacaagtctagaattcttactactacaaaactcacctggatccctaagggcacagcaaagaatgagctattacggcagcagctatcatattatcaatgcggacgcaaaatacccaggctacccgccagagcacattatagctgagaagagaagagcaagaagacgattacttcacaaagatggcagctgtaatgtctacttcaagcacatttttggagaatggggaagctatgtggttgacatcttcaccactcttgtggacaccaagtggcgccatatgtttgtgatattttctttatcttatattctctcgtggttgatatttggctctgtcttttggctcatagcctttcatcatggcgatctattaaatgatccagacatcacaccttgtgttgacaacgtccattctttcacaggggcctttttgttctccctagagacccaaaccaccataggatatggttatcgctgtgttactgaagaatgttctgtggccgtgctcatggtgatcctccagtccatcttaagttgcatcataaatacctttatcattggagctgccttggccaaaatggcaactgctcgaaagagagcccaaaccattcgtttcagctactttgcacttataggtatgagagatgggaagctttgcctcatgtggcgcattggtgattttcggccaaaccacgtggtagaaggaacagttagagcccaacttctccgctatacagaagacagtgaagggaggatgacgatggcatttaaagacctcaaattagtcaacgaccaaatcatcctggtcaccccggtaactattgtccatgaaattgaccatgagagccctctgtatgcccttgaccgcaaagcagtagccaaagataactttgagattttggtgacatttatctatactggtgattccactggaacatctcaccaatctagaagctcctatgttccccgagaaattctctggggccataggtttaatgatgtcttggaagttaagaggaagtattacaaagtgaactgcttacagtttgaaggaagtgtggaagtatatgcccccttttgcagtgccaagcaattggactggaaagaccagcagctccacatagaaaaagcaccaccagttcgagaatcctgcacgtcggacaccaaggcgagacgaaggtcatttagtgcagttgccattgtcagcagctgtgaaaaccctgaggagaccaccacttccgccacacatgaatatagggaaacaccttatcagaaagctctcctgactttaaacagaatctctgtagaatcccaaatgtagtcctaaattgcaattatgagggctaccactgaatcattttatctttcagccaatcaagtcgttgtaaacgtggcttttttgaaagtgttatggctatgttttatgatgatgctgggtaagtagagtaagttaaacttggtaaaagataatctaaaaattccatagttctcagttattaaaatttttcttgttcgccaattttgtattaagaatgctattaagcctaattgattaaaatttatcttttttattatcttacatgcttgtatcttcagttggaggtgtagtattcaaaaacggggaatgaaggcaggaaggaggctggaataaataaaaataaaaatagacaagtaagacagcataaataatacatttttaaacatgtcaacattgataatacaatgaagatttaccataaaaagtatcatatctaaccaagatatgcaaaagatgcattcagtaagctgtaacgttgagaaatgtaactgtgaaatcagctcaccagttcaagtcactaggtttgccacttggaccgtcttggtttcagcgagcatagcgagtggctgtaagaaattgtccatgccaccaattccactgctacttgcccaggtagtgatcagtgagagttagaagcaattttttctctaaccgatgaggcagaagaaaagttaacagtatttaaagcagcatttctctcttaacgttcctgggagactccaacaaatggagaccagaaacaaggcaaccacgaccttgctaggttctctgaggaggggactttctatgttcacgtcccaccttcttcgaggacatgaccaagggacaggatcatacagatgaggtgaggggatggttagcagcgataaacattctcagacccttggagagaaaccgttgctagcttgctggtcccgaaagattgcaactttggctgctacagaaaggatagaacctttttggggggagggtggggagggagatatttatttgtgcccagaagcagttatgtatgcttcttgtcttggttactgtacaagatacaaatgactcgagttgtggattgcaagaaactcttttattaaacttggaacaaccatttaaatgaaggattttgtgagatagaattcaattaaagcgatttgaatgcacagtaagtggataatctgagtacaatgaaatttcttaagttttagaacatgagataaagttgtatactctactttcatgttaaaatgttaatcatgattactttaagcccacatccactgagtaaagagtcactttaaactttataaatcaaagagatattaggaacattcagaattatttgtgttttgtttttgttttacattgttgctgcactggcaataagtatgtggcactgtttttatttgtttatgttatttaaatacacacccagacacacacacacacagtttttgctttttctggaaaatctttctttctcttctctctccatgaaaattaaaacacacaagtgaatgaagtaattacatagtccaagattagaaatacaagtaaaatatataggtataggtagatagagtgcctttctgtttcttttcttttcttttttctttttttgttcttccttcctttcttccctcctccccctcatccttccctttctccttcttttcccttttttttttttttttgacctgggagtaataaagttactttttaaatgcacgtatgcaatcttttattcctcttgttttatggataagagatttgttcaggtcaaaagttgcaaaactgttctgaagcttaatattagagacccaagtaagattgtttttagtcttgcttgaggaatgcacactccatttaaaaaattgtgcgctctgtagatttggattttacagcagcaattacttggctaaattagagtactgcaatcttgtaagtagaaaacagccaccatgacaataaacaaaaacacttaaaaatatttttagcttgttttacctacatctagtttcatttcatcttgctttgctttgttgactctgctaccgctgatgtttgccttgtcaatatcagaataggggcatcagtgtcccgtgaaatacattttgttgtgctatgagcctctgtaatcaaatgcttgtactcagaagagagtgtaaaatcagcatttctatgtaacatatatctctaattatctgtgtaattttataacatactttgacaaccccagtgagttacttaataataaagatcttaaaataatgcaaaaa

SEQ ID NO: 10543 - DNA, 589 bp, Homo sapiens
  source 1..589: mol_type = unassigned DNA
gagatgctcagctacggtgctcttacaagatgaaaaggacatggggttcagatctgcacttcatcatctttcactaaggagtaactcaagatgattttgatgttgcagttttaaatttcactttgacttgagctgggaaatcctttggcctattataccatggatgctaaaaatgactaaaggtggagttagggggaaatgagtttaatgtgaagtagtactcctgtcagttctgtttgtcctgggaagtatacaaggaagaaaagcctccgtggaagagagagcaagcaccaggtgctgaaggttctaactgaaaacccaaaccaagaaatagcaacaagtctagaattcttactactacaaaactcacctggatccctaagggcacagcaaagaatgagctattacggcagcagctatcatattatcaatgcggacgcaaaatacccaggctacccgccagagcacattatagctgagaagagaagagcaagaagacgattacttcacaaagatggcagctgtaatgtctacttcaagcacatttttggagaatggggaagctatgtggttgacatcttcaccactc

SEQ ID NO: 10544 - DNA, 582 bp, Homo sapiens
  source 1..582: mol_type = unassigned DNA
gatgctcagctacggtgctcttacaagatgaaaaggacatggggttcagatctgcacttcatcatctttcactaagacatccacattccaccctgggccttgcccgtctggtgagcccaatctctgctggtcagtcacgcagttgaggtcagggaaggagtaactcaagatgattttgatgttgcagttttaaatttcactttgacttgagctgggaaatcctttggcctattataccatggatgctaaaaatgactaaaggtggagttagggggaaatgagtttaatgtgaagtagtactcctgtcagttctgtttgtcctgggaagtatacaaggaagaaaagcctccgtggaagagagagcaagcaccaggtgctgaaggttctaactgaaaacccaaaccaagaaatagcaacaagtctagaattcttactactacaaaactcacctggatccctaagggcacagcaaagaatgagctattacggcagcagctatcatattatcaatgcggacgcaaaatacccaggctacccgccagagcacattatagctgagaagagaagagcaagaagacgatt

SEQ ID NO: 10545 - DNA, 4062 bp, Homo sapiens
  source 1..4062: mol_type = unassigned DNA
agattcccagggaggaactgtaggaacaaaccggtgtcaatggttaacccaggttcttggtgtctggagcttttctttcctttattattaactaaagagcattctctaccattgcccagctgaaagcacctagctcatagattctctgtggggagagtgaataaagaatgggggattgaggcacagagtgttaaaatagtgagacacaggattctaactggcagactggcactttatctcaattcttaactgctgtgttgcctctcactttaaagacatccacattccaccctgggccttgcccgtctggtgagcccaatctctgctggtcagtcacgcagttgaggtcagggaaggagtaactcaagatgattttgatgttgcagttttaaatttcactttgacttgagctgggaaatcctttggcctattataccatggatgctaaaaatggttctaactgaaaacccaaaccaagaaatagcaacaagtctagaattcttactactacaaaactcacctggatccctaagggcacagcaaagaatgagctattacggcagcagctatcatattatcaatgcggacgcaaaatacccaggctacccgccagagcacattatagctgagaagagaagagcaagaagacgattacttcacaaagatggcagctgtaatgtctacttcaagcacatttttggagaatggggaagctatgtggttgacatcttcaccactcttgtggacaccaagtggcgccatatgtttgtgatattttctttatcttatattctctcgtggttgatatttggctctgtcttttggctcatagcctttcatcatggcgatctattaaatgatccagacatcacaccttgtgttgacaacgtccattctttcacaggggcctttttgttctccctagagacccaaaccaccataggatatggttatcgctgtgttactgaagaatgttctgtggccgtgctcatggtgatcctccagtccatcttaagttgcatcataaatacctttatcattggagctgccttggccaaaatggcaactgctcgaaagagagcccaaaccattcgtttcagctactttgcacttataggtatgagagatgggaagctttgcctcatgtggcgcattggtgattttcggccaaaccacgtggtagaaggaacagttagagcccaacttctccgctatacagaagacagtgaagggaggatgacgatggcatttaaagacctcaaattagtcaacgaccaaatcatcctggtcaccccggtaactattgtccatgaaattgaccatgagagccctctgtatgcccttgaccgcaaagcagtagccaaagataactttgagattttggtgacatttatctatactggtgattccactggaacatctcaccaatctagaagctcctatgttccccgagaaattctctggggccataggtttaatgatgtcttggaagttaagaggaagtattacaaagtgaactgcttacagtttgaaggaagtgtggaagtatatgcccccttttgcagtgccaagcaattggactggaaagaccagcagctccacatagaaaaagcaccaccagttcgagaatcctgcacgtcggacaccaaggcgagacgaaggtcatttagtgcagttgccattgtcagcagctgtgaaaaccctgaggagaccaccacttccgccacacatgaatatagggaaacaccttatcagaaagctctcctgactttaaacagaatctctgtagaatcccaaatgtagtcctaaattgcaattatgagggctaccactgaatcattttatctttcagccaatcaagtcgttgtaaacgtggcttttttgaaagtgttatggctatgttttatgatgatgctgggtaagtagagtaagttaaacttggtaaaagataatctaaaaattccatagttctcagttattaaaatttttcttgttcgccaattttgtattaagaatgctattaagcctaattgattaaaatttatcttttttattatcttacatgcttgtatcttcagttggaggtgtagtattcaaaaacggggaatgaaggcaggaaggaggctggaataaataaaaataaaaatagacaagtaagacagcataaataatacatttttaaacatgtcaacattgataatacaatgaagatttaccataaaaagtatcatatctaaccaagatatgcaaaagatgcattcagtaagctgtaacgttgagaaatgtaactgtgaaatcagctcaccagttcaagtcactaggtttgccacttggaccgtcttggtttcagcgagcatagcgagtggctgtaagaaattgtccatgccaccaattccactgctacttgcccaggtagtgatcagtgagagttagaagcaattttttctctaaccgatgaggcagaagaaaagttaacagtatttaaagcagcatttctctcttaacgttcctgggagactccaacaaatggagaccagaaacaaggcaaccacgaccttgctaggttctctgaggaggggactttctatgttcacgtcccaccttcttcgaggacatgaccaagggacaggatcatacagatgaggtgaggggatggttagcagcgataaacattctcagacccttggagagaaaccgttgctagcttgctggtcccgaaagattgcaactttggctgctacagaaaggatagaacctttttggggggagggtggggagggagatatttatttgtgcccagaagcagttatgtatgcttcttgtcttggttactgtacaagatacaaatgactcgagttgtggattgcaagaaactcttttattaaacttggaacaaccatttaaatgaaggattttgtgagatagaattcaattaaagcgatttgaatgcacagtaagtggataatctgagtacaatgaaatttcttaagttttagaacatgagataaagttgtatactctactttcatgttaaaatgttaatcatgattactttaagcccacatccactgagtaaagagtcactttaaactttataaatcaaagagatattaggaacattcagaattatttgtgttttgtttttgttttacattgttgctgcactggcaataagtatgtggcactgtttttatttgtttatgttatttaaatacacacccagacacacacacacacagtttttgctttttctggaaaatctttctttctcttctctctccatgaaaattaaaacacacaagtgaatgaagtaattacatagtccaagattagaaatacaagtaaaatatataggtataggtagatagagtgcctttctgtttcttttcttttcttttttctttttttgttcttccttcctttcttccctcctccccctcatccttccctttctccttcttttcccttttttttttttttttgacctgggagtaataaagttactttttaaatgcacgtatgcaatcttttattcctcttgttttatggataagagatttgttcaggtcaaaagttgcaaaactgttctgaagcttaatattagagacccaagtaagattgtttttagtcttgcttgaggaatgcacactccatttaaaaaattgtgcgctctgtagatttggattttacagcagcaattacttggctaaattagagtactgcaatcttgtaagtagaaaacagccaccatgacaataaacaaaaacacttaaaaatatttttagcttgttttacctacatctagtttcatttcatcttgctttgctttgttgactctgctaccgctgatgtttgccttgtcaatatcagaataggggcatcagtgtcccgtgaaatacattttgttgtgctatgagcctctgtaatcaaatgcttgtactcagaagagagtgtaaaatcagcatttctatgtaacatatatctctaattatctgtgtaattttataacatactttgacaaccccagtgagttacttaataataaagatcttaaaataatgc

SEQ ID NO: 10546 - DNA, 4009 bp, Homo sapiens
  source 1..4009: mol_type = unassigned DNA
gagaactcagtggcctttgtctgtggtgaatgtatccggaaaggcaaagaagagagagattctcctgtggggtttctcatctccatggcggtaggtgctgacagcttcagaagggtactaacagggccaagagaaaagggccctgagatgctcagctacggtgctcttacaagatgaaaaggacatggggttcagatctgcacttcatcatctttcactaagacatccacattccaccctgggccttgcccgtctggtgagcccaatctctgctggtcagtcacgcagttgaggtcagggaaggagtaactcaagatgattttgatgttgcagttttaaatttcactttgacttgagctgggaaatcctttggcctattataccatggatgctaaaaatggttctaactgaaaacccaaaccaagaaatagcaacaagtctagaattcttactactacaaaactcacctggatccctaagggcacagcaaagaatgagctattacggcagcagctatcatattatcaatgcggacgcaaaatacccaggctacccgccagagcacattatagctgagaagagaagagcaagaagacgattacttcacaaagatggcagctgtaatgtctacttcaagcacatttttggagaatggggaagctatgtggttgacatcttcaccactcttgtggacaccaagtggcgccatatgtttgtgatattttctttatcttatattctctcgtggttgatatttggctctgtcttttggctcatagcctttcatcatggcgatctattaaatgatccagacatcacaccttgtgttgacaacgtccattctttcacaggggcctttttgttctccctagagacccaaaccaccataggatatggttatcgctgtgttactgaagaatgttctgtggccgtgctcatggtgatcctccagtccatcttaagttgcatcataaatacctttatcattggagctgccttggccaaaatggcaactgctcgaaagagagcccaaaccattcgtttcagctactttgcacttataggtatgagagatgggaagctttgcctcatgtggcgcattggtgattttcggccaaaccacgtggtagaaggaacagttagagcccaacttctccgctatacagaagacagtgaagggaggatgacgatggcatttaaagacctcaaattagtcaacgaccaaatcatcctggtcaccccggtaactattgtccatgaaattgaccatgagagccctctgtatgcccttgaccgcaaagcagtagccaaagataactttgagattttggtgacatttatctatactggtgattccactggaacatctcaccaatctagaagctcctatgttccccgagaaattctctggggccataggtttaatgatgtcttggaagttaagaggaagtattacaaagtgaactgcttacagtttgaaggaagtgtggaagtatatgcccccttttgcagtgccaagcaattggactggaaagaccagcagctccacatagaaaaagcaccaccagttcgagaatcctgcacgtcggacaccaaggcgagacgaaggtcatttagtgcagttgccattgtcagcagctgtgaaaaccctgaggagaccaccacttccgccacacatgaatatagggaaacaccttatcagaaagctctcctgactttaaacagaatctctgtagaatcccaaatgtagtcctaaattgcaattatgagggctaccactgaatcattttatctttcagccaatcaagtcgttgtaaacgtggcttttttgaaagtgttatggctatgttttatgatgatgctgggtaagtagagtaagttaaacttggtaaaagataatctaaaaattccatagttctcagttattaaaatttttcttgttcgccaattttgtattaagaatgctattaagcctaattgattaaaatttatcttttttattatcttacatgcttgtatcttcagttggaggtgtagtattcaaaaacggggaatgaaggcaggaaggaggctggaataaataaaaataaaaatagacaagtaagacagcataaataatacatttttaaacatgtcaacattgataatacaatgaagatttaccataaaaagtatcatatctaaccaagatatgcaaaagatgcattcagtaagctgtaacgttgagaaatgtaactgtgaaatcagctcaccagttcaagtcactaggtttgccacttggaccgtcttggtttcagcgagcatagcgagtggctgtaagaaattgtccatgccaccaattccactgctacttgcccaggtagtgatcagtgagagttagaagcaattttttctctaaccgatgaggcagaagaaaagttaacagtatttaaagcagcatttctctcttaacgttcctgggagactccaacaaatggagaccagaaacaaggcaaccacgaccttgctaggttctctgaggaggggactttctatgttcacgtcccaccttcttcgaggacatgaccaagggacaggatcatacagatgaggtgaggggatggttagcagcgataaacattctcagacccttggagagaaaccgttgctagcttgctggtcccgaaagattgcaactttggctgctacagaaaggatagaacctttttggggggagggtggggagggagatatttatttgtgcccagaagcagttatgtatgcttcttgtcttggttactgtacaagatacaaatgactcgagttgtggattgcaagaaactcttttattaaacttggaacaaccatttaaatgaaggattttgtgagatagaattcaattaaagcgatttgaatgcacagtaagtggataatctgagtacaatgaaatttcttaagttttagaacatgagataaagttgtatactctactttcatgttaaaatgttaatcatgattactttaagcccacatccactgagtaaagagtcactttaaactttataaatcaaagagatattaggaacattcagaattatttgtgttttgtttttgttttacattgttgctgcactggcaataagtatgtggcactgtttttatttgtttatgttatttaaatacacacccagacacacacacacacagtttttgctttttctggaaaatctttctttctcttctctctccatgaaaattaaaacacacaagtgaatgaagtaattacatagtccaagattagaaatacaagtaaaatatataggtataggtagatagagtgcctttctgtttcttttcttttcttttttctttttttgttcttccttcctttcttccctcctccccctcatccttccctttctccttcttttcccttttttttttttttttgacctgggagtaataaagttactttttaaatgcacgtatgcaatcttttattcctcttgttttatggataagagatttgttcaggtcaaaagttgcaaaactgttctgaagcttaatattagagacccaagtaagattgtttttagtcttgcttgaggaatgcacactccatttaaaaaattgtgcgctctgtagatttggattttacagcagcaattacttggctaaattagagtactgcaatcttgtaagtagaaaacagccaccatgacaataaacaaaaacacttaaaaatatttttagcttgttttacctacatctagtttcatttcatcttgctttgctttgttgactctgctaccgctgatgtttgccttgtcaatatcagaataggggcatcagtgtcccgtgaaatacattttgttgtgctatgagcctctgtaatcaaatgcttgtactcagaagagagtgtaaaatcagcatttctatgtaacatatatctctaattatctgtgtaattttataacatactttgacaaccccagtgagttacttaataataaagatcttaaaataatgc

SEQ ID NO: 10547 - DNA, 3981 bp, Homo sapiens
  source 1..3981: mol_type = unassigned DNA
agattcccagggaggaactgtaggaacaaaccggtgtcaatggttaacccaggttcttggtgtctggagcttttctttcctttattattaactaaagagcattctctaccattgcccagctgaaagcacctagctcatagattctctgtggggagagtgaataaagaatgggggattgaggcacagagtgttaaaatagtgagacacaggattctaactggcagactggcactttatctcaattcttaactgctgtgttgcctctcactttaaaggagtaactcaagatgattttgatgttgcagttttaaatttcactttgacttgagctgggaaatcctttggcctattataccatggatgctaaaaatggttctaactgaaaacccaaaccaagaaatagcaacaagtctagaattcttactactacaaaactcacctggatccctaagggcacagcaaagaatgagctattacggcagcagctatcatattatcaatgcggacgcaaaatacccaggctacccgccagagcacattatagctgagaagagaagagcaagaagacgattacttcacaaagatggcagctgtaatgtctacttcaagcacatttttggagaatggggaagctatgtggttgacatcttcaccactcttgtggacaccaagtggcgccatatgtttgtgatattttctttatcttatattctctcgtggttgatatttggctctgtcttttggctcatagcctttcatcatggcgatctattaaatgatccagacatcacaccttgtgttgacaacgtccattctttcacaggggcctttttgttctccctagagacccaaaccaccataggatatggttatcgctgtgttactgaagaatgttctgtggccgtgctcatggtgatcctccagtccatcttaagttgcatcataaatacctttatcattggagctgccttggccaaaatggcaactgctcgaaagagagcccaaaccattcgtttcagctactttgcacttataggtatgagagatgggaagctttgcctcatgtggcgcattggtgattttcggccaaaccacgtggtagaaggaacagttagagcccaacttctccgctatacagaagacagtgaagggaggatgacgatggcatttaaagacctcaaattagtcaacgaccaaatcatcctggtcaccccggtaactattgtccatgaaattgaccatgagagccctctgtatgcccttgaccgcaaagcagtagccaaagataactttgagattttggtgacatttatctatactggtgattccactggaacatctcaccaatctagaagctcctatgttccccgagaaattctctggggccataggtttaatgatgtcttggaagttaagaggaagtattacaaagtgaactgcttacagtttgaaggaagtgtggaagtatatgcccccttttgcagtgccaagcaattggactggaaagaccagcagctccacatagaaaaagcaccaccagttcgagaatcctgcacgtcggacaccaaggcgagacgaaggtcatttagtgcagttgccattgtcagcagctgtgaaaaccctgaggagaccaccacttccgccacacatgaatatagggaaacaccttatcagaaagctctcctgactttaaacagaatctctgtagaatcccaaatgtagtcctaaattgcaattatgagggctaccactgaatcattttatctttcagccaatcaagtcgttgtaaacgtggcttttttgaaagtgttatggctatgttttatgatgatgctgggtaagtagagtaagttaaacttggtaaaagataatctaaaaattccatagttctcagttattaaaatttttcttgttcgccaattttgtattaagaatgctattaagcctaattgattaaaatttatcttttttattatcttacatgcttgtatcttcagttggaggtgtagtattcaaaaacggggaatgaaggcaggaaggaggctggaataaataaaaataaaaatagacaagtaagacagcataaataatacatttttaaacatgtcaacattgataatacaatgaagatttaccataaaaagtatcatatctaaccaagatatgcaaaagatgcattcagtaagctgtaacgttgagaaatgtaactgtgaaatcagctcaccagttcaagtcactaggtttgccacttggaccgtcttggtttcagcgagcatagcgagtggctgtaagaaattgtccatgccaccaattccactgctacttgcccaggtagtgatcagtgagagttagaagcaattttttctctaaccgatgaggcagaagaaaagttaacagtatttaaagcagcatttctctcttaacgttcctgggagactccaacaaatggagaccagaaacaaggcaaccacgaccttgctaggttctctgaggaggggactttctatgttcacgtcccaccttcttcgaggacatgaccaagggacaggatcatacagatgaggtgaggggatggttagcagcgataaacattctcagacccttggagagaaaccgttgctagcttgctggtcccgaaagattgcaactttggctgctacagaaaggatagaacctttttggggggagggtggggagggagatatttatttgtgcccagaagcagttatgtatgcttcttgtcttggttactgtacaagatacaaatgactcgagttgtggattgcaagaaactcttttattaaacttggaacaaccatttaaatgaaggattttgtgagatagaattcaattaaagcgatttgaatgcacagtaagtggataatctgagtacaatgaaatttcttaagttttagaacatgagataaagttgtatactctactttcatgttaaaatgttaatcatgattactttaagcccacatccactgagtaaagagtcactttaaactttataaatcaaagagatattaggaacattcagaattatttgtgttttgtttttgttttacattgttgctgcactggcaataagtatgtggcactgtttttatttgtttatgttatttaaatacacacccagacacacacacacacagtttttgctttttctggaaaatctttctttctcttctctctccatgaaaattaaaacacacaagtgaatgaagtaattacatagtccaagattagaaatacaagtaaaatatataggtataggtagatagagtgcctttctgtttcttttcttttcttttttctttttttgttcttccttcctttcttccctcctccccctcatccttccctttctccttcttttcccttttttttttttttttgacctgggagtaataaagttactttttaaatgcacgtatgcaatcttttattcctcttgttttatggataagagatttgttcaggtcaaaagttgcaaaactgttctgaagcttaatattagagacccaagtaagattgtttttagtcttgcttgaggaatgcacactccatttaaaaaattgtgcgctctgtagatttggattttacagcagcaattacttggctaaattagagtactgcaatcttgtaagtagaaaacagccaccatgacaataaacaaaaacacttaaaaatatttttagcttgttttacctacatctagtttcatttcatcttgctttgctttgttgactctgctaccgctgatgtttgccttgtcaatatcagaataggggcatcagtgtcccgtgaaatacattttgttgtgctatgagcctctgtaatcaaatgcttgtactcagaagagagtgtaaaatcagcatttctatgtaacatatatctctaattatctgtgtaattttataacatactttgacaaccccagtgagttacttaataataaagatcttaaaataatgc

SEQ ID NO: 10548 - DNA, 4190 bp, Homo sapiens
  source 1..4190: mol_type = unassigned DNA
agattcccagggaggaactgtaggaacaaaccggtgtcaatggttaacccaggttcttggtgtctggagcttttctttcctttattattaactaaagagcattctctaccattgcccagctgaaagcacctagctcatagattctctgtggggagagtgaataaagaatgggggattgaggcacagagtgttaaaatagtgagacacaggattctaactggcagactggcactttatctcaattcttaactgctgtgttgcctctcactttaaagacatccacattccaccctgggccttgcccgtctggtgagcccaatctctgctggtcagtcacgcagttgaggtcagggaaggagtaactcaagatgattttgatgttgcagttttaaatttcactttgacttgagctgggaaatcctttggcctattataccatggatgctaaaaatgactaaaggtggagttagggggaaatgagtttaatgtgaagtagtactcctgtcagttctgtttgtcctgggaagtatacaaggaagaaaagcctccgtggaagagagagcaagcaccaggtgctgaaggttctaactgaaaacccaaaccaagaaatagcaacaagtctagaattcttactactacaaaactcacctggatccctaagggcacagcaaagaatgagctattacggcagcagctatcatattatcaatgcggacgcaaaatacccaggctacccgccagagcacattatagctgagaagagaagagcaagaagacgattacttcacaaagatggcagctgtaatgtctacttcaagcacatttttggagaatggggaagctatgtggttgacatcttcaccactcttgtggacaccaagtggcgccatatgtttgtgatattttctttatcttatattctctcgtggttgatatttggctctgtcttttggctcatagcctttcatcatggcgatctattaaatgatccagacatcacaccttgtgttgacaacgtccattctttcacaggggcctttttgttctccctagagacccaaaccaccataggatatggttatcgctgtgttactgaagaatgttctgtggccgtgctcatggtgatcctccagtccatcttaagttgcatcataaatacctttatcattggagctgccttggccaaaatggcaactgctcgaaagagagcccaaaccattcgtttcagctactttgcacttataggtatgagagatgggaagctttgcctcatgtggcgcattggtgattttcggccaaaccacgtggtagaaggaacagttagagcccaacttctccgctatacagaagacagtgaagggaggatgacgatggcatttaaagacctcaaattagtcaacgaccaaatcatcctggtcaccccggtaactattgtccatgaaattgaccatgagagccctctgtatgcccttgaccgcaaagcagtagccaaagataactttgagattttggtgacatttatctatactggtgattccactggaacatctcaccaatctagaagctcctatgttccccgagaaattctctggggccataggtttaatgatgtcttggaagttaagaggaagtattacaaagtgaactgcttacagtttgaaggaagtgtggaagtatatgcccccttttgcagtgccaagcaattggactggaaagaccagcagctccacatagaaaaagcaccaccagttcgagaatcctgcacgtcggacaccaaggcgagacgaaggtcatttagtgcagttgccattgtcagcagctgtgaaaaccctgaggagaccaccacttccgccacacatgaatatagggaaacaccttatcagaaagctctcctgactttaaacagaatctctgtagaatcccaaatgtagtcctaaattgcaattatgagggctaccactgaatcattttatctttcagccaatcaagtcgttgtaaacgtggcttttttgaaagtgttatggctatgttttatgatgatgctgggtaagtagagtaagttaaacttggtaaaagataatctaaaaattccatagttctcagttattaaaatttttcttgttcgccaattttgtattaagaatgctattaagcctaattgattaaaatttatcttttttattatcttacatgcttgtatcttcagttggaggtgtagtattcaaaaacggggaatgaaggcaggaaggaggctggaataaataaaaataaaaatagacaagtaagacagcataaataatacatttttaaacatgtcaacattgataatacaatgaagatttaccataaaaagtatcatatctaaccaagatatgcaaaagatgcattcagtaagctgtaacgttgagaaatgtaactgtgaaatcagctcaccagttcaagtcactaggtttgccacttggaccgtcttggtttcagcgagcatagcgagtggctgtaagaaattgtccatgccaccaattccactgctacttgcccaggtagtgatcagtgagagttagaagcaattttttctctaaccgatgaggcagaagaaaagttaacagtatttaaagcagcatttctctcttaacgttcctgggagactccaacaaatggagaccagaaacaaggcaaccacgaccttgctaggttctctgaggaggggactttctatgttcacgtcccaccttcttcgaggacatgaccaagggacaggatcatacagatgaggtgaggggatggttagcagcgataaacattctcagacccttggagagaaaccgttgctagcttgctggtcccgaaagattgcaactttggctgctacagaaaggatagaacctttttggggggagggtggggagggagatatttatttgtgcccagaagcagttatgtatgcttcttgtcttggttactgtacaagatacaaatgactcgagttgtggattgcaagaaactcttttattaaacttggaacaaccatttaaatgaaggattttgtgagatagaattcaattaaagcgatttgaatgcacagtaagtggataatctgagtacaatgaaatttcttaagttttagaacatgagataaagttgtatactctactttcatgttaaaatgttaatcatgattactttaagcccacatccactgagtaaagagtcactttaaactttataaatcaaagagatattaggaacattcagaattatttgtgttttgtttttgttttacattgttgctgcactggcaataagtatgtggcactgtttttatttgtttatgttatttaaatacacacccagacacacacacacacagtttttgctttttctggaaaatctttctttctcttctctctccatgaaaattaaaacacacaagtgaatgaagtaattacatagtccaagattagaaatacaagtaaaatatataggtataggtagatagagtgcctttctgtttcttttcttttcttttttctttttttgttcttccttcctttcttccctcctccccctcatccttccctttctccttcttttcccttttttttttttttttgacctgggagtaataaagttactttttaaatgcacgtatgcaatcttttattcctcttgttttatggataagagatttgttcaggtcaaaagttgcaaaactgttctgaagcttaatattagagacccaagtaagattgtttttagtcttgcttgaggaatgcacactccatttaaaaaattgtgcgctctgtagatttggattttacagcagcaattacttggctaaattagagtactgcaatcttgtaagtagaaaacagccaccatgacaataaacaaaaacacttaaaaatatttttagcttgttttacctacatctagtttcatttcatcttgctttgctttgttgactctgctaccgctgatgtttgccttgtcaatatcagaataggggcatcagtgtcccgtgaaatacattttgttgtgctatgagcctctgtaatcaaatgcttgtactcagaagagagtgtaaaatcagcatttctatgtaacatatatctctaattatctgtgtaattttataacatactttgacaaccccagtgagttacttaataataaagatcttaaaataatgc

SEQ ID NO: 10549 - DNA, 5021 bp, Homo sapiens
  source 1..5021: mol_type = unassigned DNA
caggcaggtaaaggcagcttcttaggcagccagcgagttggcaggtgggttgggactcgcttgtcaactcattaattttaagcagtcagtttgggggtactgcaggataatcaggagggccgtggggagtcaagaggtgacccgggatgccggtggtggggaaagaaaagaggagcctctggaagcttggaggcaaaattgcgcttgggttcctgttccttgcatccctcctggcttgagtgcgggagaacactttttaaagactcaccttggaaagaaggcctccgtcccaggggagaaggagaggcgtctgcagggggcagagaccgcagctacctgccgggtgcgccccccacccaggagcgctcgcttcgccccctttcctcccccgcccccacctccttattggtgctagtttgcagcgcccagctcctgcgccttcgcttcgcgtttgaatctggctcgccccttcgtattatgtctgcactccgaaggaaatttggggacgattatcaggtagtgaccacatcgtccagcggctcgggcttgcagccccaggggccaggccaggaccctcagcagcagcttgtgcccaagaagaagcggcagcggttcgtggacaagaacggccggtgcaatgtacagcacggcaacctgggcagcgagacaagccgctacctctcggacctcttcaccacgctggtggacctcaagtggcgctggaacctcttcatcttcattctcacctacaccgtggcctggcttttcatggcgtccatgtggtgggtgatcgcctacactcggggcgacctgaacaaagcccacgtcggtaactacacgccttgcgtggccaatgtctataacttcccttctgccttcctcttcttcatcgagacggaggccaccatcggctatggctaccgatacatcacagacaagtgccccgagggcatcatcctcttcctcttccagtccatcctgggctccatcgtggacgccttcctcatcggctgcatgttcatcaagatgtcccagcccaagaagcgcgccgagaccctcatgttcagcgagcacgcggtgatctccatgagggacggaaaactcacgcttatgttccgggtgggcaacctgcgcaacagccacatggtctccgcgcagattcgctgcaagctgctcaaatctcggcagacacctgagggtgagttccttccccttgaccaacttgaactggatgtaggttttagtacaggggcagatcaactttttcttgtgtcccccctcacaatttgccacgtgatcgatgccaaaagccccttttatgacctatcccagcgaagcatgcaaactgaacagttcgagattgtcgtcatcctagaaggcattgtggaaacaactgggatgacttgtcaagctcgaacatcatatactgaagatgaagttctttggggtcatcgtttttttcctgtaatttccttagaagagggattctttaaagttgattactcccagttccatgcaacatttgaagtccccaccccaccttacagtgtgaaagagcaggaggaaatgcttctcatgtcgtcccctttaatagcaccagccataactaacagcaaagaaagacataattctgtggaatgcttagatggactagatgatattactacaaaactaccatctaagctgcagaaaattactggaagagaagactttcccaaaaaactcttgaggatgagttctacaacttcagaaaaagcctacagcttgggagacttgcccatgaaacttcaacgaataagttcagttccgggcaactcagaagaaaaactggtatctaaaaccaccaagatgttatctgatcccatgagccagtctgtggctgatttgccaccaaagcttcaaaagatggctggaggagcagctaggatggaagggaaccttccagccaaattaagaaaaatgaactctgatcgcttcacataacaaagcactcccttaggcattatttaatgtttgatttagtaatagtccaatatttggcgatgaggtaattctccctaaggaatctgaaagtatattttcctcccagttctacaagcatatttgagaacccttcctttcccaagtattgcgaatgtgcagaaagcaacagttacggagggaggacatcataaggaagttattaacgggcatgtattatcacatcaagcatgcaataatgtgcaaattttgcatttagttttatggcatgatttatatatggcatatttatattgtatattctggaaaaaaaatatatatatatatttaaaggggagatactctccctgacatttctaacatatgtattaagccaaacatgagtgaatagctttcagggcgataaaactaaatatatgtctgtgtgtgtgtgtgtatgtatacacacatatacatatatatatacacatacatacacatacatacatacatacatatatatctgataaaattgtgatgttttgttcaaagttgtagttcttgtgcatgtttactttattagagtaggaaggctactggcattaattattaataccaaatattttagccttaaatttttgtcattttaaaatctgatttaatgttttctgctgtttaaggtcttgggaggctttcaattgtattttatatgagagaatcacacaagtttgtgctatctatggccctgcaaaaatataaccattacatgtttaaattgtaaattttagagcataccagtactcagtatagcattgaacatttcttatgatttttaaaagttgctagtactggggagaaataattgttgattaatttgagaattattcctttcctagactaattaaaatctggaaatctgttttgtatatgatctaatacaaagatgagctctgaacaaacactgaatcatgttaatagacagtagccaagttatattgaatatatcagaatctgtgtgaagttacacaattaattgtccctgtttcaaactgagtaaattggaaacattttctttctttttctggaaattttgtccattttaaaaaccaatcattttaagaagacatgacaatgcaatgaaacagatgataaatatttatgcttaaaatatgtatgtctaattgagtctcttttttattctgttttcttgtttatggcatttgttgtaacaggatagactttttcctcacctaggaaacctatcccatgcctgtcacttatagttcaggaggaagtttttgcacagaccagagagaaattaaaattagatgataaattgaagatatcttacacacagttttttggtgaacactgattttattggtgtcttagatccctagtctacccaaataattttaacagtactgttttttctaatcctgaagtctgatatttatgactcattagcaggaatcaaaactagtgatcagtagaacactttcaaaataaaaatttggaatgcagacttttatgaaaatttaaaagtgctccttaacagaatatcatgggttttcctataaaacttctttaagtattgtaattccagtctgccccaactttaaaaaaaattcttattaatatgtcagtcattaattgctagtttgggctctcattatttcctgttttttaacaattttgtgataattttattattggcaaattaatacatcaacacttaaatcattgactataataataccttctggctacctctgtatcaaccaaattctgtaggtgcaaacatataccagggaattcttactggcaaaatgatcaatctggagtgtgcatccactgtgaatggagcaaattgccctatacccattgataacctagctttcttagtttgtagatgtaggaaacaaaatagtgacagagagagaagggggtccacagggcatggtatatttatcagcagtggaaaaaaagtgcatagatcatttagtccaagaacttaaaactaaatagagccataatttactttggagagtcattttaatttgtctttggtaccaaggagaagacggaaccaaaaacaaactctccaagtatattcacacattcaacaaaatttttgcatgccttctatgtcgtaggcatttttagttcctggggatttggacatggctaagtcagagaaggccattgctcaccatgaacactgtataccagaaggagagtggggaggagacaaaaaacaaataagaccacttcagacaatcaaagtatcagttaagagaatgaaaacaggcctgactcagtggctcacgcctgtaatcccagtactttgggaggcggaggttgggggatcacctgaggtcaggagatcgagaccagcctggacaacatggtgaaaacccgtctctactaaaaatacaaaaattaactgggcatggtggcaggcacctgtaatcccagctactggggaagctgaggcaggagaatcgtttgaacctgggaggcggaggttgcagtgagccaagattctgccactgcactccagcctgggtgacagtgcgagactccatctcaacatcaaaaaaaaaaaaaaaaaaaaaaaaaaaaaaaaaaaaaaaaagaataaaaacagggtaacataatgcaaagtaactgtgtggaataaaaattgattattttagaaaatgtgactggcttaggacggggataatatgtgaacagaaatctatctcatgagaaagtgctactgttgtcaaaattaccttatctgagtgaatggtattttttttatcttttccacacatgcgtgggaaaggtatgatttctgcatgtaattgcagtttaacccttatttctaggttgatcataggtcccagtttacccaggaaaattccagtttatacctgttgtacctgtgtaattattggtagcactccctttcactcttacaatgtcttggtttggatgatatatggtgaagtttttgttgaaactaaattatgaagtctgatatatttggataaaaataaagaattgcttttctt

SEQ ID NO: 10550 - DNA, 564 bp, Homo sapiens
  source 1..564: mol_type = unassigned DNA
attgttggaccaggcatttctccaaagctcatgagttagggaatgtctcggcagacacctgagggtgagttccttccccttgaccaacttgaactggatgtaggttttagtacaggggcagatcaactttttcttgtgtcccccctcacaatttgccacgtgatcgatgccaaaagccccttttatgacctatcccagcgaagcatgcaaactgaacagttcgagattgtcgtcatcctagaaggcattgtggaaacaactgggatgacttgtcaagctcgaacatcatatactgaagatgaagttctttggggtcatcgtttttttcctgtaatttccttagaagagggattctttaaagttgattactcccagttccatgcaacatttgaagtccccaccccaccttacagtgtgaaagagcaggaggaaatgcttctcatgtcgtcccctttaatagcaccagccataactaacagcaaagaaagacataattctgtggaatgcttagatggactagatgatattactacaaaactaccatctaagctgcagaaaattact

SEQ ID NO: 10551 - DNA, 4523 bp, Homo sapiens
  source 1..4523: mol_type = unassigned DNA
ctccgtcccaggggagaaggagaggcgtctgcagggggcagagaccgcagctacctgccgggtgcgccccccacccaggagcgctcgcttcgccccctttcctcccccgcccccacctccttattggtgctagtttgcagcgcccagctcctgcgccttcgcttcgcgtttgaatctggctcgccccttcgtattatgtctgcactccgaaggaaatttggggacgattatcaggtagtgaccacatcgtccagcggctcgggcttgcagccccaggggccaggccaggaccctcagcagcagcttgtgcccaagaagaagcggcagcggttcgtggacaagaacggccggtgcaatgtacagcacggcaacctgggcagcgagacaagccgctacctctcggacctcttcaccacgctggtggacctcaagtggcgctggaacctcttcatcttcattctcacctacaccgtggcctggcttttcatggcgtccatgtggtgggtgatcgcctacactcggggcgacctgaacaaagcccacgtcggtaactacacgccttgcgtggccaatgtctataacttcccttctgccttcctcttcttcatcgagacggaggccaccatcggctatggctaccgatacatcacagacaagtgccccgagggcatcatcctcttcctcttccagtccatcctgggctccatcgtggacgccttcctcatcggctgcatgttcatcaagatgtcccagcccaagaagcgcgccgagaccctcatgttcagcgagcacgcggtgatctccatgagggacggaaaactcacgcttatgttccgggtgggcaacctgcgcaacagccacatggtctccgcgcagattcgctgcaagctgctcaaaggatgacttgtcaagctcgaacatcatatactgaagatgaagttctttggggtcatcgtttttttcctgtaatttccttagaagagggattctttaaagttgattactcccagttccatgcaacatttgaagtccccaccccaccttacagtgtgaaagagcaggaggaaatgcttctcatgtcgtcccctttaatagcaccagccataactaacagcaaagaaagacataattctgtggaatgcttagatggactagatgatattactacaaaactaccatctaagctgcagaaaattactggaagagaagactttcccaaaaaactcttgaggatgagttctacaacttcagaaaaagcctacagcttgggagacttgcccatgaaacttcaacgaataagttcagttccgggcaactcagaagaaaaactggtatctaaaaccaccaagatgttatctgatcccatgagccagtctgtggctgatttgccaccaaagcttcaaaagatggctggaggagcagctaggatggaagggaaccttccagccaaattaagaaaaatgaactctgatcgcttcacataacaaagcactcccttaggcattatttaatgtttgatttagtaatagtccaatatttggcgatgaggtaattctccctaaggaatctgaaagtatattttcctcccagttctacaagcatatttgagaacccttcctttcccaagtattgcgaatgtgcagaaagcaacagttacggagggaggacatcataaggaagttattaacgggcatgtattatcacatcaagcatgcaataatgtgcaaattttgcatttagttttatggcatgatttatatatggcatatttatattgtatattctggaaaaaaaatatatatatatatttaaaggggagatactctccctgacatttctaacatatgtattaagccaaacatgagtgaatagctttcagggcgataaaactaaatatatgtctgtgtgtgtgtgtgtatgtatacacacatatacatatatatatacacatacatacacatacatacatacatacatatatatctgataaaattgtgatgttttgttcaaagttgtagttcttgtgcatgtttactttattagagtaggaaggctactggcattaattattaataccaaatattttagccttaaatttttgtcattttaaaatctgatttaatgttttctgctgtttaaggtcttgggaggctttcaattgtattttatatgagagaatcacacaagtttgtgctatctatggccctgcaaaaatataaccattacatgtttaaattgtaaattttagagcataccagtactcagtatagcattgaacatttcttatgatttttaaaagttgctagtactggggagaaataattgttgattaatttgagaattattcctttcctagactaattaaaatctggaaatctgttttgtatatgatctaatacaaagatgagctctgaacaaacactgaatcatgttaatagacagtagccaagttatattgaatatatcagaatctgtgtgaagttacacaattaattgtccctgtttcaaactgagtaaattggaaacattttctttctttttctggaaattttgtccattttaaaaaccaatcattttaagaagacatgacaatgcaatgaaacagatgataaatatttatgcttaaaatatgtatgtctaattgagtctcttttttattctgttttcttgtttatggcatttgttgtaacaggatagactttttcctcacctaggaaacctatcccatgcctgtcacttatagttcaggaggaagtttttgcacagaccagagagaaattaaaattagatgataaattgaagatatcttacacacagttttttggtgaacactgattttattggtgtcttagatccctagtctacccaaataattttaacagtactgttttttctaatcctgaagtctgatatttatgactcattagcaggaatcaaaactagtgatcagtagaacactttcaaaataaaaatttggaatgcagacttttatgaaaatttaaaagtgctccttaacagaatatcatgggttttcctataaaacttctttaagtattgtaattccagtctgccccaactttaaaaaaaattcttattaatatgtcagtcattaattgctagtttgggctctcattatttcctgttttttaacaattttgtgataattttattattggcaaattaatacatcaacacttaaatcattgactataataataccttctggctacctctgtatcaaccaaattctgtaggtgcaaacatataccagggaattcttactggcaaaatgatcaatctggagtgtgcatccactgtgaatggagcaaattgccctatacccattgataacctagctttcttagtttgtagatgtaggaaacaaaatagtgacagagagagaagggggtccacagggcatggtatatttatcagcagtggaaaaaaagtgcatagatcatttagtccaagaacttaaaactaaatagagccataatttactttggagagtcattttaatttgtctttggtaccaaggagaagacggaaccaaaaacaaactctccaagtatattcacacattcaacaaaatttttgcatgccttctatgtcgtaggcatttttagttcctggggatttggacatggctaagtcagagaaggccattgctcaccatgaacactgtataccagaaggagagtggggaggagacaaaaaacaaataagaccacttcagacaatcaaagtatcagttaagagaatgaaaacaggcctgactcagtggctcacgcctgtaatcccagtactttgggaggcggaggttgggggatcacctgaggtcaggagatcgagaccagcctggacaacatggtgaaaacccgtctctactaaaaatacaaaaattaactgggcatggtggcaggcacctgtaatcccagctactggggaagctgaggcaggagaatcgtttgaacctgggaggcggaggttgcagtgagccaagattctgccactgcactccagcctgggtgacagtgcgagactccatctcaacatcaaaaaaaaaaaaaaaaaaaaaaaaaaaaaaaaaaaaaaaaagaataaaaacagggtaacataatgcaaagtaactgtgtggaataaaaattgattattttagaaaatgtgactggcttaggacggggataatatgtgaacagaaatctatctcatgagaaagtgctactgttgtcaaaattaccttatctgagtgaatggtattttttttatcttttccacacatgcgtgggaaaggtatgatttctgcatgtaattgcagtttaacccttatttctaggttgatcataggtcccagtttacccaggaaaattccagtttatacctgttgtacctgtgtaattattggtagcactccctttcactcttacaatgtcttggtttggatgatatatggtgaagtttttgttgaaactaaattatgaagtctgatatatttggataaaaataaagaattgcttttcttc

SEQ ID NO: 10552 - DNA, 2065 bp, Homo sapiens
  source 1..2065: mol_type = unassigned DNA
gggagcggcgcgggacggccgggacgcgcggagaccccaagacccacgcgcagaccgagcggcagccggggaggggagcgcgggccggccggccgagttcgcgggcagggggcgccgggactcccctttccgcgcccgggacgccgcccgccggatcgcgccttgggatgtagcgcccgctcgccgcctcccggactctcgtcggaccctccgcccagcggccctgcgtcttcccaggtgaccacgccggcttcaggacatgcacggacacagccgcaacggccaggcccacgtgccccggcggaagcgccgcaaccgcttcgtcaagaagaacggccaatgcaacgtgtacttcgccaacctgagcaacaagtcgcagcgctacatggcggacatcttcaccacctgcgtggacacgcgctggcgctacatgctcatgatcttctccgcggccttccttgtctcctggctctttttcggcctcctcttctggtgtatcgccttcttccacggtgacctggaggccagcccaggggtgcctgcggcggggggcccggcggcgggtggtggcggagcagccccggtggcccccaagccctgcatcatgcacgtgaacggcttcctgggtgccttcctgttctcggtggagacgcagacgaccatcggctatgggttccggtgcgtgacagaggagtgcccgctggcagtcatcgctgtggtggtccagtccatcgtgggctgcgtcatcgactccttcatgattggcaccatcatggccaagatggcgcggcccaagaagcgggcgcagacgttgctgttcagccaccacgcggtcatttcggtgcgcgacggcaagctctgcctcatgtggcgcgtgggcaacctgcgcaagagccacattgtggaggcccacgtgcgggcccagctcatcaagccctacatgacccaggagggcgagtacctgcccctggaccagcgggacctcaacgtgggctatgacatcggcctggaccgcatcttcctggtgtcgcccatcatcattgtccacgagatcgacgaggacagcccgctttatggcatgggcaaggaggagctggagtcggaggactttgagatcgtggtcatcctggagggcatggtggaggccacggccatgaccacccaggcccgcagctcctacctggccagcgagatcctgtggggccaccgctttgagcctgtggtcttcgaggagaagagccactacaaggtggactactcacgttttcacaagacctacgaggtggccggcacgccctgctgctcggcccgggagctgcaggagagtaagatcaccgtgctgcccgccccaccgccccctcccagtgccttctgctacgagaacgagctggcccttatgagccaggaggaagaggagatggaggaggaggcagctgcggcggccgcggtggccgcaggcctgggcctggaggcgggttccaaggaggaggcgggcatcatccggatgctggagttcggcagccacctggacctggagcgcatgcaggcttccctcccgctggacaacatctcctaccgcagggagtctgccatctgacctccaggcccggccctcaccactgcccacaagagcctctgccgggggtgggatgccaggacaccccctcccacactcaggacagagccaaccctggctccgtggaccttctggaggaaggtgggggtttcaaagactgggggaccccttcctcctgactccagcacccaggcctgggaagagctcggccccgatcagcctgagttccgccagcgcctacttctggtggctctaggtccccggatccaccacccttcccccactgactcttcaaggacgtgccctctttgctctcagaaccttggggaaggtggctggactgctgggcgggggacatctcggggtttcagggtgggcagggggttagtttggggaggggggggtgcgtttcttttgcatgactgtggcctgttgctcatgactttcttttgtaaatatctataaatggagacagatggagacaccaaa

SEQ ID NO: 10553 - DNA, 19645 bp, Homo sapiens
  source 1..19645: mol_type = unassigned DNA
ggagccgcgtcgcttcgtgcgctgccagcggggctcagccagtcggctggaattgagtagcattcattgaatctgcggatttcatgacgtctctctgcgtggtccaccacttttctcctaaccggggattttttttttcttctgccactcttatctttccccacttcattccacccagtctccctcccccgtccctgcccaaacgcgcgcccctccgcccctcccttggccccagcgcccagccctgctctccgcgctcggccagagggagccagtccggagacggccgcacctggctggagaggctgggcgggcggaggggtggagacccgcggacgccgggaagccggacctggagccggagcagccgcgagcagaatggagtctcctaacagcctctcggtgctgatgtgaaatttgaccatctgattccagtttttttcttttccttttcttttttgcatttccttccctcgccatccgtcgtgtagtgaattgttcagtcttgctccgtttcaagagaggagatcatgattgagtgaagccaccccgtccgcagccaggaaaagcacaaagaagaaactgcaacaatggccaagctgacagaatccatgactaacgtcctggagggcgactccatggatcaggacgtcgaaagcccagtggccattcaccagccaaagttgcctaagcaggccagggatgacctgccaagacacatcagccgagatcggaccaaaaggaaaatccagaggtacgtgaggaaagacggaaagtgcaatgttcatcacggcaacgtgagggagacctatcgctacctgaccgatatcttcaccacattagtggacctgaagtggagattcaacctattgatttttgtcatggtttacacagtgacctggctcttttttggaatgatctggtggttgatcgcatacatacggggagacatggaccacatagaggacccctcctggactccttgtgttaccaacctcaacgggttcgtctctgcttttttattctcaatagagacagaaaccaccattggttatggctaccgggtcatcacagataaatgcccagagggaattattcttctcttaatccaatctgtgttggggtccattgtcaatgcattcatggtgggatgcatgtttgtaaaaatctctcaacccaagaagagggcagagaccctggtcttttccacccatgcagtgatctccatgcgggatgggaaactgtgcctgatgttccgggtaggggaccttaggaattcccacattgtggaggcttccatcagagccaagttgatcaaatccaaacagacctcggagggggagttcatcccgttgaaccagacggatatcaacgtagggtattacacgggggatgaccgtctgtttctggtgtcaccgctgatcattagccatgaaattaaccaacagagtcctttctgggagatctccaaagcccagctgcccaaagaggaactggaaattgtggtcatcctagaaggaatggtggaagccacagggatgacatgccaagctcgaagctcctacatcaccagtgagatcctgtggggttaccggttcacacctgtcctgaccctggaggacgggttctacgaagttgactacaacagcttccatgagacctatgagaccagcaccccatcccttagtgccaaagagctggccgagttagccagcagggcagagctgcccctgagttggtctgtatccagcaaactcaaccaacatgcagaactggagactgaagaggaagaaaagaacctcgaagagcaaacagaaagaaatggtgatgtggcaaacctggagaatgaatccaaagtttagtgccctagctgggcaaacccttctcttctccccccaacacaatctttccttgtctctcattctctttctttttctgtctctcttgctttgttctttatttgtttatatttaatttttacatgaccagaaaacaaatcttcaaggtgtaaaatatctacctgccctctctcagttattcagattgacaaggtagacatggatttgatgaaagtgcaaagtgccctcatttgtggcccaagcctggtctcctcccaaaatactacacatccaactcctggagatttcagttacttacctgcatgtgttgtacaataccagatcactcaaaaaggtgtgtcaaagattttacctgggatatgacaagcaaggtttctggtgcctatttattcattcagtgagacacagagtggagccctcagttttatggatcccaattcatttcatctactacagggtgaggtgcttgcccccatgtgggtgtggcagttacagggcccaggtgagctgaagacaaaccactgtacatatatatgccttatgtaattattttctttttgtaattagtaataaaacccagcatgtacaaaagtaccatagaacagaactgctaaatactgtacatagatgtatcattaatgtaggtttagatatataactttagaaataagaagcaaaaaaaaaaagaaagaaagaaagattcctaacatgcagtaggcatttctgttttgatgtctgtgttttccaggttattttgatccagttgacggctggcccttcagtgcatggcctttgtttgtgtctcagactggcagacgttagggtacctcactgttcccacacggatcctttcattgaatccaacaagccataggtctgggggaaattgagaggtctggtagatggcaaaacccaccaccaatatgctgatatactgtgaaatgttacaaaacagatgtctttttttaaaagataacaagggcctcactaactggcctggaggagggggaataccaggaaggaaatattctctagcctgtcaccaaaggtatgtttttacttttcacatgagctcttgccctttgtagtacaataatttaggaaacttttctgcaaaaccattgattctccagctgtagtttctctacactcttacaatgagacatggtaagttagcagaagatggtttgggtctaaagccgtgaaattcacaaaggcatgtagtgagtggcatgcattataatcatcgacctctcactttgactctatctggctttctgagaatgacatctcgcctgtccctggggcttatccatcagcatttcttgcattgtgatcttttattattttgaaatgaccagagttcagtattcaaagattagatcaacaatcttgatgattgtctaagaaatgtctctagagtatgccacaggctagaaatcaaatccagtgtctgtcaatcaaaagaaaacaaataaaaaaattccagccttaattcactttaatctgcaaaaaggaaagaagggaggaagggagggaggaaggaaggaaggaaggaagggtatttgtactggaaatctgaattttaaaatgaaaaaaataaggaaacaaatcttagatcaaacctccggggcaggtggagattttgcactgttacagatctttcacattcactttgcatttataagctgtttgttctttaacacagttgcccatcataaatattcattgaatggatccaagtttattttcagctcctacagctgtgctcagtttgaggctctgcaccatggaggtcaaagagatcaaactagctgtccctctttgtttcccttgccttccctgacctgatcgcacaggcctttggtgtagtctggggaccttgtctactaaaaaagaagtcccaggataaggaaagtggctcctaaatataacctcggggcctctcttctcccatctcagagaccttggatcaggacaactgcctcttggcactgactttaaggaaaacaaaactgttggctatagccctttcctgtttgccagcatttccttttttgcattgaatctctgttgaatcatttctttatttcgcacactctaagaaggaggtggtggtccgggaggaggaagctcgatacactccccttgaggctgcggggaggagccatggcttgacctctctgcagcctaatgaagggcactcttggcttggggagctcccctgcaaccttgccagggtcgcagggcaggccatggcaggcacaaaacaagatggaataggggcggcaaaatgtcttctaatttagctcttgaagactcactgggcctttttaattccattgctaaggtttaaaggacagcgcacacccccgtgtctggttggaagagcaagcagctcagggcctcatccctgcttgcctgccctttagcacaactgaacgaagagccttgacaacacgttggccacgtgcacctgtcagttctgtgtctgtgacgggcacccagatgtgaggtctctccctgtttctcactgtctttgttgtcaatgtagttggagacagaacttgaaccaaatctcgtttttgtaatgtgagcctctgaatctttacatggggatgctcctgaagaaccttttactagaatgtccctatcaaacatgtctatttttctacagttgttaacacagtttaacagtgtattttgtgtcaactgttaaaatttggaactgaaagttcattgagactgattttctaagcagcgagtagtgagtgaatggtgttttccattaagacagctcaacaaaattgaccccacaatttccactcattctattccgcaatatccagtcctcattccctcagtcactccattagcaaaccaagtgcaatgagaattttttaaaagtctcttttaatacaacagtatccataactaatgaagatcactctcaactagatcctttggtctgtttggttaatgtatttgagtcatttttccataaagcatggtgggatccgtgagccagataagaatttggaatttaagggttatggtttgccacagttgaccccaatttgacagaacaaagtgctcctggatggaagggcaggttcagctgcaagcatgaccccccaccacaaggctgctgagttcctcggattctcacctccacccaccccaacgtgctctccaactggaagagcacccattcatttataaatcaactttatggaaccaataaaatcatttctgttttagctgtcccctgggtaagctatactcttttacattaacatagcaaatgtcaacttttctgttccttcaaacatggccttccagcctggttgttccagcatatatcccctctatgtccatgaggcagaactctctcttcccccactccgttcttccatctatccccatcctttgctgtttccctggttctccagttccaattctattgttttagttcagtaccttatgttccctaacagaaatccagctgcaaatgtcaacctatttcttaagcacaattttctcttgcaggtctaaccaagctagggctctgaaatgtctatttttcactgcactccaatttaaaaattattcatgacttcatttaatagtctaaattttgaattctccagagcaacattcttatgctttccatccctacattttcttacatttcagttttcttacttttttcccctttgcttttttatttagatttaagccagtgtctttgggatatttagaaactgcttacaaaggtgggaactggtggacagagaaagggggcataagaatgctattagaaaactacctgaactcaccagaagaatgggaaatcatttgatttgctgagagaatacaattaaaatactcatagtaaatcatttccaaaacagtttgctaatagtctggctactcttcagtctttctttccttgacttgggtgatactctgtatgatttaaaaatgtcaggaaggtagttgaaagttcagtgtcctctatatattgtaaacattatcttcaaggatgatttcctttcaatggatggctttaacattgaaaaacataggtaacatatacataatagatgattcattgatattactttacaatacactaaaataacattatcttgtttctgaactttatggccaaccggtatctaagaaaatgttagcctttaatttaaaattgagtaaagcacgcctcttcctaatatttctgcctttaatgtcttgagtgctttagatgcagagtgtcatctagaagtcaaaattctgtcagaaggctgctaagagattttgataaatcacagaatatataataataacccaacaatattttacccaacatggtgtggtgtttgagagcattaagagcacttgtacaaattatcttatttcattctaattcaccatgagaggttgagtattataatttacattttatagagggaaaactagggtttgggcaaattggccaagtttaaaggccagtgaatcatagctccttgtctcaaatccaggtcacagggccctaagctgtgggctatttttactacaaaaaatttcagcaaaccaaatctgctaaaaaaaaaaaaatctggcctgctgcctgttattgtaccacttgtgagctaagagcaatttttacattttttaataattgggggaaaaaaaagaaaagaagaatattttgagacatgtgaaaatcatcctaaattcaaatttcaatgtccacaaacaaagttttattggaacacagccacagccatttgtctgtgtattgcctatggctgcttccacatgcactcacagagctgagtaattacaacagagaccgtgtggccagcaaagattgaaatatttactatctggccctgtataaaaaaagtttgctgacccctgtactgtactgttaagtactattggtactattaagtactagtaatagtactattaataatagtatgtaagagtactaagtactatgaaatattgtactgtactcttaagagagtcctaggcaatatagaagaatgactttttttctagcataaattattgaagtcactcataagtctgttcaaaataacataactcttttttttcggttgtcaaagagacaactgcttcacaagacttagagagcccagtcattcagttagggtctcaaaggaagaatccttccttttcatgccattcctccagagtggcaaatagagtcaacagccagccaggatctagcggtcaactcagaaagtggatacagtaaaattactccttaatgaactacagagaaatgggcattcccagcccagccgctgaaatattgcttcagtggcaccctcaggcgttggatgatgtacatagctcaggctgccagtctctgctcagcaaagcagcccagacctgcagtggttgccacacatcaaacccgcctcgctcctccacatggcttctctcttaggctctcttggaggagagttaaataggtggcccagatgtctccctctgttttcttgctagttttctctagcctacagtttacaactgatcaaggtgatgaacgtgaacctggaactagctcatgtttaattgcgctagtttttgctctctctagccactaagctagaagtttaatgtgtaattaaagaactaaatgcttcttatggaaaaccaaaaggtcctttgaaaagagctcagggagacacggaagtatagtaaagggttgttggatttcttgcgctttctgagtctgaagcaaagacaaagattggtaattacagacataatggatggaaaaagtccagaccttggggtttttagatgagtcaatattaaatggcattctttgtgtcactaagctgaactcccttgtcttctaaggaagcatttctaatgccagaggtagtcagccaagctaggttccttatctttttagttctatggaaaaacatatcaagttctcttatgagtgctttcctggaaatcagatgagaaagaaaaaaaagtaacaatgtaacaaatcattgtgatgttgttatattgtcgacagataaaggatggatttgatcctgcgtctgaaactaagtaggtaatggtatctacaatatagatcatgcaaaaagcttgtgacccttcaactgcatggaagagtgggaggaaacaactaagtgggaggaaacaaatctcaaagttcaacaccataaaacttaaataaatgtaaaaggagtcaaacttttacttggcctcattgccttggtaaaagaaagcttcatgtatccacctaattcaataagagagtcctaggaaaaggaaggcaaaatactttaaaggcacacaaaaatatttcactggggtggtcaacatgattaagtgatggagattagatttatcactgatgaaaacagtatttatagagttatttttagacactataccccctagatgcaaatcccaacatgcactgtggttggccggagaattgtggccacatagtaaacagatcttgatttcagagaatgaaatgttcctaccgactttgtgtaattgcccatttcaagattaaggctcagtgcccattgttttaacaccgatcatcaatactgtgatatcaactaagccaatctttataagaatatgaagggctgtttttctcaggcaatgtaaatatctgctaccaacaagcactagtgaaataaacatgtaatcatcatcgtttctaaaactctgatagaaatcacaaaacattcaagcaaaagggcaaggtcttccaggagcctaggagcagacttttggctacaaagagcctagtccaggctgaatgccttatggagtatgtcagtcttgggtcttatcactaaacacaactagtagaactcgatcaactggagtgcagagatcagagtttcggtcagccgtgcattacccaaacctctgggtcttcagccagtcttcttagaagaggggaaggagcactgtcctcagatccggccatcacgggcatcgccctgacatcatctctcagcattgctgactgtgggcatgggtatgagaaataccctcccgtagctcagacttgggcagaacaaaatcctcagccatgcccacccactgaggtctctctaggggagcttctccctgcagggtctggctcttgcccatctggacaatgaccccctagaagtatcttccgggggaccctgtatctttcaagcttaacttgccccacacccttgaccccacagagcacctccctgggtcaggaatgatgactaaattaagacctttagcatctgctaagcacaggggtgccctcccatgtgaaagtccaagtaaaataaatggagtcagggtaaggaaatccccaaaagttctgattttctcatggtgatgatctcagtgcttttctttttcatgacatatctaattctcttttctctaggaagtctcacgttttggtatcacgatgccgtgggcacagactcagtcatcgggccaatggcagaactctctccagatagtctgacctggtccctctttttgagtaaggctgggagtttggtttgtttgagccaccccacaaccaatagaatcccaccctggctaagaaatctcacaaggccgggtgctgtggctcacacctgtaatctcagcactttgggaggccaaggtggcagatcacctgaggccaggagtttgagaccagcctggccaatatggtaataccccgcctctactaaaaatatgaaaaagttagctgggcatggtagttcctgcctgtacacccagctactctggaggctgaggcacaagaatagcttaaacttgggagggggaggttgcagtaagctgagatcatgccactgcactccagcctgggccacggagcgagactcagtctcaaaaaaagaaagaaaagaaggaaggaaggaaggaaggaaggaaggaaggaaggaaggaaggaaggaaaaaagataaagaaagaaggaaggaaggaaggaaagaaagaaggaaggaaggaagaaggaaagaaagaaagaaaagaaagaaagaaaaagaaagaaaagaaaagaaaagaaaagaaaagaaagaaagaaagaaagaaagaaagaaagaaagaaagaaagagaaaagaaagagaaagaaagaaagagaaaagaaatcgcacatccccacctctatcagggtcaccaaatgaaggcatcaatttcaagtcccgttattatctgcaaggaactctgcattgcagcacttacagacacaacttatgctgtctcctggtgcccacacagctttcgggtgatggcagattgtcagccaaccattccccccagctgctctctcttaatttgctccctcatctcaccacgaaaacttcacttttcctggcacccccgttggaaggttaatatcatttttgagcatccacaatccagcaacctattattggggttagtcctattccttaccacttaatagccaccaccaattttaaccgagcgtatatgttcagagtctaaccatatatatatatatatatatatatatgtacattttgttcctgcttcataattgcccagagagtctatgagtgatggttgggcgtatacatggtctcagcccggtaactgacgagagcagcataaagttaggtcttgtgctgaaaggacagctggactggtccagtgggatcttcttgtcctttgcagcatgccattaggggaccagcttgccaaagaagctcctgaacatctttattcagcccagtgcttcctcgtcttaaccaagagccacacagagacaacagtgaactcacaagttcataggattccaaaatgattgactccccaagtgtctgcctgtgttggcaaagtgctctttcctttcccactgtctgcacagactgtactctggggaaactcccagcacttgtgggtgcctggttaccgaggatgtgcttggctgccatggtaactcccagcctctcagtgtggaccactctcccgcaggctcgaggagacctggcagaggccccatggggcggaggctccctagggctgctccacctgcagacagccttgggagaacccaaggtaatgtggagtaggacccagcacacaggagctccctccgcacgccaggtctggggtattcccatcctttcttcctaagatgggatgcacttaggtggccaaattgcttcttaaaaggctcttcttcaagccatcatcctcatatcacactcatgcccacactccagtcacatttgcctttaaaaaattttcaaaattatttttgtattatcccatgtaacagatgtccaaagagttgccattttcttaacactaaataaattctgcctagaagattaagattggtccagaacagggagtgttttaataagcacaaatataaacaaaagcaattttaaaatttacttatggattctttcagaaaacctgatttcaaatcagaaatactcatttttgcccccagagcaaagttccagaatactatttcttcttgaacttgccattttccatctggctttgaacttgagaatagactcccctatattggcataaaaggtaaagtggaatttaccactgaaactttcagagctcaatttagtctggccccatggaccaggcaagaataaactctgctcaccagtaacaattctgcagccaccgtactgaacacaaaccctggagaaattctggacatggtactgcttaagaatgctgggtactcgggaggctgaggcaggagaatggcgtgaacccgggaagcggagcttgcagtgagccgagattgcgccactgcagtccgcagtccgacctgggcgacagagcgagactccgtctcaaaaaaaaaaaaaaaaaaaaaaaaaagaatgctgggaatgtcagtcgagggtctgatttcagaaagaggacattaatattcaaatccctgaaccatgcccacactgtgggagtcaggcctaacaagatcccagggtccatagtttacctggtcagcttgctgtgtctcatggggcattagagggtagatgagaactttccgcaatctcgacaactgcactgtaagaatttcttctgtgtattttctaattctgtgacaacaggcatcaacaaaacatgtggcctgttatcacatggttcctccctgtgtgcaccttcatagagattttttccttttctaaaagaatgaggattcctctgaatgttacactatgcaacaataatgtccccagtccttcataagtaacacagtaacaatataagcaccctctccctacataacacacacacatacacacaaatacacacacagacacatgcatacacacacacatacacacagacacatgcatacacacacatacagagacatgcgcatacacacacacgcatacatgcacatgcatacacacaccaagacatgcatacacacacgcatacacagagacacatgcatacacacacgtgcatacacacacagacatatgcatacacacacgcatacagacatgcatacacacacatgcatacagagacacatgcatacacacacgcatacacacacacgcatacacagagacatgcatacacacatgcatacagagacacatgcatacacgcacacagacacatgcatacacacacacgcagacacagacacatgcatacacacagagatacacgcatactcacacagacacagacacatgcatacgcacacacagatatacacacacacacacacacacacactcttatcctttccaatcagttatgagtgacaccacaaaagtaaatttccagaaatcaaagccttaagattggcgttcctcccctgcatgcactgtggcattattttaaaaatgtaccatacacttccctgaacctgcaggcaacagcctttcttccagtgtttggtaggaaccctggattcagaagaccaggttttgcccccagatgagcaatgtcgtcctgggtatatcatttcactggtcggaaatagcttcctccaccccttttttaaaaacttgataaattttattttttagagcagcattaacttcacagcaaaatagagcagaaattaccaagagctctcatttacccccggcccccgcatgcatggccgcccccacgagtgatatgccaaaccacaatggtacatctgtggaaatggatgagtctacactgagacattactatcaccccagagtccattgtttacaatggtgttgtacattctatggatttgggcaaatgtataaaggcatggatccaccattatagaatcatacaggatagtcccacggccctaaaaatcctctgtgctctcccaattcatcttgtgtcctcccaacccctggcaaccactgatctatttactgtctccatagttttgccttttccagaatggcatataattggactcatgcagtacgcagccttataaaattggcttatttcacttagtaacatgcatttaagtttccctcatatctttttatggcttgagagctcacttttttagcaccaaacactcatccattttctggatgtaccactgtttatttatccattcacctactgaaggacaccttggttgcttccaagtttggtcagttatgaataaagccactataaatatctgtatgcaggtttttgtgtggacataagttttcaattcatttgggtaaatatgatatgttaaagctatatttagtcttgcaagacacagccaaactgccttccaaagtggctgtactgttttgcattccactagcgatgaatgagggttcccgttgctccatatcttcaccagcatttagtgttgtcaatgatctgcatttgggccattctaaaagatgtacggtggtgtttcattgctgttttaatttgcaattccctaatgacatgatttgggacatatttttatatgcttgttttccatctgtacatcttctttggtgaggtgtctgttcaggtcttttgggcatttttttaaatcgggttgttttcttattgttgatttgttaaagttctttgtaaattttagataataattctttatcagatgtgtcttctgtaaatattttctcccagtccgtggcttgtcttctcattatcttgaccttgtctttttcagagcagacgcttttaattttactgaagttcagcttatcatttacttctttcatgatcatgtctttggtgttctatctaaaaatctattgccatatccaaggtcatctaagttttctcttatatgttaccttctaggagttgtatagttttgcattttacattagatctgtgaccgattttgagttaatttttgtgaaaagtgtttgttaggtctgtatttagactcttttttttttttttttttttgcctgtggatgtgcaaatgtgcagctatttcaacaccgtttgttgaaaagaccctctttgccgcactgttttgcctgtgctcctttgccaaggatcagttaactatatttgtgtgggtctgtttctcagctctccattctgttccactgatctatttgtctattccttcaccaacaccacatcgtcttgagtactgtagctttctttctccatataaactgcagactcagttttttggtaccaacaaaataacttgctgagatttttattgggattgtatttaatctacagaggaagctgggaagtgacatcttgacaatattgagtccctccatgaaatggaatatctctgtatttacttagttcttctttgatatcattcaccagttttgtagttttcctcatgtagatcttatacatattgttagatttataccttaagtacttcatttcaagggatactaatttaaataatcatgtgcttttaatttcaaatttcacttattcattgccggtatataggaaaacaattgactttgtatattaactttgaatcctaaaatcttgctataatcccttattagttccaggaaggttctggggcttgtttttgttttgttttttggtcagttatttcagattttctacatagatgatcatgtcatctgtaaacaaagacaaagttttatttcttctttcttcccaatctatatatttttatttcctttccttgtcttattgcatcagccaggacttccagtatcatgttgaaaagcagtagtgatggggacaccttttttttcctgatcttagtgagacagcttcaggtttctcaccatcacgccatttagtatgatgttagctgtaaggttttttttttagatattgtttatcaggttgaggggcttctcctctattcctgctttactgagtgtttttatcatgaaagactgtttggatttttctgcatctgttgatatgatcatgcaatttttcttcttttgcctgttgatattcattacattagttgatctttgaatgttgaaccagccttatatacctaggacaaattccacctggtcatggtgtttaattattttcatatattgttggacttgatttgctaatattttgttgaggatttctgcatctatgcttatgacaggtattggtctgtagttttcttgtaatgtctttgtctggttttggtattaaggtgatgctggattcatagaatgagttagcaagtgttctctctgcttctagcttttgaaagagattgtagataatcagtatcatttcttccttaagtctttggtagaattcaccagtgaacccatctgggccaagtgctttctggttggggaggttactaaccattgattcaaattatttaacagagatatacctattcagattgtctatttgctcttgtgtgagttttgacaaattctatttttcaaggaattggttcatttcatctacattatcaaatttgtgggtataaagtcattcataaaattccttcattatcttttattatccttttaacctccatgggattgctagtaacgtccccgctctcatttctgatagtagtaatttgtgttctttctctttttttcttagttagcatgccttgagacttatggagcttattgatcttttcaaagaatcaactttgtttctatttattttattgatttcctattttcaatttcgtgaatttttaatctaattttaattatttcttctcattggcttactttgggtttaatttgctctttttttctacttttttaaaatggaaacttaaatgattgatttcagatcttcttttgtgctatctgcattcaatgttataaatttccctttaagcattgtttttattgcatcccacaaattataataagctatgtttttattttcatttatttcaaaatattttttcacttatcttgagatttcttctttgacccatgatatttacacgtgtgttgtttaatctccaagtattttggcattttccagctacctttctgttactgatttctagcttaattccattgttatctaagagcaaacattgtaggacttgtattccttttttttttttttttttttttaagacagagtctcactctgttgcccaggctggagtagagtggcatgatcttggctcactgcaacctctgcctccggggttcaagcgattctcctgcctcagcctcccaagtagttgggactacaggtgcccaccaccaaacctggctaatttttgtatttttaatagagatggggtttcagcatgttggccaggctggtcttgaactcctgatcccaagtgatctgagaatttctattcttttaaatgtgttaaggtatgttttatgacccagaatgcagtctaacttgatgaacattccatgcaagcttaagcaaaaagactaatctgctgtagtttcctcatctttttcaacaaacatttgaaccccatagtctctgctttaataattctagtatccattccaacctacaccaccatcagttctagactgtacctctacactaaatgaccccagatggttcagctttaagtctcagctgttttcatcatttaactgattcccttgctggcagcagggaaattaactaccagccacacacttgtctccaacagcacccaccgaccacgtcctgctcccctgtcattaccaccactaaacccggtagcagagagatgagctgtgaggtaggtgccttctagataaatgaggtgctactggacatgcactgtggtcttctctgcagtagaaaaatgtccaaggaaggtcagcatcattgatagaaaataaatgtgaggctgcatctcgccagctcatccatgagcaattccttcagctccagcaggctactgacaatttgcttttaacccaaatccagctctaccctccctaaagcatgcacctagggccccagtcagaaaaacaaaacaaaaactaaaccagacaggataattaaggaggcaaaaagcttaaaccataatattttaattaagctgatttattttaaccgtagcactactgctttattttagttatataccagtaatggaaaatagtggccacttttcattattaatcataagataattcattgtatttgtctttcctaataaaatggcattatattaaggcccaaaatgtttactatggcccagtaaaatatagggttgttctgtgagctatttcttaggatagaaaattattccagaaagctattagttcaaaagtctctagcagtgccaaggtttcaatagtctctttaattttgaatctatgcgattgaagataagactgcatctagtttgggggttgcatgtttgtggacattcatgtttctatgtacctggaacttcttattctcaccatcacacagaattttcaagaactagttaagcaaagaaagcaaagcccagcaggtgtcagaattgggtccccaagctgagggtcattagggtgcatgtcagtgtgccaactccaatatccacacctagagaacgcacatcttcccaaaagaaatgaagcacagatgatacttgatcctcaactttgtctccagaaattttttcaggaacttgagttctttatcaaatgctcacatcctacagagaaataaagtgttccattttcaaggttcatgaagctcgtcaatgctgggagcaggcacacacttgtatttttatactcagggatcccaacaggcaactaaaactagacaaggacaaaactccactcaaaatattctgaaagttagctgatgccccatattttattactccaaatgtgtattcacttgcctgagtgctggccatgagcactcagtgaacacttgcagtacagtgagtgatgtccttgacaagttactatgaagactctgagaaaaagtaacatcccccactgtcctcaacaagcctgtaatcccatggctgccagcccttaccatgcaacaacactgcgctaagtgcatcgaaccacacaaaaccctgtgagaaaatactgcttcccacttcacacgtgaagtaactgagtctagttttagaaatacctaaacgaagagggacaggcacaacaaatttgctggaatgtaaagaaagtagatcagtttctgcgtaagcagtaagaaatggcctcatgaggaagaaagggacatttgccctgacatttctcaaagactgcttaggttttggagacagagatccaagggcaggcaagcacaatggttcatgcctgtaattccagcactttgagaggccaaggtgggaggattgcttgagcccaggaattcaagattagcctgtgcaacacagcaagaccccatctctattttaaaaagagagagagagatccaaaagcaaaggcatttcagtttgcaaggccagcatgggagagggtcttaaaacagaaacacacaaggtaagattgggggatggtacctagaccagcctaggatcataggatttgataaaatatgcatttggaaaactggtgctaatttatagagacttagaatttcaggctaaggacaaggactaagaaacgaatagcatgaacagtattattgataaacccatcattgcatcttaaaggctctgaagtctttagtattgaattaaaaaataattttcactggacaaaaccaaaaggtctttacacaactgtcaagcactttgaaatgattcagcaaaaagcagaataaatcactagtggaatttcaatagcatgtagttgtaaaccatcatgtgtccagcaaaatcacaaaacaagagtttattttagaagggacttagggatattaagaaatataacatacaaaataactaaagttttctccaagcaaaaccaatgatcctttagggatgaacagaaagaaaacaagaaatgcttctttcaaaagttgctaccaaggcttctaagatttctttggaataaagtcactaagatttgcttctgaggtcaatcttgccaacttttccaccatgctttttaggaaggaacaccaggtagggctcaagtactggtttggctcctgtcccattttttggtccttttgtaactccctttactcaactccaagtatgtctgtgcacggacaatgagacgaaagcatgctcaatgcgaaagcacaaattatgtattgagaaatcactacaatgccaaatttttttaaaataaaaaaaaaatatatatatatatatatatctttaagaactcgctgtgttagggaaactgtttacatattgaggtgttcctctttttttgactggaacaataaaagaaaaatttgata

SEQ ID NO: 10554 - DNA, 2161 bp, Homo sapiens
  source 1..2161: mol_type = unassigned DNA
gcaggaagacggcgctgcccggaggagcggggcgggcgggcgcgcgggggagcgggcggcgggcgggagccaggcccgggcgggggcgggggcggcggggccagaagaggcggcgggccgcgctccggccggtctgcggcgttggccttggcggcggcggtggagaagatgctgcagtccctggccggcagctcgtgcgtgcgcctggtggagcggcaccgctcggcctggtgcttcggcttcctggtgctgggctacttgctctacctggtcttcggcgcagtggtcttctcctcggtggagctgccctatgaggacctgctgcgccaggagctgcgcaagctgaagcgacgcttcttggaggagcacgagtgcctgtctgagcagcagctggagcagttcctgggccgggtgctggaggccagcaactacggcgtgtcggtgctcagcaacgcctcgggcaactggaactgggacttcacctccgcgctcttcttcgccagcaccgtgctctccaccacaggttatggccacaccgtgcccttgtcagatggaggtaaggccttctgcatcatctactccgtcattggcattcccttcaccctcctgttcctgacggctgtggtccagcgcatcaccgtgcacgtcacccgcaggccggtcctctacttccacatccgctggggcttctccaagcaggtggtggccatcgtccatgccgtgctccttgggtttgtcactgtgtcctgcttcttcttcatcccggccgctgtcttctcagtcctggaggatgactggaacttcctggaatccttttatttttgttttatttccctgagcaccattggcctgggggattatgtgcctggggaaggctacaatcaaaaattcagagagctctataagattgggatcacgtgttacctgctacttggccttattgccatgttggtagttctggaaaccttctgtgaactccatgagctgaaaaaattcagaaaaatgttctatgtgaagaaggacaaggacgaggatcaggtgcacatcatagagcatgaccaactgtccttctcctcgatcacagaccaggcagctggcatgaaagaggaccagaagcaaaatgagccttttgtggccacccagtcatctgcctgcgtggatggccctgcaaaccattgagcgtaggatttgttgcattatgctagagcaccagggtcagggtgcaaggaagaggcttaagtatgttcatttttatcagaatgcaaaagcgaaaattatgtcactttaagaaatagctactgtttgcaatgtcttattaaaaaacaacaaaaaaagacaaatggaacaaagaagctgtgaccccagcaggatgtctaatatgtgaggaaatgagatgtccacctaaaattcatatgtgacaaaattatctcgaccttacataggaggagaatacttgaagcagtatgctgctgtggttagaagcagattttatacttttaactggaaactttggggtttgcatttagatcatttagctgatggctaaatagcaaaatttatatttagaagcaaaaaaaaaaagcatagagatgtgttttataaataggtttatgtgtactggtttgcatgtacccacccaaaatgattatttttgtagaatctaagttaaacttactatttataatgcataggtaaccattaactatgtacatataaagtataaatatgtttatattctgtacatatggtttaggtcaccagatcctagtgtagttctgaaactaagactatagatattttgtttcttttgatttctctttatactaaagaatccagagttgctacaataaaataaggggaataataaacttgagagtgaataaccatagtattctgctgcaataaatgtttctaccctcttgcgatagaatggtgtcagatgtctaacatgtttataaacatttttttgaattgaacaggttatgaaaaggatttattaaaaggttaagatactttgttttgaaagtacattgtgatttgcagccacctagcactaaagcatagaacttaaacacgaatccctaaatgaacagattatgttacattaatctgagaattttaaatttagaagctaaaataaataaaaatcacagctggttgt

SEQ ID NO: 10555 - DNA, 1182 bp, Homo sapiens
  source 1..1182: mol_type = unassigned DNA
gagtcagtagaaaatggggagcctctgtgggctcctggtcctgcaccgtgataaatagcctgtcctgcaacctggcttaaaacagggaaagccggagttaggcaacagagtgcctagctttctcagtcattcaaacacaagcacggaagaagagattgcactgaccagaggaccgccagggtgtgatgctccgtagtcgcagggatgaaggaaaaccatgggcggagcttgtcatggacagctcctaggtggacataaatggaaactcattggttctggggcacggcgggaagagggagacggccctggacggccgcaccaagaatttcacaacccaaacccgactagaaagcctgggttatggccacaccgtgcccttgtcagatggaggtaaggccttctgcatcatctactccgtcattggcattcccttcaccctcctgttcctgacggctgtggtccagcgcatcaccgtgcacgtcacccgcaggccggtcctctacttccacatccgctggggcttctccaagcaggtggtggccatcgtccatgccgtgctccttgggtttgtcactgtgtcctgcttcttcttcatcccggccgctgtcttctcagtcctggaggatgactggaacttcctggaatccttttatttttgttttatttccctgagcaccattggcctgggggattatgtgcctggggaaggctacaatcaaaaattcagagagctctataagattgggatcacgtgttacctgctacttggccttattgccatgttggtagttctggaaaccttctgtgaactccatgagctgaaaaaattcagaaaaatgttctatgtgaagaaggacaaggacgaggatcaggtgcacatcatagagcatgaccaactgtccttctcctcgatcacagaccaggcagctggcatgaaagaggaccagaagcaaaatgagccttttgtggccacccagtcatctgcctgcgtggatggccctgcaaaccattgagcgtaggatttgttgcattatgctagagcaccagggtcagggtgcaaggaagaggcttaagtatgttcatttttatcagaatgcaaaagcgaaaattatgtcactttaagaaatagctactgtttgcaatgtcttattaaaaaacaacaaaaaaagacaaatggaacaa

SEQ ID NO: 10556 - DNA, 2086 bp, Homo sapiens
  source 1..2086: mol_type = unassigned DNA
gataaatagcctgtcctgcaacctggcttaaaacagggaaagccggagttaggcaacagagtgcctagctttctcagtcattcaaacacaagcacggaagaagagattgcactgaccagaggaccgccagggtgtgatgctccgtagtcgcagggatgaaggaaaaccatgggcggagcttgtcatggacagctcctaggtggacataaatggaaactcattggttctggggcacggcgggaagagggagacggccctggacggccgcaccaagaatttcacaacccaaacccgactagaaagcctggggctcccaatattacaagtctgttcttgacaaggaagttgggatgacagaactactgtatgaaaactcagaaatgctcagaagtgcagacctttggttctgttttcttcctcatcagataggaattttttttaactacgcacagaatcacacttgcgaagtcttcttttccttcttgttactttatttagaagctgtgaactcaagaagtaggtcccatgttgaatctacatgtgcgcaggtgattcttttagccaagtcatttccacactcatgcccaagtctggagatacacaggtgcgggtttctgacaacatcaagatatgaaaggattttaagctcaacggttatcagctcaaaagcagaaaatgttcattcccgtttgtgccctggtatcttgaagaatgtgcaataggttatggccacaccgtgcccttgtcagatggaggtaaggccttctgcatcatctactccgtcattggcattcccttcaccctcctgttcctgacggctgtggtccagcgcatcaccgtgcacgtcacccgcaggccggtcctctacttccacatccgctggggcttctccaagcaggtggtggccatcgtccatgccgtgctccttgggtttgtcactgtgtcctgcttcttcttcatcccggccgctgtcttctcagtcctggaggatgactggaacttcctggaatccttttatttttgttttatttccctgagcaccattggcctgggggattatgtgcctggggaaggctacaatcaaaaattcagagagctctataagattgggatcacgtgttacctgctacttggccttattgccatgttggtagttctggaaaccttctgtgaactccatgagctgaaaaaattcagaaaaatgttctatgtgaagaaggacaaggacgaggatcaggtgcacatcatagagcatgaccaactgtccttctcctcgatcacagaccaggcagctggcatgaaagaggaccagaagcaaaatgagccttttgtggccacccagtcatctgcctgcgtggatggccctgcaaaccattgagcgtaggatttgttgcattatgctagagcaccagggtcagggtgcaaggaagaggcttaagtatgttcatttttatcagaatgcaaaagcgaaaattatgtcactttaagaaatagctactgtttgcaatgtcttattaaaaaacaacaaaaaaagacaaatggaacaaagaagctgtgaccccagcaggatgtctaatatgtgaggaaatgagatgtccacctaaaattcatatgtgacaaaattatctcgaccttacataggaggagaatacttgaagcagtatgctgctgtggttagaagcagattttatacttttaactggaaactttggggtttgcatttagatcatttagctgatggctaaatagcaaaatttatatttagaagcaaaaaaaaaaagcatagagatgtgttttataaataggtttatgtgtactggtttgcatgtacccacccaaaatgattatttttgtagaatctaagttaaacttactatttataatgcataggtaaccattaactatgtacatataaagtataaatatgtttatattctgtacatatggtttaggtcaccagatcctagtgtagttctgaaactaagactatagatattttgtttcttttgatttctctttatactaaagaatccagagttgctacaataaaataaggggaataataaacttgagagtgaataaccat

SEQ ID NO: 10557 - DNA, 601 bp, Homo sapiens
  source 1..601: mol_type = unassigned DNA
gactgagaagagctaaaccccagtagagccaagttgggaggtggtgaaaaaaatccaggtgaatggggctaagaccccatacccaggaagcgagctggcatcagaagcagaagactgaggtcatttttatggatgggagatgtgctggtgggtttttagaagagctcatgtcagttggcatccatttcttcagtaaggtgagaaggttatggccacaccgtgcccttgtcagatggaggtaaggccttctgcatcatctactccgtcattggcattcccttcaccctcctgttcctgacggctgtggtccagcgcatcaccgtgcacgtcacccgcaggccggtcctctacttccacatccgctggggcttctccaagcaggtggtggccatcgtccatgccgtgctccttgggtttgtcactgtgtcctgcttcttcttcatcccggccgctgtcttctcagtcctggaggatgactggaacttcctggaatccttttatttttgttttatttccctgagcaccattggcctgggggattatgtgcctggggaaggctacaatcaaaaattcagagagctctataagattgggatcacgt

SEQ ID NO: 10558 - DNA, 726 bp, Homo sapiens
  source 1..726: mol_type = unassigned DNA
gtcctgagggttttatctcctgatttggttagaagattgttgaatctggctgtgagagcctttcaagtgcctaaaggagagagcttgaacttccctgagagtacaccaggttatggccacaccgtgcccttgtcagatggaggtaaggccttctgcatcatctactccgtcattggcattcccttcaccctcctgttcctgacggctgtggtccagcgcatcaccgtgcacgtcacccgcaggccggtcctctacttccacatccgctggggcttctccaagcaggtggtggccatcgtccatgccgtgctccttgggtttgtcactgtgtcctgcttcttcttcatcccggccgctgtcttctcagtcctggaggatgactggaacttcctggaatccttttatttttgttttatttccctgagcaccattggcctgggggattatgtgcctggggaaggctacaatcaaaaattcagagagctctataagattgggatcacgtgttacctgctacttggccttattgccatgttggtagttctggaaaccttctgtgaactccatgagctgaaaaaattcagaaaaatgttctatgtgaagaaggacaaggacgaggatcaggtgcacatcatagagcatgaccaactgtccttctcctcgatcacagaccaggcagctggcatgaaagaggaccagaagcaaaatgagccttttgtggccacc

SEQ ID NO: 10559 - DNA, 473 bp, Homo sapiens
  source 1..473: mol_type = unassigned DNA
ctccttctgccttgtgagattagagtgagaagtctatgaggaagcagccctcaccagacactgaatctgctggtgccttgatcagagacttcccagccactaaaactggacagtcttcattgatgaccttactatttaccacagaagttcatctatgtggctccaaactctatttcaagaatatgaaaggcatgtaggttatgcctacgttctcggacccttgatagatgttttgctgacccaccttctgatatctgtagagttaccctaggctccaccttccaccaaccagttctgtgtcaaagtgcaaaatgaaaatcacagaaaaagtcaacctgacctgaagcttattcatcaccgtgcaatgagtttcaccatacagttatggccacaccgtgcccttgtcagatggaggtaaggccttctgcatcatctactccgtcattggcattcccttcaccctcctgttcctg

SEQ ID NO: 10560 - DNA, 7501 bp, Homo sapiens
  source 1..7501: mol_type = unassigned DNA
gcaggcatcgtctcctccggtctcacagctaccccgggctggagcgtggggagggggtaagggagccagccaactcggggaaacttcgttgccagagatgactggggttttcgggctttcccagccttcccatgccgggccacacggcattcattaaagtggtggggcaactattggtgcgctccagccgggcaggttttgagctgcagagacccgtgcccggtagcagcgctttgccaccgagtgcacccaggacgcagtggccgccagcccgggtctcctgctgggggccggcgagtgcagggagactttgcgccacgatgttttgttttcctgccgcaggaacgctaggcagtctctttccaccagacttaacccgcctgaagcaatagccatggaagttgcggcggcacagagggagacagaaccgcttggagcggcatctttcttggatgttttttctctacacagacttctttctttccttggtggccgttcccgcagcagcaccggtgtgccagcccaagagcgccactaacgggcaacccccggctccggctccgactccaactccgcgcctgtccatttcctcccgagccacagtggtagccaggatggaaggcacctcccaagggggcttgcagaccgtcatgaagtggaagacggtggttgccatctttgtggttgtggtggtctaccttgtcactggcggtcttgtcttccgggcattggagcagccctttgagagcagccagaagaataccatcgccttggagaaggcggaattcctgcgggatcatgtctgtgtgagcccccaggagctggagacgttgatccagcatgctcttgatgctgacaatgcgggagtcagtccaataggaaactcttccaacaacagcagccactgggacctcggcagtgcctttttctttgctggaactgtcattacgaccatagggtatgggaatattgctccgagcactgaaggaggcaaaatcttttgtattttatatgccatctttggaattccactctttggtttcttattggctggaattggagaccaacttggaaccatctttgggaaaagcattgcaagagtggagaaggtctttcgaaaaaagcaagtgagtcagaccaagatccgggtcatctcaaccatcctgttcatcttggccggctgcattgtgtttgtgacgatccctgctgtcatctttaagtacatcgagggctggacggccttggagtccatttactttgtggtggtcactctgaccacggtgggctttggtgattttgtggcagggggaaacgctggcatcaattatcgggagtggtataagcccctagtgtggttttggatccttgttggccttgcctactttgcagctgtcctcagtatgatcggagattggctacgggttctgtccaaaaagacaaaagaagaggtgggtgaaatcaaggcccatgcggcagagtggaaggccaatgtcacggctgagttccgggagacacggcgaaggctcagcgtggagatccacgataagctgcagcgggcggccaccatccgcagcatggagcgccggcggctgggcctggaccagcgggcccactcactggacatgctgtcccccgagaagcgctctgtctttgctgccctggacaccggccgcttcaaggcctcatcccaggagagcatcaacaaccggcccaacaacctgcgcctgaaggggccggagcagctgaacaagcatgggcagggtgcgtccgaggacaacatcatcaacaagttcgggtccacctccagactcaccaagaggaaaaacaaggacctcaaaaagaccttgcccgaggacgttcagaaaatctacaagaccttccggaattactccctggacgaggagaagaaagaggaggagacggaaaagatgtgtaactcagacaactccagcacagccatgctgacggactgtatccagcagcacgctgagttggagaacggaatgatacccacggacaccaaagaccgggagccggagaacaactcattacttgaagacagaaactaaatgtgaaggacattggtcttggactgagcgttgtgtgtgtgtgtgtgtgtgtttttaatattcacactgagacatgtgccttaaacagactttttagtccaaaattacatagcattgaagaatatatttcactgtgccataaacaactgaaagcttgctctgccaaaaggaatcagagaacaagaacttcatttcagatagcaaacgcaggacacaccaagagtgtccgtgcacgtagccggttctggccgtacatgttaagggcatttcagtggcagtgctgtacccctgggcagtgctacctgggcacacacgtagacaagggcagctattccttagaccagcctcctgaaagaaacaggtgtgtctttttagtggagtcgtagtaatatgtgcacacacagaaggggacctgattgggtgggagctggttatgtgtaactagcgttggagttgacattttggcatgtgctctgagcttgaattttgataccaaccattcagtgcatcatacctagtctttctatgctccaaatgaatgtctgtggggacctgagagcacctggaatttgttggaagcagatcagagcacacgtacgaaaaggtgcaattgcttttctcatgacaaaagaaaaaaaataatcacaaacacatcacactgtggatatcaccttaaccaatgacagaagcctgctgagtttggtctttctcacaggggtaggtagtccacatgaactggcgagcagtggtgaaaacatgacatcaactgctgcgtggttaaaggccaatcatgcattttcctcagtgggtgcaatggtgacaataaactgatttggaaatgtccatgtactttggttataacttgttttgataagaggggtagaaataccaaaacaattgccttgcatgatgccagtggcttgctgttctgtctagctgatcctacatttttacaaaagtagacatcctgcatttctgagacacactgaggaggaccatggcatctttccatctcagggctttttgtcccttgggtgtcttagggtagacatagtgataagatccaatctcgctatctccaaacaaaaagaaaatgtaccccttgtacagtaagcttgaaatgtttttattgcttgcagcgtaagtgccattaattccatttaacaatgatacttagaaatatttaaaatatttcattttacttttatgtttgggcattcctttattctgaaaaagtcaccactgctccttgcttgtttctacatctcacatcggttactcactaaaactggaacaccctagactgattgttcccaggcaaacgataagctaacacatcataattatgattggtctgtgaggctagaacatcccgcagaggaaagtcggggaatggctagtcataggttgcatgatgattttaaatgggtttgtatcagaaaggggaaaatacatactcctgtgtatgcctcagtctttatcataattggctggttcacagctagctctttgggccacacgtgaaagcatttggacctggcaacaccaggcagttgctggttatgggtgttctaggctcactgctaccttttacagagttcacgggattttacgtaactaacccgcagtgtggatttaccaaaagatcacagcactagcggagacttccagaaactgtctcatgctttctgacctccagggaaagttgtacccacgacatcctcaaccactggtaccatggaagacctgtccctgcccatttctcaaaaatgcacagctcttccctgcctggagcacatgaagtcccatctccctgtccccagacctttaggctctgttgaagttctggcattgcttatgagacccttcctgtccaaggaaggtctaagtcaactcctccattggactggagatgaggctcactggtgacatcctgtgtcgactcagtaataaatagtcacttgggaggcgatgtttatgcaggtgtggatgttgagttttactatgggaatcattccagcctgacaaaatgtgttttaaggaataggtagataactgggacttcctctgttattctaacaagtcgaagcttcctaattaaactgtccatggatctcacttatttggtttccactctgtgttatctggtacgttctttgtagcagtgtgttaaaattccaggccctacggccaaatctggcagaggcttccctctcatttatccagtgccttctgtgggccaggcacaggattaggcactttatgaacgtcagctcattgaaacttcacgacactatgtgggaagtatttgcaaacccattatatacacaaggacacagaggctcagggaagctatgttatttatccaatggcacacagcaagaaagtggtagagctggtattcaaagtctgaccaaagtctgctttcaacttcactacagtgtctgtgtcatgcatccttgtgattgtgtgtgtttgtgtgtatgtgtgtctttctagcttcatggacacagcttacagatgtggggagcagatatggtggaatctccaccaccaagagggcacaaggtctttgtgtaaacatggctcaaagggttgcccctgcagacacctactgtacatttatttggttttggaaattttgtatgtggcaccctttaaaaaatgccctttgaaagcactcttttgcactttacttgctaactttgtagaaactctgcatacagcaggaataaaatagttcaaagcactaagctgcatactctaccaaatggaacaggtgcatgtgttggtatgtgcatagatgcttccccaaatgagtcaaatcagtcacacagagggatcaaacataaccttgggctgggggtgggaaaattttctacataacccattccctgagacatttggccaagaatgtgatgaacaaaatcaaagaagatcctctatggtgattgatcgattaaatatgtgtgcaaagtgtttagaaacctatgaaatactctcgcaaagatgctgagagagaataagaggttggattcctcttcatataaactaattttggaggaggccagttggtttgaagttacttgaatgttaccttttttagatggggccaaatggcatgtagaatacacgtgataggtcaaagctgctacacattctatacatgcatcagcacagccccccctttccaatctgcactcccattccagcataaacctaggagaaatgtttcgatttcacacaaagaaagagcacacgtccaccatcttcagtgggggctgtcttttgcttcactggcaagcaggcactgaatttttcttgcatgacaaatctggaggtttactggtgagagagccaatgggcattttttcctggaaagagtacagctccatacccagtcctaacccaacagtgatatttatcactttggggcagggctgtatagagtgtgtgtgtgtgtgtgtgtgtgtgtgtgtgtgtgtgtgtgtgtgtgtgcgggttggggtggtgttgggccatctctggcctgttactaaggtaactaggactatttgtgttccagcagtcatagcctgtgattgtgggtgcatcagttctctgcctagatctcttgttaccttgtctgcacatcaagggagggagttgagcacagatacttgtcaagggccattgtagttgtgcagttctctaatgaaacactccctagtccatgagttcacaaaatttattaagattaaattataagttggatttgtgaataatgactaattaattgtcttgcccattttaggttaaggtgagagcttagtctcttgccctttgggatttgtcttttgggggattaatggagaccagatgtacttgggagactggtgtccaaattcggatcatgccctgtgtaggctctctctatcctcccttatagctctttagtgtactgtcaccgggagggctcatgctgtgagggcattttttgcatggtgttaagactagttaaagaaattttaagctgttgttatttgcagtcaattgtagtacttcatgtatcatgaattcaagtactatgatcagacagacatctctctctctctcacacacacacacacacacacacacgcacacatacacacacacacacacacctgaggaaatggctgctttgggttctataaggaccattccatgtttaaagtcctagttgagctgaatgctaagaacctgcccccttgcctccctctgagatgatatcatttcctggcttcgtcaatgctgcctgtctatttgcatgctgggttctgaggactagtgagaaggtgaccagagtttgggtggggctggtttttacccactggatttggtgagaatatgaagcatccagtgtgtaccagggtttctgaaccacgggaaaggcgtaggaaaacaaacattcagagcccctgtaaaacgagaaaggaaaaaccagccagtgttgcattccacatctctgcttgttgcattttgctaatatggggttattctttctcactgttaggatgcaattgtgtgcaaagacagtggctgagtgaacagtaagagctggctagtaatggccttaaaaagaaaaagggtaactctctgaaacaaagatcactttagtgtggcattgtggatgctgttaattctgcatagggaaactttggaacagcatgctaattacatggctgtaagcaaagccctgtcctctgtctctgcaccataccttcattggacttcaccaacccatccatactccatgtaaacctcagttctctcatgcctgccctaagtcagttgacatcagtgcagtggcattgaggagaaatgagaggtgtctctgattttactgaaagttattatcattttcacaggtgcctgagatttggtatctactttgtgttcttgattcttaggtgaaaaatctgaaatagttccctgtgcattaaaataaattattttgagaggactcctgctccgtcgattcagcagacctatgctgcagaaggtaactgcggaagctctcttttgctgtcagggctctgagcttgaagggagaaggtgcagtggtgcctagaagtgatatgcaaaccacctcacatgccagcctctggcctccttcccatcccagagtcacagacaggggacccagtgacaatgatgataaatccatgtgtggaggtgttttacttatttttctttccgtaggatttcatggtgctttaaaaaaaaaggcattttacagaaaataatgtggggggagggagatttcataatgttcttagggaaagtacaaaacaaatttgcttgtgacatttcaataagctgtgctgctattgtctttatttgatgatgtaatttttttttcaatgatggagaaaaattgcaacaaagaccttctggaagatccaatccaa

SEQ ID NO: 10561 - DNA, 2396 bp, Homo sapiens
  source 1..2396: mol_type = unassigned DNA
gcaaggcatggagcctgcactttactctgaatgttggtggcgccttcagagcattgttagcaagggtccatgtgatcacactgacacctgagagagtgacacaccatgtacatggctggtatatggaggatggatttaagggggacaggactgaaggctgtcgcagtgattcagtggccgttcccgcagcagcaccggtgtgccagcccaagagcgccactaacgggcaacccccggctccggctccgactccaactccgcgcctgtccatttcctcccgagccacagtggtagccaggatggaaggcacctcccaagggggcttgcagaccgtcatgaagtggaagacggtggttgccatctttgtggttgtggtggtctaccttgtcactggcggtcttgtcttccgggcattggagcagccctttgagagcagccagaagaataccatcgccttggagaaggcggaattcctgcgggatcatgtctgtgtgagcccccaggagctggagacgttgatccagcatgctcttgatgctgacaatgcgggagtcagtccaataggaaactcttccaacaacagcagccactgggacctcggcagtgcctttttctttgctggaactgtcattacgaccatagggtatgggaatattgctccgagcactgaaggaggcaaaatcttttgtattttatatgccatctttggaattccactctttggtttcttattggctggaattggagaccaacttggaaccatctttgggaaaagcattgcaagagtggagaaggtctttcgaaaaaagcaagtgagtcagaccaagatccgggtcatctcaaccatcctgttcatcttggccggctgcattgtgtttgtgacgatccctgctgtcatctttaagtacatcgagggctggacggccttggagtccatttactttgtggtggtcactctgaccacggtgggctttggtgattttgtggcagggggaaacgctggcatcaattatcgggagtggtataagcccctagtgtggttttggatccttgttggccttgcctactttgcagctgtcctcagtatgatcggagattggctacgggttctgtccaaaaagacaaaagaagaggtgggtgaaatcaaggcccatgcggcagagtggaaggccaatgtcacggctgagttccgggagacacggcgaaggctcagcgtggagatccacgataagctgcagcgggcggccaccatccgcagcatggagcgccggcggctgggcctggaccagcgggcccactcactggacatgctgtcccccgagaagcgctctgtctttgctgccctggacaccggccgcttcaaggcctcatcccaggagagcatcaacaaccggcccaacaacctgcgcctgaaggggccggagcagctgaacaagcatgggcagggtgcgtccgaggacaacatcatcaacaagttcgggtccacctccagactcaccaagaggaaaaacaaggacctcaaaaagaccttgcccgaggacgttcagaaaatctacaagaccttccggaattactccctggacgaggagaagaaagaggaggagacggaaaagatgtgtaactcagacaactccagcacagccatgctgacggactgtatccagcagcacgctgagttggagaacggaatgatacccacggacaccaaagaccgggagccggagaacaactcattacttgaagacagaaactaaatgtgaaggacattggtcttggactgagcgttgtgtgtgtgtgtgtgtgtgtttttaatattcacactgagacatgtgccttaaacagactttttagtccaaaattacatagcattgaagaatatatttcactgtgccataaacaactgaaagcttgctctgccaaaaggaatcagagaacaagaacttcatttcagatagcaaacgcaggacacaccaagagtgtccgtgcacgtagccggttctggccgtacatgttaagggcatttcagtggcagtgctgtacccctgggcagtgctacctgggcacacacgtagacaagggcagctattccttagaccagcctcctgaaagaaacaggtgtgtctttttagtggagtcgtagtaatatgtgcacacacagaaggggacctgattgggtgggagctggttatgtgtaactagcgttggagttgacattttggcatgtgctctgagcttgaattttgataccaaccattcagtgcatcatacctagtctttctatgctccaaatgaatgtctgtggggacctgagagcacctggaatttgttggaagcagatcagagcacacgtacgaaaaggtgcaattgcttttctcatgacaaaagaaaaaaaataa

SEQ ID NO: 10562 - DNA, 2725 bp, Homo sapiens
  source 1..2725: mol_type = unassigned DNA
gtgtgcgggtgtgtgtgtgcgggagtgtgtgcgcacacgccttcgggggctggagtgacactgcagtgggcttctccgtagccccagccttcaggctgcgcagcccctaacctgccggcaccgcttttgggaagcagcttggctcttccatctccccaagccttcctctccatcctttcatccacccctcgccgatcttactttttcttttacccacggggccgcggccggccaccccctggccggtgcaaacacccaagccctctccagttctcccccaagctaatattttcccacctgtctttttctggggttcctccacgagccagtccaaggctcccccatcctcggaaattgttttgttggactgctaaaccgaggcgtgtaaagcttgaggactttattattatttgggttcttttcatttcttccccttctgggcaacgaagcaatgaaatttccaatcgagacgccaagaaaacaggtgaactgggatcctaaagtggccgttcccgcagcagcaccggtgtgccagcccaagagcgccactaacgggcaacccccggctccggctccgactccaactccgcgcctgtccatttcctcccgagccacagtggtagccaggatggaaggcacctcccaagggggcttgcagaccgtcatgaagtggaagacggtggttgccatctttgtggttgtggtggtctaccttgtcactggcggtcttgtcttccgggcattggagcagccctttgagagcagccagaagaataccatcgccttggagaaggcggaattcctgcgggatcatgtctgtgtgagcccccaggagctggagacgttgatccagcatgctcttgatgctgacaatgcgggagtcagtccaataggaaactcttccaacaacagcagccactgggacctcggcagtgcctttttctttgctggaactgtcattacgaccatagggtatgggaatattgctccgagcactgaaggaggcaaaatcttttgtattttatatgccatctttggaattccactctttggtttcttattggctggaattggagaccaacttggaaccatctttgggaaaagcattgcaagagtggagaaggtctttcgaaaaaagcaagtgagtcagaccaagatccgggtcatctcaaccatcctgttcatcttggccggctgcattgtgtttgtgacgatccctgctgtcatctttaagtacatcgagggctggacggccttggagtccatttactttgtggtggtcactctgaccacggtgggctttggtgattttgtggcagggggaaacgctggcatcaattatcgggagtggtataagcccctagtgtggttttggatccttgttggccttgcctactttgcagctgtcctcagtatgatcggagattggctacgggttctgtccaaaaagacaaaagaagaggtgggtgaaatcaaggcccatgcggcagagtggaaggccaatgtcacggctgagttccgggagacacggcgaaggctcagcgtggagatccacgataagctgcagcgggcggccaccatccgcagcatggagcgccggcggctgggcctggaccagcgggcccactcactggacatgctgtcccccgagaagcgctctgtctttgctgccctggacaccggccgcttcaaggcctcatcccaggagagcatcaacaaccggcccaacaacctgcgcctgaaggggccggagcagctgaacaagcatgggcagggtgcgtccgaggacaacatcatcaacaagttcgggtccacctccagactcaccaagaggaaaaacaaggacctcaaaaagaccttgcccgaggacgttcagaaaatctacaagaccttccggaattactccctggacgaggagaagaaagaggaggagacggaaaagatgtgtaactcagacaactccagcacagccatgctgacggactgtatccagcagcacgctgagttggagaacggaatgatacccacggacaccaaagaccgggagccggagaacaactcattacttgaagacagaaactaaatgtgaaggacattggtcttggactgagcgttgtgtgtgtgtgtgtgtgtgtttttaatattcacactgagacatgtgccttaaacagactttttagtccaaaattacatagcattgaagaatatatttcactgtgccataaacaactgaaagcttgctctgccaaaaggaatcagagaacaagaacttcatttcagatagcaaacgcaggacacaccaagagtgtccgtgcacgtagccggttctggccgtacatgttaagggcatttcagtggcagtgctgtacccctgggcagtgctacctgggcacacacgtagacaagggcagctattccttagaccagcctcctgaaagaaacaggtgtgtctttttagtggagtcgtagtaatatgtgcacacacagaaggggacctgattgggtgggagctggttatgtgtaactagcgttggagttgacattttggcatgtgctctgagcttgaattttgataccaaccattcagtgcatcatacctagtctttctatgctccaaatgaatgtctgtggggacctgagagcacctggaatttgttggaagcagatcagagcacacgtacgaaaaggtgcaattgcttttctcatgacaaaagaaaaaaaataa

SEQ ID NO: 10563 - DNA, 548 bp, Homo sapiens
  source 1..548: mol_type = unassigned DNA
aaccaagcgtgtctccggctgcaactccagcaagcgcgccgctgccgcctccacgcccgcccgccggccggccgagccatggccgttcccgcagcagcaccggtgtgccagcccaagagcgccactaacgggcaacccccggctccggctccgactccaactccgcgcctgtccatttcctcccgagccacagtggtagccaggatggaaggcacctcccaagggggcttgcagaccgtcatgaagtggaagacggtggttgccatctttgtggttgtggtggtctaccttgtcactggcggtcttgtcttccgggcattggagcagccctttgagagcagccagaagaataccatcgccttggagaaggcggaattcctgcgggatcatgtctgtgtgagcccccaggagctggagacgttgatccagcatgctcttgatgctgacaatgcgggagtcagtccaataggaaactcttccaacaacagcagccactgggacctcggcagtgcctttttctttgctggaactgtcattacgaccatagg

SEQ ID NO: 10564 - DNA, 6227 bp, Homo sapiens
  source 1..6227: mol_type = unassigned DNA
gaaaggagcgcttccccggactcggctcggctccgaggctctgaagccgacgccgccagctcagccccgggggcgggagcaggactgcccgcacagcccgcacctaggaggcgccgatcccgaacgcctcatgggacgcccccgggggctctctccacgccttgctgccgcgtcccggtcctaggcgcccgggatccacggcccaccccgcccgcagcccgcggcctgtctggagaggagtatgaggcccggggccccgcggacgccggccaccgggcggcaggggcctagctgcggagccccgcgcccgagagcggcgggtaaggagccgcgggagccggcgaggcgtcggggcgcgcagaggagcgcccctgcccgggcacccgctgggccacgggactcgcgtgtggcctgagcgccggggaggaggcggaggcgcccctctgtccgggctctgggaaggcgacgaggggctctgcgaaggcggcgaggggctccgcggcggccccggacccctggccaccatcctcacgctcctgctcccgccggggggatgtcgtggcccgggccccgagcgccgccccggccccggggctgagctccggaccatgtcctcccgcagcccccggcccccgccccgccgtagccgccgccgcctgccgcgcccctcctgctgctgctgctgctgccgccgttcgcacctcaacgaggacaccggccgcttcgtgctgctggcggcgctcatcggcctctacctggtggcgggtgccacagtcttctcggcgctcgagagccccggcgaggcggaggcgcgggcgcgctggggcgccacgctgcgcaacttcagcgctgcgcacggcgtggccgagccagagctgcgcgccttcctccggcactacgaggccgcgctggccgccggcgtccgcgccgacgcgctgcgcccgcgctgggacttccccggcgccttctacttcgtgggcaccgtggtgtcaaccataggtttcggcatgaccacccccgcgacggtgggcgggaaggccttcctcatcgcctacgggctgttcggctgcgctgggaccatcctgttcttcaacctcttcctggagcgcatcatctcgctgctggccttcatcatgcgcgcctgccgggagcgccagctgcgccgcagcggcctgctgcccgccaccttccgccgcggctccgcgctctcggaggccgacagcctggcgggctggaagccctcggtgtaccacgtgctgctcatcctgggcctgttcgccgtgctgctgtcctgctgcgcctcggccatgtacaccagcgtggagggctgggactacgtggactcgctctacttctgcttcgtcaccttcagcaccatcggcttcggggacctggtgagcagccagcacgccgcctaccggaaccaggggctctaccgcctgggcaacttcctcttcatcctgctcggcgtgtgctgcatttactcgctcttcaacgtcatctccatcctcatcaagcaggtgctcaactggatgctgcgcaagctgagctgccgctgctgcgcgcgctgctgcccggctcctggcgcgcccctggcccggcgcaatgccatcaccccaggctcccggctgcgccgccgcctggccgcgctcggtgccgaccccgcggcccgcgacagcgacgccgagggccgccgcctctcgggcgagctcatctccatgcgcgacctcacggcctccaacaaggtgtcgctggcgctgctgcagaagcagctgtcggagacggccaacggctacccgcgcagcgtgtgcgtcaacacgcgccagaacggcttctcgggcggcgtgggcgcgctgggcatcatgaacaaccggctggccgagaccagcgcctccaggtagaccgcccgtccgcccgcgccggggaccctctccaggccgcggggccgccgggcgtggtttgcttctctcagtcactgctggcgctttcttaatctttatccaataaaatgaaacaaaaaaaatttttttaaagaaatactatttggccaggcctgatgttatcaagggcaggttttggggacgcctgtgttccttgtgagtcccctcttggagaaccgtggcccccagcagattctccttcagggagagaaaacgtggccccccaggcccacacccagggcataccgcagcgaggagggttttgcagactggcactaaaccccgtccccatgcacagaagcagccggcaaccccaaagcatatggtgcaacttttcgtggctctgaattacctcctcagcatttagaatcctggcccagcctagcagcttccttctggtcgtcagaagtgatatagtcacagttttgacaggtgggggttgggacagccatatgttgcctcccgatgtatatatatagaacagccactacacacagagaatggtgtagtattatgcaatgagatgaaacatagcaccaacttgcggactgtggcatttcccccagatttggaaattgcagtggtgaggggcttagctggcctttctcagctcagagttagtccatttagcacagagcacagggcagctacttctaatggtgggcggtccagggcacctgtgaggaggggagcggtgaggctgcaggagccctgctgggcttttagctggctgatctccaggctcggatcggcagatcttgaatcccccaaccgtcctttctttcacaagctcatccacagcagtgcttttcaatattaaccaggaatatctgagtcttctcagacaagatatttatttgttggtgtggattttttttttcttaactactgttgatcagttcaacttttccccctttaagagatcatggggttgccgggcgcagccctccagcttctcctcctcctcctctgaaggaggcacctctgccagctgcgtccttgggaaccagggcctgcagcaccaggaacccaaaagaagccatcttgcaaatgtcagggtatttggctccagaggccatgatgtgtttggggtcaggaaagatagaatccctttctaaatattgtttatcaagaggatttgtcttctccatgcacagcctattggaggcagaggaaggcaggagggaggtagctggtgaaactggtggatggaagtaatgttaggattacagttttgctctcgggctgagggacagattctcccagacttgccttctgcagcatagggggtccctgacctggaggaaggccagatacccaggcttcattgaaaggatagtggtctgggggtgtaaacgaacactctctctgcccatttttctcatatatgatgagggcaaggacaggtgccagagtttatacaggcacggcgtgacccaccagtatgcacagcttctgataggaagtcttagaaaagcaccgcctcaccgcctccagctggagccatgctgtgaaatctctctccctggcaaatgtgcgtggaacacacacacacacaaacatgcacgcatgcgctcacgcacccagcattagagtcaaacttgaatgtcaaactcttctttccccttctagttcatggcaggaagggaaagcttacctgagatctcagtgactctccagctattttgggtaatttctgatttgagttgggattggtttttaaacacaggccctaatctggggtgaagccagtgaagcagcgctggccaggagagacgtcagtcttgctaaatcctgaaggtgggttcctgtgaaaaccatgctttcaggattcactgtgactgtcaggccagcccagtgagtgccccccatccaacccatggttgcggtcacagtgaagggattgcccacgcaggggcgcacgtgttctctagggcagggccctctgacaggacctggaaataaaatccacatttatccctttaaaaaagggaacgattaaaaggcatccaattagaggtgttacctaggcaacaggaaataacttggggatcagagccatccagagagggaagaagagatccccatgatagaggcatctagacagtgaggacttgatctgcgggcaaaataacagcctacccacaggaagtgagccccagcaacagtacagcagcctaaaacccaggcatcaagactgtgtgagctagacaggtctaaagaaacctccaggcaatcccccgcccagcgtgcaggactacacagaatcgtggtctccatgggaggaaccaggacccacctccagagaagaaaaactcaaaatgtttcttggcagtcttctctgttggcggtgcttcctagactctatcctaagttgcttatgctgcagcctcagctgtttttacttgttttcctatgctttggttttggaaagaggcaattggaggcagcttgagcaatcttctaaaggaatggtaagcatggtttcaaggggcaggaaaatgagacccttcctcttcccacctcccaacttcccagagaaacgccagtcctccaaggtacaatggcagctcaggatccagtggcacatgtgtatttttgcctatgttcccctgtccccatcccccaatccagtctcagtcacactgccatgatacatcacaccatcatccttcatctcaggccaaagggctcagcgccccagacgacagggactgcttccctgaagcagggatgtggttctcccatcatttcaggaacagtgacattgatagggatgcctttctttggtgcaggttcttctgaacctcaggccaagaaagagctccattccctcagatgctgtggcctctctcactgtcttgggggtctccagtttgcacaccactggtagctcactgtagcctacaatttcctcatgctccaggatttgcttcctaaccttaggcctggacttacccatcatgccggtgctgtggggctcccttaaagtttgaatgaactccaagaggccctcaccatatgactgtggccacagagaatccagagtcttggctagcagccttctcagagctgaggagaaaggtaaagaagccaccctgggtgtcctagcttgctaaagccaggtggtcaggcctttgtgtcctctgaatgaagcagtgcctccaggcctggagaaggcatcagaaggcttaggcaatctcaggctctcattttgtggaaaatgccagacagccctgggcatttgcacagcatcatgcatatatgtatatatatatacacacacacatacacaccagccttacaaagagctactaacccttttccccaaggaaaagtctcagtctgggccactttaagaagaaagatttcccatttttaactctctagagatgtaccagggcctggaaaatccctctctgccttgggggagttttatgtacaatttgcatgtattcaggtttcacacagaagccagcatccaaacccaagccaaaccctggaaaatagctgctaaattgacccaggatcctccgtccttcagacaggcctcccagcagaccccctcttcctgtggactctggggtgagggatgactgagccctcatggccaaaggagaagcttctggggaactgaggcagacggcagcccagtcaggcagagaccataggagcgacgggccctgtggttcgatcttactgtaactttttacattcttaaaaaacaaaaagcacaattccacatacacactgtctggaaagcacagccagacagccagcctagggcatctgagtccagaagaggcgctggggctttatctgttgcagggttcttgtattgttgtataatgtgctggtggtgactcaaggctcctcactttgtagggtggagagggagggagggagggcctgctgaggccattcctgacccccagggtgggctcatcagcatggacttggggcctggactcttgcccctgaagcagctctggcactttcaggcaccccagagcacaattgctacaccttccacgctagtctcatgcattgaggatttctgcactcggacctggccccaaaccctcttccccttccccttcttccctaaggaagctcccccttgctttacaaatcattttttatgctatctgttctctcaggagggggctagagcatgcgggacaagcctgcagggtttctcaaacaatacatctatttttctgagcagcattccaagagaggacttgaagggtgtttaaattaacgatgaataaaatgcagcctgcc

SEQ ID NO: 10565 - DNA, 833 bp, Homo sapiens
  source 1..833: mol_type = unassigned DNA
cccggcccccgccccgccgtagccgccgccgcctgccgcgcccctcctgctgctgctgctgctgccgccgttcgcacctcaacgaggacaccggccgcttcgtgctgctggcggcgctcatcggcctctacctggtggcgggtgccacagtcttctcggcgctcgagagccccggcgaggcggaggcgcgggcgcgctggggcgccacgctgcgcaacttcagcgctgcgcacggcgtggccgagccagagctgcgcgccttcctccggcactacgaggccgcgctggccgccggcgtccgcgccgacgcgctgcgcccgcgctgggacttccccggcgccttctacttcgtgggcaccgtggtgtcaaccatagatctccagaattatagtgacagtggggagaaggagggaatgacccatcccccatcccgagcttgctagcccagctcctggaagatcagcccctgggcagtgccagcctgcatgaccgtcctgatccccgactctgccctttctgccaaagagccagcagagcacatgtctcggagaagaccccctatcaccttctaggttgtcttgccacagaacaggagcacccagcaatacagcagagcttcccacgggtttctacagtgtcttcagagaaccgcaaggagggtcagcccttgtggagtctctgacccaaattctgacattacctctatgacttattcacaaagtgacctcacactgcacttttctgagcctcagattgtgcatctaaaaaccgaggataatgcttacctcactaggtggttgtgaagaaatgtaaataaaccgtgtgtgaaaatg

SEQ ID NO: 10566 - DNA, 2522 bp, Homo sapiens
  source 1..2522: mol_type = unassigned DNA
cgggaaactcgagttggctcgagcttgccctgaagacgcgccacgccccctcccctatctgagccggacagggagccggggtggaaactgcgcccgcatcccagcgccaagcagacgtgaactctgcgcccgttccccgggaccttcagcgttaaggagaactccgaggagagcagggggagtggaggggaacggcggcgacaaagcggatttgaaactaggagtcaaggaggacgtggggagctggcgccacaggagctaccgaggcggcggccgggggagcctcgcggcctgcgggagagcccggcggtcatgggcgagccggcggtggggcgcccgggagctggctgagcgccggggcccttatttcccgggggtgtgggcgagactccgccgacgcccggtgccgtgggcctgggggctgcccccgggggcccggccatggctggccggggtttcagctggggcccgggccacctgaacgaggacaacgcgcgctttctgctgctggccgcgctcatcgtgctctacctgctgggcggcgccgccgtcttctccgcgctggagctggcgcacgagcgccaggccaagcagcgctgggaggagcgcctggccaacttcagccgcggccacaacctgagccgcgacgagctgcgcggcttcctccgccactacgaggaggccactcgggccggcatccgcgtggacaacgtccgcccgcgctgggacttcaccggcgccttctacttcgtgggcaccgtcgtttccaccatagggtttgggatgacaactccggcgacagtaggaggaaaaatctttctgatcttttacggccttgttgggtgttccagcaccatcttgttcttcaacctcttcctggagcgcctgatcaccatcatcgcctacatcatgaagtcgtgccaccagcggcagctccggagacgaggggccctgccccaggagagcctgaaggatgcggggcagtgtgaggtggacagcctggccggctggaagccctccgtgtactacgtcatgctgatcctatgcacagcctccatcctcatctcttgctgcgcctcagccatgtacacccccattgaaggctggagctactttgactcactctacttctgttttgtggctttcagcaccattggctttggggacctggtcagcagccagaacgcccactatgagagccaaggcctctatcgctttgccaacttcgtcttcatcctcatgggtgtctgctgcatctactccttgttcaatgtcatctctatcctcatcaaacagtccttgaactggatcctgaggaaaatggacagcgggtgctgcccgcaatgccagagaggactcttgcgatcacgcaggaacgtggtgatgccaggcagcgtccggaaccgctgcaacatctccatagagacagacggggtggcagagagtgacacggacgggcgccggctctcaggggagatgatctccatgaaggacttgctggcagccaacaaggcctcgttggccatcctgcagaagcaactgtctgagatggccaacggctgcccccaccagaccagcacactggcccgggacaatgaattctcagggggggtgggagcctttgcaatcatgaacaacaggttggcagagaccagtggggacaggtagaagccaggagtggatgctgggcagaggccagagtagaatggaggatgattgccgcccaggggacgagctcagccctgcgccttggctctgttccttctgggagctgttcccgggagcctccgcaagcatctttagaaatctgatctcggctccaaccaacagccaccttccagggatggggggcctgaagcctcgatgcttgtctcctgatccttattctttaagtctaaattcagtcttttcaaaacaaatcacaaaagcagcattagacattgccttgtttcattaatcttgtttcagagctttagctgcctgaggagataggttttccttaagccttgatttcctgaagctctctctgttccttatttgggaacaaaaattgcgaagactcatctttccctagaactctgaatggatgaatttttaaaagtggggagaatgtttggggatgtgtctgggctttctttttgccaggcttccttcaaagcatacctgccaatggtgtctgcatagggaaaatgtctgttgtactctttatacctgtttctgttttttgttgtccctttctttttatttttaaggccttaatgcctggctgtggcgtctgtgagacctcaatgtaataagaaaattaaattcagcttcaggcctttaaactgcagcaagatggtggtgtaggggtgtgggacggggagagactcacttttgtaactaaagaacatagcttaacattttccctttgaatggtcacacagaccatttcatttttaccagggcttggggacccaatgcaaagatgatgactatttaataaaatggaaaatttaataaatcctcattttattaactaa

SEQ ID NO: 10567 - DNA, 6162 bp, Homo sapiens
  source 1..6162: mol_type = unassigned DNA
tgcccggcgcggagagcggcgagcgcagccatgccccaggccgcctccggggcagcagcagcggcggccggggccgaggcgcgggccgggggcgccggggggccggcggcggcccgggcgggacgatgaagcggcagaacgtgcgcacgctggcgctcatcgtgtgcaccttcacctacctgctggtgggcgccgcggtcttcgacgcgctggagtcggagcccgagctgatcgagcggcagcggctggagctgcggcagcaggagctgcgggcgcgctacaacctcagccagggcggctacgaggagctggagcgcgtcgtgctgcgcctcaagccgcacaaggccggcgtgcagtggcgcttcgccggctccttctacttcgccatcaccgtcatcaccaccatcggctacgggcacgcggcacccagcacggatggcggcaaggtgttctgcatgttctacgcgctgctgggcatcccgctcacgctcgtcatgttccagagcctgggcgagcgcatcaacaccttggtgaggtacctgctgcaccgcgccaagaaggggctgggcatgcggcgcgccgacgtgtccatggccaacatggtgctcatcggcttcttctcgtgcatcagcacgctgtgcatcggcgccgccgccttctcccactacgagcactggaccttcttccaggcctactactactgcttcatcaccctcaccaccatcggcttcggcgactacgtggcgctgcagaaggaccaggccctgcagacgcagccgcagtacgtggccttcagcttcgtctacatccttacgggcctcacggtcatcggcgccttcctcaacctcgtggtgctgcgcttcatgaccatgaacgccgaggacgagaagcgcgacgccgagcaccgcgcgctgctcacgcgcaacgggcaggcgggcggcggcggagggggtggcagcgcgcacactacggacaccgcctcatccacggcggcagcgggcggcggcggcttccgcaacgtctacgcggaggtgctgcacttccagtccatgtgctcgtgcctgtggtacaagagccgcgagaagctgcagtactccatccccatgatcatcccgcgggacctctccacgtccgacacgtgcgtggagcagagccactcgtcgccgggagggggcggccgctacagcgacacgccctcgcgacgctgcctgtgcagcggggcgccacgctccgccatcagctcggtgtccacgggtctgcacagcctgtccaccttccgcggcctcatgaagcgcaggagctccgtgtgactgccccgaggggcctggagcacctgggggcgcgggcgggggacccctgctgggaggccaggagactgcccctgctgccttctgcccagtgggaccccgcacaacatccctcaccactctcccccagcacccccatctccgactgtgcctgcttgcaccagccggcaggaggccgggctctgaggacccctggggcccccatcggagccctgcaaattccgagaaatgtgaaacttggtggggtcagggaggaaaggcagaagctgggagcctcccttccctttgaaaatctaagaagctcccagtcctcagagaccctgctggtacccagacccccaccttcggaggggacttcatgttccgtgtacgtttgcatctctatttatacctctgtcctgctaggtctcccaccttcccttggttccaaaagccagggtgtctatgtccaagtcacccctactcagccccactccccttcctcatccccagctgtgtctcccaacctcccttcgtgttgttttgcatggctttgcagttatggagaaagtggaaacccagcagtccctaaagctggtccccagaaagcaggacagaaagaaggagggacaggcaggcagcaggaggggcgagctgggaggcaggaggcagcggcctgtcagtctgcagaatggtcgcactggaggttcaagctaactggcctccagccacattctcatagcaggtaggacttcagccttccagacactgcccttagaatctggaacagaagacttcagactcaccataattgctgataattacccactcttaaatttgtcgagtgatttttagcctctgaaaactctatgctggccactgattcctttgagtctcacaaaaccctacttaggtcatcagggcaggagttctcactcccattttacagatgagaatactgaggcctggacaggtgaagtgaccagagagcaaaaggcaaaggggtgggggctgggtgcagtggctcacacctgtattcccaacacttttggaggctgaggttggaggattgcttgagcccaggaatttgagaccagcctaggtgacatagtgagaccccatctctacaaaaaataaaaaattaaccaggtgtggtggcacgtgcctgggagtcccagcgacttgggaggctgaggtgggaggattgtttgagcctgggaggtcgaggctgtagtgagccctgattgcaccactgtactccagcctgggtgacagggcaagaccctgtctcaaaaaaaaaaaaaaaaatggcaaagggagacaagagcccagcctgcttgttgctagccaaagtgttctttccttccagcttggcctgctcttaaaagcaaagctcctgcagtgtacatcctggcattgtgtggctacctgggttttaaaccagaatcagaagtcccggatcagagggcactgctgaggttcagcctcttctcttcttggccaggaggcagcagctctgaatgggcccctgaggctgcacaggggcctttgtcactggggcgcatgcttacaaacagtgcagttcttgggaccgaggtaagcagggctgggtctcatggcagaaaggccaggatctggggctctaggaatttgggaattgggcagagtggccaagaaagctggcaggcatatcctatgggacatcacacctggcaccattgtcattgttggtgcctgtgtcccaagtagctagtgataagctgaggctgcagcaagaaacacccttcccaggtgggggagtttggaccagaggtgccctctgcccaccacacctgcaacccagaagcccagatggaacgcagctgacgaaggtgatgcttgaggctcacttttggggccccacagctggagccggtataatgactgggacaacatcaaggggtggatgaggggcctctcctcccgcaacactgccttcccatgctgttcccctgccagctccttaacactgccgaccaaggccagccctggcattcagggaaattggagggcagcacccgtagggtggccagcctcaggccccaccccagctgtgtcctctagtctctggggacccctggggggaagaagtctaccctgcttgtgagtcccgtctcagtgtggaggaactggctgcacgtgggacctgaaggtgccctctgtgtttatgttgggggtgggggggcagtgctggctgcctctgtcctgtgtgtgaccctgccctcgaagggtcctgtcctgtcagtcccgagggagccacaaccaaagctgcggagagaaggtggggaagggtgcagaatggccgtggggcacagcgtggcagactgttcagtctctgctgggtctttcctagggacctggaaggccagtgttgcttccccctcactccctttcactgcaggcagcctctctgcttccccaatgccttatgcctgggcacactgccacagaatatgcaatatgtgtgggtgaccatgccctcacgaccacacccccaccccgggcagcccccggactccaaaggtcgtggctgccacagcctccctcagctcttcctgcctatctgtcttcacactgagaatggcgcccaataaatgctatccacggagaccaggctcaggctccagctgcctctgtcatcgtatgcccttgctgctgccagggaggggccatctcccaccccctcccctgccggggtctacaaacatatctagctgctgggtgccgtggctcacacctatagtcacagcactaggcgggcagatcacctgaggtcagaagttcaagaccagcctggccaacatggtaaaaccccgtctctactaaaaatacaaaaattagctgagcgtggtggcgcatgtctgtagtcccagctactcggctactcaggaggctgacgcacgagaatcgcttgaacccgggaggcggaggttgcagtgagctgagatcgtgccactgcactccagcctgagcgacagagtgagaccctgtctaaaaaaaaacaataataataaaataaaataacatacctagctgactcgccatgggctcgctggcctgtgggcgacactggcttcccttttgggatttcccagaagatccagattttcttaagtccccttggaacagactaagaaaggatcaccttagaaatcacctggtcctattgtcccccccgtacatgagtaactgaggcccacagagagcaaatcgcctgcctgagtcacacagcagtgagtggcagacctaggctaggaactaggactggggattgctattccagtgctccccatcctcacacagactgcacagtccgcctggacacaccccagctgacagtggtacctcccagtcagccaggagaatggattccttctcctgcagtaggggccccctggctgagtggcctgattgactaaaacatatgtctttgaaggagagtgcatcacaagcacctttctttggggtagatttttctctgggtctagagggacagctcaggcttgggactgggcctcagaacctacgacagaccgtgagagcagacccaccttatccatctggtgccagctccccaggtcagctacagcgacccccggacttcatagagtacaatccacagtaatagcacacagctctgtacctatctagctccatgcctatctatctgcctacctttcacaaaataattcttagcaaccctgctacagccaatgattctaatacgttctgttctattgcatgttataaaatgctggtcacgatccactaaattgatgtctctacctgctaatggtttaatacctgcagattgaaatatactggagaaataaagagagtgggagtagggacactttctcccagtgcccacaccgcccctcgttacccgcataggtcaactgaaagatacagagagggaagctttgatggggggttcagagttcaaaggaagaaatgatggcacctgcactccctgcccccagaggcaggacacagccagccctcctgtgacagcactcctggcagctccttgttggcctgcagccctcagggggcttagttgccattgactcacccactcctaaggccaccacatcaaaatctgaggcttactgccctgtcccacctgcctctgtctttcttaaaacagctaaatgcaacaatagcagaaattagcttgtttttgaggttggcaatgaccagttcaaggtgactcttattttcttaagcagtgcttgcaggacataaatgtgatgacacttgccctcctttctttatcgcctgggacagactttacaaacagacctgggagaagtcccctaaggggctgcatttatccccatctccctaggggtgatcagcattgtgacagctgggcagagcagtggtgaactgcacccatgtccctgctcacatctcctaagatctcagaattgcctgaggttctagcgtgggctccttctctccagatgatgccatccccacccccctcatttccacacagcatctgaggcatcctgcactaaaagatatatgtacagcaaaacaaaaatagaaaaccagcacagcagagtggaggtggggtataaatatacccagatccccgctgatttggttactcggggtgagcatcagatggaaatagaagtttccgggggccaagagagaaagagggatgtaacgacaattcttttcaaaacgtgtcccatggtatgcctcgtggaaaaaatggttcgttggtcaaatgaatttgggaaaatgctgtcaatatcaccgactcatggagcttcgcaaggcatcttagcttaataaaggttatgaaaagtcttgcagcaaa

SEQ ID NO: 10568 - DNA, 1956 bp, Homo sapiens
  source 1..1956: mol_type = unassigned DNA
tggtgctgaagggacagctccgcggcggcggcggcggcggcggccccgggcgctgagcgggtgcccggcgcggagagcgggacgatgaagcggcagaacgtgcgcacgctggcgctcatcgtgtgcaccttcacctacctgctggtgggcgccgcggtcttcgacgcgctggagtcggagcccgagctgatcgagcggcagcggctggagctgcggcagcaggagctgcgggcgcgctacaacctcagccagggcggctacgaggagctggagcgcgtcgtgctgcgcctcaagccgcacaaggccggcgtgcagtggcgcttcgccggctccttctacttcgccatcaccgtcatcaccaccatcggctacgggcacgcggcacccagcacggatggcggcaaggtgttctgcatgttctacgcgctgctgggcatcccgctcacgctcgtcatgttccagagcctgggcgagcgcatcaacaccttggtgaggtacctgctgcaccgcgccaagaaggggctgggcatgcggcgcgccgacgtgtccatggccaacatggtgctcatcggcttcttctcgtgcatcagcacgctgtgcatcggcgccgccgccttctcccactacgagcactggaccttcttccaggcctactactactgcttcatcaccctcaccaccatcggcttcggcgactacgtggcgctgcagaaggaccaggccctgcagacgcagccgcagtacgtggccttcagcttcgtctacatccttacgggcctcacggtcatcggcgccttcctcaacctcgtggtgctgcgcttcatgaccatgaacgccgaggacgagaagcgcgacgccgagcaccgcgcgctgctcacgcgcaacgggcaggcgggcggcggcggagggggtggcagcgcgcacactacggacaccgcctcatccacggcggcagcgggcggcggcggcttccgcaacgtctacgcggaggtgctgcacttccagtccatgtgctcgtgcctgtggtacaagagccgcgagaagctgcagtactccatccccatgatcatcccgcgggacctctccacgtccgacacgtgcgtggagcagagccactcgtcgccgggagggggcggccgctacagcgacacgccctcgcgacgctgcctgtgcagcggggcgccacgctccgccatcagctcggtgtccacgggtctgcacagcctgtccaccttccgcggcctcatgaagcgcaggagctccgtgtgactgccccgaggggcctggagcacctgggggcgcgggcgggggacccctgctgggaggccaggagactgcccctgctgccttctgcccagtgggaccccgcacaacatccctcaccactctcccccagcacccccatctccgactgtgcctgcttgcaccagccggcaggaggccgggctctgaggacccctggggcccccatcggagccctgcaaattccgagaaatgtgaaacttggtggggtcagggaggaaaggcagaagctgggagcctcccttccctttgaaaatctaagaagctcccagtcctcagagaccctgctggtacccagacccccaccttcggaggggacttcatgttccgtgtacgtttgcatctctatttatacctctgtcctgctaggtctcccaccttcccttggttccaaaagccagggtgtctatgtccaagtcacccctactcagccccactccccttcctcatccccagctgtgtctcccaacctcccttcgtgttgttttgcatggctttgcagttatggagaaagtggaaacccagcagtccctaaagctggtccccagaaagcaggacagaaagaaggagggacaggcaggcagcaggaggggcgagctgggaggcaggaggcagcggcctgtcagtctgcagaatggtcgcactggaggttca

SEQ ID NO: 10569 - DNA, 11400 bp, Homo sapiens
  source 1..11400: mol_type = unassigned DNA
ggcactctcaaaccagtggatgaaaaagaggaggcagtggccgccgaggtcggctggatgacctccgtgaaggactgggcgggggtgatgatatccgcccagacactgactggcagagtcctggttgtcttagtctttgctctcagcatcggtgcacttgtaatatacttcatagattcatcaaacccaatagaatcctgccagaatttctacaaagatttcacattacagatcgacatggctttcaacgtgttcttccttctctacttcggcttgcggtttattgcagccaacgataaattgtggttctggctggaagtgaactctgtagtggatttcttcacggtgccccccgtgtttgtgtctgtgtacttaaacagaagttggcttggtttgagatttttaagagctctgagactgatacagttttcagaaattttgcagtttctgaatattcttaaaacaagtaattccatcaagctggtgaatctgctctccatatttatcagcacgtggctgactgcagccgggttcatccatttggtggagaattcaggggacccatgggaaaatttccaaaacaaccaggctctcacctactgggaatgtgtctatttactcatggtcacaatgtccaccgttggttatggggatgtttatgcaaaaaccacacttgggcgcctcttcatggtcttcttcatcctcgggggactggccatgtttgccagctacgtccctgaaatcatagagttaataggaaaccgcaagaaatacgggggctcctatagtgcggttagtggaagaaagcacattgtggtctgcggacacatcactctggagagtgtttccaacttcctgaaggactttctgcacaaggaccgggatgacgtcaatgtggagatcgtttttcttcacaacatctcccccaacctggagcttgaagctctgttcaaacgacattttactcaggtggaattttatcagggttccgtcctcaatccacatgatcttgcaagagtcaagatagagtcagcagatgcatgcctgatccttgccaacaagtactgcgctgacccggatgcggaggatgcctcgaatatcatgagagtaatctccataaagaactaccatccgaagataagaatcatcactcaaatgctgcagtatcacaacaaggcccatctgctaaacatcccgagctggaattggaaagaaggtgatgacgcaatctgcctcgcagagttgaagttgggcttcatagcccagagctgcctggctcaaggcctctccaccatgcttgccaacctcttctccatgaggtcattcataaagattgaggaagacacatggcagaaatactacttggaaggagtctcaaatgaaatgtacacagaatatctctccagtgccttcgtgggtctgtccttccctactgtttgtgagctgtgttttgtgaagctcaagctcctaatgatagccattgagtacaagtctgccaaccgagagagccgaagccgaaagcgtatattaattaatcctggaaaccatcttaagatccaagaaggtactttaggatttttcatcgcaagtgatgccaaagaagttaaaagggcatttttttactgcaaggcctgtcatgatgacatcacagatcccaaaagaataaaaaaatgtggctgcaaacggcttgaagatgagcagccgtcaacactatcaccaaaaaaaaagcaacggaatggaggcatgcggaactcacccaacacctcgcctaagctgatgaggcatgaccccttgttaattcctggcaatgatcagattgacaacatggactccaatgtgaagaagtacgactctactgggatgtttcactggtgtgcacccaaggagatagagaaagtcatcctgactcgaagtgaagctgccatgaccgtcctgagtggccatgtcgtggtctgcatctttggcgacgtcagctcagccctgatcggcctccggaacctggtgatgccgctccgtgccagcaactttcattaccatgagctcaagcacattgtgtttgtgggctctattgagtacctcaagcgggaatgggagacgcttcataacttccccaaagtgtccatattgcctggtacgccattaagtcgggctgatttaagggctgtcaacatcaacctctgtgacatgtgcgttatcctgtcagccaatcagaataatattgatgatacttcgctgcaggacaaggaatgcatcttggcgtcactcaacatcaaatctatgcagtttgatgacagcatcggagtcttgcaggctaattcccaagggttcacacctccaggaatggatagatcctctccagataacagcccagtgcacgggatgttacgtcaaccatccatcacaactggggtcaacatccccatcatcactgaactagtgaacgatactaatgttcagtttttggaccaagacgatgatgatgaccctgatacagaactgtacctcacgcagccctttgcctgtgggacagcatttgccgtcagtgtcctggactcactcatgagcgcgacgtacttcaatgacaatatcctcaccctgatacggaccctggtgaccggaggagccacgccggagctggaggctctgattgctgaggaaaacgcccttagaggtggctacagcaccccgcagacactggccaatagggaccgctgccgcgtggcccagttagctctgctcgatgggccatttgcggacttaggggatggtggttgttatggtgatctgttctgcaaagctctgaaaacatataatatgctttgttttggaatttaccggctgagagatgctcacctcagcacccccagtcagtgcacaaagaggtatgtcatcaccaacccgccctatgagtttgagctcgtgccgacggacctgatcttctgcttaatgcagtttgaccacaatgccggccagtcccgggccagcctgtcccattcctcccactcgtcgcagtcctccagcaagaagagctcctctgttcactccatcccatccacagcaaaccgacagaaccggcccaagtccagggagtcccgggacaaacagaacagaaaagaaatggtttacagatgaaccggataatgcctatcccagaaacattcaaatcaagcccatgagtacccacatggctaaccagatcaaccaatataaatccacaagcagcttgattccaccaatcagagaagttgaagatgaatgttgactcccaggagaccagaactatttttttaaagcctgacaaacttcataaatggtgatgtgacttttcttcttacatgctgaatcactggtggaaacgttaggataagcaagaattgccagaaaataaagtagacagatctttctctttgtctgccttgaatattgcttccatgtattttggaaaagaaaatgatttcatttataaatgaacatactaaaatagtcatgtatagcctctagcattttaaattatttttatttattagaaagaaaatatattttttcttttcattgtcaaatatcttccctatatctaaacaatgcaaaatctaaatgaataagtggtcagactccttaatgtgtttttctcttctttctctctttttctttgaggagaatgatggtcaccaccacaattaattgtaattaagggaaatgaattattaaaacaattttaaaatggccaatgatgtatacatgtattttagtaaatccagaaaagaagactaaggggacaggtgaatacctgctcctcgcctggatgggtgtgtattttgatctgcattgacaccagctcttaataaatggaaacttatttattttcacagttgaaagtcatatttttgtagttctagttttcattctgtagttctcacccctttgttcatatttttaaagggaagaccttctgctgcttttctacaattggcagatcaggtttgtctggccaactaaggacaccaggagggttgtgggcacacctgggatgtggaagctgaggaccagatgcacacaaggcattgctctgtttgctgttctagtggtggagactcctacgtgctgttatgcttctcattttatatttccaaaccacctgagcgagtaatgtcaacttcgggagggtctggtggactttctccccactccccaagtctcagagcttttagcctggaagtttgtaaaactgattagtagttttactttaccataggatgtgagagggcagtcattcttctcactgagtttttgtttaaaaaccaggaaatttctacaatcatggagacagattttaatttgcatgctctcctttatttagttgctggggccaaacacatgaacttgttacaacaatttaaaaataataataacaaaaggaaagcaacgaatgcacttcatatagactgttagaaaaggcctttgaaaattaccagcagtgaaatcaaataaattagccactttaaactgcggtcaaaagatttttctagccatcagatgcaattacgatgtctcagagctctgctatcgcttgcatgctcggtgtacagtctcccggcaactgttttgttccaatcaacttagcaagtctttcaactttaaaattatcaatctttgatatgatcatcaaggtctctggagaagcatggatgtaatagtgatttctattttcttaaaaaatgtaaactgtggacacttaatggaaccaagctaaccaaagtatctccccgaagtttcatgatatctagtccattaactctttgggccatgacctgtggtacctagttatggtagtgcaaatcagatcagagcaaagcaatgagatcatcatgaagacatatgtccactaagtactccaattaccagcgtaggcaaaatgagcttccacctctgtccactccctgcagagccaatatagtcgtgcttccacctcgtaggcattgtcctgcagtgatttgtcggactgtggttactctgtcgtcacattttgtagaattagttctataaaagtattgtgaatacaatgtatgtccaattggattgtttaaaaactacttataattaatcactagcctactcagcagactaaaatgatgtcaacagtctatattcaggcttataaacatttcttggtttccaacagaagtcaaatgtgtttgtggggagaacgttttgctaggattttgacaactttcctgaaagctaggccttttttacataatgattttgcattggggtcaccttagtatattcacgtcaatccacgctcttctttccttcgtgaaccatagtgggctcttcactcctgctcgtaataaccacctccaaatttgttagagtgatttggtctcctctggcaggctgtggtggccacataaaggatcttccattagagggacacaggacacaaagctccattcccatgaccctctcttccctgtgtctcccctaacaaggcaatctggaagcagaaatgcaaactccagccccaccacacatccaccgatgcatttgtggctagaaattttaatctaaactttttttaaaaaaaatcataatagttaggatagtttcctatagcaaagggctccttgattcataagcacctcccccccaaaaaaaccaaattggtaaaaattcattttcttttaaatagagcaataagttcatactgtgttgccgttgtaataatgaattgttctggactagaaaacaaaatgaggcattttgttaagggggtaggaaaatgactgattgttgggccctttggcaaaagctggtgcctggtaagtagaaacgaaatggaaacagaaataacatttgtgaaatcactggagggctcaagcaaatgccagagcttctccctggcttgttcctacttgttgagctctttggccctgagtcccatccatctccactgcaacagtctgtctttctgcctacatccgcctgagaccaaggagggtctttggtacagtccacattatgaggctctgatttcctatcccagtttagggctccagaaaagccattctcccaaactaatgattcttgggtgctgtgggtcaccaacaggctgtttacaaagcagaaaatatcatcaccatcataacctttctccttgagaaaacttttatttttgtctaagcaattttatattttagaatatcatcttgaaccattataaaacaccttaaataaaagtgattgtgactaaggcacgttggagaacattccaatctttcctcccaagggttctggcaccttatgatgtactttgtaaaaaaattgattgaagattttaaataaacaggaaattagaagtgttagggttagataaaggaaaagtgaaaaagcataagaaatttgggactttttcatgttgaaaggagaaaaagcacaagttccctagttaccatttaatatgagggtgcaagagccacatttacaaacaacaaacttgatctttaaaaatgtttttaaaactctctgagtctcagtgacttcatttgtaaatgagagtgattcatctagatgactctaaggtctctttcaggtcccaggggacgtgatctaagttaggagtgggaacatgggagtggctgcttctccttggctaagcccatgcagactattgtgtccaggactggaataaaggtcctttttgctgcatcacccaggcaacactcccagccttactcaggagtggtgaacattttctgctctggacatagaataggtaggttcattcctggtcttttcactttagattctctttaggttcaagatgcagatttctcaatttggacacacctgcatcacgttggtcaaattttgctgcctgtttctagggttttcttctcagtttcatccctgccttcccttttttgttgttttttttttggttcaaggcccagcttcagttaatcccttcatctctatgccatgtctccaattcctagtatgtaactagaggttcaagagaccccaaattcctgccattttccccatttatgtttccccatgtgaatcttcaggaagtaaccagtcttccttctcacttcatttcctgtcctctgtttatttggttattttctttcattaataaactaaccatctcttagctacttacattcacaaatgtaattttaatctattgtgtttcattgtgaaagagaatctcattgaaggaaggaaggaagaaattgaggaataaaggtaggaagggagagaaacaaagactatccaaccaattgactgagatgtgagccggcttgactcctaggagactaagtagatccattcagcttgaacactgagttccagggcagaatctgtccattttctgttttgttcttacttgctgcttttggaatggtggtaaagccaccagtcaccatgagccttgaaaggaccttcactaatgaggacttgactcaccctctttaaaaagcaaaagaaacagaatttacttacaatcttctggtaaattacctttctgatcctctccttattcccaaaaggcaatttttttaatccagcagagatgatttagcatataaatcccaggtcatttgaggaggtgatgacgctatttggatttatttatgagacagtagtaattataaatgattcctaggcagtttgtactagtttggtcatattggttgtttaagtggagtctcttctgattgtttgtttccaataaagtatcagttgttaataatttcaagatttccataaaaataagaaaacttggaaaacatttttaattttatttcttaagagaccacagagcctaattttcaatttttatggtaagcttgcttaaaacatgtataaaaagaagcctacatgctcaaaggcagaggcacctttagccctacaacagttggaagctccatgatatcacagccccacatggatagattggagaaagaattctgacttagaccacctgtagcagaccttcctcttttggcatatttttttaatcacaaaaaggacctgagactccctatctaaagataagccaaacttggggtatacattaagaatctgggaagaaagaaaaaaaagaaaaagatataataagcagtattttaaaataccatgagttatgggcatgcatatggtacaaagagtagttctttgggttgaaagaaagaagagtttgcattgaactgcgtaggctggcaagaatgcagaggtatacaatgtttgatgggctttggaggcatttcaatagtaaatgggtgacaggactggaaagatgtggaatatgagggttttccagggagatgggacttaatgggccatgatgtatttgtaggaatgtgatttcaatagattgactattttgtctactgtgataagtttgtgtaggggaactgaggaaaactgagatgagacttcatggaaggggctacaaagtacagtctaaaggcctagataaagtttgaaacttgatttagaaagtcatgaaaagccactcagagttttaagcaaagagtgatggggcagcaatggctgtgcatttttcaggttgaaagtagtgagatgtcagttcttcctggaagatatcatgagaatgcacacaaaactgaacattttctcagcagcaaggagtgctaaagggtgcacactccaagtcaacaactcaccgtgtgcagcaccttcctcacacattttgctttgctttctgtcacaggaccatcagacgtagaacgtcctgactctcctgaattactagaatgtcagcaacaaactcacaaagtagattagagggtaggaatagatacataaatttttaaaaacctgccaatcatactgttttctagacagtaatataataagaacatgaggcaggacatccacaaatagtagagaataattaatagtccagaactgccaaataggaattccccttatgaaaacacccttgcagctaatcaggtagcccttgtttagaaaccaattagcactcataaaatatttgtacaaggagtgagtgggggagaaatgagcacaatatgggttctgccatcaatcagcttataatacaactaaagaaagaaaacatgctcaaagcaccattagagaaagggtgagccctaatgacatagtttcacattcaatatggtaggagttgaaacaagggagaaatgctgtggtttgaagtggttcaacaaggtaggatttctagagaaaggggggtttaggagttagataagtagaggatcagcattctaggtatgaaggcaggattatctggcatgtggcagggtgaatgatgttaatcagtaactgctaattgatatttactgagcagctgctgtgtcctcacgatggtaagactattagaggaagacagcccacctgcctaactgggaacacaaggcacacatatattggaaagatcatgttgcacaaaacaggtgttcaataaataatttttgaataaatgtgaacactgaatagcaaataaatgttatagatcgtaatagttgtagaagattggttgggattgtagggactggatgtggggcaatggctgtgggtctagagtatattcattgtgcagtggacacacacctaatctgtcctcaaggacagaaccatgtggaggaataggaaaacaagagaagcaggcaagaagcggaggcagtgagtacagcagctaagaaatgttacattgggttcatccagagcaagaaaagctgagagctgtccgtgagggaaggccacacaggcaagaggagtgggacaggggagtaaaggagtgggctacaacaggccctgcagatgtggaagccagacccacagaggcacttagaaagtgaggatcctggatgaattattttagggagaaagtgtaggtttagatcagctggcagatgtgtttgtgggctacagccaagtttttcaggactaagaaggagcaaaataagtagaacttcttgggacaggagatctagggtactccagaaccagggaaatgagaaacaagaggggaattttaagaaagagagggaagatcatctatgaggttggagatgaaaggtgttggagatggtgaggcacaagtcaaaagactcactcgaagggcaggaactctgcttatttgtccatattcccagagtttgtcatgaggtctggcccacgtgggcagtcactcggccactatgtatcactgtggctgccatggtggatggaggctggacagaacctgtggtgatcggcagtctttctggaggactcaccagggaggggtctcagggtgggcatctcctttcaccttcctgtgcatgtcactgcactgttcttcttccctccctgaacagcacacacactgcatccttagtttcaggggtctgaaaacaaatgctacgaccaccttgctttggtggcttttctgaacaggcattgtgagaagagatgttctggccaggtgaaagtggactttatttttaggtaggtttttcagtttagaaaggtttcctttgcttatcccttgaggacttctgtgctgctgcttctcctccatcttgctagttaacagaacaggggcagaagtgacaccaatgctctcggccatgcctgccttgggaagcactaccgggccccactgtttagaatcttagatggaaatgtacacaaggcattgacacacgcctgcgggagtgacccagtgcttccctcccatgggactcagggtcagcgtgggaaggcagctggcagggacaggagccccgcccgcaaggtggactgagcctcacttccacacaaaaccagagtcccatctgccccagagcgctcgctctcctccccttccttccgctcaatgcagcctgacacgcctttgaccagaactgcaacatttcaaacacaaacccagatctgttgggaaatcctaattaaaaacgttgcattcccaggtggcacaatcacatcctgcctaaaacttctggcccacatcccaccacccagatgttgaaaagaaacctttctctgcttaacaccaaaacctgcacttcaaggtttctttaggggacaaagaaaaaaaaagtacacacatgcagagttcagcctacatgttcattgaggaaaaagagcgtggcttattcatctttcaatcttttgattgttggcattatgattatgattatgattaattactctgacctgacaggaattgaagaagagactatatgctggtgctctgaaatgatctacccaactctgtcatctgtaacaaccagtgataactctcttgtcttgtaaaaagggtttgtacataacttgtacatggtttcattttgtatttttcgcagattaaaaatttatgtatttgtgttctaaaac

SEQ ID NO: 10570 - DNA, 11920 bp, Homo sapiens
  source 1..11920: mol_type = unassigned DNA
ggcggcggcggcggcggcagcagtagcagcaatatggctgttgatgggtgtttggggtggcgctggcggcgggaggagctcccccgagcccctgcgccggctgcccgttgctagctatggcaaatggtggcggcggcggcggcggcagcagcggcggcggcggcggcggcggaggcagcagtcttagaatgagtagcaatatccacgcgaaccatctcagcctagacgcgtcctcctcctcctcctcctcctcttcctcttcttcttcttcctcctcctcttcctcctcgtcctcggtccacgagcccaagatggatgcgctcatcatcccggtgaccatggaggtgccgtgcgacagccggggccaacgcatgtggtgggctttcctggcctcctccatggtgactttcttcgggggcctcttcatcatcttgctctggcggacgctcaagtacctgtggaccgtgtgctgccactgcgggggcaagacgaaggaggcccagaagattaacaatggctcaagccaggcggatggcactctcaaaccagtggatgaaaaagaggaggcagtggccgccgaggtcggctggatgacctccgtgaaggactgggcgggggtgatgatatccgcccagacactgactggcagagtcctggttgtcttagtctttgctctcagcatcggtgcacttgtaatatacttcatagattcatcaaacccaatagaatcctgccagaatttctacaaagatttcacattacagatcgacatggctttcaacgtgttcttccttctctacttcggcttgcggtttattgcagccaacgataaattgtggttctggctggaagtgaactctgtagtggatttcttcacggtgccccccgtgtttgtgtctgtgtacttaaacagaagttggcttggtttgagatttttaagagctctgagactgatacagttttcagaaattttgcagtttctgaatattcttaaaacaagtaattccatcaagctggtgaatctgctctccatatttatcagcacgtggctgactgcagccgggttcatccatttggtggagaattcaggggacccatgggaaaatttccaaaacaaccaggctctcacctactgggaatgtgtctatttactcatggtcacaatgtccaccgttggttatggggatgtttatgcaaaaaccacacttgggcgcctcttcatggtcttcttcatcctcgggggactggccatgtttgccagctacgtccctgaaatcatagagttaataggaaaccgcaagaaatacgggggctcctatagtgcggttagtggaagaaagcacattgtggtctgcggacacatcactctggagagtgtttccaacttcctgaaggactttctgcacaaggaccgggatgacgtcaatgtggagatcgtttttcttcacaacatctcccccaacctggagcttgaagctctgttcaaacgacattttactcaggtggaattttatcagggttccgtcctcaatccacatgatcttgcaagagtcaagatagagtcagcagatgcatgcctgatccttgccaacaagtactgcgctgacccggatgcggaggatgcctcgaatatcatgagagtaatctccataaagaactaccatccgaagataagaatcatcactcaaatgctgcagtatcacaacaaggcccatctgctaaacatcccgagctggaattggaaagaaggtgatgacgcaatctgcctcgcagagttgaagttgggcttcatagcccagagctgcctggctcaaggcctctccaccatgcttgccaacctcttctccatgaggtcattcataaagattgaggaagacacatggcagaaatactacttggaaggagtctcaaatgaaatgtacacagaatatctctccagtgccttcgtgggtctgtccttccctactgtttgtgagctgtgttttgtgaagctcaagctcctaatgatagccattgagtacaagtctgccaaccgagagagccgtatattaattaatcctggaaaccatcttaagatccaagaaggtactttaggatttttcatcgcaagtgatgccaaagaagttaaaagggcatttttttactgcaaggcctgtcatgatgacatcacagatcccaaaagaataaaaaaatgtggctgcaaacggcttgaagatgagcagccgtcaacactatcaccaaaaaaaaagcaacggaatggaggcatgcggaactcacccaacacctcgcctaagctgatgaggcatgaccccttgttaattcctggcaatgatcagattgacaacatggactccaatgtgaagaagtacgactctactgggatgtttcactggtgtgcacccaaggagatagagaaagtcatcctgactcgaagtgaagctgccatgaccgtcctgagtggccatgtcgtggtctgcatctttggcgacgtcagctcagccctgatcggcctccggaacctggtgatgccgctccgtgccagcaactttcattaccatgagctcaagcacattgtgtttgtgggctctattgagtacctcaagcgggaatgggagacgcttcataacttccccaaagtgtccatattgcctggtacgccattaagtcgggctgatttaagggctgtcaacatcaacctctgtgacatgtgcgttatcctgtcagccaatcagaataatattgatgatacttcgctgcaggacaaggaatgcatcttggcgtcactcaacatcaaatctatgcagtttgatgacagcatcggagtcttgcaggctaattcccaagggttcacacctccaggaatggatagatcctctccagataacagcccagtgcacgggatgttacgtcaaccatccatcacaactggggtcaacatccccatcatcactgaactagtgaacgatactaatgttcagtttttggaccaagacgatgatgatgaccctgatacagaactgtacctcacgcagccctttgcctgtgggacagcatttgccgtcagtgtcctggactcactcatgagcgcgacgtacttcaatgacaatatcctcaccctgatacggaccctggtgaccggaggagccacgccggagctggaggctctgattgctgaggaaaacgcccttagaggtggctacagcaccccgcagacactggccaatagggaccgctgccgcgtggcccagttagctctgctcgatgggccatttgcggacttaggggatggtggttgttatggtgatctgttctgcaaagctctgaaaacatataatatgctttgttttggaatttaccggctgagagatgctcacctcagcacccccagtcagtgcacaaagaggtatgtcatcaccaacccgccctatgagtttgagctcgtgccgacggacctgatcttctgcttaatgcagtttgaccacaatgccggccagtcccgggccagcctgtcccattcctcccactcgtcgcagtcctccagcaagaagagctcctctgttcactccatcccatccacagcaaaccgacagaaccggcccaagtccagggagtcccgggacaaacagaacagaaaagaaatggtttacagatgaaccggataatgcctatcccagaaacattcaaatcaagcccatgagtacccacatggctaaccagatcaaccaatataaatccacaagcagcttgattccaccaatcagagaagttgaagatgaatgttgactcccaggagaccagaactatttttttaaagcctgacaaacttcataaatggtgatgtgacttttcttcttacatgctgaatcactggtggaaacgttaggataagcaagaattgccagaaaataaagtagacagatctttctctttgtctgccttgaatattgcttccatgtattttggaaaagaaaatgatttcatttataaatgaacatactaaaatagtcatgtatagcctctagcattttaaattatttttatttattagaaagaaaatatattttttcttttcattgtcaaatatcttccctatatctaaacaatgcaaaatctaaatgaataagtggtcagactccttaatgtgtttttctcttctttctctctttttctttgaggagaatgatggtcaccaccacaattaattgtaattaagggaaatgaattattaaaacaattttaaaatggccaatgatgtatacatgtattttagtaaatccagaaaagaagactaaggggacaggtgaatacctgctcctcgcctggatgggtgtgtattttgatctgcattgacaccagctcttaataaatggaaacttatttattttcacagttgaaagtcatatttttgtagttctagttttcattctgtagttctcacccctttgttcatatttttaaagggaagaccttctgctgcttttctacaattggcagatcaggtttgtctggccaactaaggacaccaggagggttgtgggcacacctgggatgtggaagctgaggaccagatgcacacaaggcattgctctgtttgctgttctagtggtggagactcctacgtgctgttatgcttctcattttatatttccaaaccacctgagcgagtaatgtcaacttcgggagggtctggtggactttctccccactccccaagtctcagagcttttagcctggaagtttgtaaaactgattagtagttttactttaccataggatgtgagagggcagtcattcttctcactgagtttttgtttaaaaaccaggaaatttctacaatcatggagacagattttaatttgcatgctctcctttatttagttgctggggccaaacacatgaacttgttacaacaatttaaaaataataataacaaaaggaaagcaacgaatgcacttcatatagactgttagaaaaggcctttgaaaattaccagcagtgaaatcaaataaattagccactttaaactgcggtcaaaagatttttctagccatcagatgcaattacgatgtctcagagctctgctatcgcttgcatgctcggtgtacagtctcccggcaactgttttgttccaatcaacttagcaagtctttcaactttaaaattatcaatctttgatatgatcatcaaggtctctggagaagcatggatgtaatagtgatttctattttcttaaaaaatgtaaactgtggacacttaatggaaccaagctaaccaaagtatctccccgaagtttcatgatatctagtccattaactctttgggccatgacctgtggtacctagttatggtagtgcaaatcagatcagagcaaagcaatgagatcatcatgaagacatatgtccactaagtactccaattaccagcgtaggcaaaatgagcttccacctctgtccactccctgcagagccaatatagtcgtgcttccacctcgtaggcattgtcctgcagtgatttgtcggactgtggttactctgtcgtcacattttgtagaattagttctataaaagtattgtgaatacaatgtatgtccaattggattgtttaaaaactacttataattaatcactagcctactcagcagactaaaatgatgtcaacagtctatattcaggcttataaacatttcttggtttccaacagaagtcaaatgtgtttgtggggagaacgttttgctaggattttgacaactttcctgaaagctaggccttttttacataatgattttgcattggggtcaccttagtatattcacgtcaatccacgctcttctttccttcgtgaaccatagtgggctcttcactcctgctcgtaataaccacctccaaatttgttagagtgatttggtctcctctggcaggctgtggtggccacataaaggatcttccattagagggacacaggacacaaagctccattcccatgaccctctcttccctgtgtctcccctaacaaggcaatctggaagcagaaatgcaaactccagccccaccacacatccaccgatgcatttgtggctagaaattttaatctaaactttttttaaaaaaaatcataatagttaggatagtttcctatagcaaagggctccttgattcataagcacctcccccccaaaaaaaccaaattggtaaaaattcattttcttttaaatagagcaataagttcatactgtgttgccgttgtaataatgaattgttctggactagaaaacaaaatgaggcattttgttaagggggtaggaaaatgactgattgttgggccctttggcaaaagctggtgcctggtaagtagaaacgaaatggaaacagaaataacatttgtgaaatcactggagggctcaagcaaatgccagagcttctccctggcttgttcctacttgttgagctctttggccctgagtcccatccatctccactgcaacagtctgtctttctgcctacatccgcctgagaccaaggagggtctttggtacagtccacattatgaggctctgatttcctatcccagtttagggctccagaaaagccattctcccaaactaatgattcttgggtgctgtgggtcaccaacaggctgtttacaaagcagaaaatatcatcaccatcataacctttctccttgagaaaacttttatttttgtctaagcaattttatattttagaatatcatcttgaaccattataaaacaccttaaataaaagtgattgtgactaaggcacgttggagaacattccaatctttcctcccaagggttctggcaccttatgatgtactttgtaaaaaaattgattgaagattttaaataaacaggaaattagaagtgttagggttagataaaggaaaagtgaaaaagcataagaaatttgggactttttcatgttgaaaggagaaaaagcacaagttccctagttaccatttaatatgagggtgcaagagccacatttacaaacaacaaacttgatctttaaaaatgtttttaaaactctctgagtctcagtgacttcatttgtaaatgagagtgattcatctagatgactctaaggtctctttcaggtcccaggggacgtgatctaagttaggagtgggaacatgggagtggctgcttctccttggctaagcccatgcagactattgtgtccaggactggaataaaggtcctttttgctgcatcacccaggcaacactcccagccttactcaggagtggtgaacattttctgctctggacatagaataggtaggttcattcctggtcttttcactttagattctctttaggttcaagatgcagatttctcaatttggacacacctgcatcacgttggtcaaattttgctgcctgtttctagggttttcttctcagtttcatccctgccttcccttttttgttgttttttttttggttcaaggcccagcttcagttaatcccttcatctctatgccatgtctccaattcctagtatgtaactagaggttcaagagaccccaaattcctgccattttccccatttatgtttccccatgtgaatcttcaggaagtaaccagtcttccttctcacttcatttcctgtcctctgtttatttggttattttctttcattaataaactaaccatctcttagctacttacattcacaaatgtaattttaatctattgtgtttcattgtgaaagagaatctcattgaaggaaggaaggaagaaattgaggaataaaggtaggaagggagagaaacaaagactatccaaccaattgactgagatgtgagccggcttgactcctaggagactaagtagatccattcagcttgaacactgagttccagggcagaatctgtccattttctgttttgttcttacttgctgcttttggaatggtggtaaagccaccagtcaccatgagccttgaaaggaccttcactaatgaggacttgactcaccctctttaaaaagcaaaagaaacagaatttacttacaatcttctggtaaattacctttctgatcctctccttattcccaaaaggcaatttttttaatccagcagagatgatttagcatataaatcccaggtcatttgaggaggtgatgacgctatttggatttatttatgagacagtagtaattataaatgattcctaggcagtttgtactagtttggtcatattggttgtttaagtggagtctcttctgattgtttgtttccaataaagtatcagttgttaataatttcaagatttccataaaaataagaaaacttggaaaacatttttaattttatttcttaagagaccacagagcctaattttcaatttttatggtaagcttgcttaaaacatgtataaaaagaagcctacatgctcaaaggcagaggcacctttagccctacaacagttggaagctccatgatatcacagccccacatggatagattggagaaagaattctgacttagaccacctgtagcagaccttcctcttttggcatatttttttaatcacaaaaaggacctgagactccctatctaaagataagccaaacttggggtatacattaagaatctgggaagaaagaaaaaaaagaaaaagatataataagcagtattttaaaataccatgagttatgggcatgcatatggtacaaagagtagttctttgggttgaaagaaagaagagtttgcattgaactgcgtaggctggcaagaatgcagaggtatacaatgtttgatgggctttggaggcatttcaatagtaaatgggtgacaggactggaaagatgtggaatatgagggttttccagggagatgggacttaatgggccatgatgtatttgtaggaatgtgatttcaatagattgactattttgtctactgtgataagtttgtgtaggggaactgaggaaaactgagatgagacttcatggaaggggctacaaagtacagtctaaaggcctagataaagtttgaaacttgatttagaaagtcatgaaaagccactcagagttttaagcaaagagtgatggggcagcaatggctgtgcatttttcaggttgaaagtagtgagatgtcagttcttcctggaagatatcatgagaatgcacacaaaactgaacattttctcagcagcaaggagtgctaaagggtgcacactccaagtcaacaactcaccgtgtgcagcaccttcctcacacattttgctttgctttctgtcacaggaccatcagacgtagaacgtcctgactctcctgaattactagaatgtcagcaacaaactcacaaagtagattagagggtaggaatagatacataaatttttaaaaacctgccaatcatactgttttctagacagtaatataataagaacatgaggcaggacatccacaaatagtagagaataattaatagtccagaactgccaaataggaattccccttatgaaaacacccttgcagctaatcaggtagcccttgtttagaaaccaattagcactcataaaatatttgtacaaggagtgagtgggggagaaatgagcacaatatgggttctgccatcaatcagcttataatacaactaaagaaagaaaacatgctcaaagcaccattagagaaagggtgagccctaatgacatagtttcacattcaatatggtaggagttgaaacaagggagaaatgctgtggtttgaagtggttcaacaaggtaggatttctagagaaaggggggtttaggagttagataagtagaggatcagcattctaggtatgaaggcaggattatctggcatgtggcagggtgaatgatgttaatcagtaactgctaattgatatttactgagcagctgctgtgtcctcacgatggtaagactattagaggaagacagcccacctgcctaactgggaacacaaggcacacatatattggaaagatcatgttgcacaaaacaggtgttcaataaataatttttgaataaatgtgaacactgaatagcaaataaatgttatagatcgtaatagttgtagaagattggttgggattgtagggactggatgtggggcaatggctgtgggtctagagtatattcattgtgcagtggacacacacctaatctgtcctcaaggacagaaccatgtggaggaataggaaaacaagagaagcaggcaagaagcggaggcagtgagtacagcagctaagaaatgttacattgggttcatccagagcaagaaaagctgagagctgtccgtgagggaaggccacacaggcaagaggagtgggacaggggagtaaaggagtgggctacaacaggccctgcagatgtggaagccagacccacagaggcacttagaaagtgaggatcctggatgaattattttagggagaaagtgtaggtttagatcagctggcagatgtgtttgtgggctacagccaagtttttcaggactaagaaggagcaaaataagtagaacttcttgggacaggagatctagggtactccagaaccagggaaatgagaaacaagaggggaattttaagaaagagagggaagatcatctatgaggttggagatgaaaggtgttggagatggtgaggcacaagtcaaaagactcactcgaagggcaggaactctgcttatttgtccatattcccagagtttgtcatgaggtctggcccacgtgggcagtcactcggccactatgtatcactgtggctgccatggtggatggaggctggacagaacctgtggtgatcggcagtctttctggaggactcaccagggaggggtctcagggtgggcatctcctttcaccttcctgtgcatgtcactgcactgttcttcttccctccctgaacagcacacacactgcatccttagtttcaggggtctgaaaacaaatgctacgaccaccttgctttggtggcttttctgaacaggcattgtgagaagagatgttctggccaggtgaaagtggactttatttttaggtaggtttttcagtttagaaaggtttcctttgcttatcccttgaggacttctgtgctgctgcttctcctccatcttgctagttaacagaacaggggcagaagtgacaccaatgctctcggccatgcctgccttgggaagcactaccgggccccactgtttagaatcttagatggaaatgtacacaaggcattgacacacgcctgcgggagtgacccagtgcttccctcccatgggactcagggtcagcgtgggaaggcagctggcagggacaggagccccgcccgcaaggtggactgagcctcacttccacacaaaaccagagtcccatctgccccagagcgctcgctctcctccccttccttccgctcaatgcagcctgacacgcctttgaccagaactgcaacatttcaaacacaaacccagatctgttgggaaatcctaattaaaaacgttgcattcccaggtggcacaatcacatcctgcctaaaacttctggcccacatcccaccacccagatgttgaaaagaaacctttctctgcttaacaccaaaacctgcacttcaaggtttctttaggggacaaagaaaaaaaaagtacacacatgcagagttcagcctacatgttcattgaggaaaaagagcgtggcttattcatctttcaatcttttgattgttggcattatgattatgattatgattaattactctgacctgacaggaattgaagaagagactatatgctggtgctctgaaatgatctacccaactctgtcatctgtaacaaccagtgataactctcttgtcttgtaaaaagggtttgtacataacttgtacatggtttcattttgtatttttcgcagattaaaaatttatgtatttgtgttctaaaa

SEQ ID NO: 10571 - DNA, 11990 bp, Homo sapiens
  source 1..11990: mol_type = unassigned DNA
cgccaggtcgcgcacagcgccccgagcccaggcgcctccccgcccccctcccgcgctccgcggcggcggcggcggcggcagcagtagcagcaatatggctgttgatgggtgtttggggtggcgctggcggcgggaggagctcccccgagcccctgcgccggctgcccgttgctagctatggcaaatggtggcggcggcggcggcggcagcagcggcggcggcggcggcggcggaggcagcagtcttagaatgagtagcaatatccacgcgaaccatctcagcctagacgcgtcctcctcctcctcctcctcctcttcctcttcttcttcttcctcctcctcttcctcctcgtcctcggtccacgagcccaagatggatgcgctcatcatcccggtgaccatggaggtgccgtgcgacagccggggccaacgcatgtggtgggctttcctggcctcctccatggtgactttcttcgggggcctcttcatcatcttgctctggcggacgctcaagtacctgtggaccgtgtgctgccactgcgggggcaagacgaaggaggcccagaagattaacaatggctcaagccaggcggatggcactctcaaaccagtggatgaaaaagaggaggcagtggccgccgaggtcggctggatgacctccgtgaaggactgggcgggggtgatgatatccgcccagacactgactggcagagtcctggttgtcttagtctttgctctcagcatcggtgcacttgtaatatacttcatagattcatcaaacccaatagaatcctgccagaatttctacaaagatttcacattacagatcgacatggctttcaacgtgttcttccttctctacttcggcttgcggtttattgcagccaacgataaattgtggttctggctggaagtgaactctgtagtggatttcttcacggtgccccccgtgtttgtgtctgtgtacttaaacagaagttggcttggtttgagatttttaagagctctgagactgatacagttttcagaaattttgcagtttctgaatattcttaaaacaagtaattccatcaagctggtgaatctgctctccatatttatcagcacgtggctgactgcagccgggttcatccatttggtggagaattcaggggacccatgggaaaatttccaaaacaaccaggctctcacctactgggaatgtgtctatttactcatggtcacaatgtccaccgttggttatggggatgtttatgcaaaaaccacacttgggcgcctcttcatggtcttcttcatcctcgggggactggccatgtttgccagctacgtccctgaaatcatagagttaataggaaaccgcaagaaatacgggggctcctatagtgcggttagtggaagaaagcacattgtggtctgcggacacatcactctggagagtgtttccaacttcctgaaggactttctgcacaaggaccgggatgacgtcaatgtggagatcgtttttcttcacaacatctcccccaacctggagcttgaagctctgttcaaacgacattttactcaggtggaattttatcagggttccgtcctcaatccacatgatcttgcaagagtcaagatagagtcagcagatgcatgcctgatccttgccaacaagtactgcgctgacccggatgcggaggatgcctcgaatatcatgagagtaatctccataaagaactaccatccgaagataagaatcatcactcaaatgctgcagtatcacaacaaggcccatctgctaaacatcccgagctggaattggaaagaaggtgatgacgcaatctgcctcgcagagttgaagttgggcttcatagcccagagctgcctggctcaaggcctctccaccatgcttgccaacctcttctccatgaggtcattcataaagattgaggaagacacatggcagaaatactacttggaaggagtctcaaatgaaatgtacacagaatatctctccagtgccttcgtgggtctgtccttccctactgtttgtgagctgtgttttgtgaagctcaagctcctaatgatagccattgagtacaagtctgccaaccgagagagccgtatattaattaatcctggaaaccatcttaagatccaagaaggtactttaggatttttcatcgcaagtgatgccaaagaagttaaaagggcatttttttactgcaaggcctgtcatgatgacatcacagatcccaaaagaataaaaaaatgtggctgcaaacggctgatatattttgaagatgagcagccgtcaacactatcaccaaaaaaaaagcaacggaatggaggcatgcggaactcacccaacacctcgcctaagctgatgaggcatgaccccttgttaattcctggcaatgatcagattgacaacatggactccaatgtgaagaagtacgactctactgggatgtttcactggtgtgcacccaaggagatagagaaagtcatcctgactcgaagtgaagctgccatgaccgtcctgagtggccatgtcgtggtctgcatctttggcgacgtcagctcagccctgatcggcctccggaacctggtgatgccgctccgtgccagcaactttcattaccatgagctcaagcacattgtgtttgtgggctctattgagtacctcaagcgggaatgggagacgcttcataacttccccaaagtgtccatattgcctggtacgccattaagtcgggctgatttaagggctgtcaacatcaacctctgtgacatgtgcgttatcctgtcagccaatcagaataatattgatgatacttcgctgcaggacaaggaatgcatcttggcgtcactcaacatcaaatctatgcagtttgatgacagcatcggagtcttgcaggctaattcccaagggttcacacctccaggaatggatagatcctctccagataacagcccagtgcacgggatgttacgtcaaccatccatcacaactggggtcaacatccccatcatcactgaactagtgaacgatactaatgttcagtttttggaccaagacgatgatgatgaccctgatacagaactgtacctcacgcagccctttgcctgtgggacagcatttgccgtcagtgtcctggactcactcatgagcgcgacgtacttcaatgacaatatcctcaccctgatacggaccctggtgaccggaggagccacgccggagctggaggctctgattgctgaggaaaacgcccttagaggtggctacagcaccccgcagacactggccaatagggaccgctgccgcgtggcccagttagctctgctcgatgggccatttgcggacttaggggatggtggttgttatggtgatctgttctgcaaagctctgaaaacatataatatgctttgttttggaatttaccggctgagagatgctcacctcagcacccccagtcagtgcacaaagaggtatgtcatcaccaacccgccctatgagtttgagctcgtgccgacggacctgatcttctgcttaatgcagtttgaccacaatgccggccagtcccgggccagcctgtcccattcctcccactcgtcgcagtcctccagcaagaagagctcctctgttcactccatcccatccacagcaaaccgacagaaccggcccaagtccagggagtcccgggacaaacagaacagaaaagaaatggtttacagatgaaccggataatgcctatcccagaaacattcaaatcaagcccatgagtacccacatggctaaccagatcaaccaatataaatccacaagcagcttgattccaccaatcagagaagttgaagatgaatgttgactcccaggagaccagaactatttttttaaagcctgacaaacttcataaatggtgatgtgacttttcttcttacatgctgaatcactggtggaaacgttaggataagcaagaattgccagaaaataaagtagacagatctttctctttgtctgccttgaatattgcttccatgtattttggaaaagaaaatgatttcatttataaatgaacatactaaaatagtcatgtatagcctctagcattttaaattatttttatttattagaaagaaaatatattttttcttttcattgtcaaatatcttccctatatctaaacaatgcaaaatctaaatgaataagtggtcagactccttaatgtgtttttctcttctttctctctttttctttgaggagaatgatggtcaccaccacaattaattgtaattaagggaaatgaattattaaaacaattttaaaatggccaatgatgtatacatgtattttagtaaatccagaaaagaagactaaggggacaggtgaatacctgctcctcgcctggatgggtgtgtattttgatctgcattgacaccagctcttaataaatggaaacttatttattttcacagttgaaagtcatatttttgtagttctagttttcattctgtagttctcacccctttgttcatatttttaaagggaagaccttctgctgcttttctacaattggcagatcaggtttgtctggccaactaaggacaccaggagggttgtgggcacacctgggatgtggaagctgaggaccagatgcacacaaggcattgctctgtttgctgttctagtggtggagactcctacgtgctgttatgcttctcattttatatttccaaaccacctgagcgagtaatgtcaacttcgggagggtctggtggactttctccccactccccaagtctcagagcttttagcctggaagtttgtaaaactgattagtagttttactttaccataggatgtgagagggcagtcattcttctcactgagtttttgtttaaaaaccaggaaatttctacaatcatggagacagattttaatttgcatgctctcctttatttagttgctggggccaaacacatgaacttgttacaacaatttaaaaataataataacaaaaggaaagcaacgaatgcacttcatatagactgttagaaaaggcctttgaaaattaccagcagtgaaatcaaataaattagccactttaaactgcggtcaaaagatttttctagccatcagatgcaattacgatgtctcagagctctgctatcgcttgcatgctcggtgtacagtctcccggcaactgttttgttccaatcaacttagcaagtctttcaactttaaaattatcaatctttgatatgatcatcaaggtctctggagaagcatggatgtaatagtgatttctattttcttaaaaaatgtaaactgtggacacttaatggaaccaagctaaccaaagtatctccccgaagtttcatgatatctagtccattaactctttgggccatgacctgtggtacctagttatggtagtgcaaatcagatcagagcaaagcaatgagatcatcatgaagacatatgtccactaagtactccaattaccagcgtaggcaaaatgagcttccacctctgtccactccctgcagagccaatatagtcgtgcttccacctcgtaggcattgtcctgcagtgatttgtcggactgtggttactctgtcgtcacattttgtagaattagttctataaaagtattgtgaatacaatgtatgtccaattggattgtttaaaaactacttataattaatcactagcctactcagcagactaaaatgatgtcaacagtctatattcaggcttataaacatttcttggtttccaacagaagtcaaatgtgtttgtggggagaacgttttgctaggattttgacaactttcctgaaagctaggccttttttacataatgattttgcattggggtcaccttagtatattcacgtcaatccacgctcttctttccttcgtgaaccatagtgggctcttcactcctgctcgtaataaccacctccaaatttgttagagtgatttggtctcctctggcaggctgtggtggccacataaaggatcttccattagagggacacaggacacaaagctccattcccatgaccctctcttccctgtgtctcccctaacaaggcaatctggaagcagaaatgcaaactccagccccaccacacatccaccgatgcatttgtggctagaaattttaatctaaactttttttaaaaaaaatcataatagttaggatagtttcctatagcaaagggctccttgattcataagcacctcccccccaaaaaaaccaaattggtaaaaattcattttcttttaaatagagcaataagttcatactgtgttgccgttgtaataatgaattgttctggactagaaaacaaaatgaggcattttgttaagggggtaggaaaatgactgattgttgggccctttggcaaaagctggtgcctggtaagtagaaacgaaatggaaacagaaataacatttgtgaaatcactggagggctcaagcaaatgccagagcttctccctggcttgttcctacttgttgagctctttggccctgagtcccatccatctccactgcaacagtctgtctttctgcctacatccgcctgagaccaaggagggtctttggtacagtccacattatgaggctctgatttcctatcccagtttagggctccagaaaagccattctcccaaactaatgattcttgggtgctgtgggtcaccaacaggctgtttacaaagcagaaaatatcatcaccatcataacctttctccttgagaaaacttttatttttgtctaagcaattttatattttagaatatcatcttgaaccattataaaacaccttaaataaaagtgattgtgactaaggcacgttggagaacattccaatctttcctcccaagggttctggcaccttatgatgtactttgtaaaaaaattgattgaagattttaaataaacaggaaattagaagtgttagggttagataaaggaaaagtgaaaaagcataagaaatttgggactttttcatgttgaaaggagaaaaagcacaagttccctagttaccatttaatatgagggtgcaagagccacatttacaaacaacaaacttgatctttaaaaatgtttttaaaactctctgagtctcagtgacttcatttgtaaatgagagtgattcatctagatgactctaaggtctctttcaggtcccaggggacgtgatctaagttaggagtgggaacatgggagtggctgcttctccttggctaagcccatgcagactattgtgtccaggactggaataaaggtcctttttgctgcatcacccaggcaacactcccagccttactcaggagtggtgaacattttctgctctggacatagaataggtaggttcattcctggtcttttcactttagattctctttaggttcaagatgcagatttctcaatttggacacacctgcatcacgttggtcaaattttgctgcctgtttctagggttttcttctcagtttcatccctgccttcccttttttgttgttttttttttggttcaaggcccagcttcagttaatcccttcatctctatgccatgtctccaattcctagtatgtaactagaggttcaagagaccccaaattcctgccattttccccatttatgtttccccatgtgaatcttcaggaagtaaccagtcttccttctcacttcatttcctgtcctctgtttatttggttattttctttcattaataaactaaccatctcttagctacttacattcacaaatgtaattttaatctattgtgtttcattgtgaaagagaatctcattgaaggaaggaaggaagaaattgaggaataaaggtaggaagggagagaaacaaagactatccaaccaattgactgagatgtgagccggcttgactcctaggagactaagtagatccattcagcttgaacactgagttccagggcagaatctgtccattttctgttttgttcttacttgctgcttttggaatggtggtaaagccaccagtcaccatgagccttgaaaggaccttcactaatgaggacttgactcaccctctttaaaaagcaaaagaaacagaatttacttacaatcttctggtaaattacctttctgatcctctccttattcccaaaaggcaatttttttaatccagcagagatgatttagcatataaatcccaggtcatttgaggaggtgatgacgctatttggatttatttatgagacagtagtaattataaatgattcctaggcagtttgtactagtttggtcatattggttgtttaagtggagtctcttctgattgtttgtttccaataaagtatcagttgttaataatttcaagatttccataaaaataagaaaacttggaaaacatttttaattttatttcttaagagaccacagagcctaattttcaatttttatggtaagcttgcttaaaacatgtataaaaagaagcctacatgctcaaaggcagaggcacctttagccctacaacagttggaagctccatgatatcacagccccacatggatagattggagaaagaattctgacttagaccacctgtagcagaccttcctcttttggcatatttttttaatcacaaaaaggacctgagactccctatctaaagataagccaaacttggggtatacattaagaatctgggaagaaagaaaaaaaagaaaaagatataataagcagtattttaaaataccatgagttatgggcatgcatatggtacaaagagtagttctttgggttgaaagaaagaagagtttgcattgaactgcgtaggctggcaagaatgcagaggtatacaatgtttgatgggctttggaggcatttcaatagtaaatgggtgacaggactggaaagatgtggaatatgagggttttccagggagatgggacttaatgggccatgatgtatttgtaggaatgtgatttcaatagattgactattttgtctactgtgataagtttgtgtaggggaactgaggaaaactgagatgagacttcatggaaggggctacaaagtacagtctaaaggcctagataaagtttgaaacttgatttagaaagtcatgaaaagccactcagagttttaagcaaagagtgatggggcagcaatggctgtgcatttttcaggttgaaagtagtgagatgtcagttcttcctggaagatatcatgagaatgcacacaaaactgaacattttctcagcagcaaggagtgctaaagggtgcacactccaagtcaacaactcaccgtgtgcagcaccttcctcacacattttgctttgctttctgtcacaggaccatcagacgtagaacgtcctgactctcctgaattactagaatgtcagcaacaaactcacaaagtagattagagggtaggaatagatacataaatttttaaaaacctgccaatcatactgttttctagacagtaatataataagaacatgaggcaggacatccacaaatagtagagaataattaatagtccagaactgccaaataggaattccccttatgaaaacacccttgcagctaatcaggtagcccttgtttagaaaccaattagcactcataaaatatttgtacaaggagtgagtgggggagaaatgagcacaatatgggttctgccatcaatcagcttataatacaactaaagaaagaaaacatgctcaaagcaccattagagaaagggtgagccctaatgacatagtttcacattcaatatggtaggagttgaaacaagggagaaatgctgtggtttgaagtggttcaacaaggtaggatttctagagaaaggggggtttaggagttagataagtagaggatcagcattctaggtatgaaggcaggattatctggcatgtggcagggtgaatgatgttaatcagtaactgctaattgatatttactgagcagctgctgtgtcctcacgatggtaagactattagaggaagacagcccacctgcctaactgggaacacaaggcacacatatattggaaagatcatgttgcacaaaacaggtgttcaataaataatttttgaataaatgtgaacactgaatagcaaataaatgttatagatcgtaatagttgtagaagattggttgggattgtagggactggatgtggggcaatggctgtgggtctagagtatattcattgtgcagtggacacacacctaatctgtcctcaaggacagaaccatgtggaggaataggaaaacaagagaagcaggcaagaagcggaggcagtgagtacagcagctaagaaatgttacattgggttcatccagagcaagaaaagctgagagctgtccgtgagggaaggccacacaggcaagaggagtgggacaggggagtaaaggagtgggctacaacaggccctgcagatgtggaagccagacccacagaggcacttagaaagtgaggatcctggatgaattattttagggagaaagtgtaggtttagatcagctggcagatgtgtttgtgggctacagccaagtttttcaggactaagaaggagcaaaataagtagaacttcttgggacaggagatctagggtactccagaaccagggaaatgagaaacaagaggggaattttaagaaagagagggaagatcatctatgaggttggagatgaaaggtgttggagatggtgaggcacaagtcaaaagactcactcgaagggcaggaactctgcttatttgtccatattcccagagtttgtcatgaggtctggcccacgtgggcagtcactcggccactatgtatcactgtggctgccatggtggatggaggctggacagaacctgtggtgatcggcagtctttctggaggactcaccagggaggggtctcagggtgggcatctcctttcaccttcctgtgcatgtcactgcactgttcttcttccctccctgaacagcacacacactgcatccttagtttcaggggtctgaaaacaaatgctacgaccaccttgctttggtggcttttctgaacaggcattgtgagaagagatgttctggccaggtgaaagtggactttatttttaggtaggtttttcagtttagaaaggtttcctttgcttatcccttgaggacttctgtgctgctgcttctcctccatcttgctagttaacagaacaggggcagaagtgacaccaatgctctcggccatgcctgccttgggaagcactaccgggccccactgtttagaatcttagatggaaatgtacacaaggcattgacacacgcctgcgggagtgacccagtgcttccctcccatgggactcagggtcagcgtgggaaggcagctggcagggacaggagccccgcccgcaaggtggactgagcctcacttccacacaaaaccagagtcccatctgccccagagcgctcgctctcctccccttccttccgctcaatgcagcctgacacgcctttgaccagaactgcaacatttcaaacacaaacccagatctgttgggaaatcctaattaaaaacgttgcattcccaggtggcacaatcacatcctgcctaaaacttctggcccacatcccaccacccagatgttgaaaagaaacctttctctgcttaacaccaaaacctgcacttcaaggtttctttaggggacaaagaaaaaaaaagtacacacatgcagagttcagcctacatgttcattgaggaaaaagagcgtggcttattcatctttcaatcttttgattgttggcattatgattatgattatgattaattactctgacctgacaggaattgaagaagagactatatgctggtgctctgaaatgatctacccaactctgtcatctgtaacaaccagtgataactctcttgtcttgtaaaaagggtttgtacataacttgtacatggtttcattttgtatttttcgcagattaaaaatttatgtatttgtgttctaaaa

SEQ ID NO: 10572 - DNA, 12071 bp, Homo sapiens
  source 1..12071: mol_type = unassigned DNA
cgccaggtcgcgcacagcgccccgagcccaggcgcctccccgcccccctcccgcgctccgcggcggcggcggcggcggcagcagtagcagcaatatggctgttgatgggtgtttggggtggcgctggcggcgggaggagctcccccgagcccctgcgccggctgcccgttgctagctatggcaaatggtggcggcggcggcggcggcagcagcggcggcggcggcggcggcggaggcagcagtcttagaatgagtagcaatatccacgcgaaccatctcagcctagacgcgtcctcctcctcctcctcctcctcttcctcttcttcttcttcctcctcctcttcctcctcgtcctcggtccacgagcccaagatggatgcgctcatcatcccggtgaccatggaggtgccgtgcgacagccggggccaacgcatgtggtgggctttcctggcctcctccatggtgactttcttcgggggcctcttcatcatcttgctctggcggacgctcaagtacctgtggaccgtgtgctgccactgcgggggcaagacgaaggaggcccagaagattaacaatggctcaagccaggcggatggcactctcaaaccagtggatgaaaaagaggaggcagtggccgccgaggtcggctggatgacctccgtgaaggactgggcgggggtgatgatatccgcccagacactgactggcagagtcctggttgtcttagtctttgctctcagcatcggtgcacttgtaatatacttcatagattcatcaaacccaatagaatcctgccagaatttctacaaagatttcacattacagatcgacatggctttcaacgtgttcttccttctctacttcggcttgcggtttattgcagccaacgataaattgtggttctggctggaagtgaactctgtagtggatttcttcacggtgccccccgtgtttgtgtctgtgtacttaaacagaagttggcttggtttgagatttttaagagctctgagactgatacagttttcagaaattttgcagtttctgaatattcttaaaacaagtaattccatcaagctggtgaatctgctctccatatttatcagcacgtggctgactgcagccgggttcatccatttggtggagaattcaggggacccatgggaaaatttccaaaacaaccaggctctcacctactgggaatgtgtctatttactcatggtcacaatgtccaccgttggttatggggatgtttatgcaaaaaccacacttgggcgcctcttcatggtcttcttcatcctcgggggactggccatgtttgccagctacgtccctgaaatcatagagttaataggaaaccgcaagaaatacgggggctcctatagtgcggttagtggaagaaagcacattgtggtctgcggacacatcactctggagagtgtttccaacttcctgaaggactttctgcacaaggaccgggatgacgtcaatgtggagatcgtttttcttcacaacatctcccccaacctggagcttgaagctctgttcaaacgacattttactcaggtggaattttatcagggttccgtcctcaatccacatgatcttgcaagagtcaagatagagtcagcagatgcatgcctgatccttgccaacaagtactgcgctgacccggatgcggaggatgcctcgaatatcatgagagtaatctccataaagaactaccatccgaagataagaatcatcactcaaatgctgcagtatcacaacaaggcccatctgctaaacatcccgagctggaattggaaagaaggtgatgacgcaatctgcctcgcagagttgaagttgggcttcatagcccagagctgcctggctcaaggcctctccaccatgcttgccaacctcttctccatgaggtcattcataaagattgaggaagacacatggcagaaatactacttggaaggagtctcaaatgaaatgtacacagaatatctctccagtgccttcgtgggtctgtccttccctactgtttgtgagctgtgttttgtgaagctcaagctcctaatgatagccattgagtacaagtctgccaaccgagagagccgtatattaattaatcctggaaaccatcttaagatccaagaaggtactttaggatttttcatcgcaagtgatgccaaagaagttaaaagggcatttttttactgcaaggcctgtcatgatgacatcacagatcccaaaagaataaaaaaatgtggctgcaaacggctgatatattttgaagatgagcagccgtcaacactatcaccaaaaaaaaagcaacggaatggaggcatgcggaactcacccaacacctcgcctaagctgatgaggcatgaccccttgttaattcctggcaatgatcagattgacaacatggactccaatgtgaagaagtacgactctactgggatgtttcactggtgtgcacccaaggagatagagaaagtcatcctgactcgaagtgaagctgccatgaccgtcctgagtggccatgtcgtggtctgcatctttggcgacgtcagctcagccctgatcggcctccggaacctggtgatgccgctccgtgccagcaactttcattaccatgagctcaagcacattgtgtttgtgggctctattgagtacctcaagcgggaatgggagacgcttcataacttccccaaagtgtccatattgcctggtacgccattaagtcgggctgatttaagggctgtcaacatcaacctctgtgacatgtgcgttatcctgtcagccaatcagaataatattgatgatacttcgctgcaggacaaggaatgcatcttggcgtcactcaacatcaaatctatgcagtttgatgacagcatcggagtcttgcaggctaattcccaagggttcacacctccaggaatggatagatcctctccagataacagcccagtgcacgggatgttacgtcaaccatccatcacaactggggtcaacatccccatcatcactgaactagctaaaccgggcaagttgcctttggtatcagtcaatcaggaaaaaaacagtgggacgcacattctaatgataactgaactggtgaacgatactaatgttcagtttttggaccaagacgatgatgatgaccctgatacagaactgtacctcacgcagccctttgcctgtgggacagcatttgccgtcagtgtcctggactcactcatgagcgcgacgtacttcaatgacaatatcctcaccctgatacggaccctggtgaccggaggagccacgccggagctggaggctctgattgctgaggaaaacgcccttagaggtggctacagcaccccgcagacactggccaatagggaccgctgccgcgtggcccagttagctctgctcgatgggccatttgcggacttaggggatggtggttgttatggtgatctgttctgcaaagctctgaaaacatataatatgctttgttttggaatttaccggctgagagatgctcacctcagcacccccagtcagtgcacaaagaggtatgtcatcaccaacccgccctatgagtttgagctcgtgccgacggacctgatcttctgcttaatgcagtttgaccacaatgccggccagtcccgggccagcctgtcccattcctcccactcgtcgcagtcctccagcaagaagagctcctctgttcactccatcccatccacagcaaaccgacagaaccggcccaagtccagggagtcccgggacaaacagaacagaaaagaaatggtttacagatgaaccggataatgcctatcccagaaacattcaaatcaagcccatgagtacccacatggctaaccagatcaaccaatataaatccacaagcagcttgattccaccaatcagagaagttgaagatgaatgttgactcccaggagaccagaactatttttttaaagcctgacaaacttcataaatggtgatgtgacttttcttcttacatgctgaatcactggtggaaacgttaggataagcaagaattgccagaaaataaagtagacagatctttctctttgtctgccttgaatattgcttccatgtattttggaaaagaaaatgatttcatttataaatgaacatactaaaatagtcatgtatagcctctagcattttaaattatttttatttattagaaagaaaatatattttttcttttcattgtcaaatatcttccctatatctaaacaatgcaaaatctaaatgaataagtggtcagactccttaatgtgtttttctcttctttctctctttttctttgaggagaatgatggtcaccaccacaattaattgtaattaagggaaatgaattattaaaacaattttaaaatggccaatgatgtatacatgtattttagtaaatccagaaaagaagactaaggggacaggtgaatacctgctcctcgcctggatgggtgtgtattttgatctgcattgacaccagctcttaataaatggaaacttatttattttcacagttgaaagtcatatttttgtagttctagttttcattctgtagttctcacccctttgttcatatttttaaagggaagaccttctgctgcttttctacaattggcagatcaggtttgtctggccaactaaggacaccaggagggttgtgggcacacctgggatgtggaagctgaggaccagatgcacacaaggcattgctctgtttgctgttctagtggtggagactcctacgtgctgttatgcttctcattttatatttccaaaccacctgagcgagtaatgtcaacttcgggagggtctggtggactttctccccactccccaagtctcagagcttttagcctggaagtttgtaaaactgattagtagttttactttaccataggatgtgagagggcagtcattcttctcactgagtttttgtttaaaaaccaggaaatttctacaatcatggagacagattttaatttgcatgctctcctttatttagttgctggggccaaacacatgaacttgttacaacaatttaaaaataataataacaaaaggaaagcaacgaatgcacttcatatagactgttagaaaaggcctttgaaaattaccagcagtgaaatcaaataaattagccactttaaactgcggtcaaaagatttttctagccatcagatgcaattacgatgtctcagagctctgctatcgcttgcatgctcggtgtacagtctcccggcaactgttttgttccaatcaacttagcaagtctttcaactttaaaattatcaatctttgatatgatcatcaaggtctctggagaagcatggatgtaatagtgatttctattttcttaaaaaatgtaaactgtggacacttaatggaaccaagctaaccaaagtatctccccgaagtttcatgatatctagtccattaactctttgggccatgacctgtggtacctagttatggtagtgcaaatcagatcagagcaaagcaatgagatcatcatgaagacatatgtccactaagtactccaattaccagcgtaggcaaaatgagcttccacctctgtccactccctgcagagccaatatagtcgtgcttccacctcgtaggcattgtcctgcagtgatttgtcggactgtggttactctgtcgtcacattttgtagaattagttctataaaagtattgtgaatacaatgtatgtccaattggattgtttaaaaactacttataattaatcactagcctactcagcagactaaaatgatgtcaacagtctatattcaggcttataaacatttcttggtttccaacagaagtcaaatgtgtttgtggggagaacgttttgctaggattttgacaactttcctgaaagctaggccttttttacataatgattttgcattggggtcaccttagtatattcacgtcaatccacgctcttctttccttcgtgaaccatagtgggctcttcactcctgctcgtaataaccacctccaaatttgttagagtgatttggtctcctctggcaggctgtggtggccacataaaggatcttccattagagggacacaggacacaaagctccattcccatgaccctctcttccctgtgtctcccctaacaaggcaatctggaagcagaaatgcaaactccagccccaccacacatccaccgatgcatttgtggctagaaattttaatctaaactttttttaaaaaaaatcataatagttaggatagtttcctatagcaaagggctccttgattcataagcacctcccccccaaaaaaaccaaattggtaaaaattcattttcttttaaatagagcaataagttcatactgtgttgccgttgtaataatgaattgttctggactagaaaacaaaatgaggcattttgttaagggggtaggaaaatgactgattgttgggccctttggcaaaagctggtgcctggtaagtagaaacgaaatggaaacagaaataacatttgtgaaatcactggagggctcaagcaaatgccagagcttctccctggcttgttcctacttgttgagctctttggccctgagtcccatccatctccactgcaacagtctgtctttctgcctacatccgcctgagaccaaggagggtctttggtacagtccacattatgaggctctgatttcctatcccagtttagggctccagaaaagccattctcccaaactaatgattcttgggtgctgtgggtcaccaacaggctgtttacaaagcagaaaatatcatcaccatcataacctttctccttgagaaaacttttatttttgtctaagcaattttatattttagaatatcatcttgaaccattataaaacaccttaaataaaagtgattgtgactaaggcacgttggagaacattccaatctttcctcccaagggttctggcaccttatgatgtactttgtaaaaaaattgattgaagattttaaataaacaggaaattagaagtgttagggttagataaaggaaaagtgaaaaagcataagaaatttgggactttttcatgttgaaaggagaaaaagcacaagttccctagttaccatttaatatgagggtgcaagagccacatttacaaacaacaaacttgatctttaaaaatgtttttaaaactctctgagtctcagtgacttcatttgtaaatgagagtgattcatctagatgactctaaggtctctttcaggtcccaggggacgtgatctaagttaggagtgggaacatgggagtggctgcttctccttggctaagcccatgcagactattgtgtccaggactggaataaaggtcctttttgctgcatcacccaggcaacactcccagccttactcaggagtggtgaacattttctgctctggacatagaataggtaggttcattcctggtcttttcactttagattctctttaggttcaagatgcagatttctcaatttggacacacctgcatcacgttggtcaaattttgctgcctgtttctagggttttcttctcagtttcatccctgccttcccttttttgttgttttttttttggttcaaggcccagcttcagttaatcccttcatctctatgccatgtctccaattcctagtatgtaactagaggttcaagagaccccaaattcctgccattttccccatttatgtttccccatgtgaatcttcaggaagtaaccagtcttccttctcacttcatttcctgtcctctgtttatttggttattttctttcattaataaactaaccatctcttagctacttacattcacaaatgtaattttaatctattgtgtttcattgtgaaagagaatctcattgaaggaaggaaggaagaaattgaggaataaaggtaggaagggagagaaacaaagactatccaaccaattgactgagatgtgagccggcttgactcctaggagactaagtagatccattcagcttgaacactgagttccagggcagaatctgtccattttctgttttgttcttacttgctgcttttggaatggtggtaaagccaccagtcaccatgagccttgaaaggaccttcactaatgaggacttgactcaccctctttaaaaagcaaaagaaacagaatttacttacaatcttctggtaaattacctttctgatcctctccttattcccaaaaggcaatttttttaatccagcagagatgatttagcatataaatcccaggtcatttgaggaggtgatgacgctatttggatttatttatgagacagtagtaattataaatgattcctaggcagtttgtactagtttggtcatattggttgtttaagtggagtctcttctgattgtttgtttccaataaagtatcagttgttaataatttcaagatttccataaaaataagaaaacttggaaaacatttttaattttatttcttaagagaccacagagcctaattttcaatttttatggtaagcttgcttaaaacatgtataaaaagaagcctacatgctcaaaggcagaggcacctttagccctacaacagttggaagctccatgatatcacagccccacatggatagattggagaaagaattctgacttagaccacctgtagcagaccttcctcttttggcatatttttttaatcacaaaaaggacctgagactccctatctaaagataagccaaacttggggtatacattaagaatctgggaagaaagaaaaaaaagaaaaagatataataagcagtattttaaaataccatgagttatgggcatgcatatggtacaaagagtagttctttgggttgaaagaaagaagagtttgcattgaactgcgtaggctggcaagaatgcagaggtatacaatgtttgatgggctttggaggcatttcaatagtaaatgggtgacaggactggaaagatgtggaatatgagggttttccagggagatgggacttaatgggccatgatgtatttgtaggaatgtgatttcaatagattgactattttgtctactgtgataagtttgtgtaggggaactgaggaaaactgagatgagacttcatggaaggggctacaaagtacagtctaaaggcctagataaagtttgaaacttgatttagaaagtcatgaaaagccactcagagttttaagcaaagagtgatggggcagcaatggctgtgcatttttcaggttgaaagtagtgagatgtcagttcttcctggaagatatcatgagaatgcacacaaaactgaacattttctcagcagcaaggagtgctaaagggtgcacactccaagtcaacaactcaccgtgtgcagcaccttcctcacacattttgctttgctttctgtcacaggaccatcagacgtagaacgtcctgactctcctgaattactagaatgtcagcaacaaactcacaaagtagattagagggtaggaatagatacataaatttttaaaaacctgccaatcatactgttttctagacagtaatataataagaacatgaggcaggacatccacaaatagtagagaataattaatagtccagaactgccaaataggaattccccttatgaaaacacccttgcagctaatcaggtagcccttgtttagaaaccaattagcactcataaaatatttgtacaaggagtgagtgggggagaaatgagcacaatatgggttctgccatcaatcagcttataatacaactaaagaaagaaaacatgctcaaagcaccattagagaaagggtgagccctaatgacatagtttcacattcaatatggtaggagttgaaacaagggagaaatgctgtggtttgaagtggttcaacaaggtaggatttctagagaaaggggggtttaggagttagataagtagaggatcagcattctaggtatgaaggcaggattatctggcatgtggcagggtgaatgatgttaatcagtaactgctaattgatatttactgagcagctgctgtgtcctcacgatggtaagactattagaggaagacagcccacctgcctaactgggaacacaaggcacacatatattggaaagatcatgttgcacaaaacaggtgttcaataaataatttttgaataaatgtgaacactgaatagcaaataaatgttatagatcgtaatagttgtagaagattggttgggattgtagggactggatgtggggcaatggctgtgggtctagagtatattcattgtgcagtggacacacacctaatctgtcctcaaggacagaaccatgtggaggaataggaaaacaagagaagcaggcaagaagcggaggcagtgagtacagcagctaagaaatgttacattgggttcatccagagcaagaaaagctgagagctgtccgtgagggaaggccacacaggcaagaggagtgggacaggggagtaaaggagtgggctacaacaggccctgcagatgtggaagccagacccacagaggcacttagaaagtgaggatcctggatgaattattttagggagaaagtgtaggtttagatcagctggcagatgtgtttgtgggctacagccaagtttttcaggactaagaaggagcaaaataagtagaacttcttgggacaggagatctagggtactccagaaccagggaaatgagaaacaagaggggaattttaagaaagagagggaagatcatctatgaggttggagatgaaaggtgttggagatggtgaggcacaagtcaaaagactcactcgaagggcaggaactctgcttatttgtccatattcccagagtttgtcatgaggtctggcccacgtgggcagtcactcggccactatgtatcactgtggctgccatggtggatggaggctggacagaacctgtggtgatcggcagtctttctggaggactcaccagggaggggtctcagggtgggcatctcctttcaccttcctgtgcatgtcactgcactgttcttcttccctccctgaacagcacacacactgcatccttagtttcaggggtctgaaaacaaatgctacgaccaccttgctttggtggcttttctgaacaggcattgtgagaagagatgttctggccaggtgaaagtggactttatttttaggtaggtttttcagtttagaaaggtttcctttgcttatcccttgaggacttctgtgctgctgcttctcctccatcttgctagttaacagaacaggggcagaagtgacaccaatgctctcggccatgcctgccttgggaagcactaccgggccccactgtttagaatcttagatggaaatgtacacaaggcattgacacacgcctgcgggagtgacccagtgcttccctcccatgggactcagggtcagcgtgggaaggcagctggcagggacaggagccccgcccgcaaggtggactgagcctcacttccacacaaaaccagagtcccatctgccccagagcgctcgctctcctccccttccttccgctcaatgcagcctgacacgcctttgaccagaactgcaacatttcaaacacaaacccagatctgttgggaaatcctaattaaaaacgttgcattcccaggtggcacaatcacatcctgcctaaaacttctggcccacatcccaccacccagatgttgaaaagaaacctttctctgcttaacaccaaaacctgcacttcaaggtttctttaggggacaaagaaaaaaaaagtacacacatgcagagttcagcctacatgttcattgaggaaaaagagcgtggcttattcatctttcaatcttttgattgttggcattatgattatgattatgattaattactctgacctgacaggaattgaagaagagactatatgctggtgctctgaaatgatctacccaactctgtcatctgtaacaaccagtgataactctcttgtcttgtaaaaagggtttgtacataacttgtacatggtttcattttgtatttttcgcagattaaaaatttatgtatttgtgttctaaaa

SEQ ID NO: 10573 - DNA, 8394 bp, Homo sapiens
  source 1..8394: mol_type = unassigned DNA
atggatgcgctcatcatcccggtgaccatggaggtgccgtgcgacagccggggccaacgcatgtggtgggctttcctggcctcctccatggtgactttcttcgggggcctcttcatcatcttgctctggcggacgctcaagtacctgtggaccgtgtgctgccactgcgggggcaagacgaaggaggcccagaagattaacaatggctcaagccaggcggatggcactctcaaaccagtggatgaaaaagaggaggcagtggccgccgaggtcggctggatgacctccgtgaaggactgggcgggggtgatgatatccgcccagacactgactggcagagtcctggttgtcttagtctttgctctcagcatcggtgcacttgtaatatacttcatagattcatcaaacccaatagaatcctgccagaatttctacaaagatttcacattacagatcgacatggctttcaacgtgttcttccttctctacttcggcttgcggtttattgcagccaacgataaattgtggttctggctggaagtgaactctgtagtggatttcttcacggtgccccccgtgtttgtgtctgtgtacttaaacagaagttggcttggtttgagatttttaagagctctgagactgatacagttttcagaaattttgcagtttctgaatattcttaaaacaagtaattccatcaagctggtgaatctgctctccatatttatcagcacgtggctgactgcagccgggttcatccatttggtggagaattcaggggacccatgggaaaatttccaaaacaaccaggctctcacctactgggaatgtgtctatttactcatggtcacaatgtccaccgttggttatggggatgtttatgcaaaaaccacacttgggcgcctcttcatggtcttcttcatcctcgggggactggccatgtttgccagctacgtccctgaaatcatagagttaataggaaaccgcaagaaatacgggggctcctatagtgcggttagtggaagaaagcacattgtggtctgcggacacatcactctggagagtgtttccaacttcctgaaggactttctgcacaaggaccgggatgacgtcaatgtggagatcgtttttcttcacaacatctcccccaacctggagcttgaagctctgttcaaacgacattttactcaggtggaattttatcagggttccgtcctcaatccacatgatcttgcaagagtcaagatagagtcagcagatgcatgcctgatccttgccaacaagtactgcgctgacccggatgcggaggatgcctcgaatatcatgagagtaatctccataaagaactaccatccgaagataagaatcatcactcaaatgctgcagtatcacaacaaggcccatctgctaaacatcccgagctggaattggaaagaaggtgatgacgcaatctgcctcgcagagttgaagttgggcttcatagcccagagctgcctggctcaaggcctctccaccatgcttgccaacctcttctccatgaggtcattcataaagattgaggaagacacatggcagaaatactacttggaaggagtctcaaatgaaatgtacacagaatatctctccagtgccttcgtgggtctgtccttccctactgtttgtgagctgtgttttgtgaagctcaagctcctaatgatagccattgagtacaagtctgccaaccgagagagccgtatattaattaatcctggaaaccatcttaagatccaagaaggtactttaggatttttcatcgcaagtgatgccaaagaagttaaaagggcatttttttactgcaaggcctgtcatgatgacatcacagatcccaaaagaataaaaaaatgtggctgcaaacggctgatatattttgaagatgagcagccgtcaacactatcaccaaaaaaaaagcaacggaatggaggcatgcggaactcacccaacacctcgcctaagctgatgaggcatgaccccttgttaattcctggcaatgatcagattgacaacatggactccaatgtgaagaagtacgactctactgggatgtttcactggtgtgcacccaaggagatagagaaagtcatcctgactcgaagtgaagctgccatgaccgtcctgagtggccatgtcgtggtctgcatctttggcgacgtcagctcagccctgatcggcctccggaacctggtgatgccgctccgtgccagcaactttcattaccatgagctcaagcacattgtgtttgtgggctctattgagtacctcaagcgggaatgggagacgcttcataacttccccaaagtgtccatattgcctggtacgccattaagtcgggctgatttaagggctgtcaacatcaacctctgtgacatgtgcgttatcctgtcagccaatcagaataatattgatgatacttcgctgcaggacaaggaatgcatcttggcgtcactcaacatcaaatctatgcagtttgatgacagcatcggagtcttgcaggctaattcccaagggttcacacctccaggaatggatagatcctctccagataacagcccagtgcacgggatgttacgtcaaccatccatcacaactggggtcaacatccccatcatcactgaactagctaaaccgggcaagttgcctttggtatcagtcaatcaggaaaaaaacagtgggacgcacattctaatgataactgaactggtgaacgatactaatgttcagtttttggaccaagacgatgatgatgaccctgatacagaactgtacctcacgcagccctttgcctgtgggacagcatttgccgtcagtgtcctggactcactcatgagcgcgacgtacttcaatgacaatatcctcaccctgatacggaccctggtgaccggaggagccacgccggagctggaggctctgattgctgaggaaaacgcccttagaggtggctacagcaccccgcagacactggccaatagggaccgctgccgcgtggcccagttagctctgctcgatgggccatttgcggacttaggggatggtggttgttatggtgatctgttctgcaaagctctgaaaacatataatatgctttgttttggaatttaccggctgagagatgctcacctcagcacccccagtcagtgcacaaagaggtatgtcatcaccaacccgccctatgagtttgagctcgtgccgacggacctgatcttctgcttaatgcagtttgaccacaatgccggccagtcccgggccagcctgtcccattcctcccactcgtcgcagtcctccagcaagaagagctcctctgttcactccatcccatccacagcaaaccgacagaaccggcccaagtccagggagtcccgggacaaacagaaaaaagaaatggtttacagatgaaccggataatgcctatcccagaaacattcaaatcaagcccatgagtacccacatggctaaccagatcaaccaatataaatccacaagcagcttgattccaccaatcagagaagttgaagatgaatgttgactcccaggagaccagaactatttttttaaagcctgacaaacttcataaatggtgatgtgacttttcttcttacatgctgaatcactggtggaaacgttaggataagcaagaattgccagaaaataaagtagacagatctttctctttgtctgccttgaatattgcttccatgtattttggaaaagaaaatgatttcatttataaatgaacatactaaaatagtcatgtatagcctctagcattttaaattatttttatttattagaaagaaaatatattttttcttttcattgtcaaatatcttccctatatctaaacaatgcaaaatctaaatgaataagtggtcagactccttaatgtgtttttctcttctttctctctttttctttgaggagaatgatggtcaccaccacaattaattgtaattaagggaaatgaattattaaaacaattttaaaatggccaatgatgtatacatgtattttagtaaatccagaaaagaagactaaggggacaggtgaatacctgctcctcgcctggatgggtgtgtattttgatctgcattgacaccagctcttaataaatggaaacttatttattttcacagttgaaagtcatatttttgtagttctagttttcattctgtagttctcacccctttgttcatatttttaaagggaagaccttctgctgcttttctacaattggcagatcaggtttgtctggccaactaaggacaccaggagggttgtgggcacacctgggatgtggaagctgaggaccagatgcacacaaggcattgctctgtttgctgttctagtggtggagactcctacgtgctgttatgcttctcattttatatttccaaaccacctgagcgagtaatgtcaacttcgggagggtctggtggactttctccccactccccaagtctcagagcttttagcctggaagtttgtaaaactgattagtagttttactttaccataggatgtgagagggcagtcattcttctcactgagtttttgtttaaaaaccaggaaatttctacaatcatggagacagattttaatttgcatgctctcctttatttagttgctggggccaaacacatgaacttgttacaacaatttaaaaataataataacaaaaggaaagcaacgaatgcacttcatatagactgttagaaaaggcctttgaaaattaccagcagtgaaatcaaataaattagccactttaaactgcggtcaaaagatttttctagccatcagatgcaattacgatgtctcagagctctgctatcgcttgcatgctcggtgtacagtctcccggcaactgttttgttccaatcaacttagcaagtctttcaactttaaaattatcaatctttgatatgatcatcaaggtctctggagaagcatggatgtaatagtgatttctattttcttaaaaaatgtaaactgtggacacttaatggaaccaagctaaccaaagtatctccccgaagtttcatgatatctagtccattaactctttgggccatgacctgtggtacctagttatggtagtgcaaatcagatcagagcaaagcaatgagatcatcatgaagacatatgtccactaagtactccaattaccagcgtaggcaaaatgagcttccacctctgtccactccctgcagagccaatatagtcgtgcttccacctcgtaggcattgtcctgcagtgatttgtcggactgtggttactctgtcgtcacattttgtagaattagttctataaaagtattgtgaatacaatgtatgtccaattggattgtttaaaaactacttataattaatcactagcctactcagcagactaaaatgatgtcaacagtctatattcaggcttataaacatttcttggtttccaacagaagtcaaatgtgtttgtggggagaacgttttgctaggattttgacaactttcctgaaagctaggccttttttacataatgattttgcattggggtcaccttagtatattcacgtcaatccacgctcttctttccttcgtgaaccatagtgggctcttcactcctgctcgtaataaccacctccaaatttgttagagtgatttggtctcctctggcaggctgtggtggccacataaaggatcttccattagagggacacaggacacaaagctccattcccatgaccctctcttccctgtgtctcccctaacaaggcaatctggaagcagaaatgcaaactccagccccaccacacatccaccgatgcatttgtggctagaaattttaatctaaactttttttaaaaaaaatcataatagttaggatagtttcctatagcaaagggctccttgattcataagcacctcccccccaaaaaaaccaaattggtaaaaattcattttcttttaaatagagcaataagttcatactgtgttgccgttgtaataatgaattgttctggactagaaaacaaaatgaggcattttgttaagggggtaggaaaatgactgattgttgggccctttggcaaaagctggtgcctggtaagtagaaacgaaatggaaacagaaataacatttgtgaaatcactggagggctcaagcaaatgccagagcttctccctggcttgttcctacttgttgagctctttggccctgagtcccatccatctccactgcaacagtctgtctttctgcctacatccgcctgagaccaaggagggtctttggtacagtccacattatgaggctctgatttcctatcccagtttagggctccagaaaagccattctcccaaactaatgattcttgggtgctgtgggtcaccaacaggctgtttacaaagcagaaaatatcatcaccatcataacctttctccttgagaaaacttttatttttgtctaagcaattttatattttagaatatcatcttgaaccattataaaacaccttaaataaaagtgattgtgactaaggcacgttggagaacattccaatctttcctcccaagggttctggcaccttatgatgtactttgtaaaaaaattgattgaagattttaaataaacaggaaattagaagtgttagggttagataaaggaaaagtgaaaaagcataagaaatttgggactttttcatgttgaaaggagaaaaagcacaagttccctagttaccatttaatatgagggtgcaagagccacatttacaaacaacaaacttgatctttaaaaatgtttttaaaactctctgagtctcagtgacttcatttgtaaatgagagtgattcatctagatgactctaaggtctctttcaggtcccaggggacgtgatctaagttaggagtgggaacatgggagtggctgcttctccttggctaagcccatgcagactattgtgtccaggactggaataaaggtcctttttgctgcatcacccaggcaacactcccagccttactcaggagtggtgaacattttctgctctggacatagaataggtaggttcattcctggtcttttcactttagattctctttaggttcaagatgcagatttctcaatttggacacacctgcatcacgttggtcaaattttgctgcctgtttctagggttttcttctcagtttcatccctgccttcccttttttgttgttttttttttggttcaaggcccagcttcagttaatcccttcatctctatgccatgtctccaattcctagtatgtaactagaggttcaagagaccccaaattcctgccattttccccatttatgtttccccatgtgaatcttcaggaagtaaccagtcttccttctcacttcatttcctgtcctctgtttatttggttattttctttcattaataaactaaccatctcttagctacttacattcacaaatgtaattttaatctattgtgtttcattgtgaaagagaatctcattgaaggaaggaaggaagaaattgaggaataaaggtaggaagggagagaaacaaagactatccaaccaattgactgagatgtgagccggcttgactcctaggagactaagtagatccattcagcttgaacactgagttccagggcagaatctgtccattttctgttttgttcttacttgctgcttttggaatggtggtaaagccaccagtcaccatgagccttgaaaggaccttcactaatgaggacttgactcaccctctttaaaaagcaaaagaaacagaatttacttacaatcttctggtaaattacctttctgatcctctccttattcccaaaaggcaatttttttaatccagcagagatgatttagcatataaatcccaggtcatttgaggaggtgatgacgctatttggatttatttatgagacagtagtaattataaatgattcctaggcagtttgtactagtttggtcatattggttgtttaagtggagtctcttctgattgtttgtttccaataaagtatcagttgttaataatttcaagatttccataaaaataagaaaacttggaaaacatttttaattttatttcttaagagaccacagagcctaattttcaatttttatggtaagcttgcttaaaacatgtataaaaagaagcctacatgctcaaaggcagaggcacctttagccctacaacagttggaagctccatgatatcacagccccacatggatagattggagaaagaattctgacttagaccacctgtagcagaccttcctcttttggcatatttttttaatcacaaaaaggacctgagactccctatctaaagataagccaaacttggggtatacattaagaatctg

SEQ ID NO: 10574 - DNA, 8850 bp, Homo sapiens
  source 1..8850: mol_type = unassigned DNA
ggcgcagaccccgggcgcgggcggcccgcggcgccccctggctctcggcgctcggggccagcgcagcccggggcgagcggggcgcgggccggggagggggagctgcccgcgcactccatccccctcccccccgggcgggcggcggcggctcgctgtatatatctcggcgcaccccgccaggtcgcgcacagcgccccgagcccaggcgcctccccgcccccctcccgcgctccgcggcggcggcggcggcggcagcagtagcagcaatatggctgttgatgggtgtttggggtggcgctggcggcgggaggagctcccccgagcccctgcgccggctgcccgttgctagctatggcaaatggtggcggcggcggcggcggcagcagcggcggcggcggcggcggcggaggcagcagtcttagaatgagtagcaatatccacgcgaaccatctcagcctagacgcgtcctcctcctcctcctcctcctcttcctcttcttcttcttcctcctcctcttcctcctcgtcctcggtccacgagcccaagatggatgcgctcatcatcccggtgaccatggaggtgccgtgcgacagccggggccaacgcatgtggtgggctttcctggcctcctccatggtgactttcttcgggggcctcttcatcatcttgctctggcggacgctcaagtacctgtggaccgtgtgctgccactgcgggggcaagacgaaggaggcccagaagattaacaatggctcaagccaggcggatggcactctcaaaccagtggatgaaaaagaggaggcagtggccgccgaggtcggctggatgacctccgtgaaggactgggcgggggtgatgatatccgcccagacactgactggcagagtcctggttgtcttagtctttgctctcagcatcggtgcacttgtaatatacttcatagattcatcaaacccaatagaatcctgccagaatttctacaaagatttcacattacagatcgacatggctttcaacgtgttcttccttctctacttcggcttgcggtttattgcagccaacgataaattgtggttctggctggaagtgaactctgtagtggatttcttcacggtgccccccgtgtttgtgtctgtgtacttaaacagaagttggcttggtttgagatttttaagagctctgagactgatacagttttcagaaattttgcagtttctgaatattcttaaaacaagtaattccatcaagctggtgaatctgctctccatatttatcagcacgtggctgactgcagccgggttcatccatttggtggagaattcaggggacccatgggaaaatttccaaaacaaccaggctctcacctactgggaatgtgtctatttactcatggtcacaatgtccaccgttggttatggggatgtttatgcaaaaaccacacttgggcgcctcttcatggtcttcttcatcctcgggggactggccatgtttgccagctacgtccctgaaatcatagagttaataggaaaccgcaagaaatacgggggctcctatagtgcggttagtggaagaaagcacattgtggtctgcggacacatcactctggagagtgtttccaacttcctgaaggactttctgcacaaggaccgggatgacgtcaatgtggagatcgtttttcttcacaacatctcccccaacctggagcttgaagctctgttcaaacgacattttactcaggtggaattttatcagggttccgtcctcaatccacatgatcttgcaagagtcaagatagagtcagcagatgcatgcctgatccttgccaacaagtactgcgctgacccggatgcggaggatgcctcgaatatcatgagagtaatctccataaagaactaccatccgaagataagaatcatcactcaaatgctgcagtatcacaacaaggcccatctgctaaacatcccgagctggaattggaaagaaggtgatgacgcaatctgcctcgcagagttgaagttgggcttcatagcccagagctgcctggctcaaggcctctccaccatgcttgccaacctcttctccatgaggtcattcataaagattgaggaagacacatggcagaaatactacttggaaggagtctcaaatgaaatgtacacagaatatctctccagtgccttcgtgggtctgtccttccctactgtttgtgagctgtgttttgtgaagctcaagctcctaatgatagccattgagtacaagtctgccaaccgagagagccgtatattaattaatcctggaaaccatcttaagatccaagaaggtactttaggatttttcatcgcaagtgatgccaaagaagttaaaagggcatttttttactgcaaggcctgtcatgatgacatcacagatcccaaaagaataaaaaaatgtggctgcaaacggcttgaagatgagcagccgtcaacactatcaccaaaaaaaaagcaacggaatggaggcatgcggaactcacccaacacctcgcctaagctgatgaggcatgaccccttgttaattcctggcaatgatcagattgacaacatggactccaatgtgaagaagtacgactctactgggatgtttcactggtgtgcacccaaggagatagagaaagtcatcctgactcgaagtgaagctgccatgaccgtcctgagtggccatgtcgtggtctgcatctttggcgacgtcagctcagccctgatcggcctccggaacctggtgatgccgctccgtgccagcaactttcattaccatgagctcaagcacattgtgtttgtgggctctattgagtacctcaagcgggaatgggagacgcttcataacttccccaaagtgtccatattgcctggtacgccattaagtcgggctgatttaagggctgtcaacatcaacctctgtgacatgtgcgttatcctgtcagccaatcagaataatattgatgatacttcgctgcaggacaaggaatgcatcttggcgtcactcaacatcaaatctatgcagtttgatgacagcatcggagtcttgcaggctaattcccaagggttcacacctccaggaatggatagatcctctccagataacagcccagtgcacgggatgttacgtcaaccatccatcacaactggggtcaacatccccatcatcactgaactagtgaacgatactaatgttcagtttttggaccaagacgatgatgatgaccctgatacagaactgtacctcacgcagccctttgcctgtgggacagcatttgccgtcagtgtcctggactcactcatgagcgcgacgtacttcaatgacaatatcctcaccctgatacggaccctggtgaccggaggagccacgccggagctggaggctctgattgctgaggaaaacgcccttagaggtggctacagcaccccgcagacactggccaatagggaccgctgccgcgtggcccagttagctctgctcgatgggccatttgcggacttaggggatggtggttgttatggtgatctgttctgcaaagctctgaaaacatataatatgctttgttttggaatttaccggctgagagatgctcacctcagcacccccagtcagtgcacaaagaggtatgtcatcaccaacccgccctatgagtttgagctcgtgccgacggacctgatcttctgcttaatgcagtttgaccacaatgccggccagtcccgggccagcctgtcccattcctcccactcgtcgcagtcctccagcaagaagagctcctctgttcactccatcccatccacagcaaaccgacagaaccggcccaagtccagggagtcccgggacaaacagaaaaaagaaatggtttacagatgaaccggataatgcctatcccagaaacattcaaatcaagcccatgagtacccacatggctaaccagatcaaccaatataaatccacaagcagcttgattccaccaatcagagaagttgaagatgaatgttgactcccaggagaccagaactatttttttaaagcctgacaaacttcataaatggtgatgtgacttttcttcttacatgctgaatcactggtggaaacgttaggataagcaagaattgccagaaaataaagtagacagatctttctctttgtctgccttgaatattgcttccatgtattttggaaaagaaaatgatttcatttataaatgaacatactaaaatagtcatgtatagcctctagcattttaaattatttttatttattagaaagaaaatatattttttcttttcattgtcaaatatcttccctatatctaaacaatgcaaaatctaaatgaataagtggtcagactccttaatgtgtttttctcttctttctctctttttctttgaggagaatgatggtcaccaccacaattaattgtaattaagggaaatgaattattaaaacaattttaaaatggccaatgatgtatacatgtattttagtaaatccagaaaagaagactaaggggacaggtgaatacctgctcctcgcctggatgggtgtgtattttgatctgcattgacaccagctcttaataaatggaaacttatttattttcacagttgaaagtcatatttttgtagttctagttttcattctgtagttctcacccctttgttcatatttttaaagggaagaccttctgctgcttttctacaattggcagatcaggtttgtctggccaactaaggacaccaggagggttgtgggcacacctgggatgtggaagctgaggaccagatgcacacaaggcattgctctgtttgctgttctagtggtggagactcctacgtgctgttatgcttctcattttatatttccaaaccacctgagcgagtaatgtcaacttcgggagggtctggtggactttctccccactccccaagtctcagagcttttagcctggaagtttgtaaaactgattagtagttttactttaccataggatgtgagagggcagtcattcttctcactgagtttttgtttaaaaaccaggaaatttctacaatcatggagacagattttaatttgcatgctctcctttatttagttgctggggccaaacacatgaacttgttacaacaatttaaaaataataataacaaaaggaaagcaacgaatgcacttcatatagactgttagaaaaggcctttgaaaattaccagcagtgaaatcaaataaattagccactttaaactgcggtcaaaagatttttctagccatcagatgcaattacgatgtctcagagctctgctatcgcttgcatgctcggtgtacagtctcccggcaactgttttgttccaatcaacttagcaagtctttcaactttaaaattatcaatctttgatatgatcatcaaggtctctggagaagcatggatgtaatagtgatttctattttcttaaaaaatgtaaactgtggacacttaatggaaccaagctaaccaaagtatctccccgaagtttcatgatatctagtccattaactctttgggccatgacctgtggtacctagttatggtagtgcaaatcagatcagagcaaagcaatgagatcatcatgaagacatatgtccactaagtactccaattaccagcgtaggcaaaatgagcttccacctctgtccactccctgcagagccaatatagtcgtgcttccacctcgtaggcattgtcctgcagtgatttgtcggactgtggttactctgtcgtcacattttgtagaattagttctataaaagtattgtgaatacaatgtatgtccaattggattgtttaaaaactacttataattaatcactagcctactcagcagactaaaatgatgtcaacagtctatattcaggcttataaacatttcttggtttccaacagaagtcaaatgtgtttgtggggagaacgttttgctaggattttgacaactttcctgaaagctaggccttttttacataatgattttgcattggggtcaccttagtatattcacgtcaatccacgctcttctttccttcgtgaaccatagtgggctcttcactcctgctcgtaataaccacctccaaatttgttagagtgatttggtctcctctggcaggctgtggtggccacataaaggatcttccattagagggacacaggacacaaagctccattcccatgaccctctcttccctgtgtctcccctaacaaggcaatctggaagcagaaatgcaaactccagccccaccacacatccaccgatgcatttgtggctagaaattttaatctaaactttttttaaaaaaaatcataatagttaggatagtttcctatagcaaagggctccttgattcataagcacctcccccccaaaaaaaccaaattggtaaaaattcattttcttttaaatagagcaataagttcatactgtgttgccgttgtaataatgaattgttctggactagaaaacaaaatgaggcattttgttaagggggtaggaaaatgactgattgttgggccctttggcaaaagctggtgcctggtaagtagaaacgaaatggaaacagaaataacatttgtgaaatcactggagggctcaagcaaatgccagagcttctccctggcttgttcctacttgttgagctctttggccctgagtcccatccatctccactgcaacagtctgtctttctgcctacatccgcctgagaccaaggagggtctttggtacagtccacattatgaggctctgatttcctatcccagtttagggctccagaaaagccattctcccaaactaatgattcttgggtgctgtgggtcaccaacaggctgtttacaaagcagaaaatatcatcaccatcataacctttctccttgagaaaacttttatttttgtctaagcaattttatattttagaatatcatcttgaaccattataaaacaccttaaataaaagtgattgtgactaaggcacgttggagaacattccaatctttcctcccaagggttctggcaccttatgatgtactttgtaaaaaaattgattgaagattttaaataaacaggaaattagaagtgttagggttagataaaggaaaagtgaaaaagcataagaaatttgggactttttcatgttgaaaggagaaaaagcacaagttccctagttaccatttaatatgagggtgcaagagccacatttacaaacaacaaacttgatctttaaaaatgtttttaaaactctctgagtctcagtgacttcatttgtaaatgagagtgattcatctagatgactctaaggtctctttcaggtcccaggggacgtgatctaagttaggagtgggaacatgggagtggctgcttctccttggctaagcccatgcagactattgtgtccaggactggaataaaggtcctttttgctgcatcacccaggcaacactcccagccttactcaggagtggtgaacattttctgctctggacatagaataggtaggttcattcctggtcttttcactttagattctctttaggttcaagatgcagatttctcaatttggacacacctgcatcacgttggtcaaattttgctgcctgtttctagggttttcttctcagtttcatccctgccttcccttttttgttgttttttttttggttcaaggcccagcttcagttaatcccttcatctctatgccatgtctccaattcctagtatgtaactagaggttcaagagaccccaaattcctgccattttccccatttatgtttccccatgtgaatcttcaggaagtaaccagtcttccttctcacttcatttcctgtcctctgtttatttggttattttctttcattaataaactaaccatctcttagctacttacattcacaaatgtaattttaatctattgtgtttcattgtgaaagagaatctcattgaaggaaggaaggaagaaattgaggaataaaggtaggaagggagagaaacaaagactatccaaccaattgactgagatgtgagccggcttgactcctaggagactaagtagatccattcagcttgaacactgagttccagggcagaatctgtccattttctgttttgttcttacttgctgcttttggaatggtggtaaagccaccagtcaccatgagccttgaaaggaccttcactaatgaggacttgactcaccctctttaaaaagcaaaagaaacagaatttacttacaatcttctggtaaattacctttctgatcctctccttattcccaaaaggcaatttttttaatccagcagagatgatttagcatataaatcccaggtcatttgaggaggtgatgacgctatttggatttatttatgagacagtagtaattataaatgattcctaggcagtttgtactagtttggtcatattggttgtttaagtggagtctcttctgattgtttgtttccaataaagtatcagttgttaataatttcaagatttccataaaaataagaaaacttggaaaacatttttaattttatttcttaagagaccacagagcctaattttcaatttttatggtaagcttgcttaaaacatgtataaaaagaagcctacatgctcaaaggcagaggcacctttagccctacaacagttggaagctccatgatatcacagccccacatggatagattggagaaagaattctgacttagaccacctgtagcagaccttcctcttttggcatatttttttaatcacaaaaaggacctgagactccctatctaaagataagccaaacttggggtatacattaagaatctg

SEQ ID NO: 10575 - DNA, 4711 bp, Homo sapiens
  source 1..4711: mol_type = unassigned DNA
atggatgcgctcatcatcccggtgaccatggaggtgccgtgcgacagccggggccaacgcatgtggtgggctttcctggcctcctccatggtgactttcttcgggggcctcttcatcatcttgctctggcggacgctcaagtacctgtggaccgtgtgctgccactgcgggggcaagacgaaggaggcccagaagattaacaatggctcaagccaggcggatggcactctcaaaccagtggatgaaaaagaggaggcagtggccgccgaggtcggctggatgacctccgtgaaggactgggcgggggtgatgatatccgcccagacactgactggcagagtcctggttgtcttagtctttgctctcagcatcggtgcacttgtaatatacttcatagattcatcaaacccaatagaatcctgccagaatttctacaaagatttcacattacagatcgacatggctttcaacgtgttcttccttctctacttcggcttgcggtttattgcagccaacgataaattgtggttctggctggaagtgaactctgtagtggatttcttcacggtgccccccgtgtttgtgtctgtgtacttaaacagaagttggcttggtttgagatttttaagagctctgagactgatacagttttcagaaattttgcagtttctgaatattcttaaaacaagtaattccatcaagctggtgaatctgctctccatatttatcagcacgtggctgactgcagccgggttcatccatttggtggagaattcaggggacccatgggaaaatttccaaaacaaccaggctctcacctactgggaatgtgtctatttactcatggtcacaatgtccaccgttggttatggggatgtttatgcaaaaaccacacttgggcgcctcttcatggtcttcttcatcctcgggggactggccatgtttgccagctacgtccctgaaatcatagagttaataggaaaccgcaagaaatacgggggctcctatagtgcggttagtggaagaaagcacattgtggtctgcggacacatcactctggagagtgtttccaacttcctgaaggactttctgcacaaggaccgggatgacgtcaatgtggagatcgtttttcttcacaacatctcccccaacctggagcttgaagctctgttcaaacgacattttactcaggtggaattttatcagggttccgtcctcaatccacatgatcttgcaagagtcaagatagagtcagcagatgcatgcctgatccttgccaacaagtactgcgctgacccggatgcggaggatgcctcgaatatcatgagagtaatctccataaagaactaccatccgaagataagaatcatcactcaaatgctgcagtatcacaacaaggcccatctgctaaacatcccgagctggaattggaaagaaggtgatgacgcaatctgcctcgcagagttgaagttgggcttcatagcccagagctgcctggctcaaggcctctccaccatgcttgccaacctcttctccatgaggtcattcataaagattgaggaagacacatggcagaaatactacttggaaggagtctcaaatgaaatgtacacagaatatctctccagtgccttcgtgggtctgtccttccctactgtttgtgagctgtgttttgtgaagctcaagctcctaatgatagccattgagtacaagtctgccaaccgagagagccgtatattaattaatcctggaaaccatcttaagatccaagaaggtactttaggatttttcatcgcaagtgatgccaaagaagttaaaagggcatttttttactgcaaggcctgtcatgatgacatcacagatcccaaaagaataaaaaaatgtggctgcaaacggctgatatattttgaagatgagcagccgtcaacactatcaccaaaaaaaaagcaacggaatggaggcatgcggaactcacccaacacctcgcctaagctgatgaggcatgaccccttgttaattcctggcaatgatcagattgacaacatggactccaatgtgaagaagtacgactctactgggatgtttcactggtgtgcacccaaggagatagagaaagtcatcctgactcgaagtgaagctgccatgaccgtcctgagtggccatgtcgtggtctgcatctttggcgacgtcagctcagccctgatcggcctccggaacctggtgatgccgctccgtgccagcaactttcattaccatgagctcaagcacattgtgtttgtgggctctattgagtacctcaagcgggaatgggagacgcttcataacttccccaaagtgtccatattgcctggtacgccattaagtcgggctgatttaagggctgtcaacatcaacctctgtgacatgtgcgttatcctgtcagccaatcagaataatattgatgatacttcgctgcaggacaaggaatgcatcttggcgtcactcaacatcaaatctatgcagtttgatgacagcatcggagtcttgcaggctaattcccaagggttcacacctccaggaatggatagatcctctccagataacagcccagtgcacgggatgttacgtcaaccatccatcacaactggggtcaacatccccatcatcactgaactagctaaaccgggcaagttgcctttggtatcagtcaatcaggaaaaaaacagtgggacgcacattctaatgataactgaactggtgaacgatactaatgttcagtttttggaccaagacgatgatgatgaccctgatacagaactgtacctcacgcagccctttgcctgtgggacagcatttgccgtcagtgtcctggactcactcatgagcgcgacgtacttcaatgacaatatcctcaccctgatacggaccctggtgaccggaggagccacgccggagctggaggctctgattgctgaggaaaacgcccttagaggtggctacagcaccccgcagacactggccaatagggaccgctgccgcgtggcccagttagctctgctcgatgggccatttgcggacttaggggatggtggttgttatggtgatctgttctgcaaagctctgaaaacatataatatgctttgttttggaatttaccggctgagagatgctcacctcagcacccccagtcagtgcacaaagaggtatgtcatcaccaacccgccctatgagtttgagctcgtgccgacggacctgatcttctgcttaatgcagtttgaccacaatgccggccagtcccgggccagcctgtcccattcctcccactcgtcgcagtcctccagcaagaagagctcctctgttcactccatcccatccacagcaaaccgacagaaccggcccaagtccagggagtcccgggacaaacagaatgcaacaaggatgaatagaatgggccaagcagaaaagaaatggtttacagatgaaccggataatgcctatcccagaaacattcaaatcaagcccatgagtacccacatggctaaccagatcaaccaatataaatccacaagcagcttgattccaccaatcagagaagttgaagatgaatgttgactcccaggagaccagaactatttttttaaagcctgacaaacttcataaatggtgatgtgacttttcttcttacatgctgaatcactggtggaaacgttaggataagcaagaattgccagaaaataaagtagacagatctttctctttgtctgccttgaatattgcttccatgtattttggaaaagaaaatgatttcatttataaatgaacatactaaaatagtcatgtatagcctctagcattttaaattatttttatttattagaaagaaaatatattttttcttttcattgtcaaatatcttccctatatctaaacaatgcaaaatctaaatgaataagtggtcagactccttaatgtgtttttctcttctttctctctttttctttgaggagaatgatggtcaccaccacaattaattgtaattaagggaaatgaattattaaaacaattttaaaatggccaatgatgtatacatgtattttagtaaatccagaaaagaagactaaggggacaggtgaatacctgctcctcgcctggatgggtgtgtattttgatctgcattgacaccagctcttaataaatggaaacttatttattttcacagttgaaagtcatatttttgtagttctagttttcattctgtagttctcacccctttgttcatatttttaaagggaagaccttctgctgcttttctacaattggcagatcaggtttgtctggccaactaaggacaccaggagggttgtgggcacacctgggatgtggaagctgaggaccagatgcacacaaggcattgctctgtttgctgttctagtggtggagactcctacgtgctgttatgcttctcattttatatttccaaaccacctgagcgagtaatgtcaacttcgggagggtctggtggactttctccccactccccaagtctcagagcttttagcctggaagtttgtaaaactgattagtagttttactttaccataggatgtgagagggcagtcattcttctcactgagtttttgtttaaaaaccaggaaatttctacaatcatggagacagattttaatttgcatgctctcctttatttagttgctggggccaaacacatgaactt

SEQ ID NO: 10576 - DNA, 5425 bp, Homo sapiens
  source 1..5425: mol_type = unassigned DNA
gcgggaggcgctcggggaagggggtcaccggccgagcgcagcgcacacccgtggcgcacggcgggcggcgcggcgccgaggacacccgggaccgcgcgcggagccggggcgggcccgggggcggcgcagaccccgggcgcgggcggcccgcggcgccccctggctctcggcgctcggggccagcgcagcccggggcgagcggggcgcgggccggggagggggagctgcccgcgcactccatccccctcccccccgggcgggcggcggcggctcgctgtatatatctcggcgcaccccgccaggtcgcgcacagcgccccgagcccaggcgcctccccgcccccctcccgcgctccgcggcggcggcggcggcggcagcagtagcagcaatatggctgttgatgggtgtttggggtggcgctggcggcgggaggagctcccccgagcccctgcgccggctgcccgttgctagctatggcaaatggtggcggcggcggcggcggcagcagcggcggcggcggcggcggcggaggcagcagtcttagaatgagtagcaatatccacgcgaaccatctcagcctagacgcgtcctcctcctcctcctcctcctcttcctcttcttcttcttcctcctcctcttcctcctcgtcctcggtccacgagcccaagatggatgcgctcatcatcccggtgaccatggaggtgccgtgcgacagccggggccaacgcatgtggtgggctttcctggcctcctccatggtgactttcttcgggggcctcttcatcatcttgctctggcggacgctcaagtacctgtggaccgtgtgctgccactgcgggggcaagacgaaggaggcccagaagattaacaatggctcaagccaggcggatggcactctcaaaccagtggatgaaaaagaggaggcagtggccgccgaggtcggctggatgacctccgtgaaggactgggcgggggtgatgatatccgcccagacactgactggcagagtcctggttgtcttagtctttgctctcagcatcggtgcacttgtaatatacttcatagattcatcaaacccaatagaatcctgccagaatttctacaaagatttcacattacagatcgacatggctttcaacgtgttcttccttctctacttcggcttgcggtttattgcagccaacgataaattgtggttctggctggaagtgaactctgtagtggatttcttcacggtgccccccgtgtttgtgtctgtgtacttaaacagaagttggcttggtttgagatttttaagagctctgagactgatacagttttcagaaattttgcagtttctgaatattcttaaaacaagtaattccatcaagctggtgaatctgctctccatatttatcagcacgtggctgactgcagccgggttcatccatttggtggagaattcaggggacccatgggaaaatttccaaaacaaccaggctctcacctactgggaatgtgtctatttactcatggtcacaatgtccaccgttggttatggggatgtttatgcaaaaaccacacttgggcgcctcttcatggtcttcttcatcctcgggggactggccatgtttgccagctacgtccctgaaatcatagagttaataggaaaccgcaagaaatacgggggctcctatagtgcggttagtggaagaaagcacattgtggtctgcggacacatcactctggagagtgtttccaacttcctgaaggactttctgcacaaggaccgggatgacgtcaatgtggagatcgtttttcttcacaacatctcccccaacctggagcttgaagctctgttcaaacgacattttactcaggtggaattttatcagggttccgtcctcaatccacatgatcttgcaagagtcaagatagagtcagcagatgcatgcctgatccttgccaacaagtactgcgctgacccggatgcggaggatgcctcgaatatcatgagagtaatctccataaagaactaccatccgaagataagaatcatcactcaaatgctgcagtatcacaacaaggcccatctgctaaacatcccgagctggaattggaaagaaggtgatgacgcaatctgcctcgcagagttgaagttgggcttcatagcccagagctgcctggctcaaggcctctccaccatgcttgccaacctcttctccatgaggtcattcataaagattgaggaagacacatggcagaaatactacttggaaggagtctcaaatgaaatgtacacagaatatctctccagtgccttcgtgggtctgtccttccctactgtttgtgagctgtgttttgtgaagctcaagctcctaatgatagccattgagtacaagtctgccaaccgagagagccgaagccgaaagcgtatattaattaatcctggaaaccatcttaagatccaagaaggtactttaggatttttcatcgcaagtgatgccaaagaagttaaaagggcatttttttactgcaaggcctgtcatgatgacatcacagatcccaaaagaataaaaaaatgtggctgcaaacggctgatatattccaagatgtccatctacaagagaatgagacgggcatgttgttttgattgcggacgttctgagcgtgactgctcatgcatgtcaggccgtgtgcgtggtaacgtggacacccttgagagagccttcccactttcttctgtctctgttaatgattgctccaccagtttccgtgcctttgaagatgagcagccgtcaacactatcaccaaaaaaaaagcaacggaatggaggcatgcggaactcacccaacacctcgcctaagctgatgaggcatgaccccttgttaattcctggcaatgatcagattgacaacatggactccaatgtgaagaagtacgactctactgggatgtttcactggtgtgcacccaaggagatagagaaagtcatcctgactcgaagtgaagctgccatgaccgtcctgagtggccatgtcgtggtctgcatctttggcgacgtcagctcagccctgatcggcctccggaacctggtgatgccgctccgtgccagcaactttcattaccatgagctcaagcacattgtgtttgtgggctctattgagtacctcaagcgggaatgggagacgcttcataacttccccaaagtgtccatattgcctggtacgccattaagtcgggctgatttaagggctgtcaacatcaacctctgtgacatgtgcgttatcctgtcagccaatcagaataatattgatgatacttcgctgcaggacaaggaatgcatcttggcgtcactcaacatcaaatctatgcagtttgatgacagcatcggagtcttgcaggctaattcccaagggttcacacctccaggaatggatagatcctctccagataacagcccagtgcacgggatgttacgtcaaccatccatcacaactggggtcaacatccccatcatcactgaactagtgaacgatactaatgttcagtttttggaccaagacgatgatgatgaccctgatacagaactgtacctcacgcagccctttgcctgtgggacagcatttgccgtcagtgtcctggactcactcatgagcgcgacgtacttcaatgacaatatcctcaccctgatacggaccctggtgaccggaggagccacgccggagctggaggctctgattgctgaggaaaacgcccttagaggtggctacagcaccccgcagacactggccaatagggaccgctgccgcgtggcccagttagctctgctcgatgggccatttgcggacttaggggatggtggttgttatggtgatctgttctgcaaagctctgaaaacatataatatgctttgttttggaatttaccggctgagagatgctcacctcagcacccccagtcagtgcacaaagaggtatgtcatcaccaacccgccctatgagtttgagctcgtgccgacggacctgatcttctgcttaatgcagtttgaccacaatgccggccagtcccgggccagcctgtcccattcctcccactcgtcgcagtcctccagcaagaagagctcctctgttcactccatcccatccacagcaaaccgacagaaccggcccaagtccagggagtcccgggacaaacagaaaaaagaaatggtttacagatgaaccggataatgcctatcccagaaacattcaaatcaagcccatgagtacccacatggctaaccagatcaaccaatataaatccacaagcagcttgattccaccaatcagagaagttgaagatgaatgttgactcccaggagaccagaactatttttttaaagcctgacaaacttcataaatggtgatgtgacttttcttcttacatgctgaatcactggtggaaacgttaggataagcaagaattgccagaaaataaagtagacagatctttctctttgtctgccttgaatattgcttccatgtattttggaaaagaaaatgatttcatttataaatgaacatactaaaatagtcatgtatagcctctagcattttaaattatttttatttattagaaagaaaatatattttttcttttcattgtcaaatatcttccctatatctaaacaatgcaaaatctaaatgaataagtggtcagactccttaatgtgtttttctcttctttctctctttttctttgaggagaatgatggtcaccaccacaattaattgtaattaagggaaatgaattattaaaacaattttaaaatggccaatgatgtatacatgtattttagtaaatccagaaaagaagactaaggggacaggtgaatacctgctcctcgcctggatgggtgtgtattttgatctgcattgacaccagctcttaataaatggaaacttatttattttcacagttgaaagtcatatttttgtagttctagttttcattctgtagttctcacccctttgttcatatttttaaagggaagaccttctgctgcttttctacaattggcagatcaggtttgtctggccaactaaggacaccaggagggttgtgggcacacctgggatgtggaagctgaggaccagatgcacacaaggcattgctctgtttgctgttctagtggtggagactcctacgtgctgttatgcttctcattttatatttccaaaccacctgagcgagtaatgtcaacttcgggagggtctggtggactttctccccactccccaagtctcagagcttttagcctggaagtttgtaaaactgattagtagttttactttaccataggatgtgagagggcagtcattcttctcactgagtttttgtttaaaaaccaggaaatttctacaatcatggagacagattttaatttgcatgctctcctttattt

SEQ ID NO: 10577 - DNA, 5059 bp, Homo sapiens
  source 1..5059: mol_type = unassigned DNA
gcgagcggaggccgaggggctcagcggcgtggcgacaggactagggggtcccgagaacatgggctagcaggcggccacgggccggcggccggacgcggtgaacctgccgcggccgggcgcgcactggcgcggcgagccggagccgagcgcagccgggggaggagggctggcgcaggggcgcccgggcggagggggccgattatccattattaacgagttaccacctaataagcggagagcggctcgttagccgcgcgggaggcgctcggggaagggggtcaccggccgagcgcagcgcacacccgtggcgcacggcgggcggcgcggcgccgaggacacccgggaccgcgcgcggagccggggcgggcccgggggcggcgcagaccccgggcgcgggcggcccgcggcgccccctggctctcggcgctcggggccagcgcagcccggggcgagcggggcgcgggccggggagggggagctgcccgcgcactccatccccctcccccccgggcgggcggcggcggctcgctgtatatatctcggcgcaccccgccaggtcgcgcacagcgccccgagcccaggcgcctccccgcccccctcccgcgctccgcggcggcggcggcggcggcagcagtagcagcaatatggctgttgatgggtgtttggggtggcgctggcggcgggaggagctcccccgagcccctgcgccggctgcccgttgctagctatggcaaatggtggcggcggcggcggcggcagcagcggcggcggcggcggcggcggaggcagcagtcttagaatgagtagcaatatccacgcgaaccatctcagcctagacgcgtcctcctcctcctcctcctcctcttcctcttcttcttcttcctcctcctcttcctcctcgtcctcggtccacgagcccaagatggatgcgctcatcatcccggtgaccatggaggtgccgtgcgacagccggggccaacgcatgtggtgggctttcctggcctcctccatggtgactttcttcgggggcctcttcatcatcttgctctggcggacgctcaagtacctgtggaccgtgtgctgccactgcgggggcaagacgaaggaggcccagaagattaacaatggctcaagccaggcggatggcactctcaaaccagtggatgaaaaagaggaggcagtggccgccgaggtcggctggatgacctccgtgaaggactgggcgggggtgatgatatccgcccagacactgactggcagagtcctggttgtcttagtctttgctctcagcatcggtgcacttgtaatatacttcatagattcatcaaacccaatagaatcctgccagaatttctacaaagatttcacattacagatcgacatggctttcaacgtgttcttccttctctacttcggcttgcggtttattgcagccaacgataaattgtggttctggctggaagtgaactctgtagtggatttcttcacggtgccccccgtgtttgtgtctgtgtacttaaacagaagttggcttggtttgagatttttaagagctctgagactgatacagttttcagaaattttgcagtttctgaatattcttaaaacaagtaattccatcaagctggtgaatctgctctccatatttatcagcacgtggctgactgcagccgggttcatccatttggtggagaattcaggggacccatgggaaaatttccaaaacaaccaggctctcacctactgggaatgtgtctatttactcatggtcacaatgtccaccgttggttatggggatgtttatgcaaaaaccacacttgggcgcctcttcatggtcttcttcatcctcgggggactggccatgtttgccagctacgtccctgaaatcatagagttaataggaaaccgcaagaaatacgggggctcctatagtgcggttagtggaagaaagcacattgtggtctgcggacacatcactctggagagtgtttccaacttcctgaaggactttctgcacaaggaccgggatgacgtcaatgtggagatcgtttttcttcacaacatctcccccaacctggagcttgaagctctgttcaaacgacattttactcaggtggaattttatcagggttccgtcctcaatccacatgatcttgcaagagtcaagatagagtcagcagatgcatgcctgatccttgccaacaagtactgcgctgacccggatgcggaggatgcctcgaatatcatgagagtaatctccataaagaactaccatccgaagataagaatcatcactcaaatgctgcagtatcacaacaaggcccatctgctaaacatcccgagctggaattggaaagaaggtgatgacgcaatctgcctcgcagagttgaagttgggcttcatagcccagagctgcctggctcaaggcctctccaccatgcttgccaacctcttctccatgaggtcattcataaagattgaggaagacacatggcagaaatactacttggaaggagtctcaaatgaaatgtacacagaatatctctccagtgccttcgtgggtctgtccttccctactgtttgtgagctgtgttttgtgaagctcaagctcctaatgatagccattgagtacaagtctgccaaccgagagagccgaagccgaaagcgtatattaattaatcctggaaaccatcttaagatccaagaaggtactttaggatttttcatcgcaagtgatgccaaagaagttaaaagggcatttttttactgcaaggcctgtcatgatgacatcacagatcccaaaagaataaaaaaatgtggctgcaaacggcttgaagatgagcagccgtcaacactatcaccaaaaaaaaagcaacggaatggaggcatgcggaactcacccaacacctcgcctaagctgatgaggcatgaccccttgttaattcctggcaatgatcagattgacaacatggactccaatgtgaagaagtacgactctactgggatgtttcactggtgtgcacccaaggagatagagaaagtcatcctgactcgaagtgaagctgccatgaccgtcctgagtggccatgtcgtggtctgcatctttggcgacgtcagctcagccctgatcggcctccggaacctggtgatgccgctccgtgccagcaactttcattaccatgagctcaagcacattgtgtttgtgggctctattgagtacctcaagcgggaatgggagacgcttcataacttccccaaagtgtccatattgcctggtacgccattaagtcgggctgatttaagggctgtcaacatcaacctctgtgacatgtgcgttatcctgtcagccaatcagaataatattgatgatacttcgctgcaggacaaggaatgcatcttggcgtcactcaacatcaaatctatgcagtttgatgacagcatcggagtcttgcaggctaattcccaagggttcacacctccaggaatggatagatcctctccagataacagcccagtgcacgggatgttacgtcaaccatccatcacaactggggtcaacatccccatcatcactgaactagctaaaccgggcaagttgcctttggtatcagtcaatcaggaaaaaaacagtgggacgcacattctaatgataactgaactggtgaacgatactaatgttcagtttttggaccaagacgatgatgatgaccctgatacagaactgtacctcacgcagccctttgcctgtgggacagcatttgccgtcagtgtcctggactcactcatgagcgcgacgtacttcaatgacaatatcctcaccctgatacggaccctggtgaccggaggagccacgccggagctggaggctctgattgctgaggaaaacgcccttagaggtggctacagcaccccgcagacactggccaatagggaccgctgccgcgtggcccagttagctctgctcgatgggccatttgcggacttaggggatggtggttgttatggtgatctgttctgcaaagctctgaaaacatataatatgctttgttttggaatttaccggctgagagatgctcacctcagcacccccagtcagtgcacaaagaggtatgtcatcaccaacccgccctatgagtttgagctcgtgccgacggacctgatcttctgcttaatgcagtttgaccacaatgccggccagtcccgggccagcctgtcccattcctcccactcgtcgcagtcctccagcaagaagagctcctctgttcactccatcccatccacagcaaaccgacagaaccggcccaagtccagggagtcccgggacaaacagaacagaaaagaaatggtttacagatgaaccggataatgcctatcccagaaacattcaaatcaagcccatgagtacccacatggctaaccagatcaaccaatataaatccacaagcagcttgattccaccaatcagagaagttgaagatgaatgttgactcccaggagaccagaactatttttttaaagcctgacaaacttcataaatggtgatgtgacttttcttcttacatgctgaatcactggtggaaacgttaggataagcaagaattgccagaaaataaagtagacagatctttctctttgtctgccttgaatattgcttccatgtattttggaaaagaaaatgatttcatttataaatgaacatactaaaatagtcatgtatagcctctagcattttaaattatttttatttattagaaagaaaatatattttttcttttcattgtcaaatatcttccctatatctaaacaatgcaaaatctaaatgaataagtggtcagactccttaatgtgtttttctcttctttctctctttttctttgaggagaatgatggtcaccaccacaattaattgtaattaagggaaatgaattattaaaacaattttaaaatggccaatgatgtatacatgtattttagtaaatccagaaaagaagactaaggggacaggtgaatacctgctcctcgcctggatgggtgtgtattttgatctgcattgacacca

SEQ ID NO: 10578 - DNA, 4340 bp, Homo sapiens
  source 1..4340: mol_type = unassigned DNA
atggcaaatggtggcggcggcggcggcggcagcagcggcggcggcggcggcggcggaggcagcagtcttagaatgagtagcaatatccacgcgaaccatctcagcctagacgcgtcctcctcctcctcctcctcctcttcctcttcttcttcttcctcctcctcttcctcctcgtcctcggtccacgagcccaagatggatgcgctcatcatcccggtgaccatggaggtgccgtgcgacagccggggccaacgcatgtggtgggctttcctggcctcctccatggtgactttcttcgggggcctcttcatcatcttgctctggcggacgctcaagtacctgtggaccgtgtgctgccactgcgggggcaagacgaaggaggcccagaagattaacaatggctcaagccaggcggatggcactctcaaaccagtggatgaaaaagaggaggcagtggccgccgaggtcggctggatgacctccgtgaaggactgggcgggggtgatgatatccgcccagacactgactggcagagtcctggttgtcttagtctttgctctcagcatcggtgcacttgtaatatacttcatagattcatcaaacccaatagaatcctgccagaatttctacaaagatttcacattacagatcgacatggctttcaacgtgttcttccttctctacttcggcttgcggtttattgcagccaacgataaattgtggttctggctggaagtgaactctgtagtggatttcttcacggtgccccccgtgtttgtgtctgtgtacttaaacagaagttggcttggtttgagatttttaagagctctgagactgatacagttttcagaaattttgcagtttctgaatattcttaaaacaagtaattccatcaagctggtgaatctgctctccatatttatcagcacgtggctgactgcagccgggttcatccatttggtggagaattcaggggacccatgggaaaatttccaaaacaaccaggctctcacctactgggaatgtgtctatttactcatggtcacaatgtccaccgttggttatggggatgtttatgcaaaaaccacacttgggcgcctcttcatggtcttcttcatcctcgggggactggccatgtttgccagctacgtccctgaaatcatagagttaataggaaaccgcaagaaatacgggggctcctatagtgcggttagtggaagaaagcacattgtggtctgcggacacatcactctggagagtgtttccaacttcctgaaggactttctgcacaaggaccgggatgacgtcaatgtggagatcgtttttcttcacaacatctcccccaacctggagcttgaagctctgttcaaacgacattttactcaggtggaattttatcagggttccgtcctcaatccacatgatcttgcaagagtcaagatagagtcagcagatgcatgcctgatccttgccaacaagtactgcgctgacccggatgcggaggatgcctcgaatatcatgagagtaatctccataaagaactaccatccgaagataagaatcatcactcaaatgctgcagtatcacaacaaggcccatctgctaaacatcccgagctggaattggaaagaaggtgatgacgcaatctgcctcgcagagttgaagttgggcttcatagcccagagctgcctggctcaaggcctctccaccatgcttgccaacctcttctccatgaggtcattcataaagattgaggaagacacatggcagaaatactacttggaaggagtctcaaatgaaatgtacacagaatatctctccagtgccttcgtgggtctgtccttccctactgtttgtgagctgtgttttgtgaagctcaagctcctaatgatagccattgagtacaagtctgccaaccgagagagccgaagccgaaagcgtatattaattaatcctggaaaccatcttaagatccaagaaggtactttaggatttttcatcgcaagtgatgccaaagaagttaaaagggcatttttttactgcaaggcctgtcatgatgacatcacagatcccaaaagaataaaaaaatgtggctgcaaacggctgatatattttgaagatgagcagccgtcaacactatcaccaaaaaaaaagcaacggaatggaggcatgcggaactcacccaacacctcgcctaagctgatgaggcatgaccccttgttaattcctggcaatgatcagattgacaacatggactccaatgtgaagaagtacgactctactgggatgtttcactggtgtgcacccaaggagatagagaaagtcatcctgactcgaagtgaagctgccatgaccgtcctgagtggccatgtcgtggtctgcatctttggcgacgtcagctcagccctgatcggcctccggaacctggtgatgccgctccgtgccagcaactttcattaccatgagctcaagcacattgtgtttgtgggctctattgagtacctcaagcgggaatgggagacgcttcataacttccccaaagtgtccatattgcctggtacgccattaagtcgggctgatttaagggctgtcaacatcaacctctgtgacatgtgcgttatcctgtcagccaatcagaataatattgatgatacttcgctgcaggacaaggaatgcatcttggcgtcactcaacatcaaatctatgcagtttgatgacagcatcggagtcttgcaggctaattcccaagggttcacacctccaggaatggatagatcctctccagataacagcccagtgcacgggatgttacgtcaaccatccatcacaactggggtcaacatccccatcatcactgaactagctaaaccgggcaagttgcctttggtatcagtcaatcaggaaaaaaacagtgggacgcacattctaatgataactgaactggtgaacgatactaatgttcagtttttggaccaagacgatgatgatgaccctgatacagaactgtacctcacgcagccctttgcctgtgggacagcatttgccgtcagtgtcctggactcactcatgagcgcgacgtacttcaatgacaatatcctcaccctgatacggaccctggtgaccggaggagccacgccggagctggaggctctgattgctgaggaaaacgcccttagaggtggctacagcaccccgcagacactggccaatagggaccgctgccgcgtggcccagttagctctgctcgatgggccatttgcggacttaggggatggtggttgttatggtgatctgttctgcaaagctctgaaaacatataatatgctttgttttggaatttaccggctgagagatgctcacctcagcacccccagtcagtgcacaaagaggtatgtcatcaccaacccgccctatgagtttgagctcgtgccgacggacctgatcttctgcttaatgcagtttgaccacaatgccggccagtcccgggccagcctgtcccattcctcccactcgtcgcagtcctccagcaagaagagctcctctgttcactccatcccatccacagcaaaccgacagaaccggcccaagtccagggagtcccgggacaaacagaacagaaaagaaatggtttacagatgaaccggataatgcctatcccagaaacattcaaatcaagcccatgagtacccacatggctaaccagatcaaccaatataaatccacaagcagcttgattccaccaatcagagaagttgaagatgaatgttgactcccaggagaccagaactatttttttaaagcctgacaaacttcataaatggtgatgtgacttttcttcttacatgctgaatcactggtggaaacgttaggataagcaagaattgccagaaaataaagtagacagatctttctctttgtctgccttgaatattgcttccatgtattttggaaaagaaaatgatttcatttataaatgaacatactaaaatagtcatgtatagcctctagcattttaaattatttttatttattagaaagaaaatatattttttcttttcattgtcaaatatcttccctatatctaaacaatgcaaaatctaaatgaataagtggtcagactccttaatgtgtttttctcttctttctctctttttctttgaggagaatgatggtcaccaccacaattaattgtaattaagggaaatgaattattaaaacaattttaaaatggccaatgatgtatacatgtattttagtaaatccagaaaagaagactaaggggacaggtgaatacctgctcctcgcctggatgggtgtgtattttgatctgcattgacacc

SEQ ID NO: 10579 - DNA, 4073 bp, Homo sapiens
  source 1..4073: mol_type = unassigned DNA
cttcttcctcctcctcttcctcctcgtcctcggtccacgagcccaagatggatgcgctcatcatcccggtgaccatggaggtgccgtgcgacagccggggccaacgcatgtggtgggctttcctggcctcctccatggtgactttcttcgggggcctcttcatcatcttgctctggcggacgctcaagtacctgtggaccgtgtgctgccactgcgggggcaagacgaaggaggcccagaagattaacaatggctcaagccaggcggatggcactctcaaaccagtggatgaaaaagaggaggcagtggccgccgaggtcggctggatgacctccgtgaaggactgggcgggggtgatgatatccgcccagacactgactggcagagtcctggttgtcttagtctttgctctcagcatcggtgcacttgtaatatacttcatagattcatcaaacccaatagaatcctgccagaatttctacaaagatttcacattacagatcgacatggctttcaacgtgttcttccttctctacttcggcttgcggtttattgcagccaacgataaattgtggttctggctggaagtgaactctgtagtggatttcttcacggtgccccccgtgtttgtgtctgtgtacttaaacagaagttggcttggtttgagatttttaagagctctgagactgatacagttttcagaaattttgcagtttctgaatattcttaaaacaagtaattccatcaagctggtgaatctgctctccatatttatcagcacgtggctgactgcagccgggttcatccatttggtggagaattcaggggacccatgggaaaatttccaaaacaaccaggctctcacctactgggaatgtgtctatttactcatggtcacaatgtccaccgttggttatggggatgtttatgcaaaaaccacacttgggcgcctcttcatggtcttcttcatcctcgggggactggccatgtttgccagctacgtccctgaaatcatagagttaataggaaaccgcaagaaatacgggggctcctatagtgcggttagtggaagaaagcacattgtggtctgcggacacatcactctggagagtgtttccaacttcctgaaggactttctgcacaaggaccgggatgacgtcaatgtggagatcgtttttcttcacaacatctcccccaacctggagcttgaagctctgttcaaacgacattttactcaggtggaattttatcagggttccgtcctcaatccacatgatcttgcaagagtcaagatagagtcagcagatgcatgcctgatccttgccaacaagtactgcgctgacccggatgcggaggatgcctcgaatatcatgagagtaatctccataaagaactaccatccgaagataagaatcatcactcaaatgctgcagtatcacaacaaggcccatctgctaaacatcccgagctggaattggaaagaaggtgatgacgcaatctgcctcgcagagttgaagttgggcttcatagcccagagctgcctggctcaaggcctctccaccatgcttgccaacctcttctccatgaggtcattcataaagattgaggaagacacatggcagaaatactacttggaaggagtctcaaatgaaatgtacacagaatatctctccagtgccttcgtgggtctgtccttccctactgtttgtgagctgtgttttgtgaagctcaagctcctaatgatagccattgagtacaagtctgccaaccgagagagccgtatattaattaatcctggaaaccatcttaagatccaagaaggtactttaggatttttcatcgcaagtgatgccaaagaagttaaaagggcatttttttactgcaaggcctgtcatgatgacatcacagatcccaaaagaataaaaaaatgtggctgcaaacggctgatatattttgaagatgagcagccgtcaacactatcaccaaaaaaaaagcaacggaatggaggcatgcggaactcacccaacacctcgcctaagctgatgaggcatgaccccttgttaattcctggcaatgatcagattgacaacatggactccaatgtgaagaagtacgactctactgggatgtttcactggtgtgcacccaaggagatagagaaagtcatcctgactcgaagtgaagctgccatgaccgtcctgagtggccatgtcgtggtctgcatctttggcgacgtcagctcagccctgatcggcctccggaacctggtgatgccgctccgtgccagcaactttcattaccatgagctcaagcacattgtgtttgtgggctctattgagtacctcaagcgggaatgggagacgcttcataacttccccaaagtgtccatattgcctggtacgccattaagtcgggctgatttaagggctgtcaacatcaacctctgtgacatgtgcgttatcctgtcagccaatcagaataatattgatgatacttcgctgcaggacaaggaatgcatcttggcgtcactcaacatcaaatctatgcagtttgatgacagcatcggagtcttgcaggctaattcccaagggttcacacctccaggaatggatagatcctctccagataacagcccagtgcacgggatgttacgtcaaccatccatcacaactggggtcaacatccccatcatcactgaactagtgaacgatactaatgttcagtttttggaccaagacgatgatgatgaccctgatacagaactgtacctcacgcagccctttgcctgtgggacagcatttgccgtcagtgtcctggactcactcatgagcgcgacgtacttcaatgacaatatcctcaccctgatacggaccctggtgaccggaggagccacgccggagctggaggctctgattgctgaggaaaacgcccttagaggtggctacagcaccccgcagacactggccaatagggaccgctgccgcgtggcccagttagctctgctcgatgggccatttgcggacttaggggatggtggttgttatggtgatctgttctgcaaagctctgaaaacatataatatgctttgttttggaatttaccggctgagagatgctcacctcagcacccccagtcagtgcacaaagaggtatgtcatcaccaacccgccctatgagtttgagctcgtgccgacggacctgatcttctgcttaatgcagtttgaccacaatgccggccagtcccgggccagcctgtcccattcctcccactcgtcgcagtcctccagcaagaagagctcctctgttcactccatcccatccacagcaaaccgacagaaccggcccaagtccagggagtcccgggacaaacagaatgcaacaaggatgaatagaatgggccaagcagaaaagaaatggtttacagatgaaccggataatgcctatcccagaaacattcaaatcaagcccatgagtacccacatggctaaccagatcaaccaatataaatccacaagcagcttgattccaccaatcagagaagttgaagatgaatgttgactcccaggagaccagaactatttttttaaagcctgacaaacttcataaatggtgatgtgacttttcttcttacatgctgaatcactggtggaaacgttaggataagcaagaattgccagaaaataaagtagacagatctttctctttgtctgccttgaatattgcttccatgtattttggaaaagaaaatgatttcatttataaatgaacatactaaaatagtcatgtatagcctctagcattttaaattatttttatttattagaaagaaaatatattttttcttttcattgtcaaatatcttccctatatctaaacaatgcaaaatctaaatgaataagtggtcagactccttaatgtgtttttctcttctttctctctttttctttgaggagaatgatggtcaccaccacaattaattgtaattaagggaaatgaattattaaaacaattttaaaatggccaatgatgtatacatgtattttagtaaatccagaaaagaagactaaggggaca

SEQ ID NO: 10580 - DNA, 4423 bp, Homo sapiens
  source 1..4423: mol_type = unassigned DNA
gctgttgatgggtgtttggggtggcgctggcggcgggaggagctcccccgagcccctgcgccggctgcccgttgctagctatggcaaatggtggcggcggcggcggcggcagcagcggcggcggcggcggcggcggaggcagcagtcttagaatgagtagcaatatccacgcgaaccatctcagcctagacgcgtcctcctcctcctcctcctcctcttcctcttcttcttcttcctcctcctcttcctcctcgtcctcggtccacgagcccaagatggatgcgctcatcatcccggtgaccatggaggtgccgtgcgacagccggggccaacgcatgtggtgggctttcctggcctcctccatggtgactttcttcgggggcctcttcatcatcttgctctggcggacgctcaagtacctgtggaccgtgtgctgccactgcgggggcaagacgaaggaggcccagaagattaacaatggctcaagccaggcggatggcactctcaaaccagtggatgaaaaagaggaggcagtggccgccgaggtcggctggatgacctccgtgaaggactgggcgggggtgatgatatccgcccagacactgactggcagagtcctggttgtcttagtctttgctctcagcatcggtgcacttgtaatatacttcatagattcatcaaacccaatagaatcctgccagaatttctacaaagatttcacattacagatcgacatggctttcaacgtgttcttccttctctacttcggcttgcggtttattgcagccaacgataaattgtggttctggctggaagtgaactctgtagtggatttcttcacggtgccccccgtgtttgtgtctgtgtacttaaacagaagttggcttggtttgagatttttaagagctctgagactgatacagttttcagaaattttgcagtttctgaatattcttaaaacaagtaattccatcaagctggtgaatctgctctccatatttatcagcacgtggctgactgcagccgggttcatccatttggtggagaattcaggggacccatgggaaaatttccaaaacaaccaggctctcacctactgggaatgtgtctatttactcatggtcacaatgtccaccgttggttatggggatgtttatgcaaaaaccacacttgggcgcctcttcatggtcttcttcatcctcgggggactggccatgtttgccagctacgtccctgaaatcatagagttaataggaaaccgcaagaaatacgggggctcctatagtgcggttagtggaagaaagcacattgtggtctgcggacacatcactctggagagtgtttccaacttcctgaaggactttctgcacaaggaccgggatgacgtcaatgtggagatcgtttttcttcacaacatctcccccaacctggagcttgaagctctgttcaaacgacattttactcaggtggaattttatcagggttccgtcctcaatccacatgatcttgcaagagtcaagatagagtcagcagatgcatgcctgatccttgccaacaagtactgcgctgacccggatgcggaggatgcctcgaatatcatgagagtaatctccataaagaactaccatccgaagataagaatcatcactcaaatgctgcagtatcacaacaaggcccatctgctaaacatcccgagctggaattggaaagaaggtgatgacgcaatctgcctcgcagagttgaagttgggcttcatagcccagagctgcctggctcaaggcctctccaccatgcttgccaacctcttctccatgaggtcattcataaagattgaggaagacacatggcagaaatactacttggaaggagtctcaaatgaaatgtacacagaatatctctccagtgccttcgtgggtctgtccttccctactgtttgtgagctgtgttttgtgaagctcaagctcctaatgatagccattgagtacaagtctgccaaccgagagagccgaagccgaaagcgtatattaattaatcctggaaaccatcttaagatccaagaaggtactttaggatttttcatcgcaagtgatgccaaagaagttaaaagggcatttttttactgcaaggcctgtcatgatgacatcacagatcccaaaagaataaaaaaatgtggctgcaaacggcccaagatgtccatctacaagagaatgagacgggcatgttgttttgattgcggacgttctgagcgtgactgctcatgcatgtcaggccgtgtgcgtggtaacgtggacacccttgagagagccttcccactttcttctgtctctgttaatgattgctccaccagtttccgtgcctttgaagatgagcagccgtcaacactatcaccaaaaaaaaagcaacggaatggaggcatgcggaactcacccaacacctcgcctaagctgatgaggcatgaccccttgttaattcctggcaatgatcagattgacaacatggactccaatgtgaagaagtacgactctactgggatgtttcactggtgtgcacccaaggagatagagaaagtcatcctgactcgaagtgaagctgccatgaccgtcctgagtggccatgtcgtggtctgcatctttggcgacgtcagctcagccctgatcggcctccggaacctggtgatgccgctccgtgccagcaactttcattaccatgagctcaagcacattgtgtttgtgggctctattgagtacctcaagcgggaatgggagacgcttcataacttccccaaagtgtccatattgcctggtacgccattaagtcgggctgatttaagggctgtcaacatcaacctctgtgacatgtgcgttatcctgtcagccaatcagaataatattgatgatacttcgctgcaggacaaggaatgcatcttggcgtcactcaacatcaaatctatgcagtttgatgacagcatcggagtcttgcaggctaattcccaagggttcacacctccaggaatggatagatcctctccagataacagcccagtgcacgggatgttacgtcaaccatccatcacaactggggtcaacatccccatcatcactgaactagtgaacgatactaatgttcagtttttggaccaagacgatgatgatgaccctgatacagaactgtacctcacgcagccctttgcctgtgggacagcatttgccgtcagtgtcctggactcactcatgagcgcgacgtacttcaatgacaatatcctcaccctgatacggaccctggtgaccggaggagccacgccggagctggaggctctgattgctgaggaaaacgcccttagaggtggctacagcaccccgcagacactggccaatagggaccgctgccgcgtggcccagttagctctgctcgatgggccatttgcggacttaggggatggtggttgttatggtgatctgttctgcaaagctctgaaaacatataatatgctttgttttggaatttaccggctgagagatgctcacctcagcacccccagtcagtgcacaaagaggtatgtcatcaccaacccgccctatgagtttgagctcgtgccgacggacctgatcttctgcttaatgcagtttgaccacaatgccggccagtcccgggccagcctgtcccattcctcccactcgtcgcagtcctccagcaagaagagctcctctgttcactccatcccatccacagcaaaccgacagaaccggcccaagtccagggagtcccgggacaaacagaaaaaagaaatggtttacagatgaaccggataatgcctatcccagaaacattcaaatcaagcccatgagtacccacatggctaaccagatcaaccaatataaatccacaagcagcttgattccaccaatcagagaagttgaagatgaatgttgactcccaggagaccagaactatttttttaaagcctgacaaacttcataaatggtgatgtgacttttcttcttacatgctgaatcactggtggaaacgttaggataagcaagaattgccagaaaataaagtagacagatctttctctttgtctgccttgaatattgcttccatgtattttggaaaagaaaatgatttcatttataaatgaacatactaaaatagtcatgtatagcctctagcattttaaattatttttatttattagaaagaaaatatattttttcttttcattgtcaaatatcttccctatatctaaacaatgcaaaatctaaatgaataagtggtcagactccttaatgtgtttttctcttctttctctctttttctttgaggagaatgatggtcaccaccacaattaattgtaattaagggaaatgaattattaaaacaattttaaaatggccaatgatgtatacatgtattttagtaaatc

SEQ ID NO: 10581 - DNA, 4319 bp, Homo sapiens
  source 1..4319: mol_type = unassigned DNA
cccctcccgcgctccgcggcggcggcggcggcggcagcagtagcagcaatatggctgttgatgggtgtttggggtggcgctggcggcgggaggagctcccccgagcccctgcgccggctgcccgttgctagctatggcaaatggtggcggcggcggcggcggcagcagcggcggcggcggcggcggcggaggcagcagtcttagaatgagtagcaatatccacgcgaaccatctcagcctagacgcgtcctcctcctcctcctcctcctcttcctcttcttcttcttcctcctcctcttcctcctcgtcctcggtccacgagcccaagatggatgcgctcatcatcccggtgaccatggaggtgccgtgcgacagccggggccaacgcatgtggtgggctttcctggcctcctccatggtgactttcttcgggggcctcttcatcatcttgctctggcggacgctcaagtacctgtggaccgtgtgctgccactgcgggggcaagacgaaggaggcccagaagattaacaatggctcaagccaggcggatggcactctcaaaccagtggatgaaaaagaggaggcagtggccgccgaggtcggctggatgacctccgtgaaggactgggcgggggtgatgatatccgcccagacactgactggcagagtcctggttgtcttagtctttgctctcagcatcggtgcacttgtaatatacttcatagattcatcaaacccaatagaatcctgccagaatttctacaaagatttcacattacagatcgacatggctttcaacgtgttcttccttctctacttcggcttgcggtttattgcagccaacgataaattgtggttctggctggaagtgaactctgtagtggatttcttcacggtgccccccgtgtttgtgtctgtgtacttaaacagaagttggcttggtttgagatttttaagagctctgagactgatacagttttcagaaattttgcagtttctgaatattcttaaaacaagtaattccatcaagctggtgaatctgctctccatatttatcagcacgtggctgactgcagccgggttcatccatttggtggagaattcaggggacccatgggaaaatttccaaaacaaccaggctctcacctactgggaatgtgtctatttactcatggtcacaatgtccaccgttggttatggggatgtttatgcaaaaaccacacttgggcgcctcttcatggtcttcttcatcctcgggggactggccatgtttgccagctacgtccctgaaatcatagagttaataggaaaccgcaagaaatacgggggctcctatagtgcggttagtggaagaaagcacattgtggtctgcggacacatcactctggagagtgtttccaacttcctgaaggactttctgcacaaggaccgggatgacgtcaatgtggagatcgtttttcttcacaacatctcccccaacctggagcttgaagctctgttcaaacgacattttactcaggtggaattttatcagggttccgtcctcaatccacatgatcttgcaagagtcaagatagagtcagcagatgcatgcctgatccttgccaacaagtactgcgctgacccggatgcggaggatgcctcgaatatcatgagagtaatctccataaagaactaccatccgaagataagaatcatcactcaaatgctgcagtatcacaacaaggcccatctgctaaacatcccgagctggaattggaaagaaggtgatgacgcaatctgcctcgcagagttgaagttgggcttcatagcccagagctgcctggctcaaggcctctccaccatgcttgccaacctcttctccatgaggtcattcataaagattgaggaagacacatggcagaaatactacttggaaggagtctcaaatgaaatgtacacagaatatctctccagtgccttcgtgggtctgtccttccctactgtttgtgagctgtgttttgtgaagctcaagctcctaatgatagccattgagtacaagtctgccaaccgagagagccgtatattaattaatcctggaaaccatcttaagatccaagaaggtactttaggatttttcatcgcaagtgatgccaaagaagttaaaagggcatttttttactgcaaggcctgtcatgatgacatcacagatcccaaaagaataaaaaaatgtggctgcaaacggcttgaagatgagcagccgtcaacactatcaccaaaaaaaaagcaacggaatggaggcatgcggaactcacccaacacctcgcctaagctgatgaggcatgaccccttgttaattcctggcaatgatcagattgacaacatggactccaatgtgaagaagtacgactctactgggatgtttcactggtgtgcacccaaggagatagagaaagtcatcctgactcgaagtgaagctgccatgaccgtcctgagtggccatgtcgtggtctgcatctttggcgacgtcagctcagccctgatcggcctccggaacctggtgatgccgctccgtgccagcaactttcattaccatgagctcaagcacattgtgtttgtgggctctattgagtacctcaagcgggaatgggagacgcttcataacttccccaaagtgtccatattgcctggtacgccattaagtcgggctgatttaagggctgtcaacatcaacctctgtgacatgtgcgttatcctgtcagccaatcagaataatattgatgatacttcgctgcaggacaaggaatgcatcttggcgtcactcaacatcaaatctatgcagtttgatgacagcatcggagtcttgcaggctaattcccaagggttcacacctccaggaatggatagatcctctccagataacagcccagtgcacgggatgttacgtcaaccatccatcacaactggggtcaacatccccatcatcactgaactagtgaacgatactaatgttcagtttttggaccaagacgatgatgatgaccctgatacagaactgtacctcacgcagccctttgcctgtgggacagcatttgccgtcagtgtcctggactcactcatgagcgcgacgtacttcaatgacaatatcctcaccctgatacggaccctggtgaccggaggagccacgccggagctggaggctctgattgctgaggaaaacgcccttagaggtggctacagcaccccgcagacactggccaatagggaccgctgccgcgtggcccagttagctctgctcgatgggccatttgcggacttaggggatggtggttgttatggtgatctgttctgcaaagctctgaaaacatataatatgctttgttttggaatttaccggctgagagatgctcacctcagcacccccagtcagtgcacaaagaggtatgtcatcaccaacccgccctatgagtttgagctcgtgccgacggacctgatcttctgcttaatgcagtttgaccacaatgccggccagtcccgggccagcctgtcccattcctcccactcgtcgcagtcctccagcaagaagagctcctctgttcactccatcccatccacagcaaaccgacagaaccggcccaagtccagggagtcccgggacaaacagaatgcaacaaggatgaatagaatgggccaagaaaagaaatggtttacagatgaaccggataatgcctatcccagaaacattcaaatcaagcccatgagtacccacatggctaaccagatcaaccaatataaatccacaagcagcttgattccaccaatcagagaagttgaagatgaatgttgactcccaggagaccagaactatttttttaaagcctgacaaacttcataaatggtgatgtgacttttcttcttacatgctgaatcactggtggaaacgttaggataagcaagaattgccagaaaataaagtagacagatctttctctttgtctgccttgaatattgcttccatgtattttggaaaagaaaatgatttcatttataaatgaacatactaaaatagtcatgtatagcctctagcattttaaattatttttatttattagaaagaaaatatattttttcttttcattgtcaaatatcttccctatatctaaacaatgcaaaatctaaatgaataagtggtcagactccttaatgtgtttttctcttctttctctctttttctttgaggagaatgatggtcaccaccacaattaattgtaattaagggaaatgaattattaaaacaattttaaaatggccaatgatgtatacatgtattttagtaaatc

SEQ ID NO: 10582 - DNA, 4302 bp, Homo sapiens
  source 1..4302: mol_type = unassigned DNA
cccctcccgcgctccgcggcggcggcggcggcggcagcagtagcagcaatatggctgttgatgggtgtttggggtggcgctggcggcgggaggagctcccccgagcccctgcgccggctgcccgttgctagctatggcaaatggtggcggcggcggcggcggcagcagcggcggcggcggcggcggcggaggcagcagtcttagaatgagtagcaatatccacgcgaaccatctcagcctagacgcgtcctcctcctcctcctcctcctcttcctcttcttcttcttcctcctcctcttcctcctcgtcctcggtccacgagcccaagatggatgcgctcatcatcccggtgaccatggaggtgccgtgcgacagccggggccaacgcatgtggtgggctttcctggcctcctccatggtgactttcttcgggggcctcttcatcatcttgctctggcggacgctcaagtacctgtggaccgtgtgctgccactgcgggggcaagacgaaggaggcccagaagattaacaatggctcaagccaggcggatggcactctcaaaccagtggatgaaaaagaggaggcagtggccgccgaggtcggctggatgacctccgtgaaggactgggcgggggtgatgatatccgcccagacactgactggcagagtcctggttgtcttagtctttgctctcagcatcggtgcacttgtaatatacttcatagattcatcaaacccaatagaatcctgccagaatttctacaaagatttcacattacagatcgacatggctttcaacgtgttcttccttctctacttcggcttgcggtttattgcagccaacgataaattgtggttctggctggaagtgaactctgtagtggatttcttcacggtgccccccgtgtttgtgtctgtgtacttaaacagaagttggcttggtttgagatttttaagagctctgagactgatacagttttcagaaattttgcagtttctgaatattcttaaaacaagtaattccatcaagctggtgaatctgctctccatatttatcagcacgtggctgactgcagccgggttcatccatttggtggagaattcaggggacccatgggaaaatttccaaaacaaccaggctctcacctactgggaatgtgtctatttactcatggtcacaatgtccaccgttggttatggggatgtttatgcaaaaaccacacttgggcgcctcttcatggtcttcttcatcctcgggggactggccatgtttgccagctacgtccctgaaatcatagagttaataggaaaccgcaagaaatacgggggctcctatagtgcggttagtggaagaaagcacattgtggtctgcggacacatcactctggagagtgtttccaacttcctgaaggactttctgcacaaggaccgggatgacgtcaatgtggagatcgtttttcttcacaacatctcccccaacctggagcttgaagctctgttcaaacgacattttactcaggtggaattttatcagggttccgtcctcaatccacatgatcttgcaagagtcaagatagagtcagcagatgcatgcctgatccttgccaacaagtactgcgctgacccggatgcggaggatgcctcgaatatcatgagagtaatctccataaagaactaccatccgaagataagaatcatcactcaaatgctgcagtatcacaacaaggcccatctgctaaacatcccgagctggaattggaaagaaggtgatgacgcaatctgcctcgcagagttgaagttgggcttcatagcccagagctgcctggctcaaggcctctccaccatgcttgccaacctcttctccatgaggtcattcataaagattgaggaagacacatggcagaaatactacttggaaggagtctcaaatgaaatgtacacagaatatctctccagtgccttcgtgggtctgtccttccctactgtttgtgagctgtgttttgtgaagctcaagctcctaatgatagccattgagtacaagtctgccaaccgagagagccgaagccgaaagcgtatattaattaatcctggaaaccatcttaagatccaagaaggtactttaggatttttcatcgcaagtgatgccaaagaagttaaaagggcatttttttactgcaaggcctgtcatgatgacatcacagatcccaaaagaataaaaaaatgtggctgcaaacggcttgaagatgagcagccgtcaacactatcaccaaaaaaaaagcaacggaatggaggcatgcggaactcacccaacacctcgcctaagctgatgaggcatgaccccttgttaattcctggcaatgatcagattgacaacatggactccaatgtgaagaagtacgactctactgggatgtttcactggtgtgcacccaaggagatagagaaagtcatcctgactcgaagtgaagctgccatgaccgtcctgagtggccatgtcgtggtctgcatctttggcgacgtcagctcagccctgatcggcctccggaacctggtgatgccgctccgtgccagcaactttcattaccatgagctcaagcacattgtgtttgtgggctctattgagtacctcaagcgggaatgggagacgcttcataacttccccaaagtgtccatattgcctggtacgccattaagtcgggctgatttaagggctgtcaacatcaacctctgtgacatgtgcgttatcctgtcagccaatcagaataatattgatgatacttcgctgcaggacaaggaatgcatcttggcgtcactcaacatcaaatctatgcagtttgatgacagcatcggagtcttgcaggctaattcccaagggttcacacctccaggaatggatagatcctctccagataacagcccagtgcacgggatgttacgtcaaccatccatcacaactggggtcaacatccccatcatcactgaactagtgaacgatactaatgttcagtttttggaccaagacgatgatgatgaccctgatacagaactgtacctcacgcagccctttgcctgtgggacagcatttgccgtcagtgtcctggactcactcatgagcgcgacgtacttcaatgacaatatcctcaccctgatacggaccctggtgaccggaggagccacgccggagctggaggctctgattgctgaggaaaacgcccttagaggtggctacagcaccccgcagacactggccaatagggaccgctgccgcgtggcccagttagctctgctcgatgggccatttgcggacttaggggatggtggttgttatggtgatctgttctgcaaagctctgaaaacatataatatgctttgttttggaatttaccggctgagagatgctcacctcagcacccccagtcagtgcacaaagaggtatgtcatcaccaacccgccctatgagtttgagctcgtgccgacggacctgatcttctgcttaatgcagtttgaccacaatgccggccagtcccgggccagcctgtcccattcctcccactcgtcgcagtcctccagcaagaagagctcctctgttcactccatcccatccacagcaaaccgacagaaccggcccaagtccagggagtcccgggacaaacagaaaaaagaaatggtttacagatgaaccggataatgcctatcccagaaacattcaaatcaagcccatgagtacccacatggctaaccagatcaaccaatataaatccacaagcagcttgattccaccaatcagagaagttgaagatgaatgttgactcccaggagaccagaactatttttttaaagcctgacaaacttcataaatggtgatgtgacttttcttcttacatgctgaatcactggtggaaacgttaggataagcaagaattgccagaaaataaagtagacagatctttctctttgtctgccttgaatattgcttccatgtattttggaaaagaaaatgatttcatttataaatgaacatactaaaatagtcatgtatagcctctagcattttaaattatttttatttattagaaagaaaatatattttttcttttcattgtcaaatatcttccctatatctaaacaatgcaaaatctaaatgaataagtggtcagactccttaatgtgtttttctcttctttctctctttttctttgaggagaatgatggtcaccaccacaattaattgtaattaagggaaatgaattattaaaacaattttaaaatggccaatgatgtatacatgtattttagtaaatc

SEQ ID NO: 10583 - DNA, 3899 bp, Homo sapiens
  source 1..3899: mol_type = unassigned DNA
gggggaaaatatatatttgcctggagaacacaccagtctggaaaagtgaagccagccaggttcagtgtgggtggagtctcccaccagggatcccaccctagcactaaccagggttgaggtgctggggaaaatgaaaagcattggtgtctttctgacccacctaggttgtcttagtctttgctctcagcatcggtgcacttgtaatatacttcatagattcatcaaacccaatagaatcctgccagaatttctacaaagatttcacattacagatcgacatggctttcaacgtgttcttccttctctacttcggcttgcggtttattgcagccaacgataaattgtggttctggctggaagtgaactctgtagtggatttcttcacggtgccccccgtgtttgtgtctgtgtacttaaacagaagttggcttggtttgagatttttaagagctctgagactgatacagttttcagaaattttgcagtttctgaatattcttaaaacaagtaattccatcaagctggtgaatctgctctccatatttatcagcacgtggctgactgcagccgggttcatccatttggtggagaattcaggggacccatgggaaaatttccaaaacaaccaggctctcacctactgggaatgtgtctatttactcatggtcacaatgtccaccgttggttatggggatgtttatgcaaaaaccacacttgggcgcctcttcatggtcttcttcatcctcgggggactggccatgtttgccagctacgtccctgaaatcatagagttaataggaaaccgcaagaaatacgggggctcctatagtgcggttagtggaagaaagcacattgtggtctgcggacacatcactctggagagtgtttccaacttcctgaaggactttctgcacaaggaccgggatgacgtcaatgtggagatcgtttttcttcacaacatctcccccaacctggagcttgaagctctgttcaaacgacattttactcaggtggaattttatcagggttccgtcctcaatccacatgatcttgcaagagtcaagatagagtcagcagatgcatgcctgatccttgccaacaagtactgcgctgacccggatgcggaggatgcctcgaatatcatgagagtaatctccataaagaactaccatccgaagataagaatcatcactcaaatgctgcagtatcacaacaaggcccatctgctaaacatcccgagctggaattggaaagaaggtgatgacgcaatctgcctcgcagagttgaagttgggcttcatagcccagagctgcctggctcaaggcctctccaccatgcttgccaacctcttctccatgaggtcattcataaagattgaggaagacacatggcagaaatactacttggaaggagtctcaaatgaaatgtacacagaatatctctccagtgccttcgtgggtctgtccttccctactgtttgtgagctgtgttttgtgaagctcaagctcctaatgatagccattgagtacaagtctgccaaccgagagagccgaagccgaaagcgtatattaattaatcctggaaaccatcttaagatccaagaaggtactttaggatttttcatcgcaagtgatgccaaagaagttaaaagggcatttttttactgcaaggcctgtcatgatgacatcacagatcccaaaagaataaaaaaatgtggctgcaaacggcttgaagatgagcagccgtcaacactatcaccaaaaaaaaagcaacggaatggaggcatgcggaactcacccaacacctcgcctaagctgatgaggcatgaccccttgttaattcctggcaatgatcagattgacaacatggactccaatgtgaagaagtacgactctactgggatgtttcactggtgtgcacccaaggagatagagaaagtcatcctgactcgaagtgaagctgccatgaccgtcctgagtggccatgtcgtggtctgcatctttggcgacgtcagctcagccctgatcggcctccggaacctggtgatgccgctccgtgccagcaactttcattaccatgagctcaagcacattgtgtttgtgggctctattgagtacctcaagcgggaatgggagacgcttcataacttccccaaagtgtccatattgcctggtacgccattaagtcgggctgatttaagggctgtcaacatcaacctctgtgacatgtgcgttatcctgtcagccaatcagaataatattgatgatacttcgctgcaggacaaggaatgcatcttggcgtcactcaacatcaaatctatgcagtttgatgacagcatcggagtcttgcaggctaattcccaagggttcacacctccaggaatggatagatcctctccagataacagcccagtgcacgggatgttacgtcaaccatccatcacaactggggtcaacatccccatcatcactgaactagctaaaccgggcaagttgcctttggtatcagtcaatcaggaaaaaaacagtgggacgcacattctaatgataactgaactggtgaacgatactaatgttcagtttttggaccaagacgatgatgatgaccctgatacagaactgtacctcacgcagccctttgcctgtgggacagcatttgccgtcagtgtcctggactcactcatgagcgcgacgtacttcaatgacaatatcctcaccctgatacggaccctggtgaccggaggagccacgccggagctggaggctctgattgctgaggaaaacgcccttagaggtggctacagcaccccgcagacactggccaatagggaccgctgccgcgtggcccagttagctctgctcgatgggccatttgcggacttaggggatggtggttgttatggtgatctgttctgcaaagctctgaaaacatataatatgctttgttttggaatttaccggctgagagatgctcacctcagcacccccagtcagtgcacaaagaggtatgtcatcaccaacccgccctatgagtttgagctcgtgccgacggacctgatcttctgcttaatgcagtttgaccacaatgccggccagtcccgggccagcctgtcccattcctcccactcgtcgcagtcctccagcaagaagagctcctctgttcactccatcccatccacagcaaaccgacagaaccggcccaagtccagggagtcccgggacaaacagaatgcaacaaggatgaatagaatgggccaagaaaagaaatggtttacagatgaaccggataatgcctatcccagaaacattcaaatcaagcccatgagtacccacatggctaaccagatcaaccaatataaatccacaagcagcttgattccaccaatcagagaagttgaagatgaatgttgactcccaggagaccagaactatttttttaaagcctgacaaacttcataaatggtgatgtgacttttcttcttacatgctgaatcactggtggaaacgttaggataagcaagaattgccagaaaataaagtagacagatctttctctttgtctgccttgaatattgcttccatgtattttggaaaagaaaatgatttcatttataaatgaacatactaaaatagtcatgtatagcctctagcattttaaattatttttatttattagaaagaaaatatattttttcttttcattgtcaaatatcttccctatatctaaacaatgcaaaatctaaatgaataagtggtcagactccttaatgtgtttttctcttctttctctctttttctttgaggagaatgatggtcaccaccacaattaattgtaattaagggaaatgaattattaaaacaattttaaaatggccaatgatgtatacatgtattttagta

SEQ ID NO: 10584 - DNA, 4098 bp, Homo sapiens
  source 1..4098: mol_type = unassigned DNA
gaagactgtattatattccatggggtcagctagagaaaatctgtgataactttgttgaaaatgaaatacactttggatttttttttgcaagaattaaaaaaaggaacaataacccacatgcattgagccttctatacatcatctctcttaattctctaaagattattgttaccattatccacctcttgtaggtaagaaagttgagttctagggatatttagtaactggcccaaagtcaaacagctattaagtggtagtgttggaatttggacccaaattctgattgcagagccagggcatgtaaaaactgccttgcaggaaaggaggttaaaaaaatgtgcaaaatttataatcctgcctttctaaaacatcatactgaattggctttgaaagataaattcatctaaactgtatgagctctaacacttcaccctcgtgattgcatgaagtcagagggcttgttatacccatgtgaagagttggcggaggggtcattaggaggtgcttatggagagccgctgctcagtgcaggccgtgctattagtgtggactgctgctgtctgatttgggaggaatctcactgctgcctgtggttgtagggcagaacagttaaatcttcatagccttttggtattattgagtgttaataatagtcatgacacaagtacagtttcctcctgtcaggtattgttataagtaatggtagatgttcttgtgaccacaaaaaattattttgcaataatgatctgctcggaggtctcccaaccaggtgaacaaaggttcacctgggtccttcctgtatgactacagacgtatcacttcatgaccacaacacttctctggaatggtttatcagtaggaaaaaagattatgtgttaattaccatcctctatattttgattgtttggggcagctgagaacttcctttagactgattccaaatatctattaccttattaagcaacatcttttcagaacaaggaatacctctgttgtatctgttgttttattcagaatccctgaattcagtatccattaagcctgaagtcttttctcagtctctgcatcagacaatcttgtattctgcttttgatctgcagaaaattaaacttgtttgtttcatccatttattagattaggatacatttatctcttctgtcagtccaaacacaacttggtccgctaatctatttatgccactttgaaataggacaatgtatatttaggttcccacttctctgcagggcaagtttttttaaggggaggtttgcatttgttttctcaatttgcctcaattaggacatgctagacacacatcttattcaaacaccctgtacgtttttataaacagcagactggaattgttaagtatatccaactgctgacttaaaaaaaaaaactgtttgggtaaatccaattcttcctataaaggctgtacatggaatcaatttccatgtccttatcaatgtcatgaagacgttcagcttgcttccgcattggttacgggtgtcttgtaccattccctgcggtaatatgtggtgtgtgtacatgatgtttatgtatatctataggggtcccattaatgctctgtcatttaatggaaaattgttgtagcaatagcttcatcaggccaataatgcttccgtgttgaccaccaatagcagtttcaaaaggaatttattctgatggactttgcttcaaatcatgtgcccatgatggcagctagactgctccattatataaacccaggccctaataccttgatttgctttgatttcctcaactgggagcatgccagcctgggaagtaagcagtagtgcttaatgatggcattatccaactaaatgtatggggcagtggacattggactctggacaaaatctttggggaaagctttagactagtgggccccctataaacacaacagtatggtgtagccttcaaggttttattcagaacatgacctcacaaatgtatcttctctgtttgtttttgttcactgagcagtatattaattaatcctggaaaccatcttaagatccaagaaggtactttaggatttttcatcgcaagtgatgccaaagaagttaaaagttgaagatgagcagccgtcaacactatcaccaaaaaaaaagcaacggaatggaggcatgcggaactcacccaacacctcgcctaagctgatgaggcatgaccccttgttaattcctggcaatgatcagattgacaacatggactccaatgtgaagaagtacgactctactgggatgtttcactggtgtgcacccaaggagatagagaaagtcatcctgactcgaagtgaagctgccatgaccgtcctgagtggccatgtcgtggtctgcatctttggcgacgtcagctcagccctgatcggcctccggaacctggtgatgccgctccgtgccagcaactttcattaccatgagctcaagcacattgtgtttgtgggctctattgagtacctcaagcgggaatgggagacgcttcataacttccccaaagtgtccatattgcctggtacgccattaagtcgggctgatttaagggctgtcaacatcaacctctgtgacatgtgcgttatcctgtcagccaatcagaataatattgatgatacttcgctgcaggacaaggaatgcatcttggcgtcactcaacatcaaatctatgcagtttgatgacagcatcggagtcttgcaggctaattcccaagggttcacacctccaggaatggatagatcctctccagataacagcccagtgcacgggatgttacgtcaaccatccatcacaactggggtcaacatccccatcatcactgaactagctaaaccgggcaagttgcctttggtatcagtcaatcaggaaaaaaacagtgggacgcacattctaatgataactgaactggtgaacgatactaatgttcagtttttggaccaagacgatgatgatgaccctgatacagaactgtacctcacgcagccctttgcctgtgggacagcatttgccgtcagtgtcctggactcactcatgagcgcgacgtacttcaatgacaatatcctcaccctgatacggaccctggtgaccggaggagccacgccggagctggaggctctgattgctgaggaaaacgcccttagaggtggctacagcaccccgcagacactggccaatagggaccgctgccgcgtggcccagttagctctgctcgatgggccatttgcggacttaggggatggtggttgttatggtgatctgttctgcaaagctctgaaaacatataatatgctttgttttggaatttaccggctgagagatgctcacctcagcacccccagtcagtgcacaaagaggtatgtcatcaccaacccgccctatgagtttgagctcgtgccgacggacctgatcttctgcttaatgcagtttgaccacaatgccggccagtcccgggccagcctgtcccattcctcccactcgtcgcagtcctccagcaagaagagctcctctgttcactccatcccatccacagcaaaccgacagaaccggcccaagtccagggagtcccgggacaaacagaatgcaacaaggatgaatagaatgggccaagcagaaaagaaatggtttacagatgaaccggataatgcctatcccagaaacattcaaatcaagcccatgagtacccacatggctaaccagatcaaccaatataaatccacaagcagcttgattccaccaatcagagaagttgaagatgaatgttgactcccaggagaccagaactatttttttaaagcctgacaaacttcataaatggtgatgtgacttttcttcttacatgctgaatcactggtggaaacgttaggataagcaagaattgccagaaaataaagtagacagatctttctctttgtctgccttgaatattgcttccatgtattttggaaaagaaaatgatttcatttataaatgaacatactaaaatagtcatgtatagcctctagcattttaaattatttttatttattagaaagaaaatatattttttcttttcattgtcaaatatcttccctatatctaaaca

SEQ ID NO: 10585 - DNA, 3805 bp, Homo sapiens
  source 1..3805: mol_type = unassigned DNA
atggatgcgctcatcatcccggtgaccatggaggtgccgtgcgacagccggggccaacgcatgtggtgggctttcctggcctcctccatggtgactttcttcgggggcctcttcatcatcttgctctggcggacgctcaagtacctgtggaccgtgtgctgccactgcgggggcaagacgaaggaggcccagaagattaacaatggctcaagccaggcggatggcactctcaaaccagtggatgaaaaagaggaggcagtggccgccgaggtcggctggatgacctccgtgaaggactgggcgggggtgatgatatccgcccagacactgactggcagagtcctggttgtcttagtctttgctctcagcatcggtgcacttgtaatatacttcatagattcatcaaacccaatagaatcctgccagaatttctacaaagatttcacattacagatcgacatggctttcaacgtgttcttccttctctacttcggcttgcggtttattgcagccaacgataaattgtggttctggctggaagtgaactctgtagtggatttcttcacggtgccccccgtgtttgtgtctgtgtacttaaacagaagttggcttggtttgagatttttaagagctctgagactgatacagttttcagaaattttgcagtttctgaatattcttaaaacaagtaattccatcaagctggtgaatctgctctccatatttatcagcacgtggctgactgcagccgggttcatccatttggtggagaattcaggggacccatgggaaaatttccaaaacaaccaggctctcacctactgggaatgtgtctatttactcatggtcacaatgtccaccgttggttatggggatgtttatgcaaaaaccacacttgggcgcctcttcatggtcttcttcatcctcgggggactggccatgtttgccagctacgtccctgaaatcatagagttaataggaaaccgcaagaaatacgggggctcctatagtgcggttagtggaagaaagcacattgtggtctgcggacacatcactctggagagtgtttccaacttcctgaaggactttctgcacaaggaccgggatgacgtcaatgtggagatcgtttttcttcacaacatctcccccaacctggagcttgaagctctgttcaaacgacattttactcaggtggaattttatcagggttccgtcctcaatccacatgatcttgcaagagtcaagatagagtcagcagatgcatgcctgatccttgccaacaagtactgcgctgacccggatgcggaggatgcctcgaatatcatgagagtaatctccataaagaactaccatccgaagataagaatcatcactcaaatgctgcagtatcacaacaaggcccatctgctaaacatcccgagctggaattggaaagaaggtgatgacgcaatctgcctcgcagagttgaagttgggcttcatagcccagagctgcctggctcaaggcctctccaccatgcttgccaacctcttctccatgaggtcattcataaagattgaggaagacacatggcagaaatactacttggaaggagtctcaaatgaaatgtacacagaatatctctccagtgccttcgtgggtctgtccttccctactgtttgtgagctgtgttttgtgaagctcaagctcctaatgatagccattgagtacaagtctgccaaccgagagagccgtatattaattaatcctggaaaccatcttaagatccaagaaggtactttaggatttttcatcgcaagtgatgccaaagaagttaaaagggcatttttttactgcaaggcctgtcatgatgacatcacagatcccaaaagaataaaaaaatgtggctgcaaacggctgatatattttgaagatgagcagccgtcaacactatcaccaaaaaaaaagcaacggaatggaggcatgcggaactcacccaacacctcgcctaagctgatgaggcatgaccccttgttaattcctggcaatgatcagattgacaacatggactccaatgtgaagaagtacgactctactgggatgtttcactggtgtgcacccaaggagatagagaaagtcatcctgactcgaagtgaagctgccatgaccgtcctgagtggccatgtcgtggtctgcatctttggcgacgtcagctcagccctgatcggcctccggaacctggtgatgccgctccgtgccagcaactttcattaccatgagctcaagcacattgtgtttgtgggctctattgagtacctcaagcgggaatgggagacgcttcataacttccccaaagtgtccatattgcctggtacgccattaagtcgggctgatttaagggctgtcaacatcaacctctgtgacatgtgcgttatcctgtcagccaatcagaataatattgatgatacttcgctgcaggacaaggaatgcatcttggcgtcactcaacatcaaatctatgcagtttgatgacagcatcggagtcttgcaggctaattcccaagggttcacacctccaggaatggatagatcctctccagataacagcccagtgcacgggatgttacgtcaaccatccatcacaactggggtcaacatccccatcatcactgaactagctaaaccgggcaagttgcctttggtatcagtcaatcaggaaaaaaacagtgggacgcacattctaatgataactgaactggtgaacgatactaatgttcagtttttggaccaagacgatgatgatgaccctgatacagaactgtacctcacgcagccctttgcctgtgggacagcatttgccgtcagtgtcctggactcactcatgagcgcgacgtacttcaatgacaatatcctcaccctgatacggaccctggtgaccggaggagccacgccggagctggaggctctgattgctgaggaaaacgcccttagaggtggctacagcaccccgcagacactggccaatagggaccgctgccgcgtggcccagttagctctgctcgatgggccatttgcggacttaggggatggtggttgttatggtgatctgttctgcaaagctctgaaaacatataatatgctttgttttggaatttaccggctgagagatgctcacctcagcacccccagtcagtgcacaaagaggtatgtcatcaccaacccgccctatgagtttgagctcgtgccgacggacctgatcttctgcttaatgcagtttgaccacaatgccggccagtcccgggccagcctgtcccattcctcccactcgtcgcagtcctccagcaagaagagctcctctgttcactccatcccatccacagcaaaccgacagaaccggcccaagtccagggagtcccgggacaaacagaatgcaacaaggatgaatagaatgggccaagaaaagaaatggtttacagatgaaccggataatgcctatcccagaaacattcaaatcaagcccatgagtacccacatggctaaccagatcaaccaatataaatccacaagcagcttgattccaccaatcagagaagttgaagatgaatgttgactcccaggagaccagaactatttttttaaagcctgacaaacttcataaatggtgatgtgacttttcttcttacatgctgaatcactggtggaaacgttaggataagcaagaattgccagaaaataaagtagacagatctttctctttgtctgccttgaatattgcttccatgtattttggaaaagaaaatgatttcatttataaatgaacatactaa

SEQ ID NO: 10586 - DNA, 3464 bp, Homo sapiens
  source 1..3464: mol_type = unassigned DNA
gtccacgagcccaagatggatgcgctcatcatcccggtgaccatggaggtgccgtgcgacagccggggccaacgcatgtggtgggctttcctggcctcctccatggtgactttcttcgggggcctcttcatcatcttgctctggcggacgctcaagtacctgtggaccgtgtgctgccactgcgggggcaagacgaaggaggcccagaagattaacaatggctcaagccaggcggatggcactctcaaaccagtggatgaaaaagaggaggcagtggccgccgaggtcggctggatgacctccgtgaaggactgggcgggggtgatgatatccgcccagacactgactggcagagtcctggttgtcttagtctttgctctcagcatcggtgcacttgtaatatacttcatagattcatcaaacccaatagaatcctgccagaatttctacaaagatttcacattacagatcgacatggctttcaacgtgttcttccttctctacttcggcttgcggtttattgcagccaacgataaattgtggttctggctggaagtgaactctgtagtggatttcttcacggtgccccccgtgtttgtgtctgtgtacttaaacagaagttggcttggtttgagatttttaagagctctgagactgatacagttttcagaaattttgcagtttctgaatattcttaaaacaagtaattccatcaagctggtgaatctgctctccatatttatcagcacgtggctgactgcagccgggttcatccatttggtggagaattcaggggacccatgggaaaatttccaaaacaaccaggctctcacctactgggaatgtgtctatttactcatggtcacaatgtccaccgttggttatggggatgtttatgcaaaaaccacacttgggcgcctcttcatggtcttcttcatcctcgggggactggccatgtttgccagctacgtccctgaaatcatagagttaataggaaaccgcaagaaatacgggggctcctatagtgcggttagtggaagaaagcacattgtggtctgcggacacatcactctggagagtgtttccaacttcctgaaggactttctgcacaaggaccgggatgacgtcaatgtggagatcgtttttcttcacaacatctcccccaacctggagcttgaagctctgttcaaacgacattttactcaggtggaattttatcagggttccgtcctcaatccacatgatcttgcaagagtcaagatagagtcagcagatgcatgcctgatccttgccaacaagtactgcgctgacccggatgcggaggatgcctcgaatatcatgagagtaatctccataaagaactaccatccgaagataagaatcatcactcaaatgctgcagtatcacaacaaggcccatctgctaaacatcccgagctggaattggaaagaaggtgatgacgcaatctgcctcgcagagttgaagttgggcttcatagcccagagctgcctggctcaaggcctctccaccatgcttgccaacctcttctccatgaggtcattcataaagattgaggaagacacatggcagaaatactacttggaaggagtctcaaatgaaatgtacacagaatatctctccagtgccttcgtgggtctgtccttccctactgtttgtgagctgtgttttgtgaagctcaagctcctaatgatagccattgagtacaagtctgccaaccgagagagccgttgaagatgagcagccgtcaacactatcaccaaaaaaaaagcaacggaatggaggcatgcggaactcacccaacacctcgcctaagctgatgaggcatgaccccttgttaattcctggcaatgatcagattgacaacatggactccaatgtgaagaagtacgactctactgggatgtttcactggtgtgcacccaaggagatagagaaagtcatcctgactcgaagtgaagctgccatgaccgtcctgagtggccatgtcgtggtctgcatctttggcgacgtcagctcagccctgatcggcctccggaacctggtgatgccgctccgtgccagcaactttcattaccatgagctcaagcacattgtgtttgtgggctctattgagtacctcaagcgggaatgggagacgcttcataacttccccaaagtgtccatattgcctggtacgccattaagtcgggctgatttaagggctgtcaacatcaacctctgtgacatgtgcgttatcctgtcagccaatcagaataatattgatgatacttcgctgcaggacaaggaatgcatcttggcgtcactcaacatcaaatctatgcagtttgatgacagcatcggagtcttgcaggctaattcccaagggttcacacctccaggaatggatagatcctctccagataacagcccagtgcacgggatgttacgtcaaccatccatcacaactggggtcaacatccccatcatcactgaactagtgaacgatactaatgttcagtttttggaccaagacgatgatgatgaccctgatacagaactgtacctcacgcagccctttgcctgtgggacagcatttgccgtcagtgtcctggactcactcatgagcgcgacgtacttcaatgacaatatcctcaccctgatacggaccctggtgaccggaggagccacgccggagctggaggctctgattgctgaggaaaacgcccttagaggtggctacagcaccccgcagacactggccaatagggaccgctgccgcgtggcccagttagctctgctcgatgggccatttgcggacttaggggatggtggttgttatggtgatctgttctgcaaagctctgaaaacatataatatgctttgttttggaatttaccggctgagagatgctcacctcagcacccccagtcagtgcacaaagaggtatgtcatcaccaacccgccctatgagtttgagctcgtgccgacggacctgatcttctgcttaatgcagtttgaccacaatgccggccagtcccgggccagcctgtcccattcctcccactcgtcgcagtcctccagcaagaagagctcctctgttcactccatcccatccacagcaaaccgacagaaccggcccaagtccagggagtcccgggacaaacagaacagaaaagaaatggtttacagatgaaccggataatgcctatcccagaaacattcaaatcaagcccatgagtacccacatggctaaccagatcaaccaatataaatccacaagcagcttgattccaccaatcagagaagttgaagatgaatgttgactcccaggagaccagaactatttttttaaagcctgacaaacttcataaatggtgatgtgacttttcttcttacatgctgaatcactggtggaaacgttaggataagcaagaattgccagaaaataaagtagacagatcttt

SEQ ID NO: 10587 - DNA, 4021 bp, Homo sapiens
  source 1..4021: mol_type = unassigned DNA
ggcgctcggggccagcgcagcccggggcgagcggggcgcgggccggggagggggagctgcccgcgcactccatccccctcccccccgggcgggcggcggcggctcgctgtatatatctcggcgcaccccgccaggtcgcgcacagcgccccgagcccaggcgcctccccgcccccctcccgcgctccgcggcggcggcggcggcggcagcagtagcagcaatatggctgttgatgggtgtttggggtggcgctggcggcgggaggagctcccccgagcccctgcgccggctgcccgttgctagctatggcaaatggtggcggcggcggcggcggcagcagcggcggcggcggcggcggcggaggcagcagtcttagaatgagtagcaatatccacgcgaaccatctcagcctagacgcgtcctcctcctcctcctcctcctcttcctcttcttcttcttcctcctcctcttcctcctcgtcctcggtccacgagcccaagatggatgcgctcatcatcccggtgaccatggaggtgccgtgcgacagccggggccaacgcatgtggtgggctttcctggcctcctccatggtgactttcttcgggggcctcttcatcatcttgctctggcggacgctcaagtacctgtggaccgtgtgctgccactgcgggggcaagacgaaggaggcccagaagattaacaatggctcaagccaggcggatggcactctcaaaccagtggatgaaaaagaggaggcagtggccgccgaggtcggctggatgacctccgtgaaggactgggcgggggtgatgatatccgcccagacactgactggcagagtcctggttgtcttagtctttgctctcagcatcggtgcacttgtaatatacttcatagattcatcaaacccaatagaatcctgccagaatttctacaaagatttcacattacagatcgacatggctttcaacgtgttcttccttctctacttcggcttgcggtttattgcagccaacgataaattgtggttctggctggaagtgaactctgtagtggatttcttcacggtgccccccgtgtttgtgtctgtgtacttaaacagaagttggcttggtttgagatttttaagagctctgagactgatacagttttcagaaattttgcagtttctgaatattcttaaaacaagtaattccatcaagctggtgaatctgctctccatatttatcagcacgtggctgactgcagccgggttcatccatttggtggagaattcaggggacccatgggaaaatttccaaaacaaccaggctctcacctactgggaatgtgtctatttactcatggtcacaatgtccaccgttggttatggggatgtttatgcaaaaaccacacttgggcgcctcttcatggtcttcttcatcctcgggggactggcacattgtggtctgcggacacatcactctggagagtgtttccaacttcctgaaggactttctgcacaaggaccgggatgacgtcaatgtggagatcgtttttcttcacaacatctcccccaacctggagcttgaagctctgttcaaacgacattttactcaggtggaattttatcagggttccgtcctcaatccacatgatcttgcaagagtcaagatagagtcagcagatgcatgcctgatccttgccaacaagtactgcgctgacccggatgcggaggatgcctcgaatatcatgagagtaatctccataaagaactaccatccgaagataagaatcatcactcaaatgctgcagtatcacaacaaggcccatctgctaaacatcccgagctggaattggaaagaaggtgatgacgcaatctgcctcgcagagttgaagttgggcttcatagcccagagctgcctggctcaaggcctctccaccatgcttgccaacctcttctccatgaggtcattcataaagattgaggaagacacatggcagaaatactacttggaaggagtctcaaatgaaatgtacacagaatatctctccagtgccttcgtgggtctgtccttccctactgtttgtgagctgtgttttgtgaagctcaagctcctaatgatagccattgagtacaagtctgccaaccgagagagccgtatattaattaatcctggaaaccatcttaagatccaagaaggtactttaggatttttcatcgcaagtgatgccaaagaagttaaaagggcatttttttactgcaaggcctgtcatgatgacatcacagatcccaaaagaataaaaaaatgtggctgcaaacggcttgaagatgagcagccgtcaacactatcaccaaaaaaaaagcaacggaatggaggcatgcggaactcacccaacacctcgcctaagctgatgaggcatgaccccttgttaattcctggcaatgatcagattgacaacatggactccaatgtgaagaagtacgactctactgggatgtttcactggtgtgcacccaaggagatagagaaagtcatcctgactcgaagtgaagctgccatgaccgtcctgagtggccatgtcgtggtctgcatctttggcgacgtcagctcagccctgatcggcctccggaacctggtgatgccgctccgtgccagcaactttcattaccatgagctcaagcacattgtgtttgtgggctctattgagtacctcaagcgggaatgggagacgcttcataacttccccaaagtgtccatattgcctggtacgccattaagtcgggctgatttaagggctgtcaacatcaacctctgtgacatgtgcgttatcctgtcagccaatcagaataatattgatgatacttcgctgcaggacaaggaatgcatcttggcgtcactcaacatcaaatctatgcagtttgatgacagcatcggagtcttgcaggctaattcccaagggttcacacctccaggaatggatagatcctctccagataacagcccagtgcacgggatgttacgtcaaccatccatcacaactggggtcaacatccccatcatcactgaactagtgaacgatactaatgttcagtttttggaccaagacgatgatgatgaccctgatacagaactgtacctcacgcagccctttgcctgtgggacagcatttgccgtcagtgtcctggactcactcatgagcgcgacgtacttcaatgacaatatcctcaccctgatacggaccctggtgaccggaggagccacgccggagctggaggctctgattgctgaggaaaacgcccttagaggtggctacagcaccccgcagacactggccaatagggaccgctgccgcgtggcccagttagctctgctcgatgggccatttgcggacttaggggatggtggttgttatggtgatctgttctgcaaagctctgaaaacatataatatgctttgttttggaatttaccggctgagagatgctcacctcagcacccccagtcagtgcacaaagaggtatgtcatcaccaacccgccctatgagtttgagctcgtgccgacggacctgatcttctgcttaatgcagtttgaccacaatgccggccagtcccgggccagcctgtcccattcctcccactcgtcgcagtcctccagcaagaagagctcctctgttcactccatcccatccacagcaaaccgacagaaccggcccaagtccagggagtcccgggacaaacagaacagaaaagaaatggtttacagatgaaccggataatgcctatcccagaaacattcaaatcaagcccatgagtacccacatggctaaccagatcaaccaatataaatccacaagcagcttgattccaccaatcagagaagttgaagatgaatgttgactcccaggagaccagaactatttttttaaagcctgacaaacttcataaatggtgatgtgacttttcttcttacatgctgaatcactggtggaaacgttaggataagcaagaattgccagaaaataaagtagacagatcttt

SEQ ID NO: 10588 - DNA, 3145 bp, Homo sapiens
  source 1..3145: mol_type = unassigned DNA
ggatttcttcacggtgccccccgtgtttgtgtctgtgtacttaaacagaagttggcttggtttgagatttttaagagctctgagactgatacagttttcagaaattttgcagtttctgaatattcttaaaacaagtaattccatcaagctggtgaatctgctctccatatttatcagcacgtggctgactgcagccgggttcatccatttggtggagaattcaggggacccatgggaaaatttccaaaacaaccaggctctcacctactgggaatgtgtctatttactcatggtcacaatgtccaccgttggttatggggatgtttatgcaaaaaccacacttgggcgcctcttcatggtcttcttcatcctcgggggactggcacattgtggtctgcggacacatcactctggagagtgtttccaacttcctgaaggactttctgcacaaggaccgggatgacgtcaatgtggagatcgtttttcttcacaacatctcccccaacctggagcttgaagctctgttcaaacgacattttactcaggtggaattttatcagggttccgtcctcaatccacatgatcttgcaagagtcaagatagagtcagcagatgcatgcctgatccttgccaacaagtactgcgctgacccggatgcggaggatgcctcgaatatcatgagagtaatctccataaagaactaccatccgaagataagaatcatcactcaaatgctgcagtatcacaacaaggcccatctgctaaacatcccgagctggaattggaaagaaggtgatgacgcaatctgcctcgcagagttgaagttgggcttcatagcccagagctgcctggctcaaggcctctccaccatgcttgccaacctcttctccatgaggtcattcataaagattgaggaagacacatggcagaaatactacttggaaggagtctcaaatgaaatgtacacagaatatctctccagtgccttcgtgggtctgtccttccctactgtttgtgagctgtgttttgtgaagctcaagctcctaatgatagccattgagtacaagtctgccaaccgagagagccgtatattaattaatcctggaaaccatcttaagatccaagaaggtactttaggatttttcatcgcaagtgatgccaaagaagttaaaagggcatttttttactgcaaggcctgtcatgatgacatcacagatcccaaaagaataaaaaaatgtggctgcaaacggcgttgggaagaacattgttctttgtggagactggaaagcaagggaaatgtgagaagattaaactactgcaggggtcagcaaactttctctgtcaaagtcaaggttgcagctagatcacgctattccaaagatccatttgagttcaagaaggagactcccaattctcggcttgtgaccgagccagttgaagatgagcagccgtcaacactatcaccaaaaaaaaagcaacggaatggaggcatgcggaactcacccaacacctcgcctaagctgatgaggcatgaccccttgttaattcctggcaatgatcagattgacaacatggactccaatgtgaagaagtacgactctactgggatgtttcactggtgtgcacccaaggagatagagaaagtcatcctgactcgaagtgaagctgccatgaccgtcctgagtggccatgtcgtggtctgcatctttggcgacgtcagctcagccctgatcggcctccggaacctggtgatgccgctccgtgccagcaactttcattaccatgagctcaagcacattgtgtttgtgggctctattgagtacctcaagcgggaatgggagacgcttcataacttccccaaagtgtccatattgcctggtacgccattaagtcgggctgatttaagggctgtcaacatcaacctctgtgacatgtgcgttatcctgtcagccaatcagaataatattgatgatacttcgctgcaggacaaggaatgcatcttggcgtcactcaacatcaaatctatgcagtttgatgacagcatcggagtcttgcaggctaattcccaagggttcacacctccaggaatggatagatcctctccagataacagcccagtgcacgggatgttacgtcaaccatccatcacaactggggtcaacatccccatcatcactgaactagtgaacgatactaatgttcagtttttggaccaagacgatgatgatgaccctgatacagaactgtacctcacgcagccctttgcctgtgggacagcatttgccgtcagtgtcctggactcactcatgagcgcgacgtacttcaatgacaatatcctcaccctgatacggaccctggtgaccggaggagccacgccggagctggaggctctgattgctgaggaaaacgcccttagaggtggctacagcaccccgcagacactggccaatagggaccgctgccgcgtggcccagttagctctgctcgatgggccatttgcggacttaggggatggtggttgttatggtgatctgttctgcaaagctctgaaaacatataatatgctttgttttggaatttaccggctgagagatgctcacctcagcacccccagtcagtgcacaaagaggtatgtcatcaccaacccgccctatgagtttgagctcgtgccgacggacctgatcttctgcttaatgcagtttgaccacaatgccggccagtcccgggccagcctgtcccattcctcccactcgtcgcagtcctccagcaagaagagctcctctgttcactccatcccatccacagcaaaccgacagaaccggcccaagtccagggagtcccgggacaaacagaaaaaagaaatggtttacagatgaaccggataatgcctatcccagaaacattcaaatcaagcccatgagtacccacatggctaaccagatcaaccaatataaatccacaagcagcttgattccaccaatcagagaagttgaagatgaatgttgactcccaggagaccagaactatttttttaaagcctgacaaacttcataaatggtgatgtgacttttcttcttacatgctgaatcactggtggaaacgttaggataagcaagaattgccagaaaataaagtagacagatct

SEQ ID NO: 10589 - DNA, 631 bp, Homo sapiens
  source 1..631: mol_type = unassigned DNA
atcttgtgatgtatatctgggattgtccgaaaattatgaaatgaaagttgcatcacacttcatgaaacctcttgcggttgggctacttgaaagtgactttgaccttgtatagaaaggtatgtcatcaccaacccgccctatgagtttgagctcgtgccgacggacctgatcttctgcttaatgcagtttgaccacaatgccggccagtcccgggccagcctgtcccattcctcccactcgtcgcagtcctccagcaagaagagctcctctgttcactccatcccatccacagcaaaccgacagaaccggcccaagtccagggagtcccgggacaaacagaaaaaagaaatggtttacagatgaaccggataatgcctatcccagaaacattcaaatcaagcccatgagtacccacatggctaaccagatcaaccaatataaatccacaagcagcttgattccaccaatcagagaagttgaagatgaatgttgactcccaggagaccagaactatttttttaaagcctgacaaacttcataaatggtgatgtgacttttcttcttacatgctgaatcactggtggaaacgttaggataagcaagaattgccagaaaataaagtagacagatc

SEQ ID NO: 10590 - DNA, 3806 bp, Homo sapiens
  source 1..3806: mol_type = unassigned DNA
gcaatatccacgcgaaccatctcagcctagacgcgtcctcctcctcctcctcctcctcttcctcttcttcttcttcctcctcctcttcctcctcgtcctcggtccacgagcccaagatggatgcgctcatcatcccggtgaccatggaggtgccgtgcgacagccggggccaacgcatgtggtgggctttcctggcctcctccatggtgactttcttcgggggcctcttcatcatcttgctctggcggacgctcaagtacctgtggaccgtgtgctgccactgcgggggcaagacgaaggaggcccagaagattaacaatggctcaagccaggcggatggcactctcaaaccagtggatgaaaaagaggaggcagtggccgccgaggtcggctggatgacctccgtgaaggactgggcgggggtgatgatatccgcccagacactgactggcagagtcctggttgtcttagtctttgctctcagcatcggtgcacttgtaatatacttcatagattcatcaaacccaatagaatcctgccagaatttctacaaagatttcacattacagatcgacatggctttcaacgtgttcttccttctctacttcggcttgcggtttattgcagccaacgataaattgtggttctggctggaagtgaactctgtagtggatttcttcacggtgccccccgtgtttgtgtctgtgtacttaaacagaagttggcttggtttgagatttttaagagctctgagactgatacagttttcagaaattttgcagtttctgaatattcttaaaacaagtaattccatcaagctggtgaatctgctctccatatttatcagcacgtggctgactgcagccgggttcatccatttggtggagaattcaggggacccatgggaaaatttccaaaacaaccaggctctcacctactgggaatgtgtctatttactcatggtcacaatgtccaccgttggttatggggatgtttatgcaaaaaccacacttgggcgcctcttcatggtcttcttcatcctcgggggactggccatgtttgccagctacgtccctgaaatcatagagttaataggaaaccgcaagaaatacgggggctcctatagtgcggttagtggaagaaagcacattgtggtctgcggacacatcactctggagagtgtttccaacttcctgaaggactttctgcacaaggaccgggatgacgtcaatgtggagatcgtttttcttcacaacatctcccccaacctggagcttgaagctctgttcaaacgacattttactcaggtggaattttatcagggttccgtcctcaatccacatgatcttgcaagagtcaagatagagtcagcagatgcatgcctgatccttgccaacaagtactgcgctgacccggatgcggaggatgcctcgaatatcatgagagtaatctccataaagaactaccatccgaagataagaatcatcactcaaatgctgcagtatcacaacaaggcccatctgctaaacatcccgagctggaattggaaagaaggtgatgacgcaatctgcctcgcagagttgaagttgggcttcatagcccagagctgcctggctcaaggcctctccaccatgcttgccaacctcttctccatgaggtcattcataaagattgaggaagacacatggcagaaatactacttggaaggagtctcaaatgaaatgtacacagaatatctctccagtgccttcgtgggtctgtccttccctactgtttgtgagctgtgttttgtgaagctcaagctcctaatgatagccattgagtacaagtctgccaaccgagagagccgaagccgaaagcgtatattaattaatcctggaaaccatcttaagatccaagaaggtactttaggatttttcatcgcaagtgatgccaaagaagttaaaagggcatttttttactgcaaggcctgtcatgatgacatcacagatcccaaaagaataaaaaaatgtggctgcaaacggcttgaagatgagcagccgtcaacactatcaccaaaaaaaaagcaacggaatggaggcatgcggaactcacccaacacctcgcctaagctgatgaggcatgaccccttgttaattcctggcaatgatcagattgacaacatggactccaatgtgaagaagtacgactctactgggatgtttcactggtgtgcacccaaggagatagagaaagtcatcctgactcgaagtgaagctgccatgaccgtcctgagtggccatgtcgtggtctgcatctttggcgacgtcagctcagccctgatcggcctccggaacctggtgatgccgctccgtgccagcaactttcattaccatgagctcaagcacattgtgtttgtgggctctattgagtacctcaagcgggaatgggagacgcttcataacttccccaaagtgtccatattgcctggtacgccattaagtcgggctgatttaagggctgtcaacatcaacctctgtgacatgtgcgttatcctgtcagccaatcagaataatattgatgatacttcgctgcaggacaaggaatgcatcttggcgtcactcaacatcaaatctatgcagtttgatgacagcatcggagtcttgcaggctaattcccaagggttcacacctccaggaatggatagatcctctccagataacagcccagtgcacgggatgttacgtcaaccatccatcacaactggggtcaacatccccatcatcactgaactagctaaaccgggcaagttgcctttggtatcagtcaatcaggaaaaaaacagtgggacgcacattctaatgataactgaactggtgaacgatactaatgttcagtttttggaccaagacgatgatgatgaccctgatacagaactgtacctcacgcagccctttgcctgtgggacagcatttgccgtcagtgtcctggactcactcatgagcgcgacgtacttcaatgacaatatcctcaccctgatacggaccctggtgaccggaggagccacgccggagctggaggctctgattgctgaggaaaacgcccttagaggtggctacagcaccccgcagacactggccaatagggaccgctgccgcgtggcccagttagctctgctcgatgggccatttgcggacttaggggatggtggttgttatggtgatctgttctgcaaagctctgaaaacatataatatgctttgttttggaatttaccggctgagagatgctcacctcagcacccccagtcagtgcacaaagaggtatgtcatcaccaacccgccctatgagtttgagctcgtgccgacggacctgatcttctgcttaatgcagtttgaccacaatgccggccagtcccgggccagcctgtcccattcctcccactcgtcgcagtcctccagcaagaagagctcctctgttcactccatcccatccacagcaaaccgacagaaccggcccaagtccagggagtcccgggacaaacagaaaaaagaaatggtttacagatgaaccggataatgcctatcccagaaacattcaaatcaagcccatgagtacccacatggctaaccagatcaaccaatataaatccacaagcagcttgattccaccaatcagagaagttgaagatgaatgttgactcccaggagaccagaactatttttttaaagcctgacaaacttcataaatggtgatgtgacttttcttcttacatgctgaatcactggtggaaacgttaggataagcaagaattgccagaaaataaag

SEQ ID NO: 10591 - DNA, 3487 bp, Homo sapiens
  source 1..3487: mol_type = unassigned DNA
ggagaacacaccagtctggaaaagtgaagccagccaggttcagtgtgggtggagtctcccaccagggatcccaccctagcactaaccagggttgaggtgctggggaaaatgaaaagcattggtgtctttctgacccacctaggttgtcttagtctttgctctcagcatcggtgcacttgtaatatacttcatagattcatcaaacccaatagaatcctgccagaatttctacaaagatttcacattacagatcgacatggctttcaacgtgttcttccttctctacttcggcttgcggtttattgcagccaacgataaattgtggttctggctggaagtgaactctgtagtggatttcttcacggtgccccccgtgtttgtgtctgtgtacttaaacagaagttggcttggtttgagatttttaagagctctgagactgatacagttttcagaaattttgcagtttctgaatattcttaaaacaagtaattccatcaagctggtgaatctgctctccatatttatcagcacgtggctgactgcagccgggttcatccatttggtggagaattcaggggacccatgggaaaatttccaaaacaaccaggctctcacctactgggaatgtgtctatttactcatggtcacaatgtccaccgttggttatggggatgtttatgcaaaaaccacacttgggcgcctcttcatggtcttcttcatcctcgggggactggccatgtttgccagctacgtccctgaaatcatagagttaataggaaaccgcaagaaatacgggggctcctatagtgcggttagtggaagaaagcacattgtggtctgcggacacatcactctggagagtgtttccaacttcctgaaggactttctgcacaaggaccgggatgacgtcaatgtggagatcgtttttcttcacaacatctcccccaacctggagcttgaagctctgttcaaacgacattttactcaggtggaattttatcagggttccgtcctcaatccacatgatcttgcaagagtcaagatagagtcagcagatgcatgcctgatccttgccaacaagtactgcgctgacccggatgcggaggatgcctcgaatatcatgagagtaatctccataaagaactaccatccgaagataagaatcatcactcaaatgctgcagtatcacaacaaggcccatctgctaaacatcccgagctggaattggaaagaaggtgatgacgcaatctgcctcgcagagttgaagttgggcttcatagcccagagctgcctggctcaaggcctctccaccatgcttgccaacctcttctccatgaggtcattcataaagattgaggaagacacatggcagaaatactacttggaaggagtctcaaatgaaatgtacacagaatatctctccagtgccttcgtgggtctgtccttccctactgtttgtgagctgtgttttgtgaagctcaagctcctaatgatagccattgagtacaagtctgccaaccgagagagccgaagccgaaagcgtatattaattaatcctggaaaccatcttaagatccaagaaggtactttaggatttttcatcgcaagtgatgccaaagaagttaaaagggcatttttttactgcaaggcctgtcatgatgacatcacagatcccaaaagaataaaaaaatgtggctgcaaacggctgatatattttgaagatgagcagccgtcaacactatcaccaaaaaaaaagcaacggaatggaggcatgcggaactcacccaacacctcgcctaagctgatgaggcatgaccccttgttaattcctggcaatgatcagattgacaacatggactccaatgtgaagaagtacgactctactgggatgtttcactggtgtgcacccaaggagatagagaaagtcatcctgactcgaagtgaagctgccatgaccgtcctgagtggccatgtcgtggtctgcatctttggcgacgtcagctcagccctgatcggcctccggaacctggtgatgccgctccgtgccagcaactttcattaccatgagctcaagcacattgtgtttgtgggctctattgagtacctcaagcgggaatgggagacgcttcataacttccccaaagtgtccatattgcctggtacgccattaagtcgggctgatttaagggctgtcaacatcaacctctgtgacatgtgcgttatcctgtcagccaatcagaataatattgatgatacttcgctgcaggacaaggaatgcatcttggcgtcactcaacatcaaatctatgcagtttgatgacagcatcggagtcttgcaggctaattcccaagggttcacacctccaggaatggatagatcctctccagataacagcccagtgcacgggatgttacgtcaaccatccatcacaactggggtcaacatccccatcatcactgaactagctaaaccgggcaagttgcctttggtatcagtcaatcaggaaaaaaacagtgggacgcacattctaatgataactgaactggtgaacgatactaatgttcagtttttggaccaagacgatgatgatgaccctgatacagaactgtacctcacgcagccctttgcctgtgggacagcatttgccgtcagtgtcctggactcactcatgagcgcgacgtacttcaatgacaatatcctcaccctgatacggaccctggtgaccggaggagccacgccggagctggaggctctgattgctgaggaaaacgcccttagaggtggctacagcaccccgcagacactggccaatagggaccgctgccgcgtggcccagttagctctgctcgatgggccatttgcggacttaggggatggtggttgttatggtgatctgttctgcaaagctctgaaaacatataatatgctttgttttggaatttaccggctgagagatgctcacctcagcacccccagtcagtgcacaaagaggtatgtcatcaccaacccgccctatgagtttgagctcgtgccgacggacctgatcttctgcttaatgcagtttgaccacaatgccggccagtcccgggccagcctgtcccattcctcccactcgtcgcagtcctccagcaagaagagctcctctgttcactccatcccatccacagcaaaccgacagaaccggcccaagtccagggagtcccgggacaaacagaaaaaagaaatggtttacagatgaaccggataatgcctatcccagaaacattcaaatcaagcccatgagtacccacatggctaaccagatcaaccaatataaatccacaagcagcttgattccaccaatcagagaagttgaagatgaatgttgactcccaggagaccagaactatttttttaaagcctgacaaacttcataaatggtgatgtgacttttcttcttacatgctgaatcactggtggaaacgttaggataagcaagaattgccag

SEQ ID NO: 10592 - DNA, 3751 bp, Homo sapiens
  source 1..3751: mol_type = unassigned DNA
cccaagatggatgcgctcatcatcccggtgaccatggaggtgccgtgcgacagccggggccaacgcatgtggtgggctttcctggcctcctccatggtgactttcttcgggggcctcttcatcatcttgctctggcggacgctcaagtacctgtggaccgtgtgctgccactgcgggggcaagacgaaggaggcccagaagattaacaatggctcaagccaggcggatggcactctcaaaccagtggatgaaaaagaggaggcagtggccgccgaggtcggctggatgacctccgtgaaggactgggcgggggtgatgatatccgcccagacactgactggcagagtcctggttgtcttagtctttgctctcagcatcggtgcacttgtaatatacttcatagattcatcaaacccaatagaatcctgccagaatttctacaaagatttcacattacagatcgacatggctttcaacgtgttcttccttctctacttcggcttgcggtttattgcagccaacgataaattgtggttctggctggaagtgaactctgtagtggatttcttcacggtgccccccgtgtttgtgtctgtgtacttaaacagaagttggcttggtttgagatttttaagagctctgagactgatacagttttcagaaattttgcagtttctgaatattcttaaaacaagtaattccatcaagctggtgaatctgctctccatatttatcagcacgtggctgactgcagccgggttcatccatttggtggagaattcaggggacccatgggaaaatttccaaaacaaccaggctctcacctactgggaatgtgtctatttactcatggtcacaatgtccaccgttggttatggggatgtttatgcaaaaaccacacttgggcgcctcttcatggtcttcttcatcctcgggggactggccatgtttgccagctacgtccctgaaatcatagagttaataggaaaccgcaagaaatacgggggctcctatagtgcggttagtggaagaaagcacattgtggtctgcggacacatcactctggagagtgtttccaacttcctgaaggactttctgcacaaggaccgggatgacgtcaatgtggagatcgtttttcttcacaacatctcccccaacctggagcttgaagctctgttcaaacgacattttactcaggtggaattttatcagggttccgtcctcaatccacatgatcttgcaagagtcaagatagagtcagcagatgcatgcctgatccttgccaacaagtactgcgctgacccggatgcggaggatgcctcgaatatcatgagagtaatctccataaagaactaccatccgaagataagaatcatcactcaaatgctgcagtatcacaacaaggcccatctgctaaacatcccgagctggaattggaaagaaggtgatgacgcaatctgcctcgcagagttgaagttgggcttcatagcccagagctgcctggctcaaggcctctccaccatgcttgccaacctcttctccatgaggtcattcataaagattgaggaagacacatggcagaaatactacttggaaggagtctcaaatgaaatgtacacagaatatctctccagtgccttcgtgggtctgtccttccctactgtttgtgagctgtgttttgtgaagctcaagctcctaatgatagccattgagtacaagtctgccaaccgagagagccgaagccgaaagcgtatattaattaatcctggaaaccatcttaagatccaagaaggtactttaggatttttcatcgcaagtgatgccaaagaagttaaaagggcatttttttactgcaaggcctgtcatgatgacatcacagatcccaaaagaataaaaaaatgtggctgcaaacggctgatatattccaagatgtccatctacaagagaatgagacgggcatgttgttttgattgcggacgttctgagcgtgactgctcatgcatgtcaggccgtgtgcgtggtaacgtggacacccttgagagagccttcccactttcttctgtctctgttaatgattgctccaccagtttccgtgcctttgaagatgagcagccgtcaacactatcaccaaaaaaaaagcaacggaatggaggcatgcggaactcacccaacacctcgcctaagctgatgaggcatgaccccttgttaattcctggcaatgatcagattgacaacatggactccaatgtgaagaagtacgactctactgggatgtttcactggtgtgcacccaaggagatagagaaagtcatcctgactcgaagtgaagctgccatgaccgtcctgagtggccatgtcgtggtctgcatctttggcgacgtcagctcagccctgatcggcctccggaacctggtgatgccgctccgtgccagcaactttcattaccatgagctcaagcacattgtgtttgtgggctctattgagtacctcaagcgggaatgggagacgcttcataacttccccaaagtgtccatattgcctggtacgccattaagtcgggctgatttaagggctgtcaacatcaacctctgtgacatgtgcgttatcctgtcagccaatcagaataatattgatgatacttcgctgcaggacaaggaatgcatcttggcgtcactcaacatcaaatctatgcagtttgatgacagcatcggagtcttgcaggctaattcccaagggttcacacctccaggaatggatagatcctctccagataacagcccagtgcacgggatgttacgtcaaccatccatcacaactggggtcaacatccccatcatcactgaactagtgaacgatactaatgttcagtttttggaccaagacgatgatgatgaccctgatacagaactgtacctcacgcagccctttgcctgtgggacagcatttgccgtcagtgtcctggactcactcatgagcgcgacgtacttcaatgacaatatcctcaccctgatacggaccctggtgaccggaggagccacgccggagctggaggctctgattgctgaggaaaacgcccttagaggtggctacagcaccccgcagacactggccaatagggaccgctgccgcgtggcccagttagctctgctcgatgggccatttgcggacttaggggatggtggttgttatggtgatctgttctgcaaagctctgaaaacatataatatgctttgttttggaatttaccggctgagagatgctcacctcagcacccccagtcagtgcacaaagaggtatgtcatcaccaacccgccctatgagtttgagctcgtgccgacggacctgatcttctgcttaatgcagtttgaccacaatgccggccagtcccgggccagcctgtcccattcctcccactcgtcgcagtcctccagcaagaagagctcctctgttcactccatcccatccacagcaaaccgacagaaccggcccaagtccagggagtcccgggacaaacagaatgcaacaaggatgaatagaatgggccaagaaaagaaatggtttacagatgaaccggataatgcctatcccagaaacattcaaatcaagcccatgagtacccacatggctaaccagatcaaccaatataaatccacaagcagcttgattccaccaatcagagaagttgaagatgaatgttgactcccaggagaccagaactatttttttaaagcctgacaaacttcataaatgg

SEQ ID NO: 10593 - DNA, 3684 bp, Homo sapiens
  source 1..3684: mol_type = unassigned DNA
cggcggcggcggaggcagcagtcttagaatgagtagcaatatccacgcgaaccatctcagcctagacgcgtcctcctcctcctcctcctcctcttcctcttcttcttcttcctcctcctcttcctcctcgtcctcggtccacgagcccaagatggatgcgctcatcatcccggtgaccatggaggtgccgtgcgacagccggggccaacgcatgtggtgggctttcctggcctcctccatggtgactttcttcgggggcctcttcatcatcttgctctggcggacgctcaagtacctgtggaccgtgtgctgccactgcgggggcaagacgaaggaggcccagaagattaacaatggctcaagccaggcggatggcactctcaaaccagtggatgaaaaagaggaggcagtggccgccgaggtcggctggatgacctccgtgaaggactgggcgggggtgatgatatccgcccagacactgactggcagagtcctggttgtcttagtctttgctctcagcatcggtgcacttgtaatatacttcatagattcatcaaacccaatagaatcctgccagaatttctacaaagatttcacattacagatcgacatggctttcaacgtgttcttccttctctacttcggcttgcggtttattgcagccaacgataaattgtggttctggctggaagtgaactctgtagtggatttcttcacggtgccccccgtgtttgtgtctgtgtacttaaacagaagttggcttggtttgagatttttaagagctctgagactgatacagttttcagaaattttgcagtttctgaatattcttaaaacaagtaattccatcaagctggtgaatctgctctccatatttatcagcacgtggctgactgcagccgggttcatccatttggtggagaattcaggggacccatgggaaaatttccaaaacaaccaggctctcacctactgggaatgtgtctatttactcatggtcacaatgtccaccgttggttatggggatgtttatgcaaaaaccacacttgggcgcctcttcatggtcttcttcatcctcgggggactggcaatgtttgcccgctacgtgcccgaaattgctgctctcatcctgagtcggaataaattcggcgggacttttaacaaacatggaggcagaaagcacattgtggtctgcggacacatcactctggagagtgtttccaacttcctgaaggactttctgcacaaggaccgggatgacgtcaatgtggagatcgtttttcttcacaacatctcccccaacctggagcttgaagctctgttcaaacgacattttactcaggtggaattttatcagggttccgtcctcaatccacatgatcttgcaagagtcaagatagagtcagcagatgcatgcctgatccttgccaacaagtactgcgctgacccggatgcggaggatgcctcgaatatcatgagagtaatctccataaagaactaccatccgaagataagaatcatcactcaaatgctgcagtatcacaacaaggcccatctgctaaacatcccgagctggaattggaaagaaggtgatgacgcaatctgcctcgcagagttgaagttgggcttcatagcccagagctgcctggctcaaggcctctccaccatgcttgccaacctcttctccatgaggtcattcataaagattgaggaagacacatggcagaaatactacttggaaggagtctcaaatgaaatgtacacagaatatctctccagtgccttcgtgggtctgtccttccctactgtttgtgagctgtgttttgtgaagctcaagctcctaatgatagccattgagtacaagtctgccaaccgagagagccgaagccgaaagcgtatattaattaatcctggaaaccatcttaagatccaagaaggtactttaggatttttcatcgcaagtgatgccaaagaagttaaaagggcatttttttactgcaaggcctgtcatgatgacatcacagatcccaaaagaataaaaaaatgtggctgcaaacggctgatatattttgaagatgagcagccgtcaacactatcaccaaaaaaaaagcaacggaatggaggcatgcggaactcacccaacacctcgcctaagctgatgaggcatgaccccttgttaattcctggcaatgatcagattgacaacatggactccaatgtgaagaagtacgactctactgggatgtttcactggtgtgcacccaaggagatagagaaagtcatcctgactcgaagtgaagctgccatgaccgtcctgagtggccatgtcgtggtctgcatctttggcgacgtcagctcagccctgatcggcctccggaacctggtgatgccgctccgtgccagcaactttcattaccatgagctcaagcacattgtgtttgtgggctctattgagtacctcaagcgggaatgggagacgcttcataacttccccaaagtgtccatattgcctggtacgccattaagtcgggctgatttaagggctgtcaacatcaacctctgtgacatgtgcgttatcctgtcagccaatcagaataatattgatgatacttcgctgcaggacaaggaatgcatcttggcgtcactcaacatcaaatctatgcagtttgatgacagcatcggagtcttgcaggctaattcccaagggttcacacctccaggaatggatagatcctctccagataacagcccagtgcacgggatgttacgtcaaccatccatcacaactggggtcaacatccccatcatcactgaactagtgaacgatactaatgttcagtttttggaccaagacgatgatgatgaccctgatacagaactgtacctcacgcagccctttgcctgtgggacagcatttgccgtcagtgtcctggactcactcatgagcgcgacgtacttcaatgacaatatcctcaccctgatacggaccctggtgaccggaggagccacgccggagctggaggctctgattgctgaggaaaacgcccttagaggtggctacagcaccccgcagacactggccaatagggaccgctgccgcgtggcccagttagctctgctcgatgggccatttgcggacttaggggatggtggttgttatggtgatctgttctgcaaagctctgaaaacatataatatgctttgttttggaatttaccggctgagagatgctcacctcagcacccccagtcagtgcacaaagaggtatgtcatcaccaacccgccctatgagtttgagctcgtgccgacggacctgatcttctgcttaatgcagtttgaccacaatgccggccagtcccgggccagcctgtcccattcctcccactcgtcgcagtcctccagcaagaagagctcctctgttcactccatcccatccacagcaaaccgacagaaccggcccaagtccagggagtcccgggacaaacagaatgcaacaaggatgaatagaatgggccaagaaaagaaatggtttacagatgaaccggataatgcctatcccagaaacattcaaatcaagcccatgagtacccacatggctaaccagatcaaccaatataaatccacaagcagcttgattccaccaatcagagaagttgaagatgaatgttgactcccaggagacca

SEQ ID NO: 10594 - DNA, 3976 bp, Homo sapiens
  source 1..3976: mol_type = unassigned DNA
cgctccgcggcggcggcggcggcggcagcagtagcagcaatatggctgttgatgggtgtttggggtggcgctggcggcgggaggagctcccccgagcccctgcgccggctgcccgttgctagctatggcaaatggtggcggcggcggcggcggcagcagcggcggcggcggcggcggcggaggcagcagtcttagaatgagtagcaatatccacgcgaaccatctcagcctagacgcgtcctcctcctcctcctcctcctcttcctcttcttcttcttcctcctcctcttcctcctcgtcctcggtccacgagcccaagatggatgcgctcatcatcccggtgaccatggaggtgccgtgcgacagccggggccaacgcatgtggtgggctttcctggcctcctccatggtgactttcttcgggggcctcttcatcatcttgctctggcggacgctcaagtacctgtggaccgtgtgctgccactgcgggggcaagacgaaggaggcccagaagattaacaatggctcaagccaggcggatggcactctcaaaccagtggatgaaaaagaggaggcagtggccgccgaggtcggctggatgacctccgtgaaggactgggcgggggtgatgatatccgcccagacactgactggcagagtcctggttgtcttagtctttgctctcagcatcggtgcacttgtaatatacttcatagattcatcaaacccaatagaatcctgccagaatttctacaaagatttcacattacagatcgacatggctttcaacgtgttcttccttctctacttcggcttgcggtttattgcagccaacgataaattgtggttctggctggaagtgaactctgtagtggatttcttcacggtgccccccgtgtttgtgtctgtgtacttaaacagaagttggcttggtttgagatttttaagagctctgagactgatacagttttcagaaattttgcagtttctgaatattcttaaaacaagtaattccatcaagctggtgaatctgctctccatatttatcagcacgtggctgactgcagccgggttcatccatttggtggagaattcaggggacccatgggaaaatttccaaaacaaccaggctctcacctactgggaatgtgtctatttactcatggtcacaatgtccaccgttggttatggggatgtttatgcaaaaaccacacttgggcgcctcttcatggtcttcttcatcctcgggggactggccatgtttgccagctacgtccctgaaatcatagagttaataggaaaccgcaagaaatacgggggctcctatagtgcggttagtggaagaaagcacattgtggtctgcggacacatcactctggagagtgtttccaacttcctgaaggactttctgcacaaggaccgggatgacgtcaatgtggagatcgtttttcttcacaacatctcccccaacctggagcttgaagctctgttcaaacgacattttactcaggtggaattttatcagggttccgtcctcaatccacatgatcttgcaagagtcaagatagagtcagcagatgcatgcctgatccttgccaacaagtactgcgctgacccggatgcggaggatgcctcgaatatcatgagagtaatctccataaagaactaccatccgaagataagaatcatcactcaaatgctgcagtatcacaacaaggcccatctgctaaacatcccgagctggaattggaaagaaggtgatgacgcaatctgcctcgcagagttgaagttgggcttcatagcccagagctgcctggctcaaggcctctccaccatgcttgccaacctcttctccatgaggtcattcataaagattgaggaagacacatggcagaaatactacttggaaggagtctcaaatgaaatgtacacagaatatctctccagtgccttcgtgggtctgtccttccctactgtttgtgagctgtgttttgtgaagctcaagctcctaatgatagccattgagtacaagtctgccaaccgagagagccgtatattaattaatcctggaaaccatcttaagatccaagaaggtactttaggatttttcatcgcaagtgatgccaaagaagttaaaagggcatttttttactgcaaggcctgtcatgatgacatcacagatcccaaaagaataaaaaaatgtggctgcaaacggcccaagatgtccatctacaagagaatgagacgggcatgttgttttgattgcggacgttctgagcgtgactgctcatgcatgtcaggccgtgtgcgtggtaacgtggacacccttgagagagccttcccactttcttctgtctctgttaatgattgctccaccagtttccgtgcctttgaagatgagcagccgtcaacactatcaccaaaaaaaaagcaacggaatggaggcatgcggaactcacccaacacctcgcctaagctgatgaggcatgaccccttgttaattcctggcaatgatcagattgacaacatggactccaatgtgaagaagtacgactctactgggatgtttcactggtgtgcacccaaggagatagagaaagtcatcctgactcgaagtgaagctgccatgaccgtcctgagtggccatgtcgtggtctgcatctttggcgacgtcagctcagccctgatcggcctccggaacctggtgatgccgctccgtgccagcaactttcattaccatgagctcaagcacattgtgtttgtgggctctattgagtacctcaagcgggaatgggagacgcttcataacttccccaaagtgtccatattgcctggtacgccattaagtcgggctgatttaagggctgtcaacatcaacctctgtgacatgtgcgttatcctgtcagccaatcagaataatattgatgatacttcgctgcaggacaaggaatgcatcttggcgtcactcaacatcaaatctatgcagtttgatgacagcatcggagtcttgcaggctaattcccaagggttcacacctccaggaatggatagatcctctccagataacagcccagtgcacgggatgttacgtcaaccatccatcacaactggggtcaacatccccatcatcactgaactagtgaacgatactaatgttcagtttttggaccaagacgatgatgatgaccctgatacagaactgtacctcacgcagccctttgcctgtgggacagcatttgccgtcagtgtcctggactcactcatgagcgcgacgtacttcaatgacaatatcctcaccctgatacggaccctggtgaccggaggagccacgccggagctggaggctctgattgctgaggaaaacgcccttagaggtggctacagcaccccgcagacactggccaatagggaccgctgccgcgtggcccagttagctctgctcgatgggccatttgcggacttaggggatggtggttgttatggtgatctgttctgcaaagctctgaaaacatataatatgctttgttttggaatttaccggctgagagatgctcacctcagcacccccagtcagtgcacaaagaggtatgtcatcaccaacccgccctatgagtttgagctcgtgccgacggacctgatcttctgcttaatgcagtttgaccacaatgccggccagtcccgggccagcctgtcccattcctcccactcgtcgcagtcctccagcaagaagagctcctctgttcactccatcccatccacagcaaaccgacagaaccggcccaagtccagggagtcccgggacaaacagaaaaaagaaatggtttacagatgaaccggataatgcctatcccagaaacattcaaatcaagcccatgagtacccacatggctaaccagatcaaccaatataaatccacaagcagcttgattccaccaatcagagaagttgaagatgaatgttgactcccaggagacca

SEQ ID NO: 10595 - DNA, 4014 bp, Homo sapiens
  source 1..4014: mol_type = unassigned DNA
cccctcccgcgctccgcggcggcggcggcggcggcagcagtagcagcaatatggctgttgatgggtgtttggggtggcgctggcggcgggaggagctcccccgagcccctgcgccggctgcccgttgctagctatggcaaatggtggcggcggcggcggcggcagcagcggcggcggcggcggcggcggaggcagcagtcttagaatgagtagcaatatccacgcgaaccatctcagcctagacgcgtcctcctcctcctcctcctcctcttcctcttcttcttcttcctcctcctcttcctcctcgtcctcggtccacgagcccaagatggatgcgctcatcatcccggtgaccatggaggtgccgtgcgacagccggggccaacgcatgtggtgggctttcctggcctcctccatggtgactttcttcgggggcctcttcatcatcttgctctggcggacgctcaagtacctgtggaccgtgtgctgccactgcgggggcaagacgaaggaggcccagaagattaacaatggctcaagccaggcggatggcactctcaaaccagtggatgaaaaagaggaggcagtggccgccgaggtcggctggatgacctccgtgaaggactgggcgggggtgatgatatccgcccagacactgactggcagagtcctggttgtcttagtctttgctctcagcatcggtgcacttgtaatatacttcatagattcatcaaacccaatagaatcctgccagaatttctacaaagatttcacattacagatcgacatggctttcaacgtgttcttccttctctacttcggcttgcggtttattgcagccaacgataaattgtggttctggctggaagtgaactctgtagtggatttcttcacggtgccccccgtgtttgtgtctgtgtacttaaacagaagttggcttggtttgagatttttaagagctctgagactgatacagttttcagaaattttgcagtttctgaatattcttaaaacaagtaattccatcaagctggtgaatctgctctccatatttatcagcacgtggctgactgcagccgggttcatccatttggtggagaattcaggggacccatgggaaaatttccaaaacaaccaggctctcacctactgggaatgtgtctatttactcatggtcacaatgtccaccgttggttatggggatgtttatgcaaaaaccacacttgggcgcctcttcatggtcttcttcatcctcgggggactggccatgtttgccagctacgtccctgaaatcatagagttaataggaaaccgcaagaaatacgggggctcctatagtgcggttagtggaagaaagcacattgtggtctgcggacacatcactctggagagtgtttccaacttcctgaaggactttctgcacaaggaccgggatgacgtcaatgtggagatcgtttttcttcacaacatctcccccaacctggagcttgaagctctgttcaaacgacattttactcaggtggaattttatcagggttccgtcctcaatccacatgatcttgcaagagtcaagatagagtcagcagatgcatgcctgatccttgccaacaagtactgcgctgacccggatgcggaggatgcctcgaatatcatgagagtaatctccataaagaactaccatccgaagataagaatcatcactcaaatgctgcagtatcacaacaaggcccatctgctaaacatcccgagctggaattggaaagaaggtgatgacgcaatctgcctcgcagagttgaagttgggcttcatagcccagagctgcctggctcaaggcctctccaccatgcttgccaacctcttctccatgaggtcattcataaagattgaggaagacacatggcagaaatactacttggaaggagtctcaaatgaaatgtacacagaatatctctccagtgccttcgtgggtctgtccttccctactgtttgtgagctgtgttttgtgaagctcaagctcctaatgatagccattgagtacaagtctgccaaccgagagagccgtatattaattaatcctggaaaccatcttaagatccaagaaggtactttaggatttttcatcgcaagtgatgccaaagaagttaaaagggcatttttttactgcaaggcctgtcatgatgacatcacagatcccaaaagaataaaaaaatgtggctgcaaacggcccaagatgtccatctacaagagaatgagacgggcatgttgttttgattgcggacgttctgagcgtgactgctcatgcatgtcaggccgtgtgcgtggtaacgtggacacccttgagagagccttcccactttcttctgtctctgttaatgattgctccaccagtttccgtgcctttgaagatgagcagccgtcaacactatcaccaaaaaaaaagcaacggaatggaggcatgcggaactcacccaacacctcgcctaagctgatgaggcatgaccccttgttaattcctggcaatgatcagattgacaacatggactccaatgtgaagaagtacgactctactgggatgtttcactggtgtgcacccaaggagatagagaaagtcatcctgactcgaagtgaagctgccatgaccgtcctgagtggccatgtcgtggtctgcatctttggcgacgtcagctcagccctgatcggcctccggaacctggtgatgccgctccgtgccagcaactttcattaccatgagctcaagcacattgtgtttgtgggctctattgagtacctcaagcgggaatgggagacgcttcataacttccccaaagtgtccatattgcctggtacgccattaagtcgggctgatttaagggctgtcaacatcaacctctgtgacatgtgcgttatcctgtcagccaatcagaataatattgatgatacttcgctgcaggacaaggaatgcatcttggcgtcactcaacatcaaatctatgcagtttgatgacagcatcggagtcttgcaggctaattcccaagggttcacacctccaggaatggatagatcctctccagataacagcccagtgcacgggatgttacgtcaaccatccatcacaactggggtcaacatccccatcatcactgaactagtgaacgatactaatgttcagtttttggaccaagacgatgatgatgaccctgatacagaactgtacctcacgcagccctttgcctgtgggacagcatttgccgtcagtgtcctggactcactcatgagcgcgacgtacttcaatgacaatatcctcaccctgatacggaccctggtgaccggaggagccacgccggagctggaggctctgattgctgaggaaaacgcccttagaggtggctacagcaccccgcagacactggccaatagggaccgctgccgcgtggcccagttagctctgctcgatgggccatttgcggacttaggggatggtggttgttatggtgatctgttctgcaaagctctgaaaacatataatatgctttgttttggaatttaccggctgagagatgctcacctcagcacccccagtcagtgcacaaagaggtatgtcatcaccaacccgccctatgagtttgagctcgtgccgacggacctgatcttctgcttaatgcagtttgaccacaatgccggccagtcccgggccagcctgtcccattcctcccactcgtcgcagtcctccagcaagaagagctcctctgttcactccatcccatccacagcaaaccgacagaaccggcccaagtccagggagtcccgggacaaacagaatgcaacaaggatgaatagaatgggccaagaaaagaaatggtttacagatgaaccggataatgcctatcccagaaacattcaaatcaagcccatgagtacccacatggctaaccagatcaaccaatataaatccacaagcagcttgattccaccaatcagagaagttgaagatgaatgttgactcccaggagacca

SEQ ID NO: 10596 - DNA, 3849 bp, Homo sapiens
  source 1..3849: mol_type = unassigned DNA
cccctcccgcgctccgcggcggcggcggcggcggcagcagtagcagcaatatggctgttgatgggtgtttggggtggcgctggcggcgggaggagctcccccgagcccctgcgccggctgcccgttgctagctatggcaaatggtggcggcggcggcggcggcagcagcggcggcggcggcggcggcggaggcagcagtcttagaatgagtagcaatatccacgcgaaccatctcagcctagacgcgtcctcctcctcctcctcctcctcttcctcttcttcttcttcctcctcctcttcctcctcgtcctcggtccacgagcccaagatggatgcgctcatcatcccggtgaccatggaggtgccgtgcgacagccggggccaacgcatgtggtgggctttcctggcctcctccatggtgactttcttcgggggcctcttcatcatcttgctctggcggacgctcaagtacctgtggaccgtgtgctgccactgcgggggcaagacgaaggaggcccagaagattaacaatggctcaagccaggcggatggcactctcaaaccagtggatgaaaaagaggaggcagtggccgccgaggtcggctggatgacctccgtgaaggactgggcgggggtgatgatatccgcccagacactgactggcagagtcctggttgtcttagtctttgctctcagcatcggtgcacttgtaatatacttcatagattcatcaaacccaatagaatcctgccagaatttctacaaagatttcacattacagatcgacatggctttcaacgtgttcttccttctctacttcggcttgcggtttattgcagccaacgataaattgtggttctggctggaagtgaactctgtagtggatttcttcacggtgccccccgtgtttgtgtctgtgtacttaaacagaagttggcttggtttgagatttttaagagctctgagactgatacagttttcagaaattttgcagtttctgaatattcttaaaacaagtaattccatcaagctggtgaatctgctctccatatttatcagcacgtggctgactgcagccgggttcatccatttggtggagaattcaggggacccatgggaaaatttccaaaacaaccaggctctcacctactgggaatgtgtctatttactcatggtcacaatgtccaccgttggttatggggatgtttatgcaaaaaccacacttgggcgcctcttcatggtcttcttcatcctcgggggactggcaatgtttgcccgctacgtgcccgaaattgctgctctcatcctgagtcggaataaattcggcgggacttttaacaaacatggaggcagaaagcacattgtggtctgcggacacatcactctggagagtgtttccaacttcctgaaggactttctgcacaaggaccgggatgacgtcaatgtggagatcgtttttcttcacaacatctcccccaacctggagcttgaagctctgttcaaacgacattttactcaggtggaattttatcagggttccgtcctcaatccacatgatcttgcaagagtcaagatagagtcagcagatgcatgcctgatccttgccaacaagtactgcgctgacccggatgcggaggatgcctcgaatatcatgagagtaatctccataaagaactaccatccgaagataagaatcatcactcaaatgctgcagtatcacaacaaggcccatctgctaaacatcccgagctggaattggaaagaaggtgatgacgcaatctgcctcgcagagttgaagttgggcttcatagcccagagctgcctggctcaaggcctctccaccatgcttgccaacctcttctccatgaggtcattcataaagattgaggaagacacatggcagaaatactacttggaaggagtctcaaatgaaatgtacacagaatatctctccagtgccttcgtgggtctgtccttccctactgtttgtgagctgtgttttgtgaagctcaagctcctaatgatagccattgagtacaagtctgccaaccgagagagccgtatattaattaatcctggaaaccatcttaagatccaagaaggtactttaggatttttcatcgcaagtgatgccaaagaagttaaaagggcatttttttactgcaaggcctgtcatgatgacatcacagatcccaaaagaataaaaaaatgtggctgcaaacggctgatatattttgaagatgagcagccgtcaacactatcaccaaaaaaaaagcaacggaatggaggcatgcggaactcacccaacacctcgcctaagctgatgaggcatgaccccttgttaattcctggcaatgatcagattgacaacatggactccaatgtgaagaagtacgactctactgggatgtttcactggtgtgcacccaaggagatagagaaagtcatcctgactcgaagtgaagctgccatgaccgtcctgagtggccatgtcgtggtctgcatctttggcgacgtcagctcagccctgatcggcctccggaacctggtgatgccgctccgtgccagcaactttcattaccatgagctcaagcacattgtgtttgtgggctctattgagtacctcaagcgggaatgggagacgcttcataacttccccaaagtgtccatattgcctggtacgccattaagtcgggctgatttaagggctgtcaacatcaacctctgtgacatgtgcgttatcctgtcagccaatcagaataatattgatgatacttcgctgcaggacaaggaatgcatcttggcgtcactcaacatcaaatctatgcagtttgatgacagcatcggagtcttgcaggctaattcccaagggttcacacctccaggaatggatagatcctctccagataacagcccagtgcacgggatgttacgtcaaccatccatcacaactggggtcaacatccccatcatcactgaactagtgaacgatactaatgttcagtttttggaccaagacgatgatgatgaccctgatacagaactgtacctcacgcagccctttgcctgtgggacagcatttgccgtcagtgtcctggactcactcatgagcgcgacgtacttcaatgacaatatcctcaccctgatacggaccctggtgaccggaggagccacgccggagctggaggctctgattgctgaggaaaacgcccttagaggtggctacagcaccccgcagacactggccaatagggaccgctgccgcgtggcccagttagctctgctcgatgggccatttgcggacttaggggatggtggttgttatggtgatctgttctgcaaagctctgaaaacatataatatgctttgttttggaatttaccggctgagagatgctcacctcagcacccccagtcagtgcacaaagaggtatgtcatcaccaacccgccctatgagtttgagctcgtgccgacggacctgatcttctgcttaatgcagtttgaccacaatgccggccagtcccgggccagcctgtcccattcctcccactcgtcgcagtcctccagcaagaagagctcctctgttcactccatcccatccacagcaaaccgacagaaccggcccaagtccagggagtcccgggacaaacagaatgcaacaaggatgaatagaatgggccaagaaaagaaatggtttacagatgaaccggataatgcctatcccagaaacattcaaatcaagcccatgagtacccacatggctaaccagatcaaccaatataaatccacaagcagcttgattccaccaatcagagaagttgaagatgaatgttgactcccaggagacca

SEQ ID NO: 10597 - DNA, 3849 bp, Homo sapiens
  source 1..3849: mol_type = unassigned DNA
cccctcccgcgctccgcggcggcggcggcggcggcagcagtagcagcaatatggctgttgatgggtgtttggggtggcgctggcggcgggaggagctcccccgagcccctgcgccggctgcccgttgctagctatggcaaatggtggcggcggcggcggcggcagcagcggcggcggcggcggcggcggaggcagcagtcttagaatgagtagcaatatccacgcgaaccatctcagcctagacgcgtcctcctcctcctcctcctcctcttcctcttcttcttcttcctcctcctcttcctcctcgtcctcggtccacgagcccaagatggatgcgctcatcatcccggtgaccatggaggtgccgtgcgacagccggggccaacgcatgtggtgggctttcctggcctcctccatggtgactttcttcgggggcctcttcatcatcttgctctggcggacgctcaagtacctgtggaccgtgtgctgccactgcgggggcaagacgaaggaggcccagaagattaacaatggctcaagccaggcggatggcactctcaaaccagtggatgaaaaagaggaggcagtggccgccgaggtcggctggatgacctccgtgaaggactgggcgggggtgatgatatccgcccagacactgactggcagagtcctggttgtcttagtctttgctctcagcatcggtgcacttgtaatatacttcatagattcatcaaacccaatagaatcctgccagaatttctacaaagatttcacattacagatcgacatggctttcaacgtgttcttccttctctacttcggcttgcggtttattgcagccaacgataaattgtggttctggctggaagtgaactctgtagtggatttcttcacggtgccccccgtgtttgtgtctgtgtacttaaacagaagttggcttggtttgagatttttaagagctctgagactgatacagttttcagaaattttgcagtttctgaatattcttaaaacaagtaattccatcaagctggtgaatctgctctccatatttatcagcacgtggctgactgcagccgggttcatccatttggtggagaattcaggggacccatgggaaaatttccaaaacaaccaggctctcacctactgggaatgtgtctatttactcatggtcacaatgtccaccgttggttatggggatgtttatgcaaaaaccacacttgggcgcctcttcatggtcttcttcatcctcgggggactggccatgtttgccagctacgtccctgaaatcatagagttaataggaaaccgcaagaaatacgggggctcctatagtgcggttagtggaagaaagcacattgtggtctgcggacacatcactctggagagtgtttccaacttcctgaaggactttctgcacaaggaccgggatgacgtcaatgtggagatcgtttttcttcacaacatctcccccaacctggagcttgaagctctgttcaaacgacattttactcaggtggaattttatcagggttccgtcctcaatccacatgatcttgcaagagtcaagatagagtcagcagatgcatgcctgatccttgccaacaagtactgcgctgacccggatgcggaggatgcctcgaatatcatgagagtaatctccataaagaactaccatccgaagataagaatcatcactcaaatgctgcagtatcacaacaaggcccatctgctaaacatcccgagctggaattggaaagaaggtgatgacgcaatctgcctcgcagagttgaagttgggcttcatagcccagagctgcctggctcaaggcctctccaccatgcttgccaacctcttctccatgaggtcattcataaagattgaggaagacacatggcagaaatactacttggaaggagtctcaaatgaaatgtacacagaatatctctccagtgccttcgtgggtctgtccttccctactgtttgtgagctgtgttttgtgaagctcaagctcctaatgatagccattgagtacaagtctgccaaccgagagagccgtatattaattaatcctggaaaccatcttaagatccaagaaggtactttaggatttttcatcgcaagtgatgccaaagaagttaaaagggcatttttttactgcaaggcctgtcatgatgacatcacagatcccaaaagaataaaaaaatgtggctgcaaacggctgatatattttgaagatgagcagccgtcaacactatcaccaaaaaaaaagcaacggaatggaggcatgcggaactcacccaacacctcgcctaagctgatgaggcatgaccccttgttaattcctggcaatgatcagattgacaacatggactccaatgtgaagaagtacgactctactgggatgtttcactggtgtgcacccaaggagatagagaaagtcatcctgactcgaagtgaagctgccatgaccgtcctgagtggccatgtcgtggtctgcatctttggcgacgtcagctcagccctgatcggcctccggaacctggtgatgccgctccgtgccagcaactttcattaccatgagctcaagcacattgtgtttgtgggctctattgagtacctcaagcgggaatgggagacgcttcataacttccccaaagtgtccatattgcctggtacgccattaagtcgggctgatttaagggctgtcaacatcaacctctgtgacatgtgcgttatcctgtcagccaatcagaataatattgatgatacttcgctgcaggacaaggaatgcatcttggcgtcactcaacatcaaatctatgcagtttgatgacagcatcggagtcttgcaggctaattcccaagggttcacacctccaggaatggatagatcctctccagataacagcccagtgcacgggatgttacgtcaaccatccatcacaactggggtcaacatccccatcatcactgaactagtgaacgatactaatgttcagtttttggaccaagacgatgatgatgaccctgatacagaactgtacctcacgcagccctttgcctgtgggacagcatttgccgtcagtgtcctggactcactcatgagcgcgacgtacttcaatgacaatatcctcaccctgatacggaccctggtgaccggaggagccacgccggagctggaggctctgattgctgaggaaaacgcccttagaggtggctacagcaccccgcagacactggccaatagggaccgctgccgcgtggcccagttagctctgctcgatgggccatttgcggacttaggggatggtggttgttatggtgatctgttctgcaaagctctgaaaacatataatatgctttgttttggaatttaccggctgagagatgctcacctcagcacccccagtcagtgcacaaagaggtatgtcatcaccaacccgccctatgagtttgagctcgtgccgacggacctgatcttctgcttaatgcagtttgaccacaatgccggccagtcccgggccagcctgtcccattcctcccactcgtcgcagtcctccagcaagaagagctcctctgttcactccatcccatccacagcaaaccgacagaaccggcccaagtccagggagtcccgggacaaacagaatgcaacaaggatgaatagaatgggccaagaaaagaaatggtttacagatgaaccggataatgcctatcccagaaacattcaaatcaagcccatgagtacccacatggctaaccagatcaaccaatataaatccacaagcagcttgattccaccaatcagagaagttgaagatgaatgttgactcccaggagacca

SEQ ID NO: 10598 - DNA, 3811 bp, Homo sapiens
  source 1..3811: mol_type = unassigned DNA
cccctcccgcgctccgcggcggcggcggcggcggcagcagtagcagcaatatggctgttgatgggtgtttggggtggcgctggcggcgggaggagctcccccgagcccctgcgccggctgcccgttgctagctatggcaaatggtggcggcggcggcggcggcagcagcggcggcggcggcggcggcggaggcagcagtcttagaatgagtagcaatatccacgcgaaccatctcagcctagacgcgtcctcctcctcctcctcctcctcttcctcttcttcttcttcctcctcctcttcctcctcgtcctcggtccacgagcccaagatggatgcgctcatcatcccggtgaccatggaggtgccgtgcgacagccggggccaacgcatgtggtgggctttcctggcctcctccatggtgactttcttcgggggcctcttcatcatcttgctctggcggacgctcaagtacctgtggaccgtgtgctgccactgcgggggcaagacgaaggaggcccagaagattaacaatggctcaagccaggcggatggcactctcaaaccagtggatgaaaaagaggaggcagtggccgccgaggtcggctggatgacctccgtgaaggactgggcgggggtgatgatatccgcccagacactgactggcagagtcctggttgtcttagtctttgctctcagcatcggtgcacttgtaatatacttcatagattcatcaaacccaatagaatcctgccagaatttctacaaagatttcacattacagatcgacatggctttcaacgtgttcttccttctctacttcggcttgcggtttattgcagccaacgataaattgtggttctggctggaagtgaactctgtagtggatttcttcacggtgccccccgtgtttgtgtctgtgtacttaaacagaagttggcttggtttgagatttttaagagctctgagactgatacagttttcagaaattttgcagtttctgaatattcttaaaacaagtaattccatcaagctggtgaatctgctctccatatttatcagcacgtggctgactgcagccgggttcatccatttggtggagaattcaggggacccatgggaaaatttccaaaacaaccaggctctcacctactgggaatgtgtctatttactcatggtcacaatgtccaccgttggttatggggatgtttatgcaaaaaccacacttgggcgcctcttcatggtcttcttcatcctcgggggactggcaatgtttgcccgctacgtgcccgaaattgctgctctcatcctgagtcggaataaattcggcgggacttttaacaaacatggaggcagaaagcacattgtggtctgcggacacatcactctggagagtgtttccaacttcctgaaggactttctgcacaaggaccgggatgacgtcaatgtggagatcgtttttcttcacaacatctcccccaacctggagcttgaagctctgttcaaacgacattttactcaggtggaattttatcagggttccgtcctcaatccacatgatcttgcaagagtcaagatagagtcagcagatgcatgcctgatccttgccaacaagtactgcgctgacccggatgcggaggatgcctcgaatatcatgagagtaatctccataaagaactaccatccgaagataagaatcatcactcaaatgctgcagtatcacaacaaggcccatctgctaaacatcccgagctggaattggaaagaaggtgatgacgcaatctgcctcgcagagttgaagttgggcttcatagcccagagctgcctggctcaaggcctctccaccatgcttgccaacctcttctccatgaggtcattcataaagattgaggaagacacatggcagaaatactacttggaaggagtctcaaatgaaatgtacacagaatatctctccagtgccttcgtgggtctgtccttccctactgtttgtgagctgtgttttgtgaagctcaagctcctaatgatagccattgagtacaagtctgccaaccgagagagccgtatattaattaatcctggaaaccatcttaagatccaagaaggtactttaggatttttcatcgcaagtgatgccaaagaagttaaaagggcatttttttactgcaaggcctgtcatgatgacatcacagatcccaaaagaataaaaaaatgtggctgcaaacggcttgaagatgagcagccgtcaacactatcaccaaaaaaaaagcaacggaatggaggcatgcggaactcacccaacacctcgcctaagctgatgaggcatgaccccttgttaattcctggcaatgatcagattgacaacatggactccaatgtgaagaagtacgactctactgggatgtttcactggtgtgcacccaaggagatagagaaagtcatcctgactcgaagtgaagctgccatgaccgtcctgagtggccatgtcgtggtctgcatctttggcgacgtcagctcagccctgatcggcctccggaacctggtgatgccgctccgtgccagcaactttcattaccatgagctcaagcacattgtgtttgtgggctctattgagtacctcaagcgggaatgggagacgcttcataacttccccaaagtgtccatattgcctggtacgccattaagtcgggctgatttaagggctgtcaacatcaacctctgtgacatgtgcgttatcctgtcagccaatcagaataatattgatgatacttcgctgcaggacaaggaatgcatcttggcgtcactcaacatcaaatctatgcagtttgatgacagcatcggagtcttgcaggctaattcccaagggttcacacctccaggaatggatagatcctctccagataacagcccagtgcacgggatgttacgtcaaccatccatcacaactggggtcaacatccccatcatcactgaactagtgaacgatactaatgttcagtttttggaccaagacgatgatgatgaccctgatacagaactgtacctcacgcagccctttgcctgtgggacagcatttgccgtcagtgtcctggactcactcatgagcgcgacgtacttcaatgacaatatcctcaccctgatacggaccctggtgaccggaggagccacgccggagctggaggctctgattgctgaggaaaacgcccttagaggtggctacagcaccccgcagacactggccaatagggaccgctgccgcgtggcccagttagctctgctcgatgggccatttgcggacttaggggatggtggttgttatggtgatctgttctgcaaagctctgaaaacatataatatgctttgttttggaatttaccggctgagagatgctcacctcagcacccccagtcagtgcacaaagaggtatgtcatcaccaacccgccctatgagtttgagctcgtgccgacggacctgatcttctgcttaatgcagtttgaccacaatgccggccagtcccgggccagcctgtcccattcctcccactcgtcgcagtcctccagcaagaagagctcctctgttcactccatcccatccacagcaaaccgacagaaccggcccaagtccagggagtcccgggacaaacagaaaaaagaaatggtttacagatgaaccggataatgcctatcccagaaacattcaaatcaagcccatgagtacccacatggctaaccagatcaaccaatataaatccacaagcagcttgattccaccaatcagagaagttgaagatgaatgttgactcccaggagacca

SEQ ID NO: 10599 - DNA, 3852 bp, Homo sapiens
  source 1..3852: mol_type = unassigned DNA
cccctcccgcgctccgcggcggcggcggcggcggcagcagtagcagcaatatggctgttgatgggtgtttggggtggcgctggcggcgggaggagctcccccgagcccctgcgccggctgcccgttgctagctatggcaaatggtggcggcggcggcggcggcagcagcggcggcggcggcggcggcggaggcagcagtcttagaatgagtagcaatatccacgcgaaccatctcagcctagacgcgtcctcctcctcctcctcctcctcttcctcttcttcttcttcctcctcctcttcctcctcgtcctcggtccacgagcccaagatggatgcgctcatcatcccggtgaccatggaggtgccgtgcgacagccggggccaacgcatgtggtgggctttcctggcctcctccatggtgactttcttcgggggcctcttcatcatcttgctctggcggacgctcaagtacctgtggaccgtgtgctgccactgcgggggcaagacgaaggaggcccagaagattaacaatggctcaagccaggcggatggcactctcaaaccagtggatgaaaaagaggaggcagtggccgccgaggtcggctggatgacctccgtgaaggactgggcgggggtgatgatatccgcccagacactgactggcagagtcctggttgtcttagtctttgctctcagcatcggtgcacttgtaatatacttcatagattcatcaaacccaatagaatcctgccagaatttctacaaagatttcacattacagatcgacatggctttcaacgtgttcttccttctctacttcggcttgcggtttattgcagccaacgataaattgtggttctggctggaagtgaactctgtagtggatttcttcacggtgccccccgtgtttgtgtctgtgtacttaaacagaagttggcttggtttgagatttttaagagctctgagactgatacagttttcagaaattttgcagtttctgaatattcttaaaacaagtaattccatcaagctggtgaatctgctctccatatttatcagcacgtggctgactgcagccgggttcatccatttggtggagaattcaggggacccatgggaaaatttccaaaacaaccaggctctcacctactgggaatgtgtctatttactcatggtcacaatgtccaccgttggttatggggatgtttatgcaaaaaccacacttgggcgcctcttcatggtcttcttcatcctcgggggactggccatgtttgccagctacgtccctgaaatcatagagttaataggaaaccgcaagaaatacgggggctcctatagtgcggttagtggaagaaagcacattgtggtctgcggacacatcactctggagagtgtttccaacttcctgaaggactttctgcacaaggaccgggatgacgtcaatgtggagatcgtttttcttcacaacatctcccccaacctggagcttgaagctctgttcaaacgacattttactcaggtggaattttatcagggttccgtcctcaatccacatgatcttgcaagagtcaagatagagtcagcagatgcatgcctgatccttgccaacaagtactgcgctgacccggatgcggaggatgcctcgaatatcatgagagtaatctccataaagaactaccatccgaagataagaatcatcactcaaatgctgcagtatcacaacaaggcccatctgctaaacatcccgagctggaattggaaagaaggtgatgacgcaatctgcctcgcagagttgaagttgggcttcatagcccagagctgcctggctcaaggcctctccaccatgcttgccaacctcttctccatgaggtcattcataaagattgaggaagacacatggcagaaatactacttggaaggagtctcaaatgaaatgtacacagaatatctctccagtgccttcgtgggtctgtccttccctactgtttgtgagctgtgttttgtgaagctcaagctcctaatgatagccattgagtacaagtctgccaaccgagagagccgaagccgaaagcgtatattaattaatcctggaaaccatcttaagatccaagaaggtactttaggatttttcatcgcaagtgatgccaaagaagttaaaagggcatttttttactgcaaggcctgtcatgatgacatcacagatcccaaaagaataaaaaaatgtggctgcaaacggcttgaagatgagcagccgtcaacactatcaccaaaaaaaaagcaacggaatggaggcatgcggaactcacccaacacctcgcctaagctgatgaggcatgaccccttgttaattcctggcaatgatcagattgacaacatggactccaatgtgaagaagtacgactctactgggatgtttcactggtgtgcacccaaggagatagagaaagtcatcctgactcgaagtgaagctgccatgaccgtcctgagtggccatgtcgtggtctgcatctttggcgacgtcagctcagccctgatcggcctccggaacctggtgatgccgctccgtgccagcaactttcattaccatgagctcaagcacattgtgtttgtgggctctattgagtacctcaagcgggaatgggagacgcttcataacttccccaaagtgtccatattgcctggtacgccattaagtcgggctgatttaagggctgtcaacatcaacctctgtgacatgtgcgttatcctgtcagccaatcagaataatattgatgatacttcgctgcaggacaaggaatgcatcttggcgtcactcaacatcaaatctatgcagtttgatgacagcatcggagtcttgcaggctaattcccaagggttcacacctccaggaatggatagatcctctccagataacagcccagtgcacgggatgttacgtcaaccatccatcacaactggggtcaacatccccatcatcactgaactagtgaacgatactaatgttcagtttttggaccaagacgatgatgatgaccctgatacagaactgtacctcacgcagccctttgcctgtgggacagcatttgccgtcagtgtcctggactcactcatgagcgcgacgtacttcaatgacaatatcctcaccctgatacggaccctggtgaccggaggagccacgccggagctggaggctctgattgctgaggaaaacgcccttagaggtggctacagcaccccgcagacactggccaatagggaccgctgccgcgtggcccagttagctctgctcgatgggccatttgcggacttaggggatggtggttgttatggtgatctgttctgcaaagctctgaaaacatataatatgctttgttttggaatttaccggctgagagatgctcacctcagcacccccagtcagtgcacaaagaggtatgtcatcaccaacccgccctatgagtttgagctcgtgccgacggacctgatcttctgcttaatgcagtttgaccacaatgccggccagtcccgggccagcctgtcccattcctcccactcgtcgcagtcctccagcaagaagagctcctctgttcactccatcccatccacagcaaaccgacagaaccggcccaagtccagggagtcccgggacaaacagaatgcaacaaggatgaatagaatgggccaagaaaagaaatggtttacagatgaaccggataatgcctatcccagaaacattcaaatcaagcccatgagtacccacatggctaaccagatcaaccaatataaatccacaagcagcttgattccaccaatcagagaagttgaagatgaatgttgactcccaggagacca

SEQ ID NO: 10600 - DNA, 3852 bp, Homo sapiens
  source 1..3852: mol_type = unassigned DNA
cccctcccgcgctccgcggcggcggcggcggcggcagcagtagcagcaatatggctgttgatgggtgtttggggtggcgctggcggcgggaggagctcccccgagcccctgcgccggctgcccgttgctagctatggcaaatggtggcggcggcggcggcggcagcagcggcggcggcggcggcggcggaggcagcagtcttagaatgagtagcaatatccacgcgaaccatctcagcctagacgcgtcctcctcctcctcctcctcctcttcctcttcttcttcttcctcctcctcttcctcctcgtcctcggtccacgagcccaagatggatgcgctcatcatcccggtgaccatggaggtgccgtgcgacagccggggccaacgcatgtggtgggctttcctggcctcctccatggtgactttcttcgggggcctcttcatcatcttgctctggcggacgctcaagtacctgtggaccgtgtgctgccactgcgggggcaagacgaaggaggcccagaagattaacaatggctcaagccaggcggatggcactctcaaaccagtggatgaaaaagaggaggcagtggccgccgaggtcggctggatgacctccgtgaaggactgggcgggggtgatgatatccgcccagacactgactggcagagtcctggttgtcttagtctttgctctcagcatcggtgcacttgtaatatacttcatagattcatcaaacccaatagaatcctgccagaatttctacaaagatttcacattacagatcgacatggctttcaacgtgttcttccttctctacttcggcttgcggtttattgcagccaacgataaattgtggttctggctggaagtgaactctgtagtggatttcttcacggtgccccccgtgtttgtgtctgtgtacttaaacagaagttggcttggtttgagatttttaagagctctgagactgatacagttttcagaaattttgcagtttctgaatattcttaaaacaagtaattccatcaagctggtgaatctgctctccatatttatcagcacgtggctgactgcagccgggttcatccatttggtggagaattcaggggacccatgggaaaatttccaaaacaaccaggctctcacctactgggaatgtgtctatttactcatggtcacaatgtccaccgttggttatggggatgtttatgcaaaaaccacacttgggcgcctcttcatggtcttcttcatcctcgggggactggcaatgtttgcccgctacgtgcccgaaattgctgctctcatcctgagtcggaataaattcggcgggacttttaacaaacatggaggcagaaagcacattgtggtctgcggacacatcactctggagagtgtttccaacttcctgaaggactttctgcacaaggaccgggatgacgtcaatgtggagatcgtttttcttcacaacatctcccccaacctggagcttgaagctctgttcaaacgacattttactcaggtggaattttatcagggttccgtcctcaatccacatgatcttgcaagagtcaagatagagtcagcagatgcatgcctgatccttgccaacaagtactgcgctgacccggatgcggaggatgcctcgaatatcatgagagtaatctccataaagaactaccatccgaagataagaatcatcactcaaatgctgcagtatcacaacaaggcccatctgctaaacatcccgagctggaattggaaagaaggtgatgacgcaatctgcctcgcagagttgaagttgggcttcatagcccagagctgcctggctcaaggcctctccaccatgcttgccaacctcttctccatgaggtcattcataaagattgaggaagacacatggcagaaatactacttggaaggagtctcaaatgaaatgtacacagaatatctctccagtgccttcgtgggtctgtccttccctactgtttgtgagctgtgttttgtgaagctcaagctcctaatgatagccattgagtacaagtctgccaaccgagagagccgaagccgaaagcgtatattaattaatcctggaaaccatcttaagatccaagaaggtactttaggatttttcatcgcaagtgatgccaaagaagttaaaagggcatttttttactgcaaggcctgtcatgatgacatcacagatcccaaaagaataaaaaaatgtggctgcaaacggcttgaagatgagcagccgtcaacactatcaccaaaaaaaaagcaacggaatggaggcatgcggaactcacccaacacctcgcctaagctgatgaggcatgaccccttgttaattcctggcaatgatcagattgacaacatggactccaatgtgaagaagtacgactctactgggatgtttcactggtgtgcacccaaggagatagagaaagtcatcctgactcgaagtgaagctgccatgaccgtcctgagtggccatgtcgtggtctgcatctttggcgacgtcagctcagccctgatcggcctccggaacctggtgatgccgctccgtgccagcaactttcattaccatgagctcaagcacattgtgtttgtgggctctattgagtacctcaagcgggaatgggagacgcttcataacttccccaaagtgtccatattgcctggtacgccattaagtcgggctgatttaagggctgtcaacatcaacctctgtgacatgtgcgttatcctgtcagccaatcagaataatattgatgatacttcgctgcaggacaaggaatgcatcttggcgtcactcaacatcaaatctatgcagtttgatgacagcatcggagtcttgcaggctaattcccaagggttcacacctccaggaatggatagatcctctccagataacagcccagtgcacgggatgttacgtcaaccatccatcacaactggggtcaacatccccatcatcactgaactagtgaacgatactaatgttcagtttttggaccaagacgatgatgatgaccctgatacagaactgtacctcacgcagccctttgcctgtgggacagcatttgccgtcagtgtcctggactcactcatgagcgcgacgtacttcaatgacaatatcctcaccctgatacggaccctggtgaccggaggagccacgccggagctggaggctctgattgctgaggaaaacgcccttagaggtggctacagcaccccgcagacactggccaatagggaccgctgccgcgtggcccagttagctctgctcgatgggccatttgcggacttaggggatggtggttgttatggtgatctgttctgcaaagctctgaaaacatataatatgctttgttttggaatttaccggctgagagatgctcacctcagcacccccagtcagtgcacaaagaggtatgtcatcaccaacccgccctatgagtttgagctcgtgccgacggacctgatcttctgcttaatgcagtttgaccacaatgccggccagtcccgggccagcctgtcccattcctcccactcgtcgcagtcctccagcaagaagagctcctctgttcactccatcccatccacagcaaaccgacagaaccggcccaagtccagggagtcccgggacaaacagaatgcaacaaggatgaatagaatgggccaagaaaagaaatggtttacagatgaaccggataatgcctatcccagaaacattcaaatcaagcccatgagtacccacatggctaaccagatcaaccaatataaatccacaagcagcttgattccaccaatcagagaagttgaagatgaatgttgactcccaggagacca

SEQ ID NO: 10601 - DNA, 3888 bp, Homo sapiens
  source 1..3888: mol_type = unassigned DNA
cccctcccgcgctccgcggcggcggcggcggcggcagcagtagcagcaatatggctgttgatgggtgtttggggtggcgctggcggcgggaggagctcccccgagcccctgcgccggctgcccgttgctagctatggcaaatggtggcggcggcggcggcggcagcagcggcggcggcggcggcggcggaggcagcagtcttagaatgagtagcaatatccacgcgaaccatctcagcctagacgcgtcctcctcctcctcctcctcctcttcctcttcttcttcttcctcctcctcttcctcctcgtcctcggtccacgagcccaagatggatgcgctcatcatcccggtgaccatggaggtgccgtgcgacagccggggccaacgcatgtggtgggctttcctggcctcctccatggtgactttcttcgggggcctcttcatcatcttgctctggcggacgctcaagtacctgtggaccgtgtgctgccactgcgggggcaagacgaaggaggcccagaagattaacaatggctcaagccaggcggatggcactctcaaaccagtggatgaaaaagaggaggcagtggccgccgaggtcggctggatgacctccgtgaaggactgggcgggggtgatgatatccgcccagacactgactggcagagtcctggttgtcttagtctttgctctcagcatcggtgcacttgtaatatacttcatagattcatcaaacccaatagaatcctgccagaatttctacaaagatttcacattacagatcgacatggctttcaacgtgttcttccttctctacttcggcttgcggtttattgcagccaacgataaattgtggttctggctggaagtgaactctgtagtggatttcttcacggtgccccccgtgtttgtgtctgtgtacttaaacagaagttggcttggtttgagatttttaagagctctgagactgatacagttttcagaaattttgcagtttctgaatattcttaaaacaagtaattccatcaagctggtgaatctgctctccatatttatcagcacgtggctgactgcagccgggttcatccatttggtggagaattcaggggacccatgggaaaatttccaaaacaaccaggctctcacctactgggaatgtgtctatttactcatggtcacaatgtccaccgttggttatggggatgtttatgcaaaaaccacacttgggcgcctcttcatggtcttcttcatcctcgggggactggccatgtttgccagctacgtccctgaaatcatagagttaataggaaaccgcaagaaatacgggggctcctatagtgcggttagtggaagaaagcacattgtggtctgcggacacatcactctggagagtgtttccaacttcctgaaggactttctgcacaaggaccgggatgacgtcaatgtggagatcgtttttcttcacaacatctcccccaacctggagcttgaagctctgttcaaacgacattttactcaggtggaattttatcagggttccgtcctcaatccacatgatcttgcaagagtcaagatagagtcagcagatgcatgcctgatccttgccaacaagtactgcgctgacccggatgcggaggatgcctcgaatatcatgagagtaatctccataaagaactaccatccgaagataagaatcatcactcaaatgctgcagtatcacaacaaggcccatctgctaaacatcccgagctggaattggaaagaaggtgatgacgcaatctgcctcgcagagttgaagttgggcttcatagcccagagctgcctggctcaaggcctctccaccatgcttgccaacctcttctccatgaggtcattcataaagattgaggaagacacatggcagaaatactacttggaaggagtctcaaatgaaatgtacacagaatatctctccagtgccttcgtgggtctgtccttccctactgtttgtgagctgtgttttgtgaagctcaagctcctaatgatagccattgagtacaagtctgccaaccgagagagccgtatattaattaatcctggaaaccatcttaagatccaagaaggtactttaggatttttcatcgcaagtgatgccaaagaagttaaaagggcatttttttactgcaaggcctgtcatgatgacatcacagatcccaaaagaataaaaaaatgtggctgcaaacggctgatatattccaagatgtccatctacaagagaatgagacgggcatgttgttttgattgcggacgttctgagcgtgactgctcatgcatgtcaggccgtgtgcgtggtaacgtggacacccttgagagagccttcccactttcttctgtctctgttaatgattgctccaccagtttccgtgcctttgaagatgagcagccgtcaacactatcaccaaaaaaaaagcaacggaatggaggcatgcggaactcacccaacacctcgcctaagctgatgaggcatgaccccttgttaattcctggcaatgatcagattgacaacatggactccaatgtgaagaagtacgactctactgggatgtttcactggtgtgcacccaaggagatagagaaagtcatcctgactcgaagtgaagctgccatgaccgtcctgagtggccatgtcgtggtctgcatctttggcgacgtcagctcagccctgatcggcctccggaacctggtgatgccgctccgtgccagcaactttcattaccatgagctcaagcacattgtgtttgtgggctctattgagtacctcaagcgggaatgggagacgcttcataacttccccaaagtgtccatattgcctggtacgccattaagtcgggctgatttaagggctgtcaacatcaacctctgtgacatgtgcgttatcctgtcagccaatcagaataatattgatgatacttcgctgcaggacaaggaatgcatcttggcgtcactcaacatcaaatctatgcagtttgatgacagcatcggagtcttgcaggctaattcccaagggttcacacctccaggaatggatagatcctctccagataacagcccagtgcacgggatgttacgtcaaccatccatcacaactggggtcaacatccccatcatcactgaactagtgaacgatactaatgttcagtttttggaccaagacgatgatgatgaccctgatacagaactgtacctcacgcagccctttgcctgtgggacagcatttgccgtcagtgtcctggactcactcatgagcgcgacgtacttcaatgacaatatcctcaccctgatacggaccctggtgaccggaggagccacgccggagctggaggctctgattgctgaggaaaacgcccttagaggtggctacagcaccccgcagacactggccaatagggaccgctgccgcgtggcccagttagctctgctcgatgggccatttgcggacttaggggatggtggttgttatggtgatctgttctgcaaagctctgaaaacatataatatgctttgttttggaatttaccggctgagagatgctcacctcagcacccccagtcagtgcacaaagagcaagaagagctcctctgttcactccatcccatccacagcaaaccgacagaaccggcccaagtccagggagtcccgggacaaacagaatgcaacaaggatgaatagaatgggccaagcagaaaagaaatggtttacagatgaaccggataatgcctatcccagaaacattcaaatcaagcccatgagtacccacatggctaaccagatcaaccaatataaatccacaagcagcttgattccaccaatcagagaagttgaagatgaatgttgactcccaggagacca

SEQ ID NO: 10602 - DNA, 3864 bp, Homo sapiens
  source 1..3864: mol_type = unassigned DNA
cccctcccgcgctccgcggcggcggcggcggcggcagcagtagcagcaatatggctgttgatgggtgtttggggtggcgctggcggcgggaggagctcccccgagcccctgcgccggctgcccgttgctagctatggcaaatggtggcggcggcggcggcggcagcagcggcggcggcggcggcggcggaggcagcagtcttagaatgagtagcaatatccacgcgaaccatctcagcctagacgcgtcctcctcctcctcctcctcctcttcctcttcttcttcttcctcctcctcttcctcctcgtcctcggtccacgagcccaagatggatgcgctcatcatcccggtgaccatggaggtgccgtgcgacagccggggccaacgcatgtggtgggctttcctggcctcctccatggtgactttcttcgggggcctcttcatcatcttgctctggcggacgctcaagtacctgtggaccgtgtgctgccactgcgggggcaagacgaaggaggcccagaagattaacaatggctcaagccaggcggatggcactctcaaaccagtggatgaaaaagaggaggcagtggccgccgaggtcggctggatgacctccgtgaaggactgggcgggggtgatgatatccgcccagacactgactggcagagtcctggttgtcttagtctttgctctcagcatcggtgcacttgtaatatacttcatagattcatcaaacccaatagaatcctgccagaatttctacaaagatttcacattacagatcgacatggctttcaacgtgttcttccttctctacttcggcttgcggtttattgcagccaacgataaattgtggttctggctggaagtgaactctgtagtggatttcttcacggtgccccccgtgtttgtgtctgtgtacttaaacagaagttggcttggtttgagatttttaagagctctgagactgatacagttttcagaaattttgcagtttctgaatattcttaaaacaagtaattccatcaagctggtgaatctgctctccatatttatcagcacgtggctgactgcagccgggttcatccatttggtggagaattcaggggacccatgggaaaatttccaaaacaaccaggctctcacctactgggaatgtgtctatttactcatggtcacaatgtccaccgttggttatggggatgtttatgcaaaaaccacacttgggcgcctcttcatggtcttcttcatcctcgggggactggccatgtttgccagctacgtccctgaaatcatagagttaataggaaaccgcaagaaatacgggggctcctatagtgcggttagtggaagaaagcacattgtggtctgcggacacatcactctggagagtgtttccaacttcctgaaggactttctgcacaaggaccgggatgacgtcaatgtggagatcgtttttcttcacaacatctcccccaacctggagcttgaagctctgttcaaacgacattttactcaggtggaattttatcagggttccgtcctcaatccacatgatcttgcaagagtcaagatagagtcagcagatgcatgcctgatccttgccaacaagtactgcgctgacccggatgcggaggatgcctcgaatatcatgagagtaatctccataaagaactaccatccgaagataagaatcatcactcaaatgctgcagtatcacaacaaggcccatctgctaaacatcccgagctggaattggaaagaaggtgatgacgcaatctgcctcgcagagttgaagttgggcttcatagcccagagctgcctggctcaaggcctctccaccatgcttgccaacctcttctccatgaggtcattcataaagattgaggaagacacatggcagaaatactacttggaaggagtctcaaatgaaatgtacacagaatatctctccagtgccttcgtgggtctgtccttccctactgtttgtgagctgtgttttgtgaagctcaagctcctaatgatagccattgagtacaagtctgccaaccgagagagccgaagccgaaagcgtatattaattaatcctggaaaccatcttaagatccaagaaggtactttaggatttttcatcgcaagtgatgccaaagaagttaaaagggcatttttttactgcaaggcctgtcatgatgacatcacagatcccaaaagaataaaaaaatgtggctgcaaacggctgatatattttgaagatgagcagccgtcaacactatcaccaaaaaaaaagcaacggaatggaggcatgcggaactcacccaacacctcgcctaagctgatgaggcatgaccccttgttaattcctggcaatgatcagattgacaacatggactccaatgtgaagaagtacgactctactgggatgtttcactggtgtgcacccaaggagatagagaaagtcatcctgactcgaagtgaagctgccatgaccgtcctgagtggccatgtcgtggtctgcatctttggcgacgtcagctcagccctgatcggcctccggaacctggtgatgccgctccgtgccagcaactttcattaccatgagctcaagcacattgtgtttgtgggctctattgagtacctcaagcgggaatgggagacgcttcataacttccccaaagtgtccatattgcctggtacgccattaagtcgggctgatttaagggctgtcaacatcaacctctgtgacatgtgcgttatcctgtcagccaatcagaataatattgatgatacttcgctgcaggacaaggaatgcatcttggcgtcactcaacatcaaatctatgcagtttgatgacagcatcggagtcttgcaggctaattcccaagggttcacacctccaggaatggatagatcctctccagataacagcccagtgcacgggatgttacgtcaaccatccatcacaactggggtcaacatccccatcatcactgaactagtgaacgatactaatgttcagtttttggaccaagacgatgatgatgaccctgatacagaactgtacctcacgcagccctttgcctgtgggacagcatttgccgtcagtgtcctggactcactcatgagcgcgacgtacttcaatgacaatatcctcaccctgatacggaccctggtgaccggaggagccacgccggagctggaggctctgattgctgaggaaaacgcccttagaggtggctacagcaccccgcagacactggccaatagggaccgctgccgcgtggcccagttagctctgctcgatgggccatttgcggacttaggggatggtggttgttatggtgatctgttctgcaaagctctgaaaacatataatatgctttgttttggaatttaccggctgagagatgctcacctcagcacccccagtcagtgcacaaagaggtatgtcatcaccaacccgccctatgagtttgagctcgtgccgacggacctgatcttctgcttaatgcagtttgaccacaatgccggccagtcccgggccagcctgtcccattcctcccactcgtcgcagtcctccagcaagaagagctcctctgttcactccatcccatccacagcaaaccgacagaaccggcccaagtccagggagtcccgggacaaacagaatgcaacaaggatgaatagaatgggccaagcagaaaagaaatggtttacagatgaaccggataatgcctatcccagaaacattcaaatcaagcccatgagtacccacatggctaaccagatcaaccaatataaatccacaagcagcttgattccaccaatcagagaagttgaagatgaatgttgactcccaggagacca

SEQ ID NO: 10603 - DNA, 3840 bp, Homo sapiens
  source 1..3840: mol_type = unassigned DNA
cccctcccgcgctccgcggcggcggcggcggcggcagcagtagcagcaatatggctgttgatgggtgtttggggtggcgctggcggcgggaggagctcccccgagcccctgcgccggctgcccgttgctagctatggcaaatggtggcggcggcggcggcggcagcagcggcggcggcggcggcggcggaggcagcagtcttagaatgagtagcaatatccacgcgaaccatctcagcctagacgcgtcctcctcctcctcctcctcctcttcctcttcttcttcttcctcctcctcttcctcctcgtcctcggtccacgagcccaagatggatgcgctcatcatcccggtgaccatggaggtgccgtgcgacagccggggccaacgcatgtggtgggctttcctggcctcctccatggtgactttcttcgggggcctcttcatcatcttgctctggcggacgctcaagtacctgtggaccgtgtgctgccactgcgggggcaagacgaaggaggcccagaagattaacaatggctcaagccaggcggatggcactctcaaaccagtggatgaaaaagaggaggcagtggccgccgaggtcggctggatgacctccgtgaaggactgggcgggggtgatgatatccgcccagacactgactggcagagtcctggttgtcttagtctttgctctcagcatcggtgcacttgtaatatacttcatagattcatcaaacccaatagaatcctgccagaatttctacaaagatttcacattacagatcgacatggctttcaacgtgttcttccttctctacttcggcttgcggtttattgcagccaacgataaattgtggttctggctggaagtgaactctgtagtggatttcttcacggtgccccccgtgtttgtgtctgtgtacttaaacagaagttggcttggtttgagatttttaagagctctgagactgatacagttttcagaaattttgcagtttctgaatattcttaaaacaagtaattccatcaagctggtgaatctgctctccatatttatcagcacgtggctgactgcagccgggttcatccatttggtggagaattcaggggacccatgggaaaatttccaaaacaaccaggctctcacctactgggaatgtgtctatttactcatggtcacaatgtccaccgttggttatggggatgtttatgcaaaaaccacacttgggcgcctcttcatggtcttcttcatcctcgggggactggcaatgtttgcccgctacgtgcccgaaattgctgctctcatcctgagtcggaataaattcggcgggacttttaacaaacatggaggcagaaagcacattgtggtctgcggacacatcactctggagagtgtttccaacttcctgaaggactttctgcacaaggaccgggatgacgtcaatgtggagatcgtttttcttcacaacatctcccccaacctggagcttgaagctctgttcaaacgacattttactcaggtggaattttatcagggttccgtcctcaatccacatgatcttgcaagagtcaagatagagtcagcagatgcatgcctgatccttgccaacaagtactgcgctgacccggatgcggaggatgcctcgaatatcatgagagtaatctccataaagaactaccatccgaagataagaatcatcactcaaatgctgcagtatcacaacaaggcccatctgctaaacatcccgagctggaattggaaagaaggtgatgacgcaatctgcctcgcagagttgaagttgggcttcatagcccagagctgcctggctcaaggcctctccaccatgcttgccaacctcttctccatgaggtcattcataaagattgaggaagacacatggcagaaatactacttggaaggagtctcaaatgaaatgtacacagaatatctctccagtgccttcgtgggtctgtccttccctactgtttgtgagctgtgttttgtgaagctcaagctcctaatgatagccattgagtacaagtctgccaaccgagagagccgtatattaattaatcctggaaaccatcttaagatccaagaaggtactttaggatttttcatcgcaagtgatgccaaagaagttaaaagggcatttttttactgcaaggcctgtcatgatgacatcacagatcccaaaagaataaaaaaatgtggctgcaaacggcttgaagatgagcagccgtcaacactatcaccaaaaaaaaagcaacggaatggaggcatgcggaactcacccaacacctcgcctaagctgatgaggcatgaccccttgttaattcctggcaatgatcagattgacaacatggactccaatgtgaagaagtacgactctactgggatgtttcactggtgtgcacccaaggagatagagaaagtcatcctgactcgaagtgaagctgccatgaccgtcctgagtggccatgtcgtggtctgcatctttggcgacgtcagctcagccctgatcggcctccggaacctggtgatgccgctccgtgccagcaactttcattaccatgagctcaagcacattgtgtttgtgggctctattgagtacctcaagcgggaatgggagacgcttcataacttccccaaagtgtccatattgcctggtacgccattaagtcgggctgatttaagggctgtcaacatcaacctctgtgacatgtgcgttatcctgtcagccaatcagaataatattgatgatacttcgctgcaggacaaggaatgcatcttggcgtcactcaacatcaaatctatgcagtttgatgacagcatcggagtcttgcaggctaattcccaagggttcacacctccaggaatggatagatcctctccagataacagcccagtgcacgggatgttacgtcaaccatccatcacaactggggtcaacatccccatcatcactgaactagtgaacgatactaatgttcagtttttggaccaagacgatgatgatgaccctgatacagaactgtacctcacgcagccctttgcctgtgggacagcatttgccgtcagtgtcctggactcactcatgagcgcgacgtacttcaatgacaatatcctcaccctgatacggaccctggtgaccggaggagccacgccggagctggaggctctgattgctgaggaaaacgcccttagaggtggctacagcaccccgcagacactggccaatagggaccgctgccgcgtggcccagttagctctgctcgatgggccatttgcggacttaggggatggtggttgttatggtgatctgttctgcaaagctctgaaaacatataatatgctttgttttggaatttaccggctgagagatgctcacctcagcacccccagtcagtgcacaaagaggtatgtcatcaccaacccgccctatgagtttgagctcgtgccgacggacctgatcttctgcttaatgcagtttgaccacaatgccggccagtcccgggccagcctgtcccattcctcccactcgtcgcagtcctccagcaagaagagctcctctgttcactccatcccatccacagcaaaccgacagaaccggcccaagtccagggagtcccgggacaaacagaatgcaacaaggatgaatagaatgggccaagaaaagaaatggtttacagatgaaccggataatgcctatcccagaaacattcaaatcaagcccatgagtacccacatggctaaccagatcaaccaatataaatccacaagcagcttgattccaccaatcagagaagttgaagatgaatgttgactcccaggagacca

SEQ ID NO: 10604 - DNA, 4126 bp, Homo sapiens
  source 1..4126: mol_type = unassigned DNA
cccctcccgcgctccgcggcggcggcggcggcggcagcagtagcagcaatatggctgttgatgggtgtttggggtggcgctggcggcgggaggagctcccccgagcccctgcgccggctgcccgttgctagctatggcaaatggtggcggcggcggcggcggcagcagcggcggcggcggcggcggcggaggcagcagtcttagaatgagtagcaatatccacgcgaaccatctcagcctagacgcgtcctcctcctcctcctcctcctcttcctcttcttcttcttcctcctcctcttcctcctcgtcctcggtccacgagcccaagatggatgcgctcatcatcccggtgaccatggaggtgccgtgcgacagccggggccaacgcatgtggtgggctttcctggcctcctccatggtgactttcttcgggggcctcttcatcatcttgctctggcggacgctcaagtacctgtggaccgtgtgctgccactgcgggggcaagacgaaggaggcccagaagattaacaatggctcaagccaggcggatggcactctcaaaccagtggatgaaaaagaggaggcagtggccgccgaggtcggctggatgacctccgtgaaggactgggcgggggtgatgatatccgcccagacactgactggcagagtcctggttgtcttagtctttgctctcagcatcggtgcacttgtaatatacttcatagattcatcaaacccaatagaatcctgccagaatttctacaaagatttcacattacagatcgacatggctttcaacgtgttcttccttctctacttcggcttgcggtttattgcagccaacgataaattgtggttctggctggaagtgaactctgtagtggatttcttcacggtgccccccgtgtttgtgtctgtgtacttaaacagaagttggcttggtttgagatttttaagagctctgagactgatacagttttcagaaattttgcagtttctgaatattcttaaaacaagtaattccatcaagctggtgaatctgctctccatatttatcagcacgtggctgactgcagccgggttcatccatttggtggagaattcaggggacccatgggaaaatttccaaaacaaccaggctctcacctactgggaatgtgtctatttactcatggtcacaatgtccaccgttggttatggggatgtttatgcaaaaaccacacttgggcgcctcttcatggtcttcttcatcctcgggggactggccatgtttgccagctacgtccctgaaatcatagagttaataggaaaccgcaagaaatacgggggctcctatagtgcggttagtggaagaaagcaatgtttgcccgctacgtgcccgaaattgctgctctcatcctgagtcggaataaattcggcgggacttttaacaaacatggaggcagaaagcacattgtggtctgcggacacatcactctggagagtgtttccaacttcctgaaggactttctgcacaaggaccgggatgacgtcaatgtggagatcgtttttcttcacaacatctcccccaacctggagcttgaagctctgttcaaacgacattttactcaggtggaattttatcagggttccgtcctcaatccacatgatcttgcaagagtcaagatagagtcagcagatgcatgcctgatccttgccaacaagtactgcgctgacccggatgcggaggatgcctcgaatatcatgagagtaatctccataaagaactaccatccgaagataagaatcatcactcaaatgctgcagtatcacaacaaggcccatctgctaaacatcccgagctggaattggaaagaaggtgatgacgcaatctgcctcgcagagttgaagttgggcttcatagcccagagctgcctggctcaaggcctctccaccatgcttgccaacctcttctccatgaggtcattcataaagattgaggaagacacatggcagaaatactacttggaaggagtctcaaatgaaatgtacacagaatatctctccagtgccttcgtgggtctgtccttccctactgtttgtgagctgtgttttgtgaagctcaagctcctaatgatagccattgagtacaagtctgccaaccgagagagccgaagccgaaagcgtatattaattaatcctggaaaccatcttaagatccaagaaggtactttaggatttttcatcgcaagtgatgccaaagaagttaaaagggcatttttttactgcaaggcctgtcatgatgacatcacagatcccaaaagaataaaaaaatgtggctgcaaacggctgatatattccaagatgtccatctacaagagaatgagacgggcatgttgttttgattgcggacgttctgagcgtgactgctcatgcatgtcaggccgtgtgcgtggtaacgtggacacccttgagagagccttcccactttcttctgtctctgttaatgattgctccaccagtttccgtgcctttgaagatgagcagccgtcaacactatcaccaaaaaaaaagcaacggaatggaggcatgcggaactcacccaacacctcgcctaagctgatgaggcatgaccccttgttaattcctggcaatgatcagattgacaacatggactccaatgtgaagaagtacgactctactgggatgtttcactggtgtgcacccaaggagatagagaaagtcatcctgactcgaagtgaagctgccatgaccgtcctgagtggccatgtcgtggtctgcatctttggcgacgtcagctcagccctgatcggcctccggaacctggtgatgccgctccgtgccagcaactttcattaccatgagctcaagcacattgtgtttgtgggctctattgagtacctcaagcgggaatgggagacgcttcataacttccccaaagtgtccatattgcctggtacgccattaagtcgggctgatttaagggctgtcaacatcaacctctgtgacatgtgcgttatcctgtcagccaatcagaataatattgatgatacttcgctgcaggacaaggaatgcatcttggcgtcactcaacatcaaatctatgcagtttgatgacagcatcggagtcttgcaggctaattcccaagggttcacacctccaggaatggatagatcctctccagataacagcccagtgcacgggatgttacgtcaaccatccatcacaactggggtcaacatccccatcatcactgaactagtgaacgatactaatgttcagtttttggaccaagacgatgatgatgaccctgatacagaactgtacctcacgcagccctttgcctgtgggacagcatttgccgtcagtgtcctggactcactcatgagcgcgacgtacttcaatgacaatatcctcaccctgatacggaccctggtgaccggaggagccacgccggagctggaggctctgattgctgaggaaaacgcccttagaggtggctacagcaccccgcagacactggccaatagggaccgctgccgcgtggcccagttagctctgctcgatgggccatttgcggacttaggggatggtggttgttatggtgatctgttctgcaaagctctgaaaacatataatatgctttgttttggaatttaccggctgagagatgctcacctcagcacccccagtcagtgcacaaagaggtatgtcatcaccaacccgccctatgagtttgagctcgtgccgacggacctgatcttctgcttaatgcagtttgaccacaatgccggccagtcccgggccagcctgtcccattcctcccactcgtcgcagtcctccagcaagaagagctcctctgttcactccatcccatccacagcaaaccgacagaaccggcccaagtccagggagtcccgggacaaacagaatgcaacaaggatgaatagaatgggccaagaaaagaaatggtttacagatgaaccggataatgcctatcccagaaacattcaaatcaagcccatgagtacccacatggctaaccagatcaaccaatataaatccacaagcagcttgattccaccaatcagagaagttgaagatgaatgttgactcccaggagacc

SEQ ID NO: 10605 - DNA, 3579 bp, Homo sapiens
  source 1..3579: mol_type = unassigned DNA
atggatgcgctcatcatcccggtgaccatggaggtgccgtgcgacagccggggccaacgcatgtggtgggctttcctggcctcctccatggtgactttcttcgggggcctcttcatcatcttgctctggcggacgctcaagtacctgtggaccgtgtgctgccactgcgggggcaagacgaaggaggcccagaagattaacaatggctcaagccaggcggatggcactctcaaaccagtggatgaaaaagaggaggcagtggccgccgaggtcggctggatgacctccgtgaaggactgggcgggggtgatgatatccgcccagacactgactggcagagtcctggttgtcttagtctttgctctcagcatcggtgcacttgtaatatacttcatagattcatcaaacccaatagaatcctgccagaatttctacaaagatttcacattacagatcgacatggctttcaacgtgttcttccttctctacttcggcttgcggtttattgcagccaacgataaattgtggttctggctggaagtgaactctgtagtggatttcttcacggtgccccccgtgtttgtgtctgtgtacttaaacagaagttggcttggtttgagatttttaagagctctgagactgatacagttttcagaaattttgcagtttctgaatattcttaaaacaagtaattccatcaagctggtgaatctgctctccatatttatcagcacgtggctgactgcagccgggttcatccatttggtggagaattcaggggacccatgggaaaatttccaaaacaaccaggctctcacctactgggaatgtgtctatttactcatggtcacaatgtccaccgttggttatggggatgtttatgcaaaaaccacacttgggcgcctcttcatggtcttcttcatcctcgggggactggccatgtttgccagctacgtccctgaaatcatagagttaataggaaaccgcaagaaatacgggggctcctatagtgcggttagtggaagaaagcacattgtggtctgcggacacatcactctggagagtgtttccaacttcctgaaggactttctgcacaaggaccgggatgacgtcaatgtggagatcgtttttcttcacaacatctcccccaacctggagcttgaagctctgttcaaacgacattttactcaggtggaattttatcagggttccgtcctcaatccacatgatcttgcaagagtcaagatagagtcagcagatgcatgcctgatccttgccaacaagtactgcgctgacccggatgcggaggatgcctcgaatatcatgagagtaatctccataaagaactaccatccgaagataagaatcatcactcaaatgctgcagtatcacaacaaggcccatctgctaaacatcccgagctggaattggaaagaaggtgatgacgcaatctgcctcgcagagttgaagttgggcttcatagcccagagctgcctggctcaaggcctctccaccatgcttgccaacctcttctccatgaggtcattcataaagattgaggaagacacatggcagaaatactacttggaaggagtctcaaatgaaatgtacacagaatatctctccagtgccttcgtgggtctgtccttccctactgtttgtgagctgtgttttgtgaagctcaagctcctaatgatagccattgagtacaagtctgccaaccgagagagccgtatattaattaatcctggaaaccatcttaagatccaagaaggtactttaggatttttcatcgcaagtgatgccaaagaagttaaaagggcatttttttactgcaaggcctgtcatgatgacatcacagatcccaaaagaataaaaaaatgtggctgcaaacggcttgaagatgagcagccgtcaacactatcaccaaaaaaaaagcaacggaatggaggcatgcggaactcacccaacacctcgcctaagctgatgaggcatgaccccttgttaattcctggcaatgatcagattgacaacatggactccaatgtgaagaagtacgactctactgggatgtttcactggtgtgcacccaaggagatagagaaagtcatcctgactcgaagtgaagctgccatgaccgtcctgagtggccatgtcgtggtctgcatctttggcgacgtcagctcagccctgatcggcctccggaacctggtgatgccgctccgtgccagcaactttcattaccatgagctcaagcacattgtgtttgtgggctctattgagtacctcaagcgggaatgggagacgcttcataacttccccaaagtgtccatattgcctggtacgccattaagtcgggctgatttaagggctgtcaacatcaacctctgtgacatgtgcgttatcctgtcagccaatcagaataatattgatgatacttcgctgcaggacaaggaatgcatcttggcgtcactcaacatcaaatctatgcagtttgatgacagcatcggagtcttgcaggctaattcccaagggttcacacctccaggaatggatagatcctctccagataacagcccagtgcacgggatgttacgtcaaccatccatcacaactggggtcaacatccccatcatcactgaactagctaaaccgggcaagttgcctttggtatcagtcaatcaggaaaaaaacagtgggacgcacattctaatgataactgaactggtgaacgatactaatgttcagtttttggaccaagacgatgatgatgaccctgatacagaactgtacctcacgcagccctttgcctgtgggacagcatttgccgtcagtgtcctggactcactcatgagcgcgacgtacttcaatgacaatatcctcaccctgatacggaccctggtgaccggaggagccacgccggagctggaggctctgattgctgaggaaaacgcccttagaggtggctacagcaccccgcagacactggccaatagggaccgctgccgcgtggcccagttagctctgctcgatgggccatttgcggacttaggggatggtggttgttatggtgatctgttctgcaaagctctgaaaacatataatatgctttgttttggaatttaccggctgagagatgctcacctcagcacccccagtcagtgcacaaagaggtatgtcatcaccaacccgccctatgagtttgagctcgtgccgacggacctgatcttctgcttaatgcagtttgaccacaatgccggccagtcccgggccagcctgtcccattcctcccactcgtcgcagtcctccagcaagaagagctcctctgttcactccatcccatccacagcaaaccgacagaaccggcccaagtccagggagtcccgggacaaacagaatgcaacaaggatgaatagaatgggccaagaaaagaaatggtttacagatgaaccggataatgcctatcccagaaacattcaaatcaagcccatgagtacccacatggctaaccagatcaaccaatataaatccacaagcagcttgattccaccaatcagagaagttgaagatgaatgttga

SEQ ID NO: 10606 - DNA, 3348 bp, Homo sapiens
  source 1..3348: mol_type = unassigned DNA
atggatgcgctcatcatcccggtgaccatggaggtgccgtgcgacagccggggccaacgcatgtggtgggctttcctggcctcctccatggtgactttcttcgggggcctcttcatcatcttgctctggcggacgctcaagtacctgtggaccgtgtgctgccactgcgggggcaagacgaaggttgtcttagtctttgctctcagcatcggtgcacttgtaatatacttcatagattcatcaaacccaatagaatcctgccagaatttctacaaagatttcacattacagatcgacatggctttcaacgtgttcttccttctctacttcggcttgcggtttattgcagccaacgataaattgtggttctggctggaagtgaactctgtagtggatttcttcacggtgccccccgtgtttgtgtctgtgtacttaaacagaagttggcttggtttgagatttttaagagctctgagactgatacagttttcagaaattttgcagtttctgaatattcttaaaacaagtaattccatcaagctggtgaatctgctctccatatttatcagcacgtggctgactgcagccgggttcatccatttggtggagaattcaggggacccatgggaaaatttccaaaacaaccaggctctcacctactgggaatgtgtctatttactcatggtcacaatgtccaccgttggttatggggatgtttatgcaaaaaccacacttgggcgcctcttcatggtcttcttcatcctcgggggactggccatgtttgccagctacgtccctgaaatcatagagttaataggaaaccgcaagaaatacgggggctcctatagtgcggttagtggaagaaagcacattgtggtctgcggacacatcactctggagagtgtttccaacttcctgaaggactttctgcacaaggaccgggatgacgtcaatgtggagatcgtttttcttcacaacatctcccccaacctggagcttgaagctctgttcaaacgacattttactcaggtggaattttatcagggttccgtcctcaatccacatgatcttgcaagagtcaagatagagtcagcagatgcatgcctgatccttgccaacaagtactgcgctgacccggatgcggaggatgcctcgaatatcatgagagtaatctccataaagaactaccatccgaagataagaatcatcactcaaatgctgcagtatcacaacaaggcccatctgctaaacatcccgagctggaattggaaagaaggtgatgacgcaatctgcctcgcagagttgaagttgggcttcatagcccagagctgcctggctcaaggcctctccaccatgcttgccaacctcttctccatgaggtcattcataaagattgaggaagacacatggcagaaatactacttggaaggagtctcaaatgaaatgtacacagaatatctctccagtgccttcgtgggtctgtccttccctactgtttgtgagctgtgttttgtgaagctcaagctcctaatgatagccattgagtacaagtctgccaaccgagagagccgtatattaattaatcctggaaaccatcttaagatccaagaaggtactttaggatttttcatcgcaagtgatgccaaagaagttaaaagggcatttttttactgcaaggcctgtcatgatgacatcacagatcccaaaagaataaaaaaatgtggctgcaaacggctgatatattttgaagatgagcagccgtcaacactatcaccaaaaaaaaagcaacggaatggaggcatgcggaactcacccaacacctcgcctaagctgatgaggcatgaccccttgttaattcctggcaatgatcagattgacaacatggactccaatgtgaagaagtacgactctactgggatgtttcactggtgtgcacccaaggagatagagaaagtcatcctgactcgaagtgaagctgccatgaccgtcctgagtggccatgtcgtggtctgcatctttggcgacgtcagctcagccctgatcggcctccggaacctggtgatgccgctccgtgccagcaactttcattaccatgagctcaagcacattgtgtttgtgggctctattgagtacctcaagcgggaatgggagacgcttcataacttccccaaagtgtccatattgcctggtacgccattaagtcgggctgatttaagggctgtcaacatcaacctctgtgacatgtgcgttatcctgtcagccaatcagaataatattgatgatacttcgctgcaggacaaggaatgcatcttggcgtcactcaacatcaaatctatgcagtttgatgacagcatcggagtcttgcaggctaattcccaagggttcacacctccaggaatggatagatcctctccagataacagcccagtgcacgggatgttacgtcaaccatccatcacaactggggtcaacatccccatcatcactgaactagtgaacgatactaatgttcagtttttggaccaagacgatgatgatgaccctgatacagaactgtacctcacgcagccctttgcctgtgggacagcatttgccgtcagtgtcctggactcactcatgagcgcgacgtacttcaatgacaatatcctcaccctgatacggaccctggtgaccggaggagccacgccggagctggaggctctgattgctgaggaaaacgcccttagaggtggctacagcaccccgcagacactggccaatagggaccgctgccgcgtggcccagttagctctgctcgatgggccatttgcggacttaggggatggtggttgttatggtgatctgttctgcaaagctctgaaaacatataatatgctttgttttggaatttaccggctgagagatgctcacctcagcacccccagtcagtgcacaaagaggtatgtcatcaccaacccgccctatgagtttgagctcgtgccgacggacctgatcttctgcttaatgcagtttgaccacaatgccggccagtcccgggccagcctgtcccattcctcccactcgtcgcagtcctccagcaagaagagctcctctgttcactccatcccatccacagcaaaccgacagaaccggcccaagtccagggagtcccgggacaaacagaatgcaacaaggatgaatagaatgggccaagcagaaaagaaatggtttacagatgaaccggataatgcctatcccagaaacattcaaatcaagcccatgagtacccacatggctaaccagatcaaccaatataaatccacaagcagcttgattccaccaatcagagaagttgaagatgaatgttga

SEQ ID NO: 10607 - DNA, 3866 bp, Homo sapiens
  source 1..3866: mol_type = unassigned DNA
agctgaagaggggagagagacaccctccccacccccatatgaggatggtctgtgatgatatgcatgcaggggaagggacttatccaaggtccctgatagatagggactggaattttggcagtgtcttttctagagtagaacaaatttatcagttgaatttgctgtagttctctgaaggtttctttggccacattagaatttttgagccctggcatccaagtaggccaacttcaaaatggctgtgtgctccactcagagattctgctgtgaagactggcaggagattttttagcctattctgaactccaactgttccagttcctcttgctttccagaggtgtgagcacctggaagcccctgctctggtctacaccccaggctcaagattcatcctgctcactcagccactcatgctgtcaccagtgataaaactgagatgcattccccagaaccaagcaaacaagaagaaggtcctccttcagtgggctgtcatcgatcattccccgttccatggccacaggactgactgctgatgaaatctaaaagaccagcttgcagaaggcatggaaatcctggggttaggggcccctctgctatggaggttgtcttagtctttgctctcagcatcggtgcacttgtaatatacttcatagattcatcaaactcctggagacttcatggcaaaccaacatattgaatgcaggaaattccagggtggccaagaatattctccagaaatcccaatagaatcctgccagaatttctacaaagatttcacattacagatcgacatggctttcaacgtgttcttccttctctacttcggcttgcggtttattgcagccaacgataaattgtggttctggctggaagtgaactctgtagtggatttcttcacggtgccccccgtgtttgtgtctgtgtacttaaacagaagttggcttggtttgagatttttaagagctctgagactgatacagttttcagaaattttgcagtttctgaatattcttaaaacaagtaattccatcaagctggtgaatctgctctccatatttatcagcacgtggctgactgcagccgggttcatccatttggtggagaattcaggggacccatgggaaaatttccaaaacaaccaggctctcacctactgggaatgtgtctatttactcatggtcacaatgtccaccgttggttatggggatgtttatgcaaaaaccacacttgggcgcctcttcatggtcttcttcatcctcgggggactggccatgtttgccagctacgtccctgaaatcatagagttaataggaaaccgcaagaaatacgggggctcctatagtgcggttagtggaagaaagcacattgtggtctgcggacacatcactctggagagtgtttccaacttcctgaaggactttctgcacaaggaccgggatgacgtcaatgtggagatcgtttttcttcacaacatctcccccaacctggagcttgaagctctgttcaaacgacattttactcaggtggaattttatcagggttccgtcctcaatccacatgatcttgcaagagtcaagatagagtcagcagatgcatgcctgatccttgccaacaagtactgcgctgacccggatgcggaggatgcctcgaatatcatgagagtaatctccataaagaactaccatccgaagataagaatcatcactcaaatgctgcagtatcacaacaaggcccatctgctaaacatcccgagctggaattggaaagaaggtgatgacgcaatctgcctcgcagagttgaagttgggcttcatagcccagagctgcctggctcaaggcctctccaccatgcttgccaacctcttctccatgaggtcattcataaagattgaggaagacacatggcagaaatactacttggaaggagtctcaaatgaaatgtacacagaatatctctccagtgccttcgtgggtctgtccttccctactgtttgtgagctgtgttttgtgaagctcaagctcctaatgatagccattgagtacaagtctgccaaccgagagagccgtatattaattaatcctggaaaccatcttaagatccaagaaggtactttaggatttttcatcgcaagtgatgccaaagaagttaaaagggcatttttttactgcaaggcctgtcatgatgacatcacagatcccaaaagaataaaaaaatgtggctgcaaacggctcaaggttgcagctagatcacgctattccaaagatccatttgagttcaagaaggagactcccaattctcggcttgtgaccgagccagttgaagatgagcagccgtcaacactatcaccaaaaaaaaagcaacggaatggaggcatgcggaactcacccaacacctcgcctaagctgatgaggcatgaccccttgttaattcctggcaatgatcagattgacaacatggactccaatgtgaagaagtacgactctactgggatgtttcactggtgtgcacccaaggagatagagaaagtcatcctgactcgaagtgaagctgccatgaccgtcctgagtggccatgtcgtggtctgcatctttggcgacgtcagctcagccctgatcggcctccggaacctggtgatgccgctccgtgccagcaactttcattaccatgagctcaagcacattgtgtttgtgggctctattgagtacctcaagcgggaatgggagacgcttcataacttccccaaagtgtccatattgcctggtacgccattaagtcgggctgatttaagggctgtcaacatcaacctctgtgacatgtgcgttatcctgtcagccaatcagaataatattgatgatacttcgctgcaggacaaggaatgcatcttggcgtcactcaacatcaaatctatgcagtttgatgacagcatcggagtcttgcaggctaattcccaagggttcacacctccaggaatggatagatcctctccagataacagcccagtgcacgggatgttacgtcaaccatccatcacaactggggtcaacatccccatcatcactgaactagtgaacgatactaatgttcagtttttggaccaagacgatgatgatgaccctgatacagaactgtacctcacgcagccctttgcctgtgggacagcatttgccgtcagtgtcctggactcactcatgagcgcgacgtacttcaatgacaatatcctcaccctgatacggaccctggtgaccggaggagccacgccggagctggaggctctgattgctgaggaaaacgcccttagaggtggctacagcaccccgcagacactggccaatagggaccgctgccgcgtggcccagttagctctgctcgatgggccatttgcggacttaggggatggtggttgttatggtgatctgttctgcaaagctctgaaaacatataatatgctttgttttggaatttaccggctgagagatgctcacctcagcacccccagtcagtgcacaaagaggtatgtcatcaccaacccgccctatgagtttgagctcgtgccgacggacctgatcttctgcttaatgcagtttgaccacaatgccggccagtcccgggccagcctgtcccattcctcccactcgtcgcagtcctccagcaagaagagctcctctgttcactccatcccatccacagcaaaccgacagaaccggcccaagtccagggagtcccgggacaaacagaaaaaagaaatggtttacagatgaaccggataatgcctatcccagaaacattcaaatcaagcccatgagtacccacatggctaaccagatcaaccaatataaatccacaagcagcttgattccaccaatcag

SEQ ID NO: 10608 - DNA, 439 bp, Homo sapiens
  source 1..439: mol_type = unassigned DNA
ggagacactctgtcatggtaaacaaagatcttgtgatgtatatctgggattgtccgaaaattatgaaatgaaagttgcatcacacttcatgaaacctcttgcggttgggctacttgaaagtgactttgaccttgtatagaaaggtatgtcatcaccaacccgccctatgagtttgagctcgtgccgacggacctgatcttctgcttaatgcagtttgaccacaatgccggccagtcccgggccagcctgtcccattcctcccactcgtcgcagtcctccagcaagaagagctcctctgttcactccatcccatccacagcaaaccgacagaaccggcccaagtccagggagtcccgggacaaacagaacagaaaagaaatggtttacagatgaaccggataatgcctatcccagaaacattcaaatcaagcccatgagt

SEQ ID NO: 10609 - DNA, 3528 bp, Homo sapiens
  source 1..3528: mol_type = unassigned DNA
atggatgcgctcatcatcccggtgaccatggaggtgccgtgcgacagccggggccaacgcatgtggtgggctttcctggcctcctccatggtgactttcttcgggggcctcttcatcatcttgctctggcggacgctcaagtacctgtggaccgtgtgctgccactgcgggggcaagacgaaggaggcccagaagattaacaatggctcaagccaggcggatggcactctcaaaccagtggatgaaaaagaggaggcagtggccgccgaggtcggctggatgacctccgtgaaggactgggcgggggtgatgatatccgcccagacactgactggcagagtcctggttgtcttagtctttgctctcagcatcggtgcacttgtaatatacttcatagattcatcaaacccaatagaatcctgccagaatttctacaaagatttcacattacagatcgacatggctttcaacgtgttcttccttctctacttcggcttgcggtttattgcagccaacgataaattgtggttctggctggaagtgaactctgtagtggatttcttcacggtgccccccgtgtttgtgtctgtgtacttaaacagaagttggcttggtttgagatttttaagagctctgagactgatacagttttcagaaattttgcagtttctgaatattcttaaaacaagtaattccatcaagctggtgaatctgctctccatatttatcagcacgtggctgactgcagccgggttcatccatttggtggagaattcaggggacccatgggaaaatttccaaaacaaccaggctctcacctactgggaatgtgtctatttactcatggtcacaatgtccaccgttggttatggggatgtttatgcaaaaaccacacttgggcgcctcttcatggtcttcttcatcctcgggggactggccatgtttgccagctacgtccctgaaatcatagagttaataggaaaccgcaagaaatacgggggctcctatagtgcggttagtggaagaaagcacattgtggtctgcggacacatcactctggagagtgtttccaacttcctgaaggactttctgcacaaggaccgggatgacgtcaatgtggagatcgtttttcttcacaacatctcccccaacctggagcttgaagctctgttcaaacgacattttactcaggtggaattttatcagggttccgtcctcaatccacatgatcttgcaagagtcaagatagagtcagcagatgcatgcctgatccttgccaacaagtactgcgctgacccggatgcggaggatgcctcgaatatcatgagagtaatctccataaagaactaccatccgaagataagaatcatcactcaaatgctgcagtatcacaacaaggcccatctgctaaacatcccgagctggaattggaaagaaggtgatgacgcaatctgcctcgcagagttgaagttgggcttcatagcccagagctgcctggctcaaggcctctccaccatgcttgccaacctcttctccatgaggtcattcataaagattgaggaagacacatggcagaaatactacttggaaggagtctcaaatgaaatgtacacagaatatctctccagtgccttcgtgggtctgtccttccctactgtttgtgagctgtgttttgtgaagctcaagctcctaatgatagccattgagtacaagtctgccaaccgagagagccgaagccgaaagcgtatattaattaatcctggaaaccatcttaagatccaagaaggtactttaggatttttcatcgcaagtgatgccaaagaagttaaaagggcatttttttactgcaaggcctgtcatgatgacatcacagatcccaaaagaataaaaaaatgtggctgcaaacggcccaagatgtccatctacaagagaatgagacgggcatgttgttttgattgcggacgttctgagcgtgactgctcatgcatgtcaggccgtgtgcgtggtaacgtggacacccttgagagagccttcccactttcttctgtctctgttaatgattgctccaccagtttccgtgcctttgaagatgagcagccgtcaacactatcaccaaaaaaaaagcaacggaatggaggcatgcggaactcacccaacacctcgcctaagctgatgaggcatgaccccttgttaattcctggcaatgatcagattgacaacatggactccaatgtgaagaagtacgactctactgggatgtttcactggtgtgcacccaaggagatagagaaagtcatcctgactcgaagtgaagctgccatgaccgtcctgagtggccatgtcgtggtctgcatctttggcgacgtcagctcagccctgatcggcctccggaacctggtgatgccgctccgtgccagcaactttcattaccatgagctcaagcacattgtgtttgtgggctctattgagtacctcaagcgggaatgggagacgcttcataacttccccaaagtgtccatattgcctggtacgccattaagtcgggctgatttaagggctgtcaacatcaacctctgtgacatgtgcgttatcctgtcagccaatcagaataatattgatgatacttcgctgcaggacaaggaatgcatcttggcgtcactcaacatcaaatctatgcagtttgatgacagcatcggagtcttgcaggctaattcccaagggttcacacctccaggaatggatagatcctctccagataacagcccagtgcacgggatgttacgtcaaccatccatcacaactggggtcaacatccccatcatcactgaactagtgaacgatactaatgttcagtttttggaccaagacgatgatgatgaccctgatacagaactgtacctcacgcagccctttgcctgtgggacagcatttgccgtcagtgtcctggactcactcatgagcgcgacgtacttcaatgacaatatcctcaccctgatacggaccctggtgaccggaggagccacgccggagctggaggctctgattgctgaggaaaacgcccttagaggtggctacagcaccccgcagacactggccaatagggaccgctgccgcgtggcccagttagctctgctcgatgggccatttgcggacttaggggatggtggttgttatggtgatctgttctgcaaagctctgaaaacatataatatgctttgttttggaatttaccggctgagagatgctcacctcagcacccccagtcagtgcacaaagaggtatgtcatcaccaacccgccctatgagtttgagctcgtgccgacggacctgatcttctgcttaatgcagtttgaccacaatgccggccagtcccgggccagcctgtcccattcctcccactcgtcgcagtcctccagcaagaagagctcctctgttcactccatcccatccacagcaaaccgacagaaccggcccaagtccagggagtcccgggacaaacagaacagaaaagaaatggtttacagatga

SEQ ID NO: 10610 - DNA, 3537 bp, Homo sapiens
  source 1..3537: mol_type = unassigned DNA
atggatgcgctcatcatcccggtgaccatggaggtgccgtgcgacagccggggccaacgcatgtggtgggctttcctggcctcctccatggtgactttcttcgggggcctcttcatcatcttgctctggcggacgctcaagtacctgtggaccgtgtgctgccactgcgggggcaagacgaaggaggcccagaagattaacaatggctcaagccaggcggatggcactctcaaaccagtggatgaaaaagaggaggcagtggccgccgaggtcggctggatgacctccgtgaaggactgggcgggggtgatgatatccgcccagacactgactggcagagtcctggttgtcttagtctttgctctcagcatcggtgcacttgtaatatacttcatagattcatcaaacccaatagaatcctgccagaatttctacaaagatttcacattacagatcgacatggctttcaacgtgttcttccttctctacttcggcttgcggtttattgcagccaacgataaattgtggttctggctggaagtgaactctgtagtggatttcttcacggtgccccccgtgtttgtgtctgtgtacttaaacagaagttggcttggtttgagatttttaagagctctgagactgatacagttttcagaaattttgcagtttctgaatattcttaaaacaagtaattccatcaagctggtgaatctgctctccatatttatcagcacgtggctgactgcagccgggttcatccatttggtggagaattcaggggacccatgggaaaatttccaaaacaaccaggctctcacctactgggaatgtgtctatttactcatggtcacaatgtccaccgttggttatggggatgtttatgcaaaaaccacacttgggcgcctcttcatggtcttcttcatcctcgggggactggccatgtttgccagctacgtccctgaaatcatagagttaataggaaaccgcaagaaatacgggggctcctatagtgcggttagtggaagaaagcacattgtggtctgcggacacatcactctggagagtgtttccaacttcctgaaggactttctgcacaaggaccgggatgacgtcaatgtggagatcgtttttcttcacaacatctcccccaacctggagcttgaagctctgttcaaacgacattttactcaggtggaattttatcagggttccgtcctcaatccacatgatcttgcaagagtcaagatagagtcagcagatgcatgcctgatccttgccaacaagtactgcgctgacccggatgcggaggatgcctcgaatatcatgagagtaatctccataaagaactaccatccgaagataagaatcatcactcaaatgctgcagtatcacaacaaggcccatctgctaaacatcccgagctggaattggaaagaaggtgatgacgcaatctgcctcgcagagttgaagttgggcttcatagcccagagctgcctggctcaaggcctctccaccatgcttgccaacctcttctccatgaggtcattcataaagattgaggaagacacatggcagaaatactacttggaaggagtctcaaatgaaatgtacacagaatatctctccagtgccttcgtgggtctgtccttccctactgtttgtgagctgtgttttgtgaagctcaagctcctaatgatagccattgagtacaagtctgccaaccgagagagccgaagccgaaagcgtatattaattaatcctggaaaccatcttaagatccaagaaggtactttaggatttttcatcgcaagtgatgccaaagaagttaaaagggcatttttttactgcaaggcctgtcatgatgacatcacagatcccaaaagaataaaaaaatgtggctgcaaacggctgatatattccaagatgtccatctacaagagaatgagacgggcatgttgttttgattgcggacgttctgagcgtgactgctcatgcatgtcaggccgtgtgcgtggtaacgtggacacccttgagagagccttcccactttcttctgtctctgttaatgattgctccaccagtttccgtgcctttgaagatgagcagccgtcaacactatcaccaaaaaaaaagcaacggaatggaggcatgcggaactcacccaacacctcgcctaagctgatgaggcatgaccccttgttaattcctggcaatgatcagattgacaacatggactccaatgtgaagaagtacgactctactgggatgtttcactggtgtgcacccaaggagatagagaaagtcatcctgactcgaagtgaagctgccatgaccgtcctgagtggccatgtcgtggtctgcatctttggcgacgtcagctcagccctgatcggcctccggaacctggtgatgccgctccgtgccagcaactttcattaccatgagctcaagcacattgtgtttgtgggctctattgagtacctcaagcgggaatgggagacgcttcataacttccccaaagtgtccatattgcctggtacgccattaagtcgggctgatttaagggctgtcaacatcaacctctgtgacatgtgcgttatcctgtcagccaatcagaataatattgatgatacttcgctgcaggacaaggaatgcatcttggcgtcactcaacatcaaatctatgcagtttgatgacagcatcggagtcttgcaggctaattcccaagggttcacacctccaggaatggatagatcctctccagataacagcccagtgcacgggatgttacgtcaaccatccatcacaactggggtcaacatccccatcatcactgaactagtgaacgatactaatgttcagtttttggaccaagacgatgatgatgaccctgatacagaactgtacctcacgcagccctttgcctgtgggacagcatttgccgtcagtgtcctggactcactcatgagcgcgacgtacttcaatgacaatatcctcaccctgatacggaccctggtgaccggaggagccacgccggagctggaggctctgattgctgaggaaaacgcccttagaggtggctacagcaccccgcagacactggccaatagggaccgctgccgcgtggcccagttagctctgctcgatgggccatttgcggacttaggggatggtggttgttatggtgatctgttctgcaaagctctgaaaacatataatatgctttgttttggaatttaccggctgagagatgctcacctcagcacccccagtcagtgcacaaagaggtatgtcatcaccaacccgccctatgagtttgagctcgtgccgacggacctgatcttctgcttaatgcagtttgaccacaatgccggccagtcccgggccagcctgtcccattcctcccactcgtcgcagtcctccagcaagaagagctcctctgttcactccatcccatccacagcaaaccgacagaaccggcccaagtccagggagtcccgggacaaacagaacagaaaagaaatggtttacagatga

SEQ ID NO: 10611 - DNA, 3429 bp, Homo sapiens
  source 1..3429: mol_type = unassigned DNA
atggatgcgctcatcatcccggtgaccatggaggtgccgtgcgacagccggggccaacgcatgtggtgggctttcctggcctcctccatggtgactttcttcgggggcctcttcatcatcttgctctggcggacgctcaagtacctgtggaccgtgtgctgccactgcgggggcaagacgaaggaggcccagaagattaacaatggctcaagccaggcggatggcactctcaaaccagtggatgaaaaagaggaggcagtggccgccgaggtcggctggatgacctccgtgaaggactgggcgggggtgatgatatccgcccagacactgactggcagagtcctggttgtcttagtctttgctctcagcatcggtgcacttgtaatatacttcatagattcatcaaacccaatagaatcctgccagaatttctacaaagatttcacattacagatcgacatggctttcaacgtgttcttccttctctacttcggcttgcggtttattgcagccaacgataaattgtggttctggctggaagtgaactctgtagtggatttcttcacggtgccccccgtgtttgtgtctgtgtacttaaacagaagttggcttggtttgagatttttaagagctctgagactgatacagttttcagaaattttgcagtttctgaatattcttaaaacaagtaattccatcaagctggtgaatctgctctccatatttatcagcacgtggctgactgcagccgggttcatccatttggtggagaattcaggggacccatgggaaaatttccaaaacaaccaggctctcacctactgggaatgtgtctatttactcatggtcacaatgtccaccgttggttatggggatgtttatgcaaaaaccacacttgggcgcctcttcatggtcttcttcatcctcgggggactggccatgtttgccagctacgtccctgaaatcatagagttaataggaaaccgcaagaaatacgggggctcctatagtgcggttagtggaagaaagcacattgtggtctgcggacacatcactctggagagtgtttccaacttcctgaaggactttctgcacaaggaccgggatgacgtcaatgtggagatcgtttttcttcacaacatctcccccaacctggagcttgaagctctgttcaaacgacattttactcaggtggaattttatcagggttccgtcctcaatccacatgatcttgcaagagtcaagatagagtcagcagatgcatgcctgatccttgccaacaagtactgcgctgacccggatgcggaggatgcctcgaatatcatgagagtaatctccataaagaactaccatccgaagataagaatcatcactcaaatgctgcagtatcacaacaaggcccatctgctaaacatcccgagctggaattggaaagaaggtgatgacgcaatctgcctcgcagagttgaagttgggcttcatagcccagagctgcctggctcaaggcctctccaccatgcttgccaacctcttctccatgaggtcattcataaagattgaggaagacacatggcagaaatactacttggaaggagtctcaaatgaaatgtacacagaatatctctccagtgccttcgtgggtctgtccttccctactgtttgtgagctgtgttttgtgaagctcaagctcctaatgatagccattgagtacaagtctgccaaccgagagagccgtatattaattaatcctggaaaccatcttaagatccaagaaggtactttaggatttttcatcgcaagtgatgccaaagaagttaaaagggcatttttttactgcaaggcctgtcatgatgacatcacagatcccaaaagaataaaaaaatgtggctgcaaacggctcaaggttgcagctagatcacgctattccaaagatccatttgagttcaagaaggagactcccaattctcggcttgtgaccgagccagttgaagatgagcagccgtcaacactatcaccaaaaaaaaagcaacggaatggaggcatgcggaactcacccaacacctcgcctaagctgatgaggcatgaccccttgttaattcctggcaatgatcagattgacaacatggactccaatgtgaagaagtacgactctactgggatgtttcactggtgtgcacccaaggagatagagaaagtcatcctgactcgaagtgaagctgccatgaccgtcctgagtggccatgtcgtggtctgcatctttggcgacgtcagctcagccctgatcggcctccggaacctggtgatgccgctccgtgccagcaactttcattaccatgagctcaagcacattgtgtttgtgggctctattgagtacctcaagcgggaatgggagacgcttcataacttccccaaagtgtccatattgcctggtacgccattaagtcgggctgatttaagggctgtcaacatcaacctctgtgacatgtgcgttatcctgtcagccaatcagaataatattgatgatacttcgctgcaggacaaggaatgcatcttggcgtcactcaacatcaaatctatgcagtttgatgacagcatcggagtcttgcaggctaattcccaagggttcacacctccaggaatggatagatcctctccagataacagcccagtgcacgggatgttacgtcaaccatccatcacaactggggtcaacatccccatcatcactgaactagtgaacgatactaatgttcagtttttggaccaagacgatgatgatgaccctgatacagaactgtacctcacgcagccctttgcctgtgggacagcatttgccgtcagtgtcctggactcactcatgagcgcgacgtacttcaatgacaatatcctcaccctgatacggaccctggtgaccggaggagccacgccggagctggaggctctgattgctgaggaaaacgcccttagaggtggctacagcaccccgcagacactggccaatagggaccgctgccgcgtggcccagttagctctgctcgatgggccatttgcggacttaggggatggtggttgttatggtgatctgttctgcaaagctctgaaaacatataatatgctttgttttggaatttaccggctgagagatgctcacctcagcacccccagtcagtgcacaaagaggtatgtcatcaccaacccgccctatgagtttgagctcgtgccgacggacctgatcttctgcttaatgcagtttgaccacaatgccggccagtcccgggccagcctgtcccattcctcccactcgtcgcagtcctccagcaagaagagctcctctgttcactccatcccatccacagcaaaccgacagaaccggcccaagtccagggagtcccgggacaaacagaacagaaaagaaatggtttacagatga

SEQ ID NO: 10612 - DNA, 3434 bp, Homo sapiens
  source 1..3434: mol_type = unassigned DNA
atggatgcgctcatcatcccggtgaccatggaggtgccgtgcgacagccggggccaacgcatgtggtgggctttcctggcctcctccatggtgactttcttcgggggcctcttcatcatcttgctctggcggacgctcaagtacctgtggaccgtgtgctgccactgcgggggcaagacgaaggaggcccagaagattaacaatggctcaagccaggcggatggcactctcaaaccagtggatgaaaaagaggaggcagtggccgccgaggtcggctggatgacctccgtgaaggactgggcgggggtgatgatatccgcccagacactgactggcagagtcctggttgtcttagtctttgctctcagcatcggtgcacttgtaatatacttcatagattcatcaaacccaatagaatcctgccagaatttctacaaagatttcacattacagatcgacatggctttcaacgtgttcttccttctctacttcggcttgcggtttattgcagccaacgataaattgtggttctggctggaagtgaactctgtagtggatttcttcacggtgccccccgtgtttgtgtctgtgtacttaaacagaagttggcttggtttgagatttttaagagctctgagactgatacagttttcagaaattttgcagtttctgaatattcttaaaacaagtaattccatcaagctggtgaatctgctctccatatttatcagcacgtggctgactgcagccgggttcatccatttggtggagaattcaggggacccatgggaaaatttccaaaacaaccaggctctcacctactgggaatgtgtctatttactcatggtcacaatgtccaccgttggttatggggatgtttatgcaaaaaccacacttgggcgcctcttcatggtcttcttcatcctcgggggactggccatgtttgccagctacgtccctgaaatcatagagttaataggaaaccgcaagaaatacgggggctcctatagtgcggttagtggaagaaagcaatgtttgcccgctacgtgcccgaaattgctgctctcatcctgagtcggaataaattcggcgggacttttaacaaacatggaggcagaaagcacattgtggtctgcggacacatcactctggagagtgtttccaacttcctgaaggactttctgcacaaggaccgggatgacgtcaatgtggagatcgtttttcttcacaacatctcccccaacctggagcttgaagctctgttcaaacgacattttactcaggtggaattttatcagggttccgtcctcaatccacatgatcttgcaagagtcaagatagagtcagcagatgcatgcctgatccttgccaacaagtactgcgctgacccggatgcggaggatgcctcgaatatcatgagagtaatctccataaagaactaccatccgaagataagaatcatcactcaaatgctgcagtatcacaacaaggcccatctgctaaacatcccgagctggaattggaaagaaggtgatgacgcaatctgcctcgcagagttgaagttgggcttcatagcccagagctgcctggctcaaggcctctccaccatgcttgccaacctcttctccatgaggtcattcataaagattgaggaagacacatggcagaaatactacttggaaggagtctcaaatgaaatgtacacagaatatctctccagtgccttcgtgggtctgtccttccctactgtttgtgagctgtgttttgtgaagctcaagctcctaatgatagccattgagtacaagtctgccaaccgagagagccgtatattaattaatcctggaaaccatcttaagatccaagaaggtactttaggatttttcatcgcaagtgatgccaaagaagttaaaagggcatttttttactgcaaggcctgtcatgatgacatcacagatcccaaaagaataaaaaaatgtggctgcaaacggcttgaagatgagcagccgtcaacactatcaccaaaaaaaaagcaacggaatggaggcatgcggaactcacccaacacctcgcctaagctgatgaggcatgaccccttgttaattcctggcaatgatcagattgacaacatggactccaatgtgaagaagtacgactctactgggatgtttcactggtgtgcacccaaggagatagagaaagtcatcctgactcgaagtgaagctgccatgaccgtcctgagtggccatgtcgtggtctgcatctttggcgacgtcagctcagccctgatcggcctccggaacctggtgatgccgctccgtgccagcaactttcattaccatgagctcaagcacattgtgtttgtgggctctattgagtacctcaagcgggaatgggagacgcttcataacttccccaaagtgtccatattgcctggtacgccattaagtcgggctgatttaagggctgtcaacatcaacctctgtgacatgtgcgttatcctgtcagccaatcagaataatattgatgatacttcgctgcaggacaaggaatgcatcttggcgtcactcaacatcaaatctatgcagtttgatgacagcatcggagtcttgcaggctaattcccaagggttcacacctccaggaatggatagatcctctccagataacagcccagtgcacgggatgttacgtcaaccatccatcacaactggggtcaacatccccatcatcactgaactagtgaacgatactaatgttcagtttttggaccaagacgatgatgatgaccctgatacagaactgtacctcacgcagccctttgcctgtgggacagcatttgccgtcagtgtcctggactcactcatgagcgcgacgtacttcaatgacaatatcctcaccctgatacggaccctggtgaccggaggagccacgccggagctggaggctctgattgctgaggaaaacgcccttagaggtggctacagcaccccgcagacactggccaatagggaccgctgccgcgtggcccagttagctctgctcgatgggccatttgcggacttaggggatggtggttgttatggtgatctgttctgcaaagctctgaaaacatataatatgctttgttttggaatttaccggctgagagatgctcacctcagcacccccagtcagtgcacaaagaggtatgtcatcaccaacccgccctatgagtttgagctcgtgccgacggacctgatcttctgcttaatgcagtttgaccacaatgccggccagtcccgggccagcctgtcccattcctcccactcgtcgcagtcctccagcaagaagagctcctctgttcactccatcccatccacagcaaaccgacagaaccggcccaagtccagggagtcccgggacaaacagaacagaaaagaaatggtttacagatga

SEQ ID NO: 10613 - DNA, 3360 bp, Homo sapiens
  source 1..3360: mol_type = unassigned DNA
atggatgcgctcatcatcccggtgaccatggaggtgccgtgcgacagccggggccaacgcatgtggtgggctttcctggcctcctccatggtgactttcttcgggggcctcttcatcatcttgctctggcggacgctcaagtacctgtggaccgtgtgctgccactgcgggggcaagacgaaggaggcccagaagattaacaatggctcaagccaggcggatggcactctcaaaccagtggatgaaaaagaggaggcagtggccgccgaggtcggctggatgacctccgtgaaggactgggcgggggtgatgatatccgcccagacactgactggcagagtcctggttgtcttagtctttgctctcagcatcggtgcacttgtaatatacttcatagattcatcaaacccaatagaatcctgccagaatttctacaaagatttcacattacagatcgacatggctttcaacgtgttcttccttctctacttcggcttgcggtttattgcagccaacgataaattgtggttctggctggaagtgaactctgtagtggatttcttcacggtgccccccgtgtttgtgtctgtgtacttaaacagaagttggcttggtttgagatttttaagagctctgagactgatacagttttcagaaattttgcagtttctgaatattcttaaaacaagtaattccatcaagctggtgaatctgctctccatatttatcagcacgtggctgactgcagccgggttcatccatttggtggagaattcaggggacccatgggaaaatttccaaaacaaccaggctctcacctactgggaatgtgtctatttactcatggtcacaatgtccaccgttggttatggggatgtttatgcaaaaaccacacttgggcgcctcttcatggtcttcttcatcctcgggggactggccatgtttgccagctacgtccctgaaatcatagagttaataggaaaccgcaagaaatacgggggctcctatagtgcggttagtggaagaaagcacattgtggtctgcggacacatcactctggagagtgtttccaacttcctgaaggactttctgcacaaggaccgggatgacgtcaatgtggagatcgtttttcttcacaacatctcccccaacctggagcttgaagctctgttcaaacgacattttactcaggtggaattttatcagggttccgtcctcaatccacatgatcttgcaagagtcaagatagagtcagcagatgcatgcctgatccttgccaacaagtactgcgctgacccggatgcggaggatgcctcgaatatcatgagagtaatctccataaagaactaccatccgaagataagaatcatcactcaaatgctgcagtatcacaacaagattgaggaagacacatggcagaaatactacttggaaggagtctcaaatgaaatgtacacagaatatctctccagtgccttcgtgggtctgtccttccctactgtttgtgagctgtgttttgtgaagctcaagctcctaatgatagccattgagtacaagtctgccaaccgagagagccgtatattaattaatcctggaaaccatcttaagatccaagaaggtactttaggatttttcatcgcaagtgatgccaaagaagttaaaagggcatttttttactgcaaggcctgtcatgatgacatcacagatcccaaaagaataaaaaaatgtggctgcaaacggcccaagatgtccatctacaagagaatgagacgggcatgttgttttgattgcggacgttctgagcgtgactgctcatgcatgtcaggccgtgtgcgtggtaacgtggacacccttgagagagccttcccactttcttctgtctctgttaatgattgctccaccagtttccgtgcctttgaagatgagcagccgtcaacactatcaccaaaaaaaaagcaacggaatggaggcatgcggaactcacccaacacctcgcctaagctgatgaggcatgaccccttgttaattcctggcaatgatcagattgacaacatggactccaatgtgaagaagtacgactctactgggatgtttcactggtgtgcacccaaggagatagagaaagtcatcctgactcgaagtgaagctgccatgaccgtcctgagtggccatgtcgtggtctgcatctttggcgacgtcagctcagccctgatcggcctccggaacctggtgatgccgctccgtgccagcaactttcattaccatgagctcaagcacattgtgtttgtgggctctattgagtacctcaagcgggaatgggagacgcttcataacttccccaaagtgtccatattgcctggtacgccattaagtcgggctgatttaagggctgtcaacatcaacctctgtgacatgtgcgttatcctgtcagccaatcagaataatattgatgatacttcgctgcaggacaaggaatgcatcttggcgtcactcaacatcaaatctatgcagtttgatgacagcatcggagtcttgcaggctaattcccaagggttcacacctccaggaatggatagatcctctccagataacagcccagtgcacgggatgttacgtcaaccatccatcacaactggggtcaacatccccatcatcactgaactagtgaacgatactaatgttcagtttttggaccaagacgatgatgatgaccctgatacagaactgtacctcacgcagccctttgcctgtgggacagcatttgccgtcagtgtcctggactcactcatgagcgcgacgtacttcaatgacaatatcctcaccctgatacggaccctggtgaccggaggagccacgccggagctggaggctctgattgctgaggaaaacgcccttagaggtggctacagcaccccgcagacactggccaatagggaccgctgccgcgtggcccagttagctctgctcgatgggccatttgcggacttaggggatggtggttgttatggtgatctgttctgcaaagctctgaaaacatataatatgctttgttttggaatttaccggctgagagatgctcacctcagcacccccagtcagtgcacaaagaggtatgtcatcaccaacccgccctatgagtttgagctcgtgccgacggacctgatcttctgcttaatgcagtttgaccacaatgccggccagtcccgggccagcctgtcccattcctcccactcgtcgcagtcctccagcaagaagagctcctctgttcactccatcccatccacagcaaaccgacagaaccggcccaagtccagggagtcccgggacaaacagaacagaaaagaaatggtttacagatga

SEQ ID NO: 10614 - DNA, 3711 bp, Homo sapiens
  source 1..3711: mol_type = unassigned DNA
atggcaaatggtggcggcggcggcggcggcagcagcggcggcggcggcggcggcggaggcagcagtcttagaatgagtagcaatatccacgcgaaccatctcagcctagacgcgtcctcctcctcctcctcctcctcttcctcttcttcttcttcctcctcctcttcctcctcgtcctcggtccacgagcccaagatggatgcgctcatcatcccggtgaccatggaggtgccgtgcgacagccggggccaacgcatgtggtgggctttcctggcctcctccatggtgactttcttcgggggcctcttcatcatcttgctctggcggacgctcaagtacctgtggaccgtgtgctgccactgcgggggcaagacgaaggaggcccagaagattaacaatggctcaagccaggcggatggcactctcaaaccagtggatgaaaaagaggaggcagtggccgccgaggtcggctggatgacctccgtgaaggactgggcgggggtgatgatatccgcccagacactgactggcagagtcctggttgtcttagtctttgctctcagcatcggtgcacttgtaatatacttcatagattcatcaaacccaatagaatcctgccagaatttctacaaagatttcacattacagatcgacatggctttcaacgtgttcttccttctctacttcggcttgcggtttattgcagccaacgataaattgtggttctggctggaagtgaactctgtagtggatttcttcacggtgccccccgtgtttgtgtctgtgtacttaaacagaagttggcttggtttgagatttttaagagctctgagactgatacagttttcagaaattttgcagtttctgaatattcttaaaacaagtaattccatcaagctggtgaatctgctctccatatttatcagcacgtggctgactgcagccgggttcatccatttggtggagaattcaggggacccatgggaaaatttccaaaacaaccaggctctcacctactgggaatgtgtctatttactcatggtcacaatgtccaccgttggttatggggatgtttatgcaaaaaccacacttgggcgcctcttcatggtcttcttcatcctcgggggactggccatgtttgccagctacgtccctgaaatcatagagttaataggaaaccgcaagaaatacgggggctcctatagtgcggttagtggaagaaagcacattgtggtctgcggacacatcactctggagagtgtttccaacttcctgaaggactttctgcacaaggaccgggatgacgtcaatgtggagatcgtttttcttcacaacatctcccccaacctggagcttgaagctctgttcaaacgacattttactcaggtggaattttatcagggttccgtcctcaatccacatgatcttgcaagagtcaagatagagtcagcagatgcatgcctgatccttgccaacaagtactgcgctgacccggatgcggaggatgcctcgaatatcatgagagtaatctccataaagaactaccatccgaagataagaatcatcactcaaatgctgcagtatcacaacaaggcccatctgctaaacatcccgagctggaattggaaagaaggtgatgacgcaatctgcctcgcagagttgaagttgggcttcatagcccagagctgcctggctcaaggcctctccaccatgcttgccaacctcttctccatgaggtcattcataaagattgaggaagacacatggcagaaatactacttggaaggagtctcaaatgaaatgtacacagaatatctctccagtgccttcgtgggtctgtccttccctactgtttgtgagctgtgttttgtgaagctcaagctcctaatgatagccattgagtacaagtctgccaaccgagagagccgtatattaattaatcctggaaaccatcttaagatccaagaaggtactttaggatttttcatcgcaagtgatgccaaagaagttaaaagggcatttttttactgcaaggcctgtcatgatgacatcacagatcccaaaagaataaaaaaatgtggctgcaaacggcccaagatgtccatctacaagagaatgagacgggcatgttgttttgattgcggacgttctgagcgtgactgctcatgcatgtcaggccgtgtgcgtggtaacgtggacacccttgagagagccttcccactttcttctgtctctgttaatgattgctccaccagtttccgtgcctttgaagatgagcagccgtcaacactatcaccaaaaaaaaagcaacggaatggaggcatgcggaactcacccaacacctcgcctaagctgatgaggcatgaccccttgttaattcctggcaatgatcagattgacaacatggactccaatgtgaagaagtacgactctactgggatgtttcactggtgtgcacccaaggagatagagaaagtcatcctgactcgaagtgaagctgccatgaccgtcctgagtggccatgtcgtggtctgcatctttggcgacgtcagctcagccctgatcggcctccggaacctggtgatgccgctccgtgccagcaactttcattaccatgagctcaagcacattgtgtttgtgggctctattgagtacctcaagcgggaatgggagacgcttcataacttccccaaagtgtccatattgcctggtacgccattaagtcgggctgatttaagggctgtcaacatcaacctctgtgacatgtgcgttatcctgtcagccaatcagaataatattgatgatacttcgctgcaggacaaggaatgcatcttggcgtcactcaacatcaaatctatgcagtttgatgacagcatcggagtcttgcaggctaattcccaagggttcacacctccaggaatggatagatcctctccagataacagcccagtgcacgggatgttacgtcaaccatccatcacaactggggtcaacatccccatcatcactgaactagtgaacgatactaatgttcagtttttggaccaagacgatgatgatgaccctgatacagaactgtacctcacgcagccctttgcctgtgggacagcatttgccgtcagtgtcctggactcactcatgagcgcgacgtacttcaatgacaatatcctcaccctgatacggaccctggtgaccggaggagccacgccggagctggaggctctgattgctgaggaaaacgcccttagaggtggctacagcaccccgcagacactggccaatagggaccgctgccgcgtggcccagttagctctgctcgatgggccatttgcggacttaggggatggtggttgttatggtgatctgttctgcaaagctctgaaaacatataatatgctttgttttggaatttaccggctgagagatgctcacctcagcacccccagtcagtgcacaaagaggtatgtcatcaccaacccgccctatgagtttgagctcgtgccgacggacctgatcttctgcttaatgcagtttgaccacaatgccggccagtcccgggccagcctgtcccattcctcccactcgtcgcagtcctccagcaagaagagctcctctgttcactccatcccatccacagcaaaccgacagaaccggcccaagtccagggagtcccgggacaaacagaacagaaaagaaatggtttacagatga

SEQ ID NO: 10615 - DNA, 3387 bp, Homo sapiens
  source 1..3387: mol_type = unassigned DNA
atggcaaatggtggcggcggcggcggcggcagcagcggcggcggcggcggcggcggaggcagcagtcttagaatgagtagcaatatccacgcgaaccatctcagcctagacgcgtcctcctcctcctcctcctcctcttcctcttcttcttcttcctcctcctcttcctcctcgtcctcggtccacgagcccaagatggatgcgctcatcatcccggtgaccatggaggtgccgtgcgacagccggggccaacgcatgtggtgggctttcctggcctcctccatggtgactttcttcgggggcctcttcatcatcttgctctggcggacgctcaagtacctgtggaccgtgtgctgccactgcgggggcaagacgaaggttgtcttagtctttgctctcagcatcggtgcacttgtaatatacttcatagattcatcaaacccaatagaatcctgccagaatttctacaaagatttcacattacagatcgacatggctttcaacgtgttcttccttctctacttcggcttgcggtttattgcagccaacgataaattgtggttctggctggaagtgaactctgtagtggatttcttcacggtgccccccgtgtttgtgtctgtgtacttaaacagaagttggcttggtttgagatttttaagagctctgagactgatacagttttcagaaattttgcagtttctgaatattcttaaaacaagtaattccatcaagctggtgaatctgctctccatatttatcagcacgtggctgactgcagccgggttcatccatttggtggagaattcaggggacccatgggaaaatttccaaaacaaccaggctctcacctactgggaatgtgtctatttactcatggtcacaatgtccaccgttggttatggggatgtttatgcaaaaaccacacttgggcgcctcttcatggtcttcttcatcctcgggggactggccatgtttgccagctacgtccctgaaatcatagagttaataggaaaccgcaagaaatacgggggctcctatagtgcggttagtggaagaaagcacattgtggtctgcggacacatcactctggagagtgtttccaacttcctgaaggactttctgcacaaggaccgggatgacgtcaatgtggagatcgtttttcttcacaacatctcccccaacctggagcttgaagctctgttcaaacgacattttactcaggtggaattttatcagggttccgtcctcaatccacatgatcttgcaagagtcaagatagagtcagcagatgcatgcctgatccttgccaacaagtactgcgctgacccggatgcggaggatgcctcgaatatcatgagagtaatctccataaagaactaccatccgaagataagaatcatcactcaaatgctgcagtatcacaacaaggcccatctgctaaacatcccgagctggaattggaaagaaggtgatgacgcaatctgcctcgcagagttgaagttgggcttcatagcccagagctgcctggctcaaggcctctccaccatgcttgccaacctcttctccatgaggtcattcataaagattgaggaagacacatggcagaaatactacttggaaggagtctcaaatgaaatgtacacagaatatctctccagtgccttcgtgggtctgtccttccctactgtttgtgagctgtgttttgtgaagctcaagctcctaatgatagccattgagtacaagtctgccaaccgagagagccgaagccgaaagcgtatattaattaatcctggaaaccatcttaagatccaagaaggtactttaggatttttcatcgcaagtgatgccaaagaagttaaaagggcatttttttactgcaaggcctgtcatgatgacatcacagatcccaaaagaataaaaaaatgtggctgcaaacggcttgaagatgagcagccgtcaacactatcaccaaaaaaaaagcaacggaatggaggcatgcggaactcacccaacacctcgcctaagctgatgaggcatgaccccttgttaattcctggcaatgatcagattgacaacatggactccaatgtgaagaagtacgactctactgggatgtttcactggtgtgcacccaaggagatagagaaagtcatcctgactcgaagtgaagctgccatgaccgtcctgagtggccatgtcgtggtctgcatctttggcgacgtcagctcagccctgatcggcctccggaacctggtgatgccgctccgtgccagcaactttcattaccatgagctcaagcacattgtgtttgtgggctctattgagtacctcaagcgggaatgggagacgcttcataacttccccaaagtgtccatattgcctggtacgccattaagtcgggctgatttaagggctgtcaacatcaacctctgtgacatgtgcgttatcctgtcagccaatcagaataatattgatgatacttcgctgcaggacaaggaatgcatcttggcgtcactcaacatcaaatctatgcagtttgatgacagcatcggagtcttgcaggctaattcccaagggttcacacctccaggaatggatagatcctctccagataacagcccagtgcacgggatgttacgtcaaccatccatcacaactggggtcaacatccccatcatcactgaactagtgaacgatactaatgttcagtttttggaccaagacgatgatgatgaccctgatacagaactgtacctcacgcagccctttgcctgtgggacagcatttgccgtcagtgtcctggactcactcatgagcgcgacgtacttcaatgacaatatcctcaccctgatacggaccctggtgaccggaggagccacgccggagctggaggctctgattgctgaggaaaacgcccttagaggtggctacagcaccccgcagacactggccaatagggaccgctgccgcgtggcccagttagctctgctcgatgggccatttgcggacttaggggatggtggttgttatggtgatctgttctgcaaagctctgaaaacatataatatgctttgttttggaatttaccggctgagagatgctcacctcagcacccccagtcagtgcacaaagaggtatgtcatcaccaacccgccctatgagtttgagctcgtgccgacggacctgatcttctgcttaatgcagtttgaccacaatgccggccagtcccgggccagcctgtcccattcctcccactcgtcgcagtcctccagcaagaagagctcctctgttcactccatcccatccacagcaaaccgacagaaccggcccaagtccagggagtcccgggacaaacagaacagaaaagaaatggtttacagatga

SEQ ID NO: 10616 - DNA, 4055 bp, Homo sapiens
  source 1..4055: mol_type = unassigned DNA
atggcaaatggtggcggcggcggcggcggcagcagcggcggcggcggcggcggcggaggcagcagtcttagaatgagtagcaatatccacgcgaaccatctcagcctagacgcgtcctcctcctcctcctcctcctcttcctcttcttcttcttcctcctcctcttcctcctcgtcctcggtccacgagcccaagatggatgcgctcatcatcccggtgaccatggaggtgccgtgcgacagccggggccaacgcatgtggtgggctttcctggcctcctccatggtgactttcttcgggggcctcttcatcatcttgctctggcggacgctcaagtacctgtggaccgtgtgctgccactgcgggggcaagacgaaggaggcccagaagattaacaatggctcaagccaggcggatggcactctcaaaccagtggatgaaaaagaggaggcagtggccgccgaggtcggctggatgacctccgtgaaggactgggcgggggtgatgatatccgcccagacactgactggcagagtcctggttgtcttagtctttgctctcagcatcggtgcacttgtaatatacttcatagattcatcaaacccaatagaatcctgccagaatttctacaaagatttcacattacagatcgacatggctttcaacgtgttcttccttctctacttcggcttgcggtttattgcagccaacgataaattgtggttctggctggaagtgaactctgtagtggatttcttcacggtgccccccgtgtttgtgtctgtgtacttaaacagaagttggcttggtttgagatttttaagagctctgagactgatacagttttcagaaattttgcagtttctgaatattcttaaaacaagtaattccatcaagctggtgaatctgctctccatatttatcagcacgtggctgactgcagccgggttcatccatttggtggagaattcaggggacccatgggaaaatttccaaaacaaccaggctctcacctactgggaatgtgtctatttactcatggtcacaatgtccaccgttggttatggggatgtttatgcaaaaaccacacttgggcgcctcttcatggtcttcttcatcctcgggggactggccatgtttgccagctacgtccctgaaatcatagagttaataggaaaccgcaagaaatacgggggctcctatagtgcggttagtggaagaaagcacattgtggtctgcggacacatcactctggagagtgtttccaacttcctgaaggactttctgcacaaggaccgggatgacgtcaatgtggagatcgtttttcttcacaacatctcccccaacctggagcttgaagctctgttcaaacgacattttactcaggtggaattttatcagggttccgtcctcaatccacatgatcttgcaagagtcaagatagagtcagcagatgcatgcctgatccttgccaacaagtactgcgctgacccggatgcggaggatgcctcgaatatcatgagagtaatctccataaagaactaccatccgaagataagaatcatcactcaaatgctgcagtatcacaacaaggcccatctgctaaacatcccgagctggaattggaaagaaggtgatgacgcaatctgcctcgcagagttgaagttgggcttcatagcccagagctgcctggctcaaggcctctccaccatgcttgccaacctcttctccatgaggtcattcataaagattgaggaagacacatggcagaaatactacttggaaggagtctcaaatgaaatgtacacagaatatctctccagtgccttcgtgggtctgtccttccctactgtttgtgagctgtgttttgtgaagctcaagctcctaatgatagccattgagtacaagtctgccaaccgagagagccgtatattaattaatcctggaaaccatcttaagatccaagaaggtactttaggatttttcatcgcaagtgatgccaaagaagttaaaagggcatttttttactgcaaggcctgtcatgatgacatcacagatcccaaaagaataaaaaaatgtggctgcaaacggctcaaggttgcagctagatcacgctattccaaagatccatttgagttcaagaaggagactcccaattctcggcttgtgaccgagccagttgaagatgagcagccgtcaacactatcaccaaaaaaaaagcaacggaatggaggcatgcggaactcacccaacacctcgcctaagctgatgaggcatgaccccttgttaattcctggcaatgatcagattgacaacatggactccaatgtgaagaagtacgactctactgggatgtttcactggtgtgcacccaaggagatagagaaagtcatcctgactcgaagtgaagctgccatgaccgtcctgagtggccatgtcgtggtctgcatctttggcgacgtcagctcagccctgatcggcctccggaacctggtgatgccgctccgtgccagcaactttcattaccatgagctcaagcacattgtgtttgtgggctctattgagtacctcaagcgggaatgggagacgcttcataacttccccaaagtgtccatattgcctggtacgccattaagtcgggctgatttaagggctgtcaacatcaacctctgtgacatgtgcgttatcctgtcagccaatcagaataatattgatgatacttcgctgcaggacaaggaatgcatcttggcgtcactcaacatcaaatctatgcagtttgatgacagcatcggagtcttgcaggctaattcccaagggttcacacctccaggaatggatagatcctctccagataacagcccagtgcacgggatgttacgtcaaccatccatcacaactggggtcaacatccccatcatcactgaactagtgaacgatactaatgttcagtttttggaccaagacgatgatgatgaccctgatacagaactgtacctcacgcagccctttgcctgtgggacagcatttgccgtcagtgtcctggactcactcatgagcgcgacgtacttcaatgacaatatcctcaccctgatacggaccctggtgaccggaggagccacgccggagctggaggctctgattgctgaggaaaacgcccttagaggtggctacagcaccccgcagacactggccaatagggaccgctgccgcgtggcccagttagctctgctcgatgggccatttgcggacttaggggatggtggttgttatggtgatctgttctgcaaagctctgaaaacatataatatgctttgttttggaatttaccggctgagagatgctcacctcagcacccccagtcagtgcacaaagaggtatgtcatcaccaacccgccctatgagtttgagctcgtgccgacggacctgatcttctgcttaatgcagtttgaccacaatgccggccagtcccgggccagcctgtcccattcctcccactcgtcgcagtcctccagcaagaagagctcctctgttcactccatcccatccacagcaaaccgacagaaccggcccaagtccagggagtcccgggacaaacagaagtacgtgcaggaagagcggctttgatatgtcttccttcacttcccccattgccaccccccaatcccagtccccccatcggtctgttcacatctctgtgttcatcttggcaagacctactcaatcaagtgatgatgccagttgataaacttccctggaaaacatttacagctattccatttggcaaacttgcttctctgtcaatatttcatcctcctttaaaccaggagggttattaatggcaaaagcattggtcttctttatgcttgatcagtatgactcaaattaaaagtgttctgctgtgtatatcaactcagtagcccacacccagttatctgggagctgatggttcagtcactgtattacccaaatctttcctgccagctgcctttcagacatttgttaaatcccaaccagagaccgggcagatagagagaagtaaatccgaagtgcgtttt

SEQ ID NO: 10617 - DNA, 6194 bp, Homo sapiens
  source 1..6194: mol_type = unassigned DNA
gggagggggagctgcccgcgcactccatccccctcccccccgggcgggcggcggcggctcgctgtatatatctcggcgcaccccgccaggtcgcgcacagcgccccgagcccaggcgcctccccgcccccctcccgcgctccgcggcggcggcggcggcggcagcagtagcagcaatatggctgttgatgggtgtttggggtggcgctggcggcgggaggagctcccccgagcccctgcgccggctgcccgttgctagctatggcaaatggtggcggcggcggcggcggcagcagcggcggcggcggcggcggcggaggcagcagtcttagaatgagtagcaatatccacgcgaaccatctcagcctagacgcgtcctcctcctcctcctcctcctcttcctcttcttcttcttcctcctcctcttcctcctcgtcctcggtccacgagcccaagatggatgcgctcatcatcccggtgaccatggaggtgccgtgcgacagccggggccaacgcatgtggtgggctttcctggcctcctccatggtgactttcttcgggggcctcttcatcatcttgctctggcggacgctcaagtacctgtggaccgtgtgctgccactgcgggggcaagacgaaggaggcccagaagattaacaatggctcaagccaggcggatggcactctcaaaccagtggatgaaaaagaggaggcagtggccgccgaggtcggctggatgacctccgtgaaggactgggcgggggtgatgatatccgcccagacactgactggcagagtcctggttgtcttagtctttgctctcagcatcggtgcacttgtaatatacttcatagattcatcaaacccaatagaatcctgccagaatttctacaaagatttcacattacagatcgacatggctttcaacgtgttcttccttctctacttcggcttgcggtttattgcagccaacgataaattgtggttctggctggaagtgaactctgtagtggatttcttcacggtgccccccgtgtttgtgtctgtgtacttaaacagaagttggcttggtttgagatttttaagagctctgagactgatacagttttcagaaattttgcagtttctgaatattcttaaaacaagtaattccatcaagctggtgaatctgctctccatatttatcagcacgtggctgactgcagccgggttcatccatttggtggagaattcaggggacccatgggaaaatttccaaaacaaccaggctctcacctactgggaatgtgtctatttactcatggtcacaatgtccaccgttggttatggggatgtttatgcaaaaaccacacttgggcgcctcttcatggtcttcttcatcctcgggggactggccatgtttgccagctacgtccctgaaatcatagagttaataggaaaccgcaagaaatacgggggctcctatagtgcggttagtggaagaaagcacattgtggtctgcggacacatcactctggagagtgtttccaacttcctgaaggactttctgcacaaggaccgggatgacgtcaatgtggagatcgtttttcttcacaacatctcccccaacctggagcttgaagctctgttcaaacgacattttactcaggtggaattttatcagggttccgtcctcaatccacatgatcttgcaagagtcaagatagagtcagcagatgcatgcctgatccttgccaacaagtactgcgctgacccggatgcggaggatgcctcgaatatcatgagagtaatctccataaagaactaccatccgaagataagaatcatcactcaaatgctgcagtatcacaacaaggcccatctgctaaacatcccgagctggaattggaaagaaggtgatgacgcaatctgcctcgcagagttgaagttgggcttcatagcccagagctgcctggctcaaggcctctccaccatgcttgccaacctcttctccatgaggtcattcataaagattgaggaagacacatggcagaaatactacttggaaggagtctcaaatgaaatgtacacagaatatctctccagtgccttcgtgggtctgtccttccctactgtttgtgagctgtgttttgtgaagctcaagctcctaatgatagccattgagtacaagtctgccaaccgagagagccgtatattaattaatcctggaaaccatcttaagatccaagaaggtactttaggatttttcatcgcaagtgatgccaaagaagttaaaagggcatttttttactgcaaggcctgtcatgatgacatcacagatcccaaaagaataaaaaaatgtggctgcaaacggcttgaagatgagcagccgtcaacactatcaccaaaaaaaaagcaacggaatggaggcatgcggaactcacccaacacctcgcctaagctgatgaggcatgaccccttgttaattcctggcaatgatcagattgacaacatggactccaatgtgaagaagtacgactctactgggatgtttcactggtgtgcacccaaggagatagagaaagtcatcctgactcgaagtgaagctgccatgaccgtcctgagtggccatgtcgtggtctgcatctttggcgacgtcagctcagccctgatcggcctccggaacctggtgatgccgctccgtgccagcaactttcattaccatgagctcaagcacattgtgtttgtgggctctattgagtacctcaagcgggaatgggagacgcttcataacttccccaaagtgtccatattgcctggtacgccattaagtcgggctgatttaagggctgtcaacatcaacctctgtgacatgtgcgttatcctgtcagccaatcagaataatattgatgatacttcgctgcaggacaaggaatgcatcttggcgtcactcaacatcaaatctatgcagtttgatgacagcatcggagtcttgcaggctaattcccaagggttcacacctccaggaatggatagatcctctccagataacagcccagtgcacgggatgttacgtcaaccatccatcacaactggggtcaacatccccatcatcactgaactagtgaacgatactaatgttcagtttttggaccaagacgatgatgatgaccctgatacagaactgtacctcacgcagccctttgcctgtgggacagcatttgccgtcagtgtcctggactcactcatgagcgcgacgtacttcaatgacaatatcctcaccctgatacggaccctggtgaccggaggagccacgccggagctggaggctctgattgctgaggaaaacgcccttagaggtggctacagcaccccgcagacactggccaatagggaccgctgccgcgtggcccagttagctctgctcgatgggccatttgcggacttaggggatggtggttgttatggtgatctgttctgcaaagctctgaaaacatataatatgctttgttttggaatttaccggctgagagatgctcacctcagcacccccagtcagtgcacaaagaggtatgtcatcaccaacccgccctatgagtttgagctcgtgccgacggacctgatcttctgcttaatgcagtttgaccacaatgccggccagtcccgggccagcctgtcccattcctcccactcgtcgcagtcctccagcaagaagagctcctctgttcactccatcccatccacagcaaaccgacagaaccggcccaagtccagggagtcccgggacaaacagaagtacgtgcaggaagagcggctttgatatgtgtatccaccgccactgtgtgaaactgtatctgccactcatttccccagttggtgtttccaacaaagtaactttccctgttttcccctgtagtccccccctttttttttacacatatttgcatatgtatgatagtgtgcatgtggttgtcatttttatttcaccaccataaaacccttgagcacaacagcaaataagcagacggaccaaaagttatttatgattctgggggaaaaataacccaaaggcatgctccagacataaatagctcactgcaggaacgagttcacagattagaagggagcacttgtgatcaacgtcagttaggcagagcaagtttatttaatgtaaaagaaaagttgattctgatttatcaggattatcagggtgctttgggttttgattttgttgttgttgttgttttcctttctttctttttttatacacacaataagttagcacatgtttatttgaaacaagcaaccaaacagcaatgaaaacatattgattgtttccagtctctgggccgaagtattgcgaagcatttgaaaagctttcacgatttgtgtagatgattatgaaggacctgcttgttgcaagagaacatcagtgatttttttagttactcaccaaggccttttgtcccagagccagttccctctgggagttcttatgaacatttctcaccttaatatggaggagagaatagtattccaatcatggatgtatcaaattctagtcatttagtttaagtgaaaagaggtttgattgcatattaaattgttattctgtctccttatgttgccatatgaatagctattttttttctttcacttttgacatttgggatgaaaagccatatgtatcataaatatcagatgtaagtcattaaaaactgccttcctgggacttttacatcttttaaaaggtgaattacttaccttatgtacagaataaataatgctcaggaaagagcaagtatttttccatgcattctcaggggatctttttactcccctttgtttgattagttagggccccaatgccaggtaggaggaagggctggggcaatggtagagtgagaggaagacaaacccagctgcagatcatgcttttctaggagccgacatgctaaataaattagaatgtaggaggatcagccacagttgactcaacaaagacaaaagccagccaccaccttcaactgttggcacagctgtgcggtgctggctgtcccaatgcagaaagctggtgggaaggaattcctcatcatcactttctttaatgtagccaatttaggcagggtaatgacggcaatagagagctgctccttgtcattatgagacgtgggataagaagagtgcaacagtgagccaaacacattttggtatagttatttttttcttcttttgttttctttcttttttaacacttagtaagcatgagaggagaggtagaaaaatacccttttttcaacatatagttgtcagatgctttgtgcatgcaaatcatgctttaggcagtgcggtatttcttaaaaactggccaattcaccataaccaatttcccttatggatggactaggctggtatatacatatttgaaaagttttacttcaaagaattccatcgaatagaataggggtaaaagggaggaggaaaacatgtcacagctgtaccatctctaaaaaggtgtttttatggtgaatgttttggatttagattttggatcccccgtcccctcaagcatgatagttttggatatttgcttgctgtgtgaattgacaagcacttttactgacaaatggtgaggctcagtcagaacctccaccctcccccacaccaaagacaggggcagcgtagtattcaaaccagtattgtggtggggaataattgtatacatgtaaattatcaagccctatgagtggaagaattttttcaaattatttttgtccctctatatattgatttatattatgtataactatctctttatataaactatatataattatatatatataactatataattatatatatataactatatatataactatatatatgtatcccctagtattggatcatgaagagctcttcatgcattctttgcaaaggaggttataaagttacgccctcagaacatttataactataagaatgtgccagttaaagtgctcaacaggaaatatgacagtttaaaagcattgtaaaactcacatagcttacttctctctctaaagtgcaacaaggatgaatagaatgggccaaggtatgacaattaatggttctgcatgacctagccactgctgggggttttcttctataacgttgtccttgtgaaaacttttgtgaaattaaaaaaaaaggagttacaaattttattctgtta

SEQ ID NO: 10618 - DNA, 6233 bp, Homo sapiens
  source 1..6233: mol_type = unassigned DNA
cccctcccgcgctccgcggcggcggcggcggcggcagcagtagcagcaatatggctgttgatgggtgtttggggtggcgctggcggcgggaggagctcccccgagcccctgcgccggctgcccgttgctagctatggcaaatggtggcggcggcggcggcggcagcagcggcggcggcggcggcggcggaggcagcagtcttagaatgagtagcaatatccacgcgaaccatctcagcctagacgcgtcctcctcctcctcctcctcctcttcctcttcttcttcttcctcctcctcttcctcctcgtcctcggtccacgagcccaagatggatgcgctcatcatcccggtgaccatggaggtgccgtgcgacagccggggccaacgcatgtggtgggctttcctggcctcctccatggtgactttcttcgggggcctcttcatcatcttgctctggcggacgctcaagtacctgtggaccgtgtgctgccactgcgggggcaagacgaaggaggcccagaagattaacaatggctcaagccaggcggatggcactctcaaaccagtggatgaaaaagaggaggcagtggccgccgaggtcggctggatgacctccgtgaaggactgggcgggggtgatgatatccgcccagacactgactggcagagtcctggttgtcttagtctttgctctcagcatcggtgcacttgtaatatacttcatagattcatcaaacccaatagaatcctgccagaatttctacaaagatttcacattacagatcgacatggctttcaacgtgttcttccttctctacttcggcttgcggtttattgcagccaacgataaattgtggttctggctggaagtgaactctgtagtggatttcttcacggtgccccccgtgtttgtgtctgtgtacttaaacagaagttggcttggtttgagatttttaagagctctgagactgatacagttttcagaaattttgcagtttctgaatattcttaaaacaagtaattccatcaagctggtgaatctgctctccatatttatcagcacgtggctgactgcagccgggttcatccatttggtggagaattcaggggacccatgggaaaatttccaaaacaaccaggctctcacctactgggaatgtgtctatttactcatggtcacaatgtccaccgttggttatggggatgtttatgcaaaaaccacacttgggcgcctcttcatggtcttcttcatcctcgggggactggccatgtttgccagctacgtccctgaaatcatagagttaataggaaaccgcaagaaatacgggggctcctatagtgcggttagtggaagaaagcacattgtggtctgcggacacatcactctggagagtgtttccaacttcctgaaggactttctgcacaaggaccgggatgacgtcaatgtggagatcgtttttcttcacaacatctcccccaacctggagcttgaagctctgttcaaacgacattttactcaggtggaattttatcagggttccgtcctcaatccacatgatcttgcaagagtcaagatagagtcagcagatgcatgcctgatccttgccaacaagtactgcgctgacccggatgcggaggatgcctcgaatatcatgagagtaatctccataaagaactaccatccgaagataagaatcatcactcaaatgctgcagtatcacaacaaggcccatctgctaaacatcccgagctggaattggaaagaaggtgatgacgcaatctgcctcgcagagttgaagttgggcttcatagcccagagctgcctggctcaaggcctctccaccatgcttgccaacctcttctccatgaggtcattcataaagattgaggaagacacatggcagaaatactacttggaaggagtctcaaatgaaatgtacacagaatatctctccagtgccttcgtgggtctgtccttccctactgtttgtgagctgtgttttgtgaagctcaagctcctaatgatagccattgagtacaagtctgccaaccgagagagccgtatattaattaatcctggaaaccatcttaagatccaagaaggtactttaggatttttcatcgcaagtgatgccaaagaagttaaaagggcatttttttactgcaaggcctgtcatgatgacatcacagatcccaaaagaataaaaaaatgtggctgcaaacggcccaagatgtccatctacaagagaatgagacgggcatgttgttttgattgcggacgttctgagcgtgactgctcatgcatgtcaggccgtgtgcgtggtaacgtggacacccttgagagagccttcccactttcttctgtctctgttaatgattgctccaccagtttccgtgcctttgaagatgagcagccgtcaacactatcaccaaaaaaaaagcaacggaatggaggcatgcggaactcacccaacacctcgcctaagctgatgaggcatgaccccttgttaattcctggcaatgatcagattgacaacatggactccaatgtgaagaagtacgactctactgggatgtttcactggtgtgcacccaaggagatagagaaagtcatcctgactcgaagtgaagctgccatgaccgtcctgagtggccatgtcgtggtctgcatctttggcgacgtcagctcagccctgatcggcctccggaacctggtgatgccgctccgtgccagcaactttcattaccatgagctcaagcacattgtgtttgtgggctctattgagtacctcaagcgggaatgggagacgcttcataacttccccaaagtgtccatattgcctggtacgccattaagtcgggctgatttaagggctgtcaacatcaacctctgtgacatgtgcgttatcctgtcagccaatcagaataatattgatgatacttcgctgcaggacaaggaatgcatcttggcgtcactcaacatcaaatctatgcagtttgatgacagcatcggagtcttgcaggctaattcccaagggttcacacctccaggaatggatagatcctctccagataacagcccagtgcacgggatgttacgtcaaccatccatcacaactggggtcaacatccccatcatcactgaactagtgaacgatactaatgttcagtttttggaccaagacgatgatgatgaccctgatacagaactgtacctcacgcagccctttgcctgtgggacagcatttgccgtcagtgtcctggactcactcatgagcgcgacgtacttcaatgacaatatcctcaccctgatacggaccctggtgaccggaggagccacgccggagctggaggctctgattgctgaggaaaacgcccttagaggtggctacagcaccccgcagacactggccaatagggaccgctgccgcgtggcccagttagctctgctcgatgggccatttgcggacttaggggatggtggttgttatggtgatctgttctgcaaagctctgaaaacatataatatgctttgttttggaatttaccggctgagagatgctcacctcagcacccccagtcagtgcacaaagaggtatgtcatcaccaacccgccctatgagtttgagctcgtgccgacggacctgatcttctgcttaatgcagtttgaccacaatgccggccagtcccgggccagcctgtcccattcctcccactcgtcgcagtcctccagcaagaagagctcctctgttcactccatcccatccacagcaaaccgacagaaccggcccaagtccagggagtcccgggacaaacagaagtacgtgcaggaagagcggctttgatatgtgtatccaccgccactgtgtgaaactgtatctgccactcatttccccagttggtgtttccaacaaagtaactttccctgttttcccctgtagtccccccctttttttttacacatatttgcatatgtatgatagtgtgcatgtggttgtcatttttatttcaccaccataaaacccttgagcacaacagcaaataagcagacggaccaaaagttatttatgattctgggggaaaaataacccaaaggcatgctccagacataaatagctcactgcaggaacgagttcacagattagaagggagcacttgtgatcaacgtcagttaggcagagcaagtttatttaatgtaaaagaaaagttgattctgatttatcaggattatcagggtgctttgggttttgattttgttgttgttgttgttttcctttctttctttttttatacacacaataagttagcacatgtttatttgaaacaagcaaccaaacagcaatgaaaacatattgattgtttccagtctctgggccgaagtattgcgaagcatttgaaaagctttcacgatttgtgtagatgattatgaaggacctgcttgttgcaagagaacatcagtgatttttttagttactcaccaaggccttttgtcccagagccagttccctctgggagttcttatgaacatttctcaccttaatatggaggagagaatagtattccaatcatggatgtatcaaattctagtcatttagtttaagtgaaaagaggtttgattgcatattaaattgttattctgtctccttatgttgccatatgaatagctattttttttctttcacttttgacatttgggatgaaaagccatatgtatcataaatatcagatgtaagtcattaaaaactgccttcctgggacttttacatcttttaaaaggtgaattacttaccttatgtacagaataaataatgctcaggaaagagcaagtatttttccatgcattctcaggggatctttttactcccctttgtttgattagttagggccccaatgccaggtaggaggaagggctggggcaatggtagagtgagaggaagacaaacccagctgcagatcatgcttttctaggagccgacatgctaaataaattagaatgtaggaggatcagccacagttgactcaacaaagacaaaagccagccaccaccttcaactgttggcacagctgtgcggtgctggctgtcccaatgcagaaagctggtgggaaggaattcctcatcatcactttctttaatgtagccaatttaggcagggtaatgacggcaatagagagctgctccttgtcattatgagacgtgggataagaagagtgcaacagtgagccaaacacattttggtatagttatttttttcttcttttgttttctttcttttttaacacttagtaagcatgagaggagaggtagaaaaatacccttttttcaacatatagttgtcagatgctttgtgcatgcaaatcatgctttaggcagtgcggtatttcttaaaaactggccaattcaccataaccaatttcccttatggatggactaggctggtatatacatatttgaaaagttttacttcaaagaattccatcgaatagaataggggtaaaagggaggaggaaaacatgtcacagctgtaccatctctaaaaaggtgtttttatggtgaatgttttggatttagattttggatcccccgtcccctcaagcatgatagttttggatatttgcttgctgtgtgaattgacaagcacttttactgacaaatggtgaggctcagtcagaacctccaccctcccccacaccaaagacaggggcagcgtagtattcaaaccagtattgtggtggggaataattgtatacatgtaaattatcaagccctatgagtggaagaattttttcaaattatttttgtccctctatatattgatttatattatgtataactatctctttatataaactatatataattatatatatataactatataattatatatatataactatatatataactatatatatgtatcccctagtattggatcatgaagagctcttcatgcattctttgcaaaggaggttataaagttacgccctcagaacatttataactataagaatgtgccagttaaagtgctcaacaggaaatatgacagtttaaaagcattgtaaaactcacatagcttacttctctctctaaagtgcaacaaggatgaatagaatgggccaaggtatgacaattaatggttctgcatgacctagccactgctgggggttttcttctataacgttgtccttgtgaaaacttttgtgaaattaaaaaaaaaggagttacaaatttta

SEQ ID NO: 10619 - DNA, 3408 bp, Homo sapiens
  source 1..3408: mol_type = unassigned DNA
gaggcccagaagattaacaatggctcaagccaggcggatggcactctcaaaccagtggatgaaaaagaggaggcagtggccgccgaggtcggctggatgacctccgtgaaggactgggcgggggtgatgatatccgcccagacactgactggcagagtcctggttgtcttagtctttgctctcagcatcggtgcacttgtaatatacttcatagattcatcaaacccaatagaatcctgccagaatttctacaaagatttcacattacagatcgacatggctttcaacgtgttcttccttctctacttcggcttgcggtttattgcagccaacgataaattgtggttctggctggaagtgaactctgtagtggatttcttcacggtgccccccgtgtttgtgtctgtgtacttaaacagaagttggcttggtttgagatttttaagagctctgagactgatacagttttcagaaattttgcagtttctgaatattcttaaaacaagtaattccatcaagctggtgaatctgctctccatatttatcagcacgtggctgactgcagccgggttcatccatttggtggagaattcaggggacccatgggaaaatttccaaaacaaccaggctctcacctactgggaatgtgtctatttactcatggtcacaatgtccaccgttggttatggggatgtttatgcaaaaaccacacttgggcgcctcttcatggtcttcttcatcctcgggggactggccatgtttgccagctacgtccctgaaatcatagagttaataggaaaccgcaagaaatacgggggctcctatagtgcggttagtggaagaaagcacattgtggtctgcggacacatcactctggagagtgtttccaacttcctgaaggactttctgcacaaggaccgggatgacgtcaatgtggagatcgtttttcttcacaacatctcccccaacctggagcttgaagctctgttcaaacgacattttactcaggtggaattttatcagggttccgtcctcaatccacatgatcttgcaagagtcaagatagagtcagcagatgcatgcctgatccttgccaacaagtactgcgctgacccggatgcggaggatgcctcgaatatcatgagagtaatctccataaagaactaccatccgaagataagaatcatcactcaaatgctgcagtatcacaacaaggcccatctgctaaacatcccgagctggaattggaaagaaggtgatgacgcaatctgcctcgcagagttgaagttgggcttcatagcccagagctgcctggctcaaggcctctccaccatgcttgccaacctcttctccatgaggtcattcataaagattgaggaagacacatggcagaaatactacttggaaggagtctcaaatgaaatgtacacagaatatctctccagtgccttcgtgggtctgtccttccctactgtttgtgagctgtgttttgtgaagctcaagctcctaatgatagccattgagtacaagtctgccaaccgagagagccgaagccgaaagcgtatattaattaatcctggaaaccatcttaagatccaagaaggtactttaggatttttcatcgcaagtgatgccaaagaagttaaaagggcatttttttactgcaaggcctgtcatgatgacatcacagatcccaaaagaataaaaaaatgtggctgcaaacggctcaaggttgcagctagatcacgctattccaaagatccatttgagttcaagaaggagactcccaattctcggcttgtgaccgagccagttgaagatgagcagccgtcaacactatcaccaaaaaaaaagcaacggaatggaggcatgcggaactcacccaacacctcgcctaagctgatgaggcatgaccccttgttaattcctggcaatgatcagattgacaacatggactccaatgtgaagaagtacgactctactgggatgtttcactggtgtgcacccaaggagatagagaaagtcatcctgactcgaagtgaagctgccatgaccgtcctgagtggccatgtcgtggtctgcatctttggcgacgtcagctcagccctgatcggcctccggaacctggtgatgccgctccgtgccagcaactttcattaccatgagctcaagcacattgtgtttgtgggctctattgagtacctcaagcgggaatgggagacgcttcataacttccccaaagtgtccatattgcctggtacgccattaagtcgggctgatttaagggctgtcaacatcaacctctgtgacatgtgcgttatcctgtcagccaatcagaataatattgatgatacttcgctgcaggacaaggaatgcatcttggcgtcactcaacatcaaatctatgcagtttgatgacagcatcggagtcttgcaggctaattcccaagggttcacacctccaggaatggatagatcctctccagataacagcccagtgcacgggatgttacgtcaaccatccatcacaactggggtcaacatccccatcatcactgaactagctaaaccgggcaagttgcctttggtatcagtcaatcaggaaaaaaacagtgggacgcacattctaatgataactgaactggtgaacgatactaatgttcagtttttggaccaagacgatgatgatgaccctgatacagaactgtacctcacgcagccctttgcctgtgggacagcatttgccgtcagtgtcctggactcactcatgagcgcgacgtacttcaatgacaatatcctcaccctgatacggaccctggtgaccggaggagccacgccggagctggaggctctgattgctgaggaaaacgcccttagaggtggctacagcaccccgcagacactggccaatagggaccgctgccgcgtggcccagttagctctgctcgatgggccatttgcggacttaggggatggtggttgttatggtgatctgttctgcaaagctctgaaaacatataatatgctttgttttggaatttaccggctgagagatgctcacctcagcacccccagtcagtgcacaaagaggtatgtcatcaccaacccgccctatgagtttgagctcgtgccgacggacctgatcttctgcttaatgcagtttgaccacaatgccggccagtcccgggccagcctgtcccattcctcccactcgtcgcagtcctccagcaagaagagctcctctgttcactccatcccatccacagcaaaccgacagaaccggcccaagtccagggagtcccgggacaaacagaatgcaacaaggatgaatagaatgggccaaggtatgacaattaatggttctgcatgacctagccactgctgggggttttcttctataacgttgtcc

SEQ ID NO: 10620 - DNA, 2962 bp, Homo sapiens
  source 1..2962: mol_type = unassigned DNA
tacagatcgacatggctttcaacgtgttcttccttctctacttcggcttgcggtttattgcagccaacgataaattgtggttctggctggaagtgaactctgtagtggatttcttcacggtgccccccgtgtttgtgtctgtgtacttaaacagaagttggcttggtttgagatttttaagagctctgagactgatacagttttcagaaattttgcagtttctgaatattcttaaaacaagtaattccatcaagctggtgaatctgctctccatatttatcagcacgtggctgactgcagccgggttcatccatttggtggagaattcaggggacccatgggaaaatttccaaaacaaccaggctctcacctactgggaatgtgtctatttactcatggtcacaatgtccaccgttggttatggggatgtttatgcaaaaaccacacttgggcgcctcttcatggtcttcttcatcctcgggggactggccatgtttgccagctacgtccctgaaatcatagagttaataggaaaccgcaagaaatacgggggctcctatagtgcggttagtggaagaaagcacattgtggtctgcggacacatcactctggagagtgtttccaacttcctgaaggactttctgcacaaggaccgggatgacgtcaatgtggagatcgtttttcttcacaacatctcccccaacctggagcttgaagctctgttcaaacgacattttactcaggtggaattttatcagggttccgtcctcaatccacatgatcttgcaagagtcaagatagagtcagcagatgcatgcctgatccttgccaacaagtactgcgctgacccggatgcggaggatgcctcgaatatcatgagagtaatctccataaagaactaccatccgaagataagaatcatcactcaaatgctgcagtatcacaacaaggcccatctgctaaacatcccgagctggaattggaaagaaggtgatgacgcaatctgcctcgcagagttgaagttgggcttcatagcccagagctgcctggctcaaggcctctccaccatgcttgccaacctcttctccatgaggtcattcataaagattgaggaagacacatggcagaaatactacttggaaggagtctcaaatgaaatgtacacagaatatctctccagtgccttcgtgggtctgtccttccctactgtttgtgagctgtgttttgtgaagctcaagctcctaatgatagccattgagtacaagtctgccaaccgagagagccgtatattaattaatcctggaaaccatcttaagatccaagaaggtactttaggatttttcatcgcaagtgatgccaaagaagttaaaagggcatttttttactgcaaggcctgtcatgatgacatcacagatcccaaaagaataaaaaaatgtggctgcaaacggctgatatattttgaagatgagcagccgtcaacactatcaccaaaaaaaaagcaacggaatggaggcatgcggaactcacccaacacctcgcctaagctgatgaggcatgaccccttgttaattcctggcaatgatcagattgacaacatggactccaatgtgaagaagtacgactctactgggatgtttcactggtgtgcacccaaggagatagagaaagtcatcctgactcgaagtgaagctgccatgaccgtcctgagtggccatgtcgtggtctgcatctttggcgacgtcagctcagccctgatcggcctccggaacctggtgatgccgctccgtgccagcaactttcattaccatgagctcaagcacattgtgtttgtgggctctattgagtacctcaagcgggaatgggagacgcttcataacttccccaaagtgtccatattgcctggtacgccattaagtcgggctgatttaagggctgtcaacatcaacctctgtgacatgtgcgttatcctgtcagccaatcagaataatattgatgatacttcgctgcaggacaaggaatgcatcttggcgtcactcaacatcaaatctatgcagtttgatgacagcatcggagtcttgcaggctaattcccaagggttcacacctccaggaatggatagatcctctccagataacagcccagtgcacgggatgttacgtcaaccatccatcacaactggggtcaacatccccatcatcactgaactagtgaacgatactaatgttcagtttttggaccaagacgatgatgatgaccctgatacagaactgtacctcacgcagccctttgcctgtgggacagcatttgccgtcagtgtcctggactcactcatgagcgcgacgtacttcaatgacaatatcctcaccctgatacggaccctggtgaccggaggagccacgccggagctggaggctctgattgctgaggaaaacgcccttagaggtggctacagcaccccgcagacactggccaatagggaccgctgccgcgtggcccagttagctctgctcgatgggccatttgcggacttaggggatggtggttgttatggtgatctgttctgcaaagctctgaaaacatataatatgctttgttttggaatttaccggctgagagatgctcacctcagcacccccagtcagtgcacaaagaggtatgtcatcaccaacccgccctatgagtttgagctcgtgccgacggacctgatcttctgcttaatgcagtttgaccacaatgccggccagtcccgggccagcctgtcccattcctcccactcgtcgcagtcctccagcaagaagagctcctctgttcactccatcccatccacagcaaaccgacagaaccggcccaagtccagggagtcccgggacaaacagaatgcaacaaggatgaatagaatgggccaaggtatgacaattaatggttctgcatgacctagccactgctgggggttttcttctat

SEQ ID NO: 10621 - DNA, 3624 bp, Homo sapiens
  source 1..3624: mol_type = unassigned DNA
gagtagcaatatccacgcgaaccatctcagcctagacgcgtcctcctcctcctcctcctcctcttcctcttcttcttcttcctcctcctcttcctcctcgtcctcggtccacgagcccaagatggatgcgctcatcatcccggtgaccatggaggtgccgtgcgacagccggggccaacgcatgtggtgggctttcctggcctcctccatggtgactttcttcgggggcctcttcatcatcttgctctggcggacgctcaagtacctgtggaccgtgtgctgccactgcgggggcaagacgaaggaggcccagaagattaacaatggctcaagccaggcggatggcactctcaaaccagtggatgaaaaagaggaggcagtggccgccgaggtcggctggatgacctccgtgaaggactgggcgggggtgatgatatccgcccagacactgactggcagagtcctggttgtcttagtctttgctctcagcatcggtgcacttgtaatatacttcatagattcatcaaacccaatagaatcctgccagaatttctacaaagatttcacattacagatcgacatggctttcaacgtgttcttccttctctacttcggcttgcggtttattgcagccaacgataaattgtggttctggctggaagtgaactctgtagtggatttcttcacggtgccccccgtgtttgtgtctgtgtacttaaacagaagttggcttggtttgagatttttaagagctctgagactgatacagttttcagaaattttgcagtttctgaatattcttaaaacaagtaattccatcaagctggtgaatctgctctccatatttatcagcacgtggctgactgcagccgggttcatccatttggtggagaattcaggggacccatgggaaaatttccaaaacaaccaggctctcacctactgggaatgtgtctatttactcatggtcacaatgtccaccgttggttatggggatgtttatgcaaaaaccacacttgggcgcctcttcatggtcttcttcatcctcgggggactggccatgtttgccagctacgtccctgaaatcatagagttaataggaaaccgcaagaaatacgggggctcctatagtgcggttagtggaagaaagcacattgtggtctgcggacacatcactctggagagtgtttccaacttcctgaaggactttctgcacaaggaccgggatgacgtcaatgtggagatcgtttttcttcacaacatctcccccaacctggagcttgaagctctgttcaaacgacattttactcaggtggaattttatcagggttccgtcctcaatccacatgatcttgcaagagtcaagatagagtcagcagatgcatgcctgatccttgccaacaagtactgcgctgacccggatgcggaggatgcctcgaatatcatgagagtaatctccataaagaactaccatccgaagataagaatcatcactcaaatgctgcagtatcacaacaaggcccatctgctaaacatcccgagctggaattggaaagaaggtgatgacgcaatctgcctcgcagagttgaagttgggcttcatagcccagagctgcctggctcaaggcctctccaccatgcttgccaacctcttctccatgaggtcattcataaagattgaggaagacacatggcagaaatactacttggaaggagtctcaaatgaaatgtacacagaatatctctccagtgccttcgtgggtctgtccttccctactgtttgtgagctgtgttttgtgaagctcaagctcctaatgatagccattgagtacaagtctgccaaccgagagagccgaagccgaaagcgtatattaattaatcctggaaaccatcttaagatccaagaaggtactttaggatttttcatcgcaagtgatgccaaagaagttaaaagggcatttttttactgcaaggcctgtcatgatgacatcacagatcccaaaagaataaaaaaatgtggctgcaaacggctgatatattttgaagatgagcagccgtcaacactatcaccaaaaaaaaagcaacggaatggaggcatgcggaactcacccaacacctcgcctaagctgatgaggcatgaccccttgttaattcctggcaatgatcagattgacaacatggactccaatgtgaagaagtacgactctactgggatgtttcactggtgtgcacccaaggagatagagaaagtcatcctgactcgaagtgaagctgccatgaccgtcctgagtggccatgtcgtggtctgcatctttggcgacgtcagctcagccctgatcggcctccggaacctggtgatgccgctccgtgccagcaactttcattaccatgagctcaagcacattgtgtttgtgggctctattgagtacctcaagcgggaatgggagacgcttcataacttccccaaagtgtccatattgcctggtacgccattaagtcgggctgatttaagggctgtcaacatcaacctctgtgacatgtgcgttatcctgtcagccaatcagaataatattgatgatacttcgctgcaggacaaggaatgcatcttggcgtcactcaacatcaaatctatgcagtttgatgacagcatcggagtcttgcaggctaattcccaagggttcacacctccaggaatggatagatcctctccagataacagcccagtgcacgggatgttacgtcaaccatccatcacaactggggtcaacatccccatcatcactgaactagctaaaccgggcaagttgcctttggtatcagtcaatcaggaaaaaaacagtgggacgcacattctaatgataactgaactggtgaacgatactaatgttcagtttttggaccaagacgatgatgatgaccctgatacagaactgtacctcacgcagccctttgcctgtgggacagcatttgccgtcagtgtcctggactcactcatgagcgcgacgtacttcaatgacaatatcctcaccctgatacggaccctggtgaccggaggagccacgccggagctggaggctctgattgctgaggaaaacgcccttagaggtggctacagcaccccgcagacactggccaatagggaccgctgccgcgtggcccagttagctctgctcgatgggccatttgcggacttaggggatggtggttgttatggtgatctgttctgcaaagctctgaaaacatataatatgctttgttttggaatttaccggctgagagatgctcacctcagcacccccagtcagtgcacaaagaggtatgtcatcaccaacccgccctatgagtttgagctcgtgccgacggacctgatcttctgcttaatgcagtttgaccacaatgccggccagtcccgggccagcctgtcccattcctcccactcgtcgcagtcctccagcaagaagagctcctctgttcactccatcccatccacagcaaaccgacagaaccggcccaagtccagggagtcccgggacaaacagaatgcaacaaggatgaatagaatgggccaaggtatgacaattaatggttctgcatgacctagccactgctgggggttttcttctat

SEQ ID NO: 10622 - DNA, 3790 bp, Homo sapiens
  source 1..3790: mol_type = unassigned DNA
actgtttgtgagctgtgttttgtgaagctcaagctcctaatgatagccattgagtacaagtctgccaaccgagagagccgtatattaattaatcctggaaaccatcttaagatccaagaaggtactttaggatttttcatcgcaagtgatgccaaagaagttaaaagacctcctcaactctgtctccctttggctgcccagaaaagggcatttttttactgcaaggcctgtcatgatgacatcacagatcccaaaagaataaaaaaatgtggctgcaaacggcttgaagatgagcagccgtcaacactatcaccaaaaaaaaagcaacggaatggaggcatgcggaactcacccaacacctcgcctaagctgatgaggcatgaccccttgttaattcctggcaatgatcagattgacaacatggactccaatgtgaagaagtacgactctactgggatgtttcactggtgtgcacccaaggagatagagaaagtcatcctgactcgaagtgaagctgccatgaccgtcctgagtggccatgtcgtggtctgcatctttggcgacgtcagctcagccctgatcggcctccggaacctggtgatgccgctccgtgccagcaactttcattaccatgagctcaagcacattgtgtttgtgggctctattgagtacctcaagcgggaatgggagacgcttcataacttccccaaagtgtccatattgcctggtacgccattaagtcgggctgatttaagggctgtcaacatcaacctctgtgacatgtgcgttatcctgtcagccaatcagaataatattgatgatacttcgctgcaggacaaggaatgcatcttggcgtcactcaacatcaaatctatgcagtttgatgacagcatcggagtcttgcaggctaattcccaagggttcacacctccaggaatggatagatcctctccagataacagcccagtgcacgggatgttacgtcaaccatccatcacaactggggtcaacatccccatcatcactgaactagtgaacgatactaatgttcagtttttggaccaagacgatgatgatgaccctgatacagaactgtacctcacgcagccctttgcctgtgggacagcatttgccgtcagtgtcctggactcactcatgagcgcgacgtacttcaatgacaatatcctcaccctgatacggaccctggtgaccggaggagccacgccggagctggaggctctgattgctgaggaaaacgcccttagaggtggctacagcaccccgcagacactggccaatagggaccgctgccgcgtggcccagttagctctgctcgatgggccatttgcggacttaggggatggtggttgttatggtgatctgttctgcaaagctctgaaaacatataatatgctttgttttggaatttaccggctgagagatgctcacctcagcacccccagtcagtgcacaaagaggtatgtcatcaccaacccgccctatgagtttgagctcgtgccgacggacctgatcttctgcttaatgcagtttgaccacaatgccggccagtcccgggccagcctgtcccattcctcccactcgtcgcagtcctccagcaagaagagctcctctgttcactccatcccatccacagcaaaccgacagaaccggcccaagtccagggagtcccgggacaaacagaagtacgtgcaggaagagcggctttgatatgtgtatccaccgccactgtgtgaaactgtatctgccactcatttccccagttggtgtttccaacaaagtaactttccctgttttcccctgtagtccccccctttttttttacacatatttgcatatgtatgatagtgtgcatgtggttgtcatttttatttcaccaccataaaacccttgagcacaacagcaaataagcagacggaccaaaagttatttatgattctgggggaaaaataacccaaaggcatgctccagacataaatagctcactgcaggaacgagttcacagattagaagggagcacttgtgatcaacgtcagttaggcagagcaagtttatttaatgtaaaagaaaagttgattctgatttatcaggattatcagggtgctttgggttttgattttgttgttgttgttgttttcctttctttctttttttatacacacaataagttagcacatgtttatttgaaacaagcaaccaaacagcaatgaaaacatattgattgtttccagtctctgggccgaagtattgcgaagcatttgaaaagctttcacgatttgtgtagatgattatgaaggacctgcttgttgcaagagaacatcagtgatttttttagttactcaccaaggccttttgtcccagagccagttccctctgggagttcttatgaacatttctcaccttaatatggaggagagaatagtattccaatcatggatgtatcaaattctagtcatttagtttaagtgaaaagaggtttgattgcatattaaattgttattctgtctccttatgttgccatatgaatagctattttttttctttcacttttgacatttgggatgaaaagccatatgtatcataaatatcagatgtaagtcattaaaaactgccttcctgggacttttacatcttttaaaaggtgaattacttaccttatgtacagaataaataatgctcaggaaagagcaagtatttttccatgcattctcaggggatctttttactcccctttgtttgattagttagggccccaatgccaggtaggaggaagggctggggcaatggtagagtgagaggaagacaaacccagctgcagatcatgcttttctaggagccgacatgctaaataaattagaatgtaggaggatcagccacagttgactcaacaaagacaaaagccagccaccaccttcaactgttggcacagctgtgcggtgctggctgtcccaatgcagaaagctggtgggaaggaattcctcatcatcactttctttaatgtagccaatttaggcagggtaatgacggcaatagagagctgctccttgtcattatgagacgtgggataagaagagtgcaacagtgagccaaacacattttggtatagttatttttttcttcttttgttttctttcttttttaacacttagtaagcatgagaggagaggtagaaaaatacccttttttcaacatatagttgtcagatgctttgtgcatgcaaatcatgctttaggcagtgcggtatttcttaaaaactggccaattcaccataaccaatttcccttatggatggactaggctggtatatacatatttgaaaagttttacttcaaagaattccatcgaatagaataggggtaaaagggaggaggaaaacatgtcacagctgtaccatctctaaaaaggtgtttttatggtgaatgttttggatttagattttggatcccccgtcccctcaagcatgatagttttggatatttgcttgctgtgtgaattgacaagcacttttactgacaaatggtgaggctcagtcagaacctccaccctcccccacaccaaagacaggggcagcgtagtattcaaaccagtattgtggtggggaataattgtatacatgtaaattatcaagccctatgagtggaagaattttttcaaattatttttgtccctctatatattgatttatattatgtataactatctctttatataaactatatataattatatatatataactatataattatatatatataactatatatataac

SEQ ID NO: 10623 - DNA, 5705 bp, Homo sapiens
  source 1..5705: mol_type = unassigned DNA
cccctcccgcgctccgcggcggcggcggcggcggcagcagtagcagcaatatggctgttgatgggtgtttggggtggcgctggcggcgggaggagctcccccgagcccctgcgccggctgcccgttgctagctatggcaaatggtggcggcggcggcggcggcagcagcggcggcggcggcggcggcggaggcagcagtcttagaatgagtagcaatatccacgcgaaccatctcagcctagacgcgtcctcctcctcctcctcctcctcttcctcttcttcttcttcctcctcctcttcctcctcgtcctcggtccacgagcccaagatggatgcgctcatcatcccggtgaccatggaggtgccgtgcgacagccggggccaacgcatgtggtgggctttcctggcctcctccatggtgactttcttcgggggcctcttcatcatcttgctctggcggacgctcaagtacctgtggaccgtgtgctgccactgcgggggcaagacgaaggaggcccagaagattaacaatggctcaagccaggcggatggcactctcaaaccagtggatgaaaaagaggaggcagtggccgccgaggtcggctggatgacctccgtgaaggactgggcgggggtgatgatatccgcccagacactgactggcagagtcctggttgtcttagtctttgctctcagcatcggtgcacttgtaatatacttcatagattcatcaaacccaatagaatcctgccagaatttctacaaagatttcacattacagatcgacatggctttcaacgtgttcttccttctctacttcggcttgcggtttattgcagccaacgataaattgtggttctggctggaagtgaactctgtagtggatttcttcacggtgccccccgtgtttgtgtctgtgtacttaaacagaagttggcttggtttgagatttttaagagctctgagactgatacagttttcagaaattttgcagtttctgaatattcttaaaacaagtaattccatcaagctggtgaatctgctctccatatttatcagcacgtggctgactgcagccgggttcatccatttggtggagaattcaggggacccatgggaaaatttccaaaacaaccaggctctcacctactgggaatgtgtctatttactcatggtcacaatgtccaccgttggttatggggatgtttatgcaaaaaccacacttgggcgcctcttcatggtcttcttcatcctcgggggactggccatgtttgccagctacgtccctgaaatcatagagttaataggaaaccgcaagaaatacgggggctcctatagtgcggttagtggaagaaagcacattgtggtctgcggacacatcactctggagagtgtttccaacttcctgaaggactttctgcacaaggaccgggatgacgtcaatgtggagatcgtttttcttcacaacatctcccccaacctggagcttgaagctctgttcaaacgacattttactcaggtggaattttatcagggttccgtcctcaatccacatgatcttgcaagagtcaagatagagtcagcagatgcatgcctgatccttgccaacaagtactgcgctgacccggatgcggaggatgcctcgaatatcatgagagtaatctccataaagaactaccatccgaagataagaatcatcactcaaatgctgcagtatcacaacaaggcccatctgctaaacatcccgagctggaattggaaagaaggtgatgacgcaatctgcctcgcagagttgaagttgggcttcatagcccagagctgcctggctcaaggcctctccaccatgcttgccaacctcttctccatgaggtcattcataaagattgaggaagacacatggcagaaatactacttggaaggagtctcaaatgaaatgtacacagaatatctctccagtgccttcgtgggtctgtccttccctactgtttgtgagctgtgttttgtgaagctcaagctcctaatgatagccattgagtacaagtctgccaaccgagagagccgtatattaattaatcctggaaaccatcttaagatccaagaaggtactttaggatttttcatcgcaagtgatgccaaagaagttaaaagggcatttttttactgcaaggcctgtcatgatgacatcacagatcccaaaagaataaaaaaatgtggctgcaaacggctgatatattttgaagatgagcagccgtcaacactatcaccaaaaaaaaagcaacggaatggaggcatgcggaactcacccaacacctcgcctaagctgatgaggcatgaccccttgttaattcctggcaatgatcagattgacaacatggactccaatgtgaagaagtacgactctactgggatgtttcactggtgtgcacccaaggagatagagaaagtcatcctgactcgaagtgaagctgccatgaccgtcctgagtggccatgtcgtggtctgcatctttggcgacgtcagctcagccctgatcggcctccggaacctggtgatgccgctccgtgccagcaactttcattaccatgagctcaagcacattgtgtttgtgggctctattgagtacctcaagcgggaatgggagacgcttcataacttccccaaagtgtccatattgcctggtacgccattaagtcgggctgatttaagggctgtcaacatcaacctctgtgacatgtgcgttatcctgtcagccaatcagaataatattgatgatacttcgctgcaggacaaggaatgcatcttggcgtcactcaacatcaaatctatgcagtttgatgacagcatcggagtcttgcaggctaattcccaagggttcacacctccaggaatggatagatcctctccagataacagcccagtgcacgggatgttacgtcaaccatccatcacaactggggtcaacatccccatcatcactgaactagtgaacgatactaatgttcagtttttggaccaagacgatgatgatgaccctgatacagaactgtacctcacgcagccctttgcctgtgggacagcatttgccgtcagtgtcctggactcactcatgagcgcgacgtacttcaatgacaatatcctcaccctgatacggaccctggtgaccggaggagccacgccggagctggaggctctgattgctgaggaaaacgcccttagaggtggctacagcaccccgcagacactggccaatagggaccgctgccgcgtggcccagttagctctgctcgatgggccatttgcggacttaggggatggtggttgttatggtgatctgttctgcaaagctctgaaaacatataatatgctttgttttggaatttaccggctgagagatgctcacctcagcacccccagtcagtgcacaaagaggtatgtcatcaccaacccgccctatgagtttgagctcgtgccgacggacctgatcttctgcttaatgcagtttgaccacaatgccggccagtcccgggccagcctgtcccattcctcccactcgtcgcagtcctccagcaagaagagctcctctgttcactccatcccatccacagcaaaccgacagaaccggcccaagtccagggagtcccgggacaaacagaagtacgtgcaggaagagcggctttgatatgtgtatccaccgccactgtgtgaaactgtatctgccactcatttccccagttggtgtttccaacaaagtaactttccctgttttcccctgtagtccccccctttttttttacacatatttgcatatgtatgatagtgtgcatgtggttgtcatttttatttcaccaccataaaacccttgagcacaacagcaaataagcagacggaccaaaagttatttatgattctgggggaaaaataacccaaaggcatgctccagacataaatagctcactgcaggaacgagttcacagattagaagggagcacttgtgatcaacgtcagttaggcagagcaagtttatttaatgtaaaagaaaagttgattctgatttatcaggattatcagggtgctttgggttttgattttgttgttgttgttgttttcctttctttctttttttatacacacaataagttagcacatgtttatttgaaacaagcaaccaaacagcaatgaaaacatattgattgtttccagtctctgggccgaagtattgcgaagcatttgaaaagctttcacgatttgtgtagatgattatgaaggacctgcttgttgcaagagaacatcagtgatttttttagttactcaccaaggccttttgtcccagagccagttccctctgggagttcttatgaacatttctcaccttaatatggaggagagaatagtattccaatcatggatgtatcaaattctagtcatttagtttaagtgaaaagaggtttgattgcatattaaattgttattctgtctccttatgttgccatatgaatagctattttttttctttcacttttgacatttgggatgaaaagccatatgtatcataaatatcagatgtaagtcattaaaaactgccttcctgggacttttacatcttttaaaaggtgaattacttaccttatgtacagaataaataatgctcaggaaagagcaagtatttttccatgcattctcaggggatctttttactcccctttgtttgattagttagggccccaatgccaggtaggaggaagggctggggcaatggtagagtgagaggaagacaaacccagctgcagatcatgcttttctaggagccgacatgctaaataaattagaatgtaggaggatcagccacagttgactcaacaaagacaaaagccagccaccaccttcaactgttggcacagctgtgcggtgctggctgtcccaatgcagaaagctggtgggaaggaattcctcatcatcactttctttaatgtagccaatttaggcagggtaatgacggcaatagagagctgctccttgtcattatgagacgtgggataagaagagtgcaacagtgagccaaacacattttggtatagttatttttttcttcttttgttttctttcttttttaacacttagtaagcatgagaggagaggtagaaaaatacccttttttcaacatatagttgtcagatgctttgtgcatgcaaatcatgctttaggcagtgcggtatttcttaaaaactggccaattcaccataaccaatttcccttatggatggactaggctggtatatacatatttgaaaagttttacttcaaagaattccatcgaatagaataggggtaaaagggaggaggaaaacatgtcacagctgtaccatctctaaaaaggtgtttttatggtgaatgttttggatttagattttggatcccccgtcccctcaagcatgatagttttggatatttgcttgctgtgtgaattgacaagcacttttactgacaaatggtgaggctcagtcagaacctccaccctcccccacaccaaagacaggggcagcgtagtattcaaaccagtattgtggtggggaataattgtatacatgtaaattatcaagccctatgagtggaagaattttttcaaattatttttgtccctctatatattgatttatattatgtataactatctctttatataaactatatataattatatatatata

SEQ ID NO: 10624 - DNA, 5069 bp, Homo sapiens
  source 1..5069: mol_type = unassigned DNA
gaggcccagaagattaacaatggctcaagccaggcggatggcactctcaaaccagtggatgaaaaagaggaggcagtggccgccgaggtcggctggatgacctccgtgaaggactgggcgggggtgatgatatccgcccagacactgactggcagagtcctggttgtcttagtctttgctctcagcatcggtgcacttgtaatatacttcatagattcatcaaacccaatagaatcctgccagaatttctacaaagatttcacattacagatcgacatggctttcaacgtgttcttccttctctacttcggcttgcggtttattgcagccaacgataaattgtggttctggctggaagtgaactctgtagtggatttcttcacggtgccccccgtgtttgtgtctgtgtacttaaacagaagttggcttggtttgagatttttaagagctctgagactgatacagttttcagaaattttgcagtttctgaatattcttaaaacaagtaattccatcaagctggtgaatctgctctccatatttatcagcacgtggctgactgcagccgggttcatccatttggtggagaattcaggggacccatgggaaaatttccaaaacaaccaggctctcacctactgggaatgtgtctatttactcatggtcacaatgtccaccgttggttatggggatgtttatgcaaaaaccacacttgggcgcctcttcatggtcttcttcatcctcgggggactggccatgtttgccagctacgtccctgaaatcatagagttaataggaaaccgcaagaaatacgggggctcctatagtgcggttagtggaagaaagcacattgtggtctgcggacacatcactctggagagtgtttccaacttcctgaaggactttctgcacaaggaccgggatgacgtcaatgtggagatcgtttttcttcacaaagtaatctccataaagaactaccatccgaagataagaatcatcactcaaatgctgcagtatcacaacaaggcccatctgctaaacatcccgagctggaattggaaagaaggtgatgacgcaatctgcctcgcagagttgaagttgggcttcatagcccagagctgcctggctcaaggcctctccaccatgcttgccaacctcttctccatgaggtcattcataaagattgaggaagacacatggcagaaatactacttggaaggagtctcaaatgaaatgtacacagaatatctctccagtgccttcgtgggtctgtccttccctactgtttgtgagctgtgttttgtgaagctcaagctcctaatgatagccattgagtacaagtctgccaaccgagagagccgaagccgaaagcgtatattaattaatcctggaaaccatcttaagatccaagaaggtactttaggatttttcatcgcaagtgatgccaaagaagttaaaagggcatttttttactgcaaggcctgtcatgatgacatcacagatcccaaaagaataaaaaaatgtggctgcaaacggcttgaagatgagcagccgtcaacactatcaccaaaaaaaaagcaacggaatggaggcatgcggaactcacccaacacctcgcctaagctgatgaggcatgaccccttgttaattcctggcaatgatcagattgacaacatggactccaatgtgaagaagtacgactctactgggatgtttcactggtgtgcacccaaggagatagagaaagtcatcctgactcgaagtgaagctgccatgaccgtcctgagtggccatgtcgtggtctgcatctttggcgacgtcagctcagccctgatcggcctccggaacctggtgatgccgctccgtgccagcaactttcattaccatgagctcaagcacattgtgtttgtgggctctattgagtacctcaagcgggaatgggagacgcttcataacttccccaaagtgtccatattgcctggtacgccattaagtcgggctgatttaagggctgtcaacatcaacctctgtgacatgtgcgttatcctgtcagccaatcagaataatattgatgatacttcgctgcaggacaaggaatgcatcttggcgtcactcaacatcaaatctatgcagtttgatgacagcatcggagtcttgcaggctaattcccaagggttcacacctccaggaatggatagatcctctccagataacagcccagtgcacgggatgttacgtcaaccatccatcacaactggggtcaacatccccatcatcactgaactagctaaaccgggcaagttgcctttggtatcagtcaatcaggaaaaaaacagtgggacgcacattctaatgataactgaactggtgaacgatactaatgttcagtttttggaccaagacgatgatgatgaccctgatacagaactgtacctcacgcagccctttgcctgtgggacagcatttgccgtcagtgtcctggactcactcatgagcgcgacgtacttcaatgacaatatcctcaccctgatacggaccctggtgaccggaggagccacgccggagctggaggctctgattgctgaggaaaacgcccttagaggtggctacagcaccccgcagacactggccaatagggaccgctgccgcgtggcccagttagctctgctcgatgggccatttgcggacttaggggatggtggttgttatggtgatctgttctgcaaagctctgaaaacatataatatgctttgttttggaatttaccggctgagagatgctcacctcagcacccccagtcagtgcacaaagaggtatgtcatcaccaacccgccctatgagtttgagctcgtgccgacggacctgatcttctgcttaatgcagtttgaccacaatgccggccagtcccgggccagcctgtcccattcctcccactcgtcgcagtcctccagcaagaagagctcctctgttcactccatcccatccacagcaaaccgacagaaccggcccaagtccagggagtcccgggacaaacagaagtacgtgcaggaagagcggctttgatatgtgtatccaccgccactgtgtgaaactgtatctgccactcatttccccagttggtgtttccaacaaagtaactttccctgttttcccctgtagtccccccctttttttttacacatatttgcatatgtatgatagtgtgcatgtggttgtcatttttatttcaccaccataaaacccttgagcacaacagcaaataagcagacggaccaaaagttatttatgattctgggggaaaaataacccaaaggcatgctccagacataaatagctcactgcaggaacgagttcacagattagaagggagcacttgtgatcaacgtcagttaggcagagcaagtttatttaatgtaaaagaaaagttgattctgatttatcaggattatcagggtgctttgggttttgattttgttgttgttgttgttttcctttctttctttttttatacacacaataagttagcacatgtttatttgaaacaagcaaccaaacagcaatgaaaacatattgattgtttccagtctctgggccgaagtattgcgaagcatttgaaaagctttcacgatttgtgtagatgattatgaaggacctgcttgttgcaagagaacatcagtgatttttttagttactcaccaaggccttttgtcccagagccagttccctctgggagttcttatgaacatttctcaccttaatatggaggagagaatagtattccaatcatggatgtatcaaattctagtcatttagtttaagtgaaaagaggtttgattgcatattaaattgttattctgtctccttatgttgccatatgaatagctattttttttctttcacttttgacatttgggatgaaaagccatatgtatcataaatatcagatgtaagtcattaaaaactgccttcctgggacttttacatcttttaaaaggtgaattacttaccttatgtacagaataaataatgctcaggaaagagcaagtatttttccatgcattctcaggggatctttttactcccctttgtttgattagttagggccccaatgccaggtaggaggaagggctggggcaatggtagagtgagaggaagacaaacccagctgcagatcatgcttttctaggagccgacatgctaaataaattagaatgtaggaggatcagccacagttgactcaacaaagacaaaagccagccaccaccttcaactgttggcacagctgtgcggtgctggctgtcccaatgcagaaagctggtgggaaggaattcctcatcatcactttctttaatgtagccaatttaggcagggtaatgacggcaatagagagctgctccttgtcattatgagacgtgggataagaagagtgcaacagtgagccaaacacattttggtatagttatttttttcttcttttgttttctttcttttttaacacttagtaagcatgagaggagaggtagaaaaatacccttttttcaacatatagttgtcagatgctttgtgcatgcaaatcatgctttaggcagtgcggtatttcttaaaaactggccaattcaccataaccaatttcccttatggatggactaggctggtatatacatatttgaaaagttttacttcaaagaattccatcgaatagaataggggtaaaagggaggaggaaaacatgtcacagctgtaccatctctaaaaaggtgtttttatggtgaatgttttggatttagattttggatcccccgtcccctcaagcatgatagttttggatatttgcttgctgtgtgaattgacaagcacttttactgacaaatggtgaggctcagtcagaacctccaccctcccccacaccaaagacaggggcagcgtagtattcaaaccagtattgtggtggggaataattgtatacatgtaaattatcaagccctatgagtggaagaattttttcaaattatttttgtccctctatatattgatttatattatgtataactatctctttatataaacta

SEQ ID NO: 10625 - DNA, 9904 bp, Homo sapiens
  source 1..9904: mol_type = unassigned DNA
ggactgggcgggggtgatgatatccgcccagacactgactggcagagtcctggttgtcttagtctttgctctcagcatcggtgcacttgtaatatacttcatagattcatcaaacccaatagaatcctgccagaatttctacaaagatttcacattacagatcgacatggctttcaacgtgttcttccttctctacttcggcttgcggtttattgcagccaacgataaattgtggttctggctggaagtgaactctgtagtggatttcttcacggtgccccccgtgtttgtgtctgtgtacttaaacagaagttggcttggtttgagatttttaagagctctgagactgatacagttttcagaaattttgcagtttctgaatattcttaaaacaagtaattccatcaagctggtgaatctgctctccatatttatcagcacgtggctgactgcagccgggttcatccatttggtggagaattcaggggacccatgggaaaatttccaaaacaaccaggctctcacctactgggaatgtgtctatttactcatggtcacaatgtccaccgttggttatggggatgtttatgcaaaaaccacacttgggcgcctcttcatggtcttcttcatcctcgggggactggccatgtttgccagctacgtccctgaaatcatagagttaataggaaaccgcaagaaatacgggggctcctatagtgcggttagtggaagaaagcacattgtggtctgcggacacatcactctggagagtgtttccaacttcctgaaggactttctgcacaaggaccgggatgacgtcaatgtggagatcgtttttcttcacaacatctcccccaacctggagcttgaagctctgttcaaacgacattttactcaggtggaattttatcagggttccgtcctcaatccacatgatcttgcaagagtcaagatagagtcagcagatgcatgcctgatccttgccaacaagtactgcgctgacccggatgcggaggatgcctcgaatatcatgagagtaatctccataaagaactaccatccgaagataagaatcatcactcaaatgctgcagtatcacaacaaggcccatctgctaaacatcccgagctggaattggaaagaaggtgatgacgcaatctgcctcgcagagttgaagttgggcttcatagcccagagctgcctggctcaaggcctctccaccatgcttgccaacctcttctccatgaggtcattcataaagattgaggaagacacatggcagaaatactacttggaaggagtctcaaatgaaatgtacacagaatatctctccagtgccttcgtgggtctgtccttccctactgtttgtgagctgtgttttgtgaagctcaagctcctaatgatagccattgagtacaagtctgccaaccgagagagccgaagccgaaagcgtatattaattaatcctggaaaccatcttaagatccaagaaggtactttaggatttttcatcgcaagtgatgccaaagaagttaaaagggcatttttttactgcaaggcctgtcatgatgacatcacagatcccaaaagaataaaaaaatgtggctgcaaacggcttgaagatgagcagccgtcaacactatcaccaaaaaaaaagcaacggaatggaggcatgcggaactcacccaacacctcgcctaagctgatgaggcatgaccccttgttaattcctggcaatgatcagattgacaacatggactccaatgtgaagaagtacgactctactgggatgtttcactggtgtgcacccaaggagatagagaaagtcatcctgactcgaagtgaagctgccatgaccgtcctgagtggccatgtcgtggtctgcatctttggcgacgtcagctcagccctgatcggcctccggaacctggtgatgccgctccgtgccagcaactttcattaccatgagctcaagcacattgtgtttgtgggctctattgagtacctcaagcgggaatgggagacgcttcataacttccccaaagtgtccatattgcctggtacgccattaagtcgggctgatttaagggctgtcaacatcaacctctgtgacatgtgcgttatcctgtcagccaatcagaataatattgatgatacttcgctgcaggacaaggaatgcatcttggcgtcactcaacatcaaatctatgcagtttgatgacagcatcggagtcttgcaggctaattcccaagggttcacacctccaggaatggatagatcctctccagataacagcccagtgcacgggatgttacgtcaaccatccatcacaactggggtcaacatccccatcatcactgaactaggtaggggtcaatgtcagctttggggggagtttttgttctgtctttcaaaccatacaggatatgaggaggttggtttatttcttagccctttcaactttgtagctgctatggggtttgttttgagggggctgggaggaaggtatggggagaaatatggcagattaccggaagggaaaactgatctatctttcttctgagatgaatagacagtttccttcatgctggtcactgttttcaaaggagcatgagatgatggatttgcgattggggcattcaattgggaatggagaggaaaggaggaaaggcttagttcacggattctttctggtgatttttactgtaagaacctcttttgagcattctgtctggacagctcctacaatctgagtcctccactgatatacaaagcctcggatctaagccaaacccattttgggaacaaggtagaagccctgggctaatgtgtaataacttgacatttaacgtatcgtagttgaatatctcagccaaaagccattttcagcaaatgccattctggcccccaaaatgatggggttttgagggccatgttggttggacaatagaatctaacttctaacctggccatggcactccctgttaccattagtgagtgtgcaaaactgtagagtggcctcttcccccaagacaaatgcaaactacctgtggtccggggtccctttacttgagaatgtttcctctgttattccctcactctcttctttttctgtactttcctccactccctttccccaacccttaaatgctgtatccaattagctaaaccgggcaagttgcctttggtatcagtcaatcaggaaaaaaacagtgggacgcacattctaatgataactgaactgggtaagaagcactgttttccttcacatcagtatctccttttgttctgttgttggtgtttccaactatcatcagcttgtttttatttcaccggctgtaacagaaaggctaccccatggcactgctttgaatgtgttttatttgtggctctggttggaatcgactgtcttgttctggcctttcttaatgattttttccccacacagcatcagtaaacctttgatcacacccatctgacctggcagttgtttccaaagcatatttgctctaattcattttctctggcctgagccttttttccccacttttttttgtcaccccgctctcccgccttctcccttctactcctcttccaacatactgtcagtttgaatgacatgtcttcacagctcttagaggaagtcaaaggagaatatcaaaattttaagataagaaacctaagatggcactttccctccagctgtttatttttctttattctgactttatttgccttttttttttttcccccctactagggcatttctcagaagctctggttctgaagccataaaaacacctggtccctaggagaactttttttactaaaggcagatttcaagaagggtgcggaggataaggttagcagccacccacgtgcagccctgcactctggcccccaatcccagcccagaatcctctctgggagattcacaatggactcaggtggacgataaaggcctccagtcgtgactgcatttgttaggttcttccccacttccccgtgacttggttaataactccatgaagggcacccatcagcagcaagtctcagaactggggattgatcttctaaatagagacagcaaaagtgctgctcagcagaggggtggatagagaggtgggagcacctgccttcacatgactcacaaatgaaatgaacaccccattttcttggcccaaaaatatatttcaaaataagggagcaggctttcaacacagtaatcttgcttgcgagatgtctagaaaccaaggaataaattgtccaccactcagcagtgcattattgtaggtatagctatttatcaggacaaattcactcaggtcagggagtatcacactattttctgtttccaaccataggaggggtatctttttcatgtttagtgtagttgtttaaaagccctaggtttctggattgctctcctcagaactggagggcaataagagacccagggctcatgtggtccacgcctctggttggaaaattaatccaaacatctccatctcacaaacctacagcagcatttcagaatcctcactgccgggaatttcattttctatttggaattcacgtgccgctgactaactaggatatcttaatttgtcattagtagacgagaaaaggaaaagcttggtgccccaaacctaaggcaacaattctggtatttgattagcatcattgactctcctgaagcctttgtcccacaccagatttcttccttgtgttcagagaatctttcaggtgctcacaccacccttgtcttctgccttgaaacctatttctctagccactataccaccctcctcagaccatttcacctcccacatcccccacaaatacttcttatttatctacatgttctgagatgtgttctgcattatgccaggccagtataatgaattttaagagacacagagggcaccaaggccacacaagctttcaaagctgtgtagcacattccacttttcatctacttggagactctcaattgatgttagcatggcaaaggctcctcagagtctcacaagaaaggactgtgttacagctgtttcacctgactattccaattgtatttgaccacatatgctttggggtgattacgtgggtacctcttagcacccacataattactgttctgtgaaataggccttgagtagcattgcttgctctccttctgagactgggtatttcagaacggtatacaaggtattcactggaccctggctggtctcttggagcgcttttcctatgaccccagatgtctagctcactggcaatcgggagtcccctccccctacttggagtcacttcacctccatatctggtaccaacccttccccatcttcctgataagaggtaacagatgctgtgcttttcggagcattgccacacacaccattggtggctattacaagtaactaaaactgcattcttccatatgtggtctccagtttacattttctgattcacaaaacagaaagactaaacagtggcctacaacatccctttggacaagtgaagggaggtgaggaaaagctacctcttgaaagacccctgagcaagaccttcagtgtttccaagagaggcagagggaagctgggtattttcatgctataatgggtggacaggtatttaatgtcagaagggagatcatgacagcagctggtatttatcaagtcatggcatgatccagatgctgggccaggcttactgggcaccatcccattcgtatgagcctcctgacagcctcatgagagagctgctgtaactcccccattttacagaaacaaactaaggtatagaatgatgaaatgctttgcccaaggaagttggcagcacaggctggactgaagcccagttgtcagagcctggattttggactttcaccactagcctgcaattcaattgctgcttaaacaatggggacccaaatgtgaccaattttggaagaacagagcaaagattttccccattagaatttttctctggggaaacaagatgatgtcattttaaaatactaattccatgcctagcctttcatgctagtatcatttattctgcttcatacagtaaacaaaagttttttttttttaaaaaagaagagttatcaagaaagttgcttaaaaattaaaacaatcactctagaaaaaagaattagctgttgatacatttagaaaggaatcagggaaaggaaacctcatctgttctcttcctaaaatcacaataattatttcagaaattttgagtgcccccttctcccatccccccaccgacttttcccctattacttgctctgcaaaactgataatttccaaagccaagatgggaatggaaattaatttgtcatttaatttttaataagttaaagacatctgagtgacacaactaatcagcctgcacgtacatgcgggaggagtccttgaggaatcctcagatggaaatgaaatacagcatccaatgctgcatctgcttgaatgcaagcatataaaagattgagctgtttaggatgggaaagggagaacgtgggcgtccccatgcaactcaaaattcagagcaagtccttgtcagcaagcagcaggagacagccaggcatccatcccacctggggtttcctgtgtattaaacagggcctattgggtgtggacctagatttagggcctgggaccccgggaactacccaggccaatcccagtgggtaggctgcgggttatgcctgtggctgaattccttgctatctgcctttgctgtgctccccttccagcgctctttactcccaataagctgctttcttttcattgtggctaaaatgactatcccagcatggctgctcatcattgaaatatgtccatctctcaaaggacttggttaccaaaaaacactggaaagtgtttttaggtcatgatcctaaagctatgccaaaggactggccagcacagtctattggtcctccagtggcctgccgtggagcaagcctgcttgaacttattgctctccaggtctcagacacttaaacagtgacacaggaacagtccattgagtcccactgccccccttacccaaagatccatctacagcttattccatgcttttgtttccttctcaatgacttcagtatttctaaaccagtagcctggtctccctctggcttcaatgcctgtgtgtggtcttcagagctaattcttattttatgctttttctagtgaacgatactaatgttcagtttttggaccaagacgatgatgatgaccctgatacagaactgtacctcacgcagccctttgcctgtgggacagcatttgccgtcagtgtcctggactcactcatgagcgcgacgtacttcaatgacaatatcctcaccctgatacggaccctggtgaccggaggagccacgccggagctggaggctctgattgctgaggaaaacgcccttagaggtggctacagcaccccgcagacactggccaatagggaccgctgccgcgtggcccagttagctctgctcgatgggccatttgcggacttaggggatggtggttgttatggtgatctgttctgcaaagctctgaaaacatataatatgctttgttttggaatttaccggctgagagatgctcacctcagcacccccagtcagtgcacaaagaggtatgtcatcaccaacccgccctatgagtttgagctcgtgccgacggacctgatcttctgcttaatgcagtttgaccacaatgccggccagtcccgggccagcctgtcccattcctcccactcgtcgcagtcctccagcaagaagagctcctctgttcactccatcccatccacagcaaaccgacagaaccggcccaagtccagggagtcccgggacaaacagaagtacgtgcaggaagagcggctttgatatgtgtatccaccgccactgtgtgaaactgtatctgccactcatttccccagttggtgtttccaacaaagtaactttccctgttttcccctgtagtccccccctttttttttacacatatttgcatatgtatgatagtgtgcatgtggttgtcatttttatttcaccaccataaaacccttgagcacaacagcaaataagcagacggaccaaaagttatttatgattctgggggaaaaataacccaaaggcatgctccagacataaatagctcactgcaggaacgagttcacagattagaagggagcacttgtgatcaacgtcagttaggcagagcaagtttatttaatgtaaaagaaaagttgattctgatttatcaggattatcagggtgctttgggttttgattttgttgttgttgttgttttcctttctttctttttttatacacacaataagttagcacatgtttatttgaaacaagcaaccaaacagcaatgaaaacatattgattgtttccagtctctgggccgaagtattgcgaagcatttgaaaagctttcacgatttgtgtagatgattatgaaggacctgcttgttgcaagagaacatcagtgatttttttagttactcaccaaggccttttgtcccagagccagttccctctgggagttcttatgaacatttctcaccttaatatggaggagagaatagtattccaatcatggatgtatcaaattctagtcatttagtttaagtgaaaagaggtttgattgcatattaaattgttattctgtctccttatgttgccatatgaatagctattttttttctttcacttttgacatttgggatgaaaagccatatgtatcataaatatcagatgtaagtcattaaaaactgccttcctgggacttttacatcttttaaaaggtgaattacttaccttatgtacagaataaataatgctcaggaaagagcaagtatttttccatgcattctcaggggatctttttactcccctttgtttgattagttagggccccaatgccaggtaggaggaagggctggggcaatggtagagtgagaggaagacaaacccagctgcagatcatgcttttctaggagccgacatgctaaataaattagaatgtaggaggatcagccacagttgactcaacaaagacaaaagccagccaccaccttcaactgttggcacagctgtgcggtgctggctgtcccaatgcagaaagctggtgggaaggaattcctcatcatcactttctttaatgtagccaatttaggcagggtaatgacggcaatagagagctgctccttgtcattatgagacgtgggataagaagagtgcaacagtgagccaaacacattttggtatagttatttttttcttcttttgttttctttcttttttaacacttagtaagcatgagaggagaggtagaaaaatacccttttttcaacatatagttgtcagatgctttgtgcatgcaaatcatgctttaggcagtgcggtatttcttaaaaactggccaattcaccataaccaatttcccttatggatggactaggctggtatatacatatttgaaaagttttacttcaaagaattccatcgaatagaataggggtaaaagggaggaggaaaacatgtcacagctgtaccatctctaaaaaggtgtttttatggtgaatgttttggatttagattttggatcccccgtcccctcaagcatgatagttttggatatttgcttgctgtgtgaattgacaagcacttttactgacaaatggtgaggctcagtcagaacctccaccctcccccacaccaaagacaggggcagcgtagtattcaaaccagtattgtggtggggaataattgtatacatgtaaattatcaagccctatgagtggaagaattttttcaaattatttttgtccctctatatattgatttatattatgtataactatctctttatataaac

SEQ ID NO: 10626 - DNA, 5789 bp, Homo sapiens
  source 1..5789: mol_type = unassigned DNA
acagcgccccgagcccaggcgcctccccgcccccctcccgcgctccgcggcggcggcggcggcggcagcagtagcagcaatatggctgttgatgggtgtttggggtggcgctggcggcgggaggagctcccccgagcccctgcgccggctgcccgttgctagctatggcaaatggtggcggcggcggcggcggcagcagcggcggcggcggcggcggcggaggcagcagtcttagaatgagtagcaatatccacgcgaaccatctcagcctagacgcgtcctcctcctcctcctcctcctcttcctcttcttcttcttcctcctcctcttcctcctcgtcctcggtccacgagcccaagatggatgcgctcatcatcccggtgaccatggaggtgccgtgcgacagccggggccaacgcatgtggtgggctttcctggcctcctccatggtgactttcttcgggggcctcttcatcatcttgctctggcggacgctcaagtacctgtggaccgtgtgctgccactgcgggggcaagacgaaggaggcccagaagattaacaatggctcaagccaggcggatggcactctcaaaccagtggatgaaaaagaggaggcagtggccgccgaggtcggctggatgacctccgtgaaggactgggcgggggtgatgatatccgcccagacactgactggcagagtcctggttgtcttagtctttgctctcagcatcggtgcacttgtaatatacttcatagattcatcaaacccaatagaatcctgccagaatttctacaaagatttcacattacagatcgacatggctttcaacgtgttcttccttctctacttcggcttgcggtttattgcagccaacgataaattgtggttctggctggaagtgaactctgtagtggatttcttcacggtgccccccgtgtttgtgtctgtgtacttaaacagaagttggcttggtttgagatttttaagagctctgagactgatacagttttcagaaattttgcagtttctgaatattcttaaaacaagtaattccatcaagctggtgaatctgctctccatatttatcagcacgtggctgactgcagccgggttcatccatttggtggagaattcaggggacccatgggaaaatttccaaaacaaccaggctctcacctactgggaatgtgtctatttactcatggtcacaatgtccaccgttggttatggggatgtttatgcaaaaaccacacttgggcgcctcttcatggtcttcttcatcctcgggggactggccatgtttgccagctacgtccctgaaatcatagagttaataggaaaccgcaagaaatacgggggctcctatagtgcggttagtggaagaaagcacattgtggtctgcggacacatcactctggagagtgtttccaacttcctgaaggactttctgcacaaggaccgggatgacgtcaatgtggagatcgtttttcttcacaacatctcccccaacctggagcttgaagctctgttcaaacgacattttactcaggtggaattttatcagggttccgtcctcaatccacatgatcttgcaagagtcaagatagagtcagcagatgcatgcctgatccttgccaacaagtactgcgctgacccggatgcggaggatgcctcgaatatcatgagagtaatctccataaagaactaccatccgaagataagaatcatcactcaaatgctgcagtatcacaacaaggcccatctgctaaacatcccgagctggaattggaaagaaggtgatgacgcaatctgcctcgcagagttgaagttgggcttcatagcccagagctgcctggctcaaggcctctccaccatgcttgccaacctcttctccatgaggtcattcataaagattgaggaagacacatggcagaaatactacttggaaggagtctcaaatgaaatgtacacagaatatctctccagtgccttcgtgggtctgtccttccctactgtttgtgagctgtgttttgtgaagctcaagctcctaatgatagccattgagtacaagtctgccaaccgagagagccgtatattaattaatcctggaaaccatcttaagatccaagaaggtactttaggatttttcatcgcaagtgatgccaaagaagttaaaagggcatttttttactgcaaggcctgtcatgatgacatcacagatcccaaaagaataaaaaaatgtggctgcaaacggctcaaggttgcagctagatcacgctattccaaagatccatttgagttcaagaaggagactcccaattctcggcttgtgaccgagccagttgaagatgagcagccgtcaacactatcaccaaaaaaaaagcaacggaatggaggcatgcggaactcacccaacacctcgcctaagctgatgaggcatgaccccttgttaattcctggcaatgatcagattgacaacatggactccaatgtgaagaagtacgactctactgggatgtttcactggtgtgcacccaaggagatagagaaagtcatcctgactcgaagtgaagctgccatgaccgtcctgagtggccatgtcgtggtctgcatctttggcgacgtcagctcagccctgatcggcctccggaacctggtgatgccgctccgtgccagcaactttcattaccatgagctcaagcacattgtgtttgtgggctctattgagtacctcaagcgggaatgggagacgcttcataacttccccaaagtgtccatattgcctggtacgccattaagtcgggctgatttaagggctgtcaacatcaacctctgtgacatgtgcgttatcctgtcagccaatcagaataatattgatgatacttcgctgcaggacaaggaatgcatcttggcgtcactcaacatcaaatctatgcagtttgatgacagcatcggagtcttgcaggctaattcccaagggttcacacctccaggaatggatagatcctctccagataacagcccagtgcacgggatgttacgtcaaccatccatcacaactggggtcaacatccccatcatcactgaactagtgaacgatactaatgttcagtttttggaccaagacgatgatgatgaccctgatacagaactgtacctcacgcagccctttgcctgtgggacagcatttgccgtcagtgtcctggactcactcatgagcgcgacgtacttcaatgacaatatcctcaccctgatacggaccctggtgaccggaggagccacgccggagctggaggctctgattgctgaggaaaacgcccttagaggtggctacagcaccccgcagacactggccaatagggaccgctgccgcgtggcccagttagctctgctcgatgggccatttgcggacttaggggatggtggttgttatggtgatctgttctgcaaagctctgaaaacatataatatgctttgttttggaatttaccggctgagagatgctcacctcagcacccccagtcagtgcacaaagaggtatgtcatcaccaacccgccctatgagtttgagctcgtgccgacggacctgatcttctgcttaatgcagtttgaccacaatgccggccagtcccgggccagcctgtcccattcctcccactcgtcgcagtcctccagcaagaagagctcctctgttcactccatcccatccacagcaaaccgacagaaccggcccaagtccagggagtcccgggacaaacagaagtacgtgcaggaagagcggctttgatatgtgtatccaccgccactgtgtgaaactgtatctgccactcatttccccagttggtgtttccaacaaagtaactttccctgttttcccctgtagtccccccctttttttttacacatatttgcatatgtatgatagtgtgcatgtggttgtcatttttatttcaccaccataaaacccttgagcacaacagcaaataagcagacggaccaaaagttatttatgattctgggggaaaaataacccaaaggcatgctccagacataaatagctcactgcaggaacgagttcacagattagaagggagcacttgtgatcaacgtcagttaggcagagcaagtttatttaatgtaaaagaaaagttgattctgatttatcaggattatcagggtgctttgggttttgattttgttgttgttgttgttttcctttctttctttttttatacacacaataagttagcacatgtttatttgaaacaagcaaccaaacagcaatgaaaacatattgattgtttccagtctctgggccgaagtattgcgaagcatttgaaaagctttcacgatttgtgtagatgattatgaaggacctgcttgttgcaagagaacatcagtgatttttttagttactcaccaaggccttttgtcccagagccagttccctctgggagttcttatgaacatttctcaccttaatatggaggagagaatagtattccaatcatggatgtatcaaattctagtcatttagtttaagtgaaaagaggtttgattgcatattaaattgttattctgtctccttatgttgccatatgaatagctattttttttctttcacttttgacatttgggatgaaaagccatatgtatcataaatatcagatgtaagtcattaaaaactgccttcctgggacttttacatcttttaaaaggtgaattacttaccttatgtacagaataaataatgctcaggaaagagcaagtatttttccatgcattctcaggggatctttttactcccctttgtttgattagttagggccccaatgccaggtaggaggaagggctggggcaatggtagagtgagaggaagacaaacccagctgcagatcatgcttttctaggagccgacatgctaaataaattagaatgtaggaggatcagccacagttgactcaacaaagacaaaagccagccaccaccttcaactgttggcacagctgtgcggtgctggctgtcccaatgcagaaagctggtgggaaggaattcctcatcatcactttctttaatgtagccaatttaggcagggtaatgacggcaatagagagctgctccttgtcattatgagacgtgggataagaagagtgcaacagtgagccaaacacattttggtatagttatttttttcttcttttgttttctttcttttttaacacttagtaagcatgagaggagaggtagaaaaatacccttttttcaacatatagttgtcagatgctttgtgcatgcaaatcatgctttaggcagtgcggtatttcttaaaaactggccaattcaccataaccaatttcccttatggatggactaggctggtatatacatatttgaaaagttttacttcaaagaattccatcgaatagaataggggtaaaagggaggaggaaaacatgtcacagctgtaccatctctaaaaaggtgtttttatggtgaatgttttggatttagattttggatcccccgtcccctcaagcatgatagttttggatatttgcttgctgtgtgaattgacaagcacttttactgacaaatggtgaggctcagtcagaacctccaccctcccccacaccaaagacaggggcagcgtagtattcaaaccagtattgtggtggggaataattgtatacatgtaaattatcaagccctatgagtggaagaattttttcaaattatttttgtccctctatatattgatttatattatgtataactatctctttatata

SEQ ID NO: 10627 - DNA, 4939 bp, Homo sapiens
  source 1..4939: mol_type = unassigned DNA
gaggcccagaagattaacaatggctcaagccaggcggatggcactctcaaaccagtggatgaaaaagaggaggcagtggccgccgaggtcggctggatgacctccgtgaaggactgggcgggggtgatgatatccgcccagacactgactggcagagtcctggttgtcttagtctttgctctcagcatcggtgcacttgtaatatacttcatagattcatcaaagtttgagatttttaagagctctgagactgatacagttttcagaaattttgcagtttctgaatattcttaaaacaagtaattccatcaagctggtgaatctgctctccatatttatcagcacgtggctgactgcagccgggttcatccatttggtggagaattcaggggacccatgggaaaatttccaaaacaaccaggctctcacctactgggaatgtgtctatttactcatggtcacaatgtccaccgttggttatggggatgtttatgcaaaaaccacacttgggcgcctcttcatggtcttcttcatcctcgggggactggccatgtttgccagctacgtccctgaaatcatagagttaataggaaaccgcaagaaatacgggggctcctatagtgcggttagtggaagaaagcacattgtggtctgcggacacatcactctggagagtgtttccaacttcctgaaggactttctgcacaaggaccgggatgacgtcaatgtggagatcgtttttcttcacaacatctcccccaacctggagcttgaagctctgttcaaacgacattttactcaggtggaattttatcagggttccgtcctcaatccacatgatcttgcaagagtcaagatagagtcagcagatgcatgcctgatccttgccaacaagtactgcgctgacccggatgcggaggatgcctcgaatatcatgagagtaatctccataaagaactaccatccgaagataagaatcatcactcaaatgctgcagtatcacaacaaggcccatctgctaaacatcccgagctggaattggaaagaaggtgatgacgcaatctgcctcgcagagttgaagttgggcttcatagcccagagctgcctggctcaaggcctctccaccatgcttgccaacctcttctccatgaggtcattcataaagattgaggaagacacatggcagaaatactacttggaaggagtctcaaatgaaatgtacacagaatatctctccagtgccttcgtgggtctgtccttccctactgtttgtgagctgtgttttgtgaagctcaagctcctaatgatagccattgagtacaagtctgccaaccgagagagccgtatattaattaatcctggaaaccatcttaagatccaagaaggtactttaggatttttcatcgcaagtgatgccaaagaagttaaaagggcatttttttactgcaaggcctgtcatgatgacatcacagatcccaaaagaataaaaaaatgtggctgcaaacggctgatatattttgaagatgagcagccgtcaacactatcaccaaaaaaaaagcaacggaatggaggcatgcggaactcacccaacacctcgcctaagctgatgaggcatgaccccttgttaattcctggcaatgatcagattgacaacatggactccaatgtgaagaagtacgactctactgggatgtttcactggtgtgcacccaaggagatagagaaagtcatcctgactcgaagtgaagctgccatgaccgtcctgagtggccatgtcgtggtctgcatctttggcgacgtcagctcagccctgatcggcctccggaacctggtgatgccgctccgtgccagcaactttcattaccatgagctcaagcacattgtgtttgtgggctctattgagtacctcaagcgggaatgggagacgcttcataacttccccaaagtgtccatattgcctggtacgccattaagtcgggctgatttaagggctgtcaacatcaacctctgtgacatgtgcgttatcctgtcagccaatcagaataatattgatgatacttcgctgcaggacaaggaatgcatcttggcgtcactcaacatcaaatctatgcagtttgatgacagcatcggagtcttgcaggctaattcccaagggttcacacctccaggaatggatagatcctctccagataacagcccagtgcacgggatgttacgtcaaccatccatcacaactggggtcaacatccccatcatcactgaactagtgaacgatactaatgttcagtttttggaccaagacgatgatgatgaccctgatacagaactgtacctcacgcagccctttgcctgtgggacagcatttgccgtcagtgtcctggactcactcatgagcgcgacgtacttcaatgacaatatcctcaccctgatacggaccctggtgaccggaggagccacgccggagctggaggctctgattgctgaggaaaacgcccttagaggtggctacagcaccccgcagacactggccaatagggaccgctgccgcgtggcccagttagctctgctcgatgggccatttgcggacttaggggatggtggttgttatggtgatctgttctgcaaagctctgaaaacatataatatgctttgttttggaatttaccggctgagagatgctcacctcagcacccccagtcagtgcacaaagaggtatgtcatcaccaacccgccctatgagtttgagctcgtgccgacggacctgatcttctgcttaatgcagtttgaccacaatgccggccagtcccgggccagcctgtcccattcctcccactcgtcgcagtcctccagcaagaagagctcctctgttcactccatcccatccacagcaaaccgacagaaccggcccaagtccagggagtcccgggacaaacagaagtacgtgcaggaagagcggctttgatatgtgtatccaccgccactgtgtgaaactgtatctgccactcatttccccagttggtgtttccaacaaagtaactttccctgttttcccctgtagtccccccctttttttttacacatatttgcatatgtatgatagtgtgcatgtggttgtcatttttatttcaccaccataaaacccttgagcacaacagcaaataagcagacggaccaaaagttatttatgattctgggggaaaaataacccaaaggcatgctccagacataaatagctcactgcaggaacgagttcacagattagaagggagcacttgtgatcaacgtcagttaggcagagcaagtttatttaatgtaaaagaaaagttgattctgatttatcaggattatcagggtgctttgggttttgattttgttgttgttgttgttttcctttctttctttttttatacacacaataagttagcacatgtttatttgaaacaagcaaccaaacagcaatgaaaacatattgattgtttccagtctctgggccgaagtattgcgaagcatttgaaaagctttcacgatttgtgtagatgattatgaaggacctgcttgttgcaagagaacatcagtgatttttttagttactcaccaaggccttttgtcccagagccagttccctctgggagttcttatgaacatttctcaccttaatatggaggagagaatagtattccaatcatggatgtatcaaattctagtcatttagtttaagtgaaaagaggtttgattgcatattaaattgttattctgtctccttatgttgccatatgaatagctattttttttctttcacttttgacatttgggatgaaaagccatatgtatcataaatatcagatgtaagtcattaaaaactgccttcctgggacttttacatcttttaaaaggtgaattacttaccttatgtacagaataaataatgctcaggaaagagcaagtatttttccatgcattctcaggggatctttttactcccctttgtttgattagttagggccccaatgccaggtaggaggaagggctggggcaatggtagagtgagaggaagacaaacccagctgcagatcatgcttttctaggagccgacatgctaaataaattagaatgtaggaggatcagccacagttgactcaacaaagacaaaagccagccaccaccttcaactgttggcacagctgtgcggtgctggctgtcccaatgcagaaagctggtgggaaggaattcctcatcatcactttctttaatgtagccaatttaggcagggtaatgacggcaatagagagctgctccttgtcattatgagacgtgggataagaagagtgcaacagtgagccaaacacattttggtatagttatttttttcttcttttgttttctttcttttttaacacttagtaagcatgagaggagaggtagaaaaatacccttttttcaacatatagttgtcagatgctttgtgcatgcaaatcatgctttaggcagtgcggtatttcttaaaaactggccaattcaccataaccaatttcccttatggatggactaggctggtatatacatatttgaaaagttttacttcaaagaattccatcgaatagaataggggtaaaagggaggaggaaaacatgtcacagctgtaccatctctaaaaaggtgtttttatggtgaatgttttggatttagattttggatcccccgtcccctcaagcatgatagttttggatatttgcttgctgtgtgaattgacaagcacttttactgacaaatggtgaggctcagtcagaacctccaccctcccccacaccaaagacaggggcagcgtagtattcaaaccagtattgtggtggggaataattgtatacatgtaaattatcaagccctatgagtggaagaattttttcaaattatttttgtccctctatatattgatttatat

SEQ ID NO: 10628 - DNA, 5567 bp, Homo sapiens
  source 1..5567: mol_type = unassigned DNA
gctgttgatgggtgtttggggtggcgctggcggcgggaggagctcccccgagcccctgcgccggctgcccgttgctagctatggcaaatggtggcggcggcggcggcggcagcagcggcggcggcggcggcggcggaggcagcagtcttagaatgagtagcaatatccacgcgaaccatctcagcctagacgcgtcctcctcctcctcctcctcctcttcctcttcttcttcttcctcctcctcttcctcctcgtcctcggtccacgagcccaagatggatgcgctcatcatcccggtgaccatggaggtgccgtgcgacagccggggccaacgcatgtggtgggctttcctggcctcctccatggtgactttcttcgggggcctcttcatcatcttgctctggcggacgctcaagtacctgtggaccgtgtgctgccactgcgggggcaagacgaaggaggcccagaagattaacaatggctcaagccaggcggatggcactctcaaaccagtggatgaaaaagaggaggcagtggccgccgaggtcggctggatgacctccgtgaaggactgggcgggggtgatgatatccgcccagacactgactggcagagtcctggttgtcttagtctttgctctcagcatcggtgcacttgtaatatacttcatagattcatcaaacccaatagaatcctgccagaatttctacaaagatttcacattacagatcgacatggctttcaacgtgttcttccttctctacttcggcttgcggtttattgcagccaacgataaattgtggttctggctggaagtgaactctgtagtggatttcttcacggtgccccccgtgtttgtgtctgtgtacttaaacagaagttggcttggtttgagatttttaagagctctgagactgatacagttttcagaaattttgcagtttctgaatattcttaaaacaagtaattccatcaagctggtgaatctgctctccatatttatcagcacgtggctgactgcagccgggttcatccatttggtggagaattcaggggacccatgggaaaatttccaaaacaaccaggctctcacctactgggaatgtgtctatttactcatggtcacaatgtccaccgttggttatggggatgtttatgcaaaaaccacacttgggcgcctcttcatggtcttcttcatcctcgggggactggccatgtttgccagctacgtccctgaaatcatagagttaataggaaaccgcaagaaatacgggggctcctatagtgcggttagtggaagaaagcacattgtggtctgcggacacatcactctggagagtgtttccaacttcctgaaggactttctgcacaaggaccgggatgacgtcaatgtggagatcgtttttcttcacaacatctcccccaacctggagcttgaagctctgttcaaacgacattttactcaggtggaattttatcagggttccgtcctcaatccacatgatcttgcaagagtcaagatagagtcagcagatgcatgcctgatccttgccaacaagtactgcgctgacccggatgcggaggatgcctcgaatatcatgagagtaatctccataaagaactaccatccgaagataagaatcatcactcaaatgctgcagtatcacaacaaggcccatctgctaaacatcccgagctggaattggaaagaaggtgatgacgcaatctgcctcgcagagttgaagttgggcttcatagcccagagctgcctggctcaaggcctctccaccatgcttgccaacctcttctccatgaggtcattcataaagattgaggaagacacatggcagaaatactacttggaaggagtctcaaatgaaatgtacacagaatatctctccagtgccttcgtgggtctgtccttccctactgtttgtgagctgtgttttgtgaagctcaagctcctaatgatagccattgagtacaagtctgccaaccgagagagccgtatattaattaatcctggaaaccatcttaagatccaagaaggtactttaggatttttcatcgcaagtgatgccaaagaagttaaaagggcatttttttactgcaaggcctgtcatgatgacatcacagatcccaaaagaataaaaaaatgtggctgcaaacggctgatatattttgaagatgagcagccgtcaacactatcaccaaaaaaaaagcaacggaatggaggcatgcggaactcacccaacacctcgcctaagctgatgaggcatgaccccttgttaattcctggcaatgatcagattgacaacatggactccaatgtgaagaagtacgactctactgggatgtttcactggtgtgcacccaaggagatagagaaagtcatcctgactcgaagtgaagctgccatgaccgtcctgagtggccatgtcgtggtctgcatctttggcgacgtcagctcagccctgatcggcctccggaacctggtgatgccgctccgtgccagcaactttcattaccatgagctcaagcacattgtgtttgtgggctctattgagtacctcaagcgggaatgggagacgcttcataacttccccaaagtgtccatattgcctggtacgccattaagtcgggctgatttaagggctgtcaacatcaacctctgtgacatgtgcgttatcctgtcagccaatcagaataatattgatgatacttcgctgcaggacaaggaatgcatcttggcgtcactcaacatcaaatctatgcagtttgatgacagcatcggagtcttgcaggctaattcccaagggttcacacctccaggaatggatagatcctctccagataacagcccagtgcacgggatgttacgtcaaccatccatcacaactggggtcaacatccccatcatcactgaactagctaaaccgggcaagttgcctttggtatcagtcaatcaggaaaaaaacagtgggacgcacattctaatgataactgaactggtgaacgatactaatgttcagtttttggaccaagacgatgatgatgaccctgatacagaactgtacctcacgcagccctttgcctgtgggacagcatttgccgtcagtgtcctggactcactcatgagcgcgacgtacttcaatgacaatatcctcaccctgatacggaccctggtgaccggaggagccacgccggagctggaggctctgattgctgaggaaaacgcccttagaggtggctacagcaccccgcagacactggccaatagggaccgctgccgcgtggcccagttagctctgctcgatgggccatttgcggacttaggggatggtggttgttatggtgatctgttctgcaaagctctgaaaacatataatatgctttgttttggaatttaccggctgagagatgctcacctcagcacccccagtcagtgcacaaagaggtatgtcatcaccaacccgccctatgagtttgagctcgtgccgacggacctgatcttctgcttaatgcagtttgaccacaatgccggccagtcccgggccagcctgtcccattcctcccactcgtcgcagtcctccagcaagaagagctcctctgttcactccatcccatccacagcaaaccgacagaaccggcccaagtccagggagtcccgggacaaacagaagtacgtgcaggaagagcggctttgatatgtgtatccaccgccactgtgtgaaactgtatctgccactcatttccccagttggtgtttccaacaaagtaactttccctgttttcccctgtagtccccccctttttttttacacatatttgcatatgtatgatagtgtgcatgtggttgtcatttttatttcaccaccataaaacccttgagcacaacagcaaataagcagacggaccaaaagttatttatgattctgggggaaaaataacccaaaggcatgctccagacataaatagctcactgcaggaacgagttcacagattagaagggagcacttgtgatcaacgtcagttaggcagagcaagtttatttaatgtaaaagaaaagttgattctgatttatcaggattatcagggtgctttgggttttgattttgttgttgttgttgttttcctttctttctttttttatacacacaataagttagcacatgtttatttgaaacaagcaaccaaacagcaatgaaaacatattgattgtttccagtctctgggccgaagtattgcgaagcatttgaaaagctttcacgatttgtgtagatgattatgaaggacctgcttgttgcaagagaacatcagtgatttttttagttactcaccaaggccttttgtcccagagccagttccctctgggagttcttatgaacatttctcaccttaatatggaggagagaatagtattccaatcatggatgtatcaaattctagtcatttagtttaagtgaaaagaggtttgattgcatattaaattgttattctgtctccttatgttgccatatgaatagctattttttttctttcacttttgacatttgggatgaaaagccatatgtatcataaatatcagatgtaagtcattaaaaactgccttcctgggacttttacatcttttaaaaggtgaattacttaccttatgtacagaataaataatgctcaggaaagagcaagtatttttccatgcattctcaggggatctttttactcccctttgtttgattagttagggccccaatgccaggtaggaggaagggctggggcaatggtagagtgagaggaagacaaacccagctgcagatcatgcttttctaggagccgacatgctaaataaattagaatgtaggaggatcagccacagttgactcaacaaagacaaaagccagccaccaccttcaactgttggcacagctgtgcggtgctggctgtcccaatgcagaaagctggtgggaaggaattcctcatcatcactttctttaatgtagccaatttaggcagggtaatgacggcaatagagagctgctccttgtcattatgagacgtgggataagaagagtgcaacagtgagccaaacacattttggtatagttatttttttcttcttttgttttctttcttttttaacacttagtaagcatgagaggagaggtagaaaaatacccttttttcaacatatagttgtcagatgctttgtgcatgcaaatcatgctttaggcagtgcggtatttcttaaaaactggccaattcaccataaccaatttcccttatggatggactaggctggtatatacatatttgaaaagttttacttcaaagaattccatcgaatagaataggggtaaaagggaggaggaaaacatgtcacagctgtaccatctctaaaaaggtgtttttatggtgaatgttttggatttagattttggatcccccgtcccctcaagcatgatagttttggatatttgcttgctgtgtgaattgacaagcacttttactgacaaatggtgaggctcagtcagaacctccaccctcccccacaccaaagacaggggcag

SEQ ID NO: 10629 - DNA, 3638 bp, Homo sapiens
  source 1..3638: mol_type = unassigned DNA
atggatgcgctcatcatcccggtgaccatggaggtgccgtgcgacagccggggccaacgcatgtggtgggctttcctggcctcctccatggtgactttcttcgggggcctcttcatcatcttgctctggcggacgctcaagtacctgtggaccgtgtgctgccactgcgggggcaagacgaaggaggcccagaagattaacaatggctcaagccaggcggatggcactctcaaaccagtggatgaaaaagaggaggcagtggccgccgaggtcggctggatgacctccgtgaaggactgggcgggggtgatgatatccgcccagacactgactggcagagtcctggttgtcttagtctttgctctcagcatcggtgcacttgtaatatacttcatagattcatcaaacccaatagaatcctgccagaatttctacaaagatttcacattacagatcgacatggctttcaacgtgttcttccttctctacttcggcttgcggtttattgcagccaacgataaattgtggttctggctggaagtgaactctgtagtggatttcttcacggtgccccccgtgtttgtgtctgtgtacttaaacagaagttggcttggtttgagatttttaagagctctgagactgatacagttttcagaaattttgcagtttctgaatattcttaaaacaagtaattccatcaagctggtgaatctgctctccatatttatcagcacgtggctgactgcagccgggttcatccatttggtggagaattcaggggacccatgggaaaatttccaaaacaaccaggctctcacctactgggaatgtgtctatttactcatggtcacaatgtccaccgttggttatggggatgtttatgcaaaaaccacacttgggcgcctcttcatggtcttcttcatcctcgggggactggccatgtttgccagctacgtccctgaaatcatagagttaataggaaaccgcaagaaatacgggggctcctatagtgcggttagtggaagaaagcacattgtggtctgcggacacatcactctggagagtgtttccaacttcctgaaggactttctgcacaaggaccgggatgacgtcaatgtggagatcgtttttcttcacaacatctcccccaacctggagcttgaagctctgttcaaacgacattttactcaggtggaattttatcagggttccgtcctcaatccacatgatcttgcaagagtcaagatagagtcagcagatgcatgcctgatccttgccaacaagtactgcgctgacccggatgcggaggatgcctcgaatatcatgagagtaatctccataaagaactaccatccgaagataagaatcatcactcaaatgctgcagtatcacaacaaggcccatctgctaaacatcccgagctggaattggaaagaaggtgatgacgcaatctgcctcgcagagttgaagttgggcttcatagcccagagctgcctggctcaaggcctctccaccatgcttgccaacctcttctccatgaggtcattcataaagattgaggaagacacatggcagaaatactacttggaaggagtctcaaatgaaatgtacacagaatatctctccagtgccttcgtgggtctgtccttccctactgtttgtgagctgtgttttgtgaagctcaagctcctaatgatagccattgagtacaagtctgccaaccgagagagccgaagccgaaagcgtatattaattaatcctggaaaccatcttaagatccaagaaggtactttaggatttttcatcgcaagtgatgccaaagaagttaaaagggcatttttttactgcaaggcctgtcatgatgacatcacagatcccaaaagaataaaaaaatgtggctgcaaacggctcaaggttgcagctagatcacgctattccaaagatccatttgagttcaagaaggagactcccaattctcggcttgtgaccgagccagttgaagatgagcagccgtcaacactatcaccaaaaaaaaagcaacggaatggaggcatgcggaactcacccaacacctcgcctaagctgatgaggcatgaccccttgttaattcctggcaatgatcagattgacaacatggactccaatgtgaagaagtacgactctactgggatgtttcactggtgtgcacccaaggagatagagaaagtcatcctgactcgaagtgaagctgccatgaccgtcctgagtggccatgtcgtggtctgcatctttggcgacgtcagctcagccctgatcggcctccggaacctggtgatgccgctccgtgccagcaactttcattaccatgagctcaagcacattgtgtttgtgggctctattgagtacctcaagcgggaatgggagacgcttcataacttccccaaagtgtccatattgcctggtacgccattaagtcgggctgatttaagggctgtcaacatcaacctctgtgacatgtgcgttatcctgtcagccaatcagaataatattgatgatacttcgctgcaggacaaggaatgcatcttggcgtcactcaacatcaaatctatgcagtttgatgacagcatcggagtcttgcaggctaattcccaagggttcacacctccaggaatggatagatcctctccagataacagcccagtgcacgggatgttacgtcaaccatccatcacaactggggtcaacatccccatcatcactgaactagtgaacgatactaatgttcagtttttggaccaagacgatgatgatgaccctgatacagaactgtacctcacgcagccctttgcctgtgggacagcatttgccgtcagtgtcctggactcactcatgagcgcgacgtacttcaatgacaatatcctcaccctgatacggaccctggtgaccggaggagccacgccggagctggaggctctgattgctgaggaaaacgcccttagaggtggctacagcaccccgcagacactggccaatagggaccgctgccgcgtggcccagttagctctgctcgatgggccatttgcggacttaggggatggtggttgttatggtgatctgttctgcaaagctctgaaaacatataatatgctttgttttggaatttaccggctgagagatgctcacctcagcacccccagtcagtgcacaaagaggtatgtcatcaccaacccgccctatgagtttgagctcgtgccgacggacctgatcttctgcttaatgcagtttgaccacaatgccggccagtcccgggccagcctgtcccattcctcccactcgtcgcagtcctccagcaagaagagctcctctgttcactccatcccatccacagcaaaccgacagaaccggcccaagtccagggagtcccgggacaaacagaagtacgtgcaggaagagcggctttgatatgtgtatccaccgccactgtgtgaaactgtatctgccactcatttccccagttggtgtttccaacaaagtaactttccctgttttcccctgtagtccccccctttttttttacacatatttgcatatgtatgatagtgtgcatgtggttgtcatttttatttcaccaccataaaacccttgagcacaacagcaaa

SEQ ID NO: 10630 - DNA, 3664 bp, Homo sapiens
  source 1..3664: mol_type = unassigned DNA
cagtagcagcaatatggctgttgatgggtgtttggggtggcgctggcggcgggaggagctcccccgagcccctgcgccggctgcccgttgctagctatggcaaatggtggcggcggcggcggcggcagcagcggcggcggcggcggcggcggaggcagcagtcttagaatgagtagcaatatccacgcgaaccatctcagcctagacgcgtcctcctcctcctcctcctcctcttcctcttcttcttcttcctcctcctcttcctcctcgtcctcggtccacgagcccaagatggatgcgctcatcatcccggtgaccatggaggtgccgtgcgacagccggggccaacgcatgtggtgggctttcctggcctcctccatggtgactttcttcgggggcctcttcatcatcttgctctggcggacgctcaagtacctgtggaccgtgtgctgccactgcgggggcaagacgaaggaggcccagaagattaacaatggctcaagccaggcggatggcactctcaaaccagtggatgaaaaagaggaggcagtggccgccgaggtcggctggatgacctccgtgaaggactgggcgggggtgatgatatccgcccagacactgactggcagagtcctggttgtcttagtctttgctctcagcatcggtgcacttgtaatatacttcatagattcatcaaacccaatagaatcctgccagaatttctacaaagatttcacattacagatcgacatggctttcaacgtgttcttccttctctacttcggcttgcggtttattgcagccaacgataaattgtggttctggctggaagtgaactctgtagtggatttcttcacggtgccccccgtgtttgtgtctgtgtacttaaacagaagttggcttggtttgagatttttaagagctctgagactgatacagttttcagaaattttgcagtttctgaatattcttaaaacaagtaattccatcaagctggtgaatctgctctccatatttatcagcacgtggctgactgcagccgggttcatccatttggtggagaattcaggggacccatgggaaaatttccaaaacaaccaggctctcacctactgggaatgtgtctatttactcatggtcacaatgtccaccgttggttatggggatgtttatgcaaaaaccacacttgggcgcctcttcatggtcttcttcatcctcgggggactggcaatgtttgcccgctacgtgcccgaaattgctgctctcatcctgagtcggaataaattcggcgggacttttaacaaacatggaggcagaaagcacattgtggtctgcggacacatcactctggagagtgtttccaacttcctgaaggactttctgcacaaggaccgggatgacgtcaatgtggagatcgtttttcttcacaacatctcccccaacctggagcttgaagctctgttcaaacgacattttactcaggtggaattttatcagggttccgtcctcaatccacatgatcttgcaagagtcaagatagagtcagcagatgcatgcctgatccttgccaacaagtactgcgctgacccggatgcggaggatgcctcgaatatcatgagagtaatctccataaagaactaccatccgaagataagaatcatcactcaaatgctgcagtatcacaacaaggcccatctgctaaacatcccgagctggaattggaaagaaggtgatgacgcaatctgcctcgcagagttgaagttgggcttcatagcccagagctgcctggctcaaggcctctccaccatgcttgccaacctcttctccatgaggtcattcataaagattgaggaagacacatggcagaaatactacttggaaggagtctcaaatgaaatgtacacagaatatctctccagtgccttcgtgggtctgtccttccctactgtttgtgagctgtgttttgtgaagctcaagctcctaatgatagccattgagtacaagtctgccaaccgagagagccgtatattaattaatcctggaaaccatcttaagatccaagaaggtactttaggatttttcatcgcaagtgatgccaaagaagttaaaagggcatttttttactgcaaggcctgtcatgatgacatcacagatcccaaaagaataaaaaaatgtggctgcaaacggcttgaagatgagcagccgtcaacactatcaccaaaaaaaaagcaacggaatggaggcatgcggaactcacccaacacctcgcctaagctgatgaggcatgaccccttgttaattcctggcaatgatcagattgacaacatggactccaatgtgaagaagtacgactctactgggatgtttcactggtgtgcacccaaggagatagagaaagtcatcctgactcgaagtgaagctgccatgaccgtcctgagtggccatgtcgtggtctgcatctttggcgacgtcagctcagccctgatcggcctccggaacctggtgatgccgctccgtgccagcaactttcattaccatgagctcaagcacattgtgtttgtgggctctattgagtacctcaagcgggaatgggagacgcttcataacttccccaaagtgtccatattgcctggtacgccattaagtcgggctgatttaagggctgtcaacatcaacctctgtgacatgtgcgttatcctgtcagccaatcagaataatattgatgatacttcgctgcaggacaaggaatgcatcttggcgtcactcaacatcaaatctatgcagtttgatgacagcatcggagtcttgcaggctaattcccaagggttcacacctccaggaatggatagatcctctccagataacagcccagtgcacgggatgttacgtcaaccatccatcacaactggggtcaacatccccatcatcactgaactagtgaacgatactaatgttcagtttttggaccaagacgatgatgatgaccctgatacagaactgtacctcacgcagccctttgcctgtgggacagcatttgccgtcagtgtcctggactcactcatgagcgcgacgtacttcaatgacaatatcctcaccctgatacggaccctggtgaccggaggagccacgccggagctggaggctctgattgctgaggaaaacgcccttagaggtggctacagcaccccgcagacactggccaatagggaccgctgccgcgtggcccagttagctctgctcgatgggccatttgcggacttaggggatggtggttgttatggtgatctgttctgcaaagctctgaaaacatataatatgctttgttttggaatttaccggctgagagatgctcacctcagcacccccagtcagtgcacaaagaggtatgtcatcaccaacccgccctatgagtttgagctcgtgccgacggacctgatcttctgcttaatgcagtttgaccacaatgccggccagtcccgggccagcctgtcccattcctcccactcgtcgcagtcctccagcaagaagagctcctctgttcactccatcccatccacagcaaaccgacagaaccggcccaagtccagggagtcccgggacaaacagaagtacgtgcaggaagagcggctttgatatgtgtatccaccgccactgtgtgaaactg

SEQ ID NO: 10631 - DNA, 3660 bp, Homo sapiens
  source 1..3660: mol_type = unassigned DNA
atggcaaatggtggcggcggcggcggcggcagcagcggcggcggcggcggcggcggaggcagcagtcttagaatgagtagcaatatccacgcgaaccatctcagcctagacgcgtcctcctcctcctcctcctcctcttcctcttcttcttcttcctcctcctcttcctcctcgtcctcggtccacgagcccaagatggatgcgctcatcatcccggtgaccatggaggtgccgtgcgacagccggggccaacgcatgtggtgggctttcctggcctcctccatggtgactttcttcgggggcctcttcatcatcttgctctggcggacgctcaagtacctgtggaccgtgtgctgccactgcgggggcaagacgaaggaggcccagaagattaacaatggctcaagccaggcggatggcactctcaaaccagtggatgaaaaagaggaggcagtggccgccgaggtcggctggatgacctccgtgaaggactgggcgggggtgatgatatccgcccagacactgactggcagagtcctggttgtcttagtctttgctctcagcatcggtgcacttgtaatatacttcatagattcatcaaacccaatagaatcctgccagaatttctacaaagatttcacattacagatcgacatggctttcaacgtgttcttccttctctacttcggcttgcggtttattgcagccaacgataaattgtggttctggctggaagtgaactctgtagtggatttcttcacggtgccccccgtgtttgtgtctgtgtacttaaacagaagttggcttggtttgagatttttaagagctctgagactgatacagttttcagaaattttgcagtttctgaatattcttaaaacaagtaattccatcaagctggtgaatctgctctccatatttatcagcacgtggctgactgcagccgggttcatccatttggtggagaattcaggggacccatgggaaaatttccaaaacaaccaggctctcacctactgggaatgtgtctatttactcatggtcacaatgtccaccgttggttatggggatgtttatgcaaaaaccacacttgggcgcctcttcatggtcttcttcatcctcgggggactggccatgtttgccagctacgtccctgaaatcatagagttaataggaaaccgcaagaaatacgggggctcctatagtgcggttagtggaagaaagcacattgtggtctgcggacacatcactctggagagtgtttccaacttcctgaaggactttctgcacaaggaccgggatgacgtcaatgtggagatcgtttttcttcacaacatctcccccaacctggagcttgaagctctgttcaaacgacattttactcaggtggaattttatcagggttccgtcctcaatccacatgatcttgcaagagtcaagatagagtcagcagatgcatgcctgatccttgccaacaagtactgcgctgacccggatgcggaggatgcctcgaatatcatgagagtaatctccataaagaactaccatccgaagataagaatcatcactcaaatgctgcagtatcacaacaaggcccatctgctaaacatcccgagctggaattggaaagaaggtgatgacgcaatctgcctcgcagagttgaagttgggcttcatagcccagagctgcctggctcaaggcctctccaccatgcttgccaacctcttctccatgaggtcattcataaagattgaggaagacacatggcagaaatactacttggaaggagtctcaaatgaaatgtacacagaatatctctccagtgccttcgtgggtctgtccttccctactgtttgtgagctgtgttttgtgaagctcaagctcctaatgatagccattgagtacaagtctgccaaccgagagagccgtatattaattaatcctggaaaccatcttaagatccaagaaggtactttaggatttttcatcgcaagtgatgccaaagaagttaaaagggcatttttttactgcaaggcctgtcatgatgacatcacagatcccaaaagaataaaaaaatgtggctgcaaacggcttgaagatgagcagccgtcaacactatcaccaaaaaaaaagcaacggaatggaggcatgcggaactcacccaacacctcgcctaagctgatgaggcatgaccccttgttaattcctggcaatgatcagattgacaacatggactccaatgtgaagaagtacgactctactgggatgtttcactggtgtgcacccaaggagatagagaaagtcatcctggtcacaggctggatgccgtatctgggacctagggttttaatgacttgcctggatattggtgtagtatgcatgccaactgatattcaatcaacatctcctgccagcataaaaaagtttaaggagactcgaagtgaagctgccatgaccgtcctgagtggccatgtcgtggtctgcatctttggcgacgtcagctcagccctgatcggcctccggaacctggtgatgccgctccgtgccagcaactttcattaccatgagctcaagcacattgtgtttgtgggctctattgagtacctcaagcgggaatgggagacgcttcataacttccccaaagtgtccatattgcctggtacgccattaagtcgggctgatttaagggctgtcaacatcaacctctgtgacatgtgcgttatcctgtcagccaatcagaataatattgatgatacttcgctgcaggacaaggaatgcatcttggcgtcactcaacatcaaatctatgcagtttgatgacagcatcggagtcttgcaggctaattcccaagggttcacacctccaggaatggatagatcctctccagataacagcccagtgcacgggatgttacgtcaaccatccatcacaactggggtcaacatccccatcatcactgaactagtgaacgatactaatgttcagtttttggaccaagacgatgatgatgaccctgatacagaactgtacctcacgcagccctttgcctgtgggacagcatttgccgtcagtgtcctggactcactcatgagcgcgacgtacttcaatgacaatatcctcaccctgatacggaccctggtgaccggaggagccacgccggagctggaggctctgattgctgaggaaaacgcccttagaggtggctacagcaccccgcagacactggccaatagggaccgctgccgcgtggcccagttagctctgctcgatgggccatttgcggacttaggggatggtggttgttatggtgatctgttctgcaaagctctgaaaacatataatatgctttgttttggaatttaccggctgagagatgctcacctcagcacccccagtcagtgcacaaagaggtatgtcatcaccaacccgccctatgagtttgagctcgtgccgacggacctgatcttctgcttaatgcagtttgaccacaatgccggccagtcccgggccagcctgtcccattcctcccactcgtcgcagtcctccagcaagaagagctcctctgttcactccatcccatccacagcaaaccgacagaaccggcccaagtccagggagtcccgggacaaacagaagtacgtgcaggaagagcggctttga

SEQ ID NO: 10632 - DNA, 3723 bp, Homo sapiens
  source 1..3723: mol_type = unassigned DNA
atggcaaatggtggcggcggcggcggcggcagcagcggcggcggcggcggcggcggaggcagcagtcttagaatgagtagcaatatccacgcgaaccatctcagcctagacgcgtcctcctcctcctcctcctcctcttcctcttcttcttcttcctcctcctcttcctcctcgtcctcggtccacgagcccaagatggatgcgctcatcatcccggtgaccatggaggtgccgtgcgacagccggggccaacgcatgtggtgggctttcctggcctcctccatggtgactttcttcgggggcctcttcatcatcttgctctggcggacgctcaagtacctgtggaccgtgtgctgccactgcgggggcaagacgaaggaggcccagaagattaacaatggctcaagccaggcggatggcactctcaaaccagtggatgaaaaagaggaggcagtggccgccgaggtcggctggatgacctccgtgaaggactgggcgggggtgatgatatccgcccagacactgactggcagagtcctggttgtcttagtctttgctctcagcatcggtgcacttgtaatatacttcatagattcatcaaacccaatagaatcctgccagaatttctacaaagatttcacattacagatcgacatggctttcaacgtgttcttccttctctacttcggcttgcggtttattgcagccaacgataaattgtggttctggctggaagtgaactctgtagtggatttcttcacggtgccccccgtgtttgtgtctgtgtacttaaacagaagttggcttggtttgagatttttaagagctctgagactgatacagttttcagaaattttgcagtttctgaatattcttaaaacaagtaattccatcaagctggtgaatctgctctccatatttatcagcacgtggctgactgcagccgggttcatccatttggtggagaattcaggggacccatgggaaaatttccaaaacaaccaggctctcacctactgggaatgtgtctatttactcatggtcacaatgtccaccgttggttatggggatgtttatgcaaaaaccacacttgggcgcctcttcatggtcttcttcatcctcgggggactggccatgtttgccagctacgtccctgaaatcatagagttaataggaaaccgcaagaaatacgggggctcctatagtgcggttagtggaagaaagcacattgtggtctgcggacacatcactctggagagtgtttccaacttcctgaaggactttctgcacaaggaccgggatgacgtcaatgtggagatcgtttttcttcacaacatctcccccaacctggagcttgaagctctgttcaaacgacattttactcaggtggaattttatcagggttccgtcctcaatccacatgatcttgcaagagtcaagatagagtcagcagatgcatgcctgatccttgccaacaagtactgcgctgacccggatgcggaggatgcctcgaatatcatgagagtaatctccataaagaactaccatccgaagataagaatcatcactcaaatgctgcagtatcacaacaaggcccatctgctaaacatcccgagctggaattggaaagaaggtgatgacgcaatctgcctcgcagagttgaagttgggcttcatagcccagagctgcctggctcaaggcctctccaccatgcttgccaacctcttctccatgaggtcattcataaagattgaggaagacacatggcagaaatactacttggaaggagtctcaaatgaaatgtacacagaatatctctccagtgccttcgtgggtctgtccttccctactgtttgtgagctgtgttttgtgaagctcaagctcctaatgatagccattgagtacaagtctgccaaccgagagagccgaagccgaaagcgtatattaattaatcctggaaaccatcttaagatccaagaaggtactttaggatttttcatcgcaagtgatgccaaagaagttaaaagggcatttttttactgcaaggcctgtcatgatgacatcacagatcccaaaagaataaaaaaatgtggctgcaaacggcccaagatgtccatctacaagagaatgagacgggcatgttgttttgattgcggacgttctgagcgtgactgctcatgcatgtcaggccgtgtgcgtggtaacgtggacacccttgagagagccttcccactttcttctgtctctgttaatgattgctccaccagtttccgtgcctttgaagatgagcagccgtcaacactatcaccaaaaaaaaagcaacggaatggaggcatgcggaactcacccaacacctcgcctaagctgatgaggcatgaccccttgttaattcctggcaatgatcagattgacaacatggactccaatgtgaagaagtacgactctactgggatgtttcactggtgtgcacccaaggagatagagaaagtcatcctgactcgaagtgaagctgccatgaccgtcctgagtggccatgtcgtggtctgcatctttggcgacgtcagctcagccctgatcggcctccggaacctggtgatgccgctccgtgccagcaactttcattaccatgagctcaagcacattgtgtttgtgggctctattgagtacctcaagcgggaatgggagacgcttcataacttccccaaagtgtccatattgcctggtacgccattaagtcgggctgatttaagggctgtcaacatcaacctctgtgacatgtgcgttatcctgtcagccaatcagaataatattgatgatacttcgctgcaggacaaggaatgcatcttggcgtcactcaacatcaaatctatgcagtttgatgacagcatcggagtcttgcaggctaattcccaagggttcacacctccaggaatggatagatcctctccagataacagcccagtgcacgggatgttacgtcaaccatccatcacaactggggtcaacatccccatcatcactgaactagtgaacgatactaatgttcagtttttggaccaagacgatgatgatgaccctgatacagaactgtacctcacgcagccctttgcctgtgggacagcatttgccgtcagtgtcctggactcactcatgagcgcgacgtacttcaatgacaatatcctcaccctgatacggaccctggtgaccggaggagccacgccggagctggaggctctgattgctgaggaaaacgcccttagaggtggctacagcaccccgcagacactggccaatagggaccgctgccgcgtggcccagttagctctgctcgatgggccatttgcggacttaggggatggtggttgttatggtgatctgttctgcaaagctctgaaaacatataatatgctttgttttggaatttaccggctgagagatgctcacctcagcacccccagtcagtgcacaaagaggtatgtcatcaccaacccgccctatgagtttgagctcgtgccgacggacctgatcttctgcttaatgcagtttgaccacaatgccggccagtcccgggccagcctgtcccattcctcccactcgtcgcagtcctccagcaagaagagctcctctgttcactccatcccatccacagcaaaccgacagaaccggcccaagtccagggagtcccgggacaaacagaagtacgtgcaggaagagcggctttga

SEQ ID NO: 10633 - DNA, 3720 bp, Homo sapiens
  source 1..3720: mol_type = unassigned DNA
atggcaaatggtggcggcggcggcggcggcagcagcggcggcggcggcggcggcggaggcagcagtcttagaatgagtagcaatatccacgcgaaccatctcagcctagacgcgtcctcctcctcctcctcctcctcttcctcttcttcttcttcctcctcctcttcctcctcgtcctcggtccacgagcccaagatggatgcgctcatcatcccggtgaccatggaggtgccgtgcgacagccggggccaacgcatgtggtgggctttcctggcctcctccatggtgactttcttcgggggcctcttcatcatcttgctctggcggacgctcaagtacctgtggaccgtgtgctgccactgcgggggcaagacgaaggaggcccagaagattaacaatggctcaagccaggcggatggcactctcaaaccagtggatgaaaaagaggaggcagtggccgccgaggtcggctggatgacctccgtgaaggactgggcgggggtgatgatatccgcccagacactgactggcagagtcctggttgtcttagtctttgctctcagcatcggtgcacttgtaatatacttcatagattcatcaaacccaatagaatcctgccagaatttctacaaagatttcacattacagatcgacatggctttcaacgtgttcttccttctctacttcggcttgcggtttattgcagccaacgataaattgtggttctggctggaagtgaactctgtagtggatttcttcacggtgccccccgtgtttgtgtctgtgtacttaaacagaagttggcttggtttgagatttttaagagctctgagactgatacagttttcagaaattttgcagtttctgaatattcttaaaacaagtaattccatcaagctggtgaatctgctctccatatttatcagcacgtggctgactgcagccgggttcatccatttggtggagaattcaggggacccatgggaaaatttccaaaacaaccaggctctcacctactgggaatgtgtctatttactcatggtcacaatgtccaccgttggttatggggatgtttatgcaaaaaccacacttgggcgcctcttcatggtcttcttcatcctcgggggactggccatgtttgccagctacgtccctgaaatcatagagttaataggaaaccgcaagaaatacgggggctcctatagtgcggttagtggaagaaagcacattgtggtctgcggacacatcactctggagagtgtttccaacttcctgaaggactttctgcacaaggaccgggatgacgtcaatgtggagatcgtttttcttcacaacatctcccccaacctggagcttgaagctctgttcaaacgacattttactcaggtggaattttatcagggttccgtcctcaatccacatgatcttgcaagagtcaagatagagtcagcagatgcatgcctgatccttgccaacaagtactgcgctgacccggatgcggaggatgcctcgaatatcatgagagtaatctccataaagaactaccatccgaagataagaatcatcactcaaatgctgcagtatcacaacaaggcccatctgctaaacatcccgagctggaattggaaagaaggtgatgacgcaatctgcctcgcagagttgaagttgggcttcatagcccagagctgcctggctcaaggcctctccaccatgcttgccaacctcttctccatgaggtcattcataaagattgaggaagacacatggcagaaatactacttggaaggagtctcaaatgaaatgtacacagaatatctctccagtgccttcgtgggtctgtccttccctactgtttgtgagctgtgttttgtgaagctcaagctcctaatgatagccattgagtacaagtctgccaaccgagagagccgtatattaattaatcctggaaaccatcttaagatccaagaaggtactttaggatttttcatcgcaagtgatgccaaagaagttaaaagggcatttttttactgcaaggcctgtcatgatgacatcacagatcccaaaagaataaaaaaatgtggctgcaaacggcgttgggaagaacattgttctttgtggagactggaaagcaagggaaatgtgagaagattaaactactgcaggggtcagcaaactttctctgtcaaagtcaaggttgcagctagatcacgctattccaaagatccatttgagttcaagaaggagactcccaattctcggcttgtgaccgagccagttgaagatgagcagccgtcaacactatcaccaaaaaaaaagcaacggaatggaggcatgcggaactcacccaacacctcgcctaagctgatgaggcatgaccccttgttaattcctggcaatgatcagattgacaacatggactccaatgtgaagaagtacgactctactgggatgtttcactggtgtgcacccaaggagatagagaaagtcatcctgactcgaagtgaagctgccatgaccgtcctgagtggccatgtcgtggtctgcatctttggcgacgtcagctcagccctgatcggcctccggaacctggtgatgccgctccgtgccagcaactttcattaccatgagctcaagcacattgtgtttgtgggctctattgagtacctcaagcgggaatgggagacgcttcataacttccccaaagtgtccatattgcctggtacgccattaagtcgggctgatttaagggctgtcaacatcaacctctgtgacatgtgcgttatcctgtcagccaatcagaataatattgatgatacttcgctgcaggacaaggaatgcatcttggcgtcactcaacatcaaatctatgcagtttgatgacagcatcggagtcttgcaggctaattcccaagggttcacacctccaggaatggatagatcctctccagataacagcccagtgcacgggatgttacgtcaaccatccatcacaactggggtcaacatccccatcatcactgaactagtgaacgatactaatgttcagtttttggaccaagacgatgatgatgaccctgatacagaactgtacctcacgcagccctttgcctgtgggacagcatttgccgtcagtgtcctggactcactcatgagcgcgacgtacttcaatgacaatatcctcaccctgatacggaccctggtgaccggaggagccacgccggagctggaggctctgattgctgaggaaaacgcccttagaggtggctacagcaccccgcagacactggccaatagggaccgctgccgcgtggcccagttagctctgctcgatgggccatttgcggacttaggggatggtggttgttatggtgatctgttctgcaaagctctgaaaacatataatatgctttgttttggaatttaccggctgagagatgctcacctcagcacccccagtcagtgcacaaagaggtatgtcatcaccaacccgccctatgagtttgagctcgtgccgacggacctgatcttctgcttaatgcagtttgaccacaatgccggccagtcccgggccagcctgtcccattcctcccactcgtcgcagtcctccagcaagaagagctcctctgttcactccatcccatccacagcaaaccgacagaaccggcccaagtccagggagtcccgggacaaacagaagtacgtgcaggaagagcggctttga

SEQ ID NO: 10634 - DNA, 2527 bp, Homo sapiens
  source 1..2527: mol_type = unassigned DNA
gatacagttttcagaaattttgcagtttctgaatattcttaaaacaagtaattccatcaagctggtgaatctgctctccatatttatcagcacgtggctgactgcagccgggttcatccatttggtggagaattcaggggacccatgggaaaatttccaaaacaaccaggctctcacctactgggaatgtgtctatttactcatggtcacaatgtccaccgttggttatggggatgtttatgcaaaaaccacacttgggcgcctcttcatggtcttcttcatcctcgggggactggccatgtttgccagctacgtccctgaaatcatagagttaataggaaaccgcaagaaatacgggggctcctatagtgcggttagtggaagaaagcacattgtggtctgcggacacatcactctggagagtgtttccaacttcctgaaggactttctgcacaaggaccgggatgacgtcaatgtggagatcgtttttcttcacaacatctcccccaacctggagcttgaagctctgttcaaacgacattttactcaggtggaattttatcagggttccgtcctcaatccacatgatcttgcaagagtcaagatagagtcagcagatgcatgcctgatccttgccaacaagtactgcgctgacccggatgcggaggatgcctcgaatatcatgagagtaatctccataaagaactaccatccgaagataagaatcatcactcaaatgctgcagtatcacaacaaggcccatctgctaaacatcccgagctggaattggaaagaaggtgatgacgcaatctgcctcgcagagttgaagttgggcttcatagcccagagctgcctggctcaaggcctctccaccatgcttgccaacctcttctccatgaggtcattcataaagattgaggaagacacatggcagaaatactacttggaaggagtctcaaatgaaatgtacacagaatatctctccagtgccttcgtgggtctgtccttccctactgtttgtgagctgtgttttgtgaagctcaagctcctaatgatagccattgagtacaagtctgccaaccgagagagccgaagccgaaagcgtatattaattaatcctggaaaccatcttaagatccaagaaggtactttaggatttttcatcgcaagtgatgccaaagaagttaaaagggcatttttttactgcaaggcctgtcatgatgacatcacagatcccaaaagaataaaaaaatgtggctgcaaacggctgatatattttgaagatgagcagccgtcaacactatcaccaaaaaaaaagcaacggaatggaggcatgcggaactcacccaacacctcgcctaagctgatgaggcatgaccccttgttaattcctggcaatgatcagattgacaacatggactccaatgtgaagaagtacgactctactgggatgtttcactggtgtgcacccaaggagatagagaaagtcatcctgactcgaagtgaagctgccatgaccgtcctgagtggccatgtcgtggtctgcatctttggcgacgtcagctcagccctgatcggcctccggaacctggtgatgccgctccgtgccagcaactttcattaccatgagctcaagcacattgtgtttgtgggctctattgagtacctcaagcgggaatgggagacgcttcataacttccccaaagtgtccatattgcctggtacgccattaagtcgggctgatttaagggctgtcaacatcaacctctgtgacatgtgcgttatcctgtcagccaatcagaataatattgatgatacttcgctgcaggacaaggaatgcatcttggcgtcactcaacatcaaatctatgcagtttgatgacagcatcggagtcttgcaggctaattcccaagggttcacacctccaggaatggatagatcctctccagataacagcccagtgcacgggatgttacgtcaaccatccatcacaactggggtcaacatccccatcatcactgaactagtgaacgatactaatgttcagtttttggaccaagacgatgatgatgaccctgatacagaactgtacctcacgcagccctttgcctgtgggacagcatttgccgtcagtgtcctggactcactcatgagcgcgacgtacttcaatgacaatatcctcaccctgatacggaccctggtgaccggaggagccacgccggagctggaggctctgattgctgaggaaaacgcccttagaggtggctacagcaccccgcagacactggccaatagggaccgctgccgcgtggcccagttagctctgctcgatgggccatttgcggacttaggggtatgtcatcaccaacccgccctatgagtttgagctcgtgccgacggacctgatcttctgcttaatgcagtttgaccacaatgccggccagtcccgggccagcctgtcccattcctcccactcgtcgcagtcctccagcaagaagagctcctctgttcactccatcccatccac

SEQ ID NO: 10635 - DNA, 3711 bp, Homo sapiens
  source 1..3711: mol_type = unassigned DNA
gcggcggcggcggcggcggcagcagtagcagcaatatggctgttgatgggtgtttggggtggcgctggcggcgggaggagctcccccgagcccctgcgccggctgcccgttgctagctatggcaaatggtggcggcggcggcggcggcagcagcggcggcggcggcggcggcggaggcagcagtcttagaatgagtagcaatatccacgcgaaccatctcagcctagacgcgtcctcctcctcctcctcctcctcttcctcttcttcttcttcctcctcctcttcctcctcgtcctcggtccacgagcccaagatggatgcgctcatcatcccggtgaccatggaggtgccgtgcgacagccggggccaacgcatgtggtgggctttcctggcctcctccatggtgactttcttcgggggcctcttcatcatcttgctctggcggacgctcaagtacctgtggaccgtgtgctgccactgcgggggcaagacgaaggggaggaaaccaagactccagggtggagtgattggctgtatgtttcacctgcagccacgcgaggcccagaagtcttccagtgctttggaggttcacaagaaatatggtgactcaactggaaccacattagaggaggcccagaagattaacaatggctcaagccaggcggatggcactctcaaaccagtggatgaaaaagaggaggcagtggccgccgaggtcggctggatgacctccgtgaaggactgggcgggggtgatgatatccgcccagacactgactggcagagtcctggttgtcttagtctttgctctcagcatcggtgcacttgtaatatacttcatagattcatcaaacccaatagaatcctgccagaatttctacaaagatttcacattacagatcgacatggctttcaacgtgttcttccttctctacttcggcttgcggtttattgcagccaacgataaattgtggttctggctggaagtgaactctgtagtggatttcttcacggtgccccccgtgtttgtgtctgtgtacttaaacagaagttggcttggtttgagatttttaagagctctgagactgatacagttttcagaaattttgcagtttctgaatattcttaaaacaagtaattccatcaagctggtgaatctgctctccatatttatcagcacgtggctgactgcagccgggttcatccatttggtggagaattcaggggacccatgggaaaatttccaaaacaaccaggctctcacctactgggaatgtgtctatttactcatggtcacaatgtccaccgttggttatggggatgtttatgcaaaaaccacacttgggcgcctcttcatggtcttcttcatcctcgggggactggccatgtttgccagctacgtccctgaaatcatagagttaataggaaaccgcaagaaatacgggggctcctatagtgcggttagtggaagaaagcacattgtggtctgcggacacatcactctggagagtgtttccaacttcctgaaggactttctgcacaaggaccgggatgacgtcaatgtggagatcgtttttcttcacaacatctcccccaacctggagcttgaagctctgttcaaacgacattttactcaggtggaattttatcagggttccgtcctcaatccacatgatcttgcaagagtcaagatagagtcagcagatgcatgcctgatccttgccaacaagtactgcgctgacccggatgcggaggatgcctcgaatatcatgagagtaatctccataaagaactaccatccgaagataagaatcatcactcaaatgctgcagtatcacaacaaggcccatctgctaaacatcccgagctggaattggaaagaaggtgatgacgcaatctgcctcgcagagttgaagttgggcttcatagcccagagctgcctggctcaaggcctctccaccatgcttgccaacctcttctccatgaggtcattcataaagattgaggaagacacatggcagaaatactacttggaaggagtctcaaatgaaatgtacacagaatatctctccagtgccttcgtgggtctgtccttccctactgtttgtgagctgtgttttgtgaagctcaagctcctaatgatagccattgagtacaagtctgccaaccgagagagccgtatattaattaatcctggaaaccatcttaagatccaagaaggtactttaggatttttcatcgcaagtgatgccaaagaagttaaaagggcatttttttactgcaaggcctgtcatgatgacatcacagatcccaaaagaataaaaaaatgtggctgcaaacggcttgaagatgagcagccgtcaacactatcaccaaaaaaaaagcaacggaatggaggcatgcggaactcacccaacacctcgcctaagctgatgaggcatgaccccttgttaattcctggcaatgatcagattgacaacatggactccaatgtgaagaagtacgactctactgggatgtttcactggtgtgcacccaaggagatagagaaagtcatcctgactcgaagtgaagctgccatgaccgtcctgagtggccatgtcgtggtctgcatctttggcgacgtcagctcagccctgatcggcctccggaacctggtgatgccgctccgtgccagcaactttcattaccatgagctcaagcacattgtgtttgtgggctctattgagtacctcaagcgggaatgggagacgcttcataacttccccaaagtgtccatattgcctggtacgccattaagtcgggctgatttaagggctgtcaacatcaacctctgtgacatgtgcgttatcctgtcagccaatcagaataatattgatgatacttcgctgcaggacaaggaatgcatcttggcgtcactcaacatcaaatctatgcagtttgatgacagcatcggagtcttgcaggctaattcccaagggttcacacctccaggaatggatagatcctctccagataacagcccagtgcacgggatgttacgtcaaccatccatcacaactggggtcaacatccccatcatcactgaactagtgaacgatactaatgttcagtttttggaccaagacgatgatgatgaccctgatacagaactgtacctcacgcagccctttgcctgtgggacagcatttgccgtcagtgtcctggactcactcatgagcgcgacgtacttcaatgacaatatcctcaccctgatacggaccctggtgaccggaggagccacgccggagctggaggctctgattgctgaggaaaacgcccttagaggtggctacagcaccccgcagacactggccaatagggaccgctgccgcgtggcccagttagctctgctcgatgggccatttgcggacttaggggatggtggttgttatggtgatctgttctgcaaagctctgaaaacatataatatgctttgttttggaatttaccggctgagagatgctcacctcagcacccccagtcagtgcacaaagaggtatgtcatcaccaacccgccctatgagtttgagctcgtgccgacggacctgatcttctgcttaatgcagtttgaccacaatgccggccagtcccgggccagcctgtcccattcctcccactcgtcgcagtcctccagcaagaagagctcctctgttcactccatcccatccac

SEQ ID NO: 10636 - DNA, 2890 bp, Homo sapiens
  source 1..2890: mol_type = unassigned DNA
ggcccagaagattaacaatggctcaagccaggcggatggcactctcaaaccagtggatgaaaaagaggaggcagtggccgccgaggtcggctggatgacctccgtgaaggactgggcgggggtgatgatatccgcccagacactgactggcagagtcctggttgtcttagtctttgctctcagcatcggtgcacttgtaatatacttcatagattcatcaaacccaatagaatcctgccagaatttctacaaagatttcacattacagatcgacatggctttcaacgtgttcttccttctctacttcggcttgcggtttattgcagccaacgataaattgtggttctggctggaagtgaactctgtagtggatttcttcacggtgccccccgtgtttgtgtctgtgtacttaaacagaagttggcttggtttgagatttttaagagctctgagactgatacagttttcagaaattttgcagtttctgaatattcttaaaacaagtaattccatcaagctggtgaatctgctctccatatttatcagcacgtggctgactgcagccgggttcatccatttggtggagaattcaggggacccatgggaaaatttccaaaacaaccaggctctcacctactgggaatgtgtctatttactcatggtcacaatgtccaccgttggttatggggatgtttatgcaaaaaccacacttgggcgcctcttcatggtcttcttcatcctcgggggactggccatgtttgccagctacgtccctgaaatcatagagttaataggaaaccgcaagaaatacgggggctcctatagtgcggttagtggaagaaagcacattgtggtctgcggacacatcactctggagagtgtttccaacttcctgaaggactttctgcacaaggaccgggatgacgtcaatgtggagatcgtttttcttcacaaagtaatctccataaagaactaccatccgaagataagaatcatcactcaaatgctgcagtatcacaacaaggcccatctgctaaacatcccgagctggaattggaaagaaggtgatgacgcaatctgcctcgcagagttgaagttgggcttcatagcccagagctgcctggctcaaggcctctccaccatgcttgccaacctcttctccatgaggtcattcataaagattgaggaagacacatggcagaaatactacttggaaggagtctcaaatgaaatgtacacagaatatctctccagtgccttcgtgggtctgtccttccctactgtttgtgagctgtgttttgtgaagctcaagctcctaatgatagccattgagtacaagtctgccaaccgagagagccgtatattaattaatcctggaaaccatcttaagatccaagaaggtactttaggatttttcatcgcaagtgatgccaaagaagttaaaagggcatttttttactgcaaggcctgtcatgatgacatcacagatcccaaaagaataaaaaaatgtggctgcaaacggcttgaagatgagcagccgtcaacactatcaccaaaaaaaaagcaacggaatggaggcatgcggaactcacccaacacctcgcctaagctgatgaggcatgaccccttgttaattcctggcaatgatcagattgacaacatggactccaatgtgaagaagtacgactctactgggatgtttcactggtgtgcacccaaggagatagagaaagtcatcctgactcgaagtgaagctgccatgaccgtcctgagtggccatgtcgtggtctgcatctttggcgacgtcagctcagccctgatcggcctccggaacctggtgatgccgctccgtgccagcaactttcattaccatgagctcaagcacattgtgtttgtgggctctattgagtacctcaagcgggaatgggagacgcttcataacttccccaaagtgtccatattgcctggtacgccattaagtcgggctgatttaagggctgtcaacatcaacctctgtgacatgtgcgttatcctgtcagccaatcagaataatattgatgatacttcgctgcaggacaaggaatgcatcttggcgtcactcaacatcaaatctatgcagtttgatgacagcatcggagtcttgcaggctaattcccaagggttcacacctccaggaatggatagatcctctccagataacagcccagtgcacgggatgttacgtcaaccatccatcacaactggggtcaacatccccatcatcactgaactagtgaacgatactaatgttcagtttttggaccaagacgatgatgatgaccctgatacagaactgtacctcacgcagccctttgcctgtgggacagcatttgccgtcagtgtcctggactcactcatgagcgcgacgtacttcaatgacaatatcctcaccctgatacggaccctggtgaccggaggagccacgccggagctggaggctctgattgctgaggaaaacgcccttagaggtggctacagcaccccgcagacactggccaatagggaccgctgccgcgtggcccagttagctctgctcgatgggccatttgcggacttaggggatggtggttgttatggtgatctgttctgcaaagctctgaaaacatataatatgctttgttttggaatttaccggctgagagatgctcacctcagcacccccagtcagtgcacaaagaggtatgtcatcaccaacccgccctatgagtttgagctcgtgccgacggacctgatcttctgcttaatgcagtttgaccacaatgccggccagtcccgggccagcctgtcccattcctcccactcgtcgcagtcctccagcaagaagagctcctctgttcactccatcccatcc

SEQ ID NO: 10637 - DNA, 3481 bp, Homo sapiens
  source 1..3481: mol_type = unassigned DNA
gagtagcaatatccacgcgaaccatctcagcctagacgcgtcctcctcctcctcctcctcctcttcctcttcttcttcttcctcctcctcttcctcctcgtcctcggtccacgagcccaagatggatgcgctcatcatcccggtgaccatggaggtgccgtgcgacagccggggccaacgcatgtggtgggctttcctggcctcctccatggtgactttcttcgggggcctcttcatcatcttgctctggcggacgctcaagtacctgtggaccgtgtgctgccactgcgggggcaagacgaaggaggcccagaagattaacaatggctcaagccaggcggatggcactctcaaaccagtggatgaaaaagaggaggcagtggccgccgaggtcggctggatgacctccgtgaaggactgggcgggggtgatgatatccgcccagacactgactggcagagtcctggttgtcttagtctttgctctcagcatcggtgcacttgtaatatacttcatagattcatcaaacccaatagaatcctgccagaatttctacaaagatttcacattacagatcgacatggctttcaacgtgttcttccttctctacttcggcttgcggtttattgcagccaacgataaattgtggttctggctggaagtgaactctgtagtggatttcttcacggtgccccccgtgtttgtgtctgtgtacttaaacagaagttggcttggtttgagatttttaagagctctgagactgatacagttttcagaaattttgcagtttctgaatattcttaaaacaagtaattccatcaagctggtgaatctgctctccatatttatcagcacgtggctgactgcagccgggttcatccatttggtggagaattcaggggacccatgggaaaatttccaaaacaaccaggctctcacctactgggaatgtgtctatttactcatggtcacaatgtccaccgttggttatggggatgtttatgcaaaaaccacacttgggcgcctcttcatggtcttcttcatcctcgggggactggccatgtttgccagctacgtccctgaaatcatagagttaataggaaaccgcaagaaatacgggggctcctatagtgcggttagtggaagaaagcacattgtggtctgcggacacatcactctggagagtgtttccaacttcctgaaggactttctgcacaaggaccgggatgacgtcaatgtggagatcgtttttcttcacaacatctcccccaacctggagcttgaagctctgttcaaacgacattttactcaggtggaattttatcagggttccgtcctcaatccacatgatcttgcaagagtcaagatagagtcagcagatgcatgcctgatccttgccaacaagtactgcgctgacccggatgcggaggatgcctcgaatatcatgagagtaatctccataaagaactaccatccgaagataagaatcatcactcaaatgctgcagtatcacaacaaggcccatctgctaaacatcccgagctggaattggaaagaaggtgatgacgcaatctgcctcgcagagttgaagttgggcttcatagcccagagctgcctggctcaaggcctctccaccatgcttgccaacctcttctccatgaggtcattcataaagattgaggaagacacatggcagaaatactacttggaaggagtctcaaatgaaatgtacacagaatatctctccagtgccttcgtgggtctgtccttccctactgtttgtgagctgtgttttgtgaagctcaagctcctaatgatagccattgagtacaagtctgccaaccgagagagccgtatattaattaatcctggaaaccatcttaagatccaagaaggtactttaggatttttcatcgcaagtgatgccaaagaagttaaaagggcatttttttactgcaaggcctgtcatgatgacatcacagatcccaaaagaataaaaaaatgtggctgcaaacggctgatatatttcaaggttgcagctagatcacgctattccaaagatccatttgagttcaagaaggagactcccaattctcggcttgtgaccgagccagttgaagatgagcagccgtcaacactatcaccaaaaaaaaagcaacggaatggaggcatgcggaactcacccaacacctcgcctaagctgatgaggcatgaccccttgttaattcctggcaatgatcagattgacaacatggactccaatgtgaagaagtacgactctactgggatgtttcactggtgtgcacccaaggagatagagaaagtcatcctgactcgaagtgaagctgccatgaccgtcctgagtggccatgtcgtggtctgcatctttggcgacgtcagctcagccctgatcggcctccggaacctggtgatgccgctccgtgccagcaactttcattaccatgagctcaagcacattgtgtttgtgggctctattgagtacctcaagcgggaatgggagacgcttcataacttccccaaagtgtccatattgcctggtacgccattaagtcgggctgatttaagggctgtcaacatcaacctctgtgacatgtgcgttatcctgtcagccaatcagaataatattgatgatacttcgctgcaggacaaggaatgcatcttggcgtcactcaacatcaaatctatgcagtttgatgacagcatcggagtcttgcaggctaattcccaagggttcacacctccaggaatggatagatcctctccagataacagcccagtgcacgggatgttacgtcaaccatccatcacaactggggtcaacatccccatcatcactgaactagtgaacgatactaatgttcagtttttggaccaagacgatgatgatgaccctgatacagaactgtacctcacgcagccctttgcctgtgggacagcatttgccgtcagtgtcctggactcactcatgagcgcgacgtacttcaatgacaatatcctcaccctgatacggaccctggtgaccggaggagccacgccggagctggaggctctgattgctgaggaaaacgcccttagaggtggctacagcaccccgcagacactggccaatagggaccgctgccgcgtggcccagttagctctgctcgatgggccatttgcggacttaggggatggtggttgttatggtgatctgttctgcaaagctctgaaaacatataatatgctttgttttggaatttaccggctgagagatgctcacctcagcacccccagtcagtgcacaaagaggtatgtcatcaccaacccgccctatgagtttgagctcgtgccgacggacctgatcttctgcttaatgcagtttgaccacaatgccggccagtcccgggccagcctgtcccattcctcccactcgtcgcagtcctccagcaagaagagctcctctgttcactccatcccatcc

SEQ ID NO: 10638 - DNA, 2312 bp, Homo sapiens
  source 1..2312: mol_type = unassigned DNA
caggctaatacatctgcaaagcttattagtgggtgtctttgggcaagagcagtagagtgtgctgtggtgtttctaagtgaagcttcacattgcttagcaatctgtgtggtttagacatttggaaaacagcttttggtttccaatcccctgtgctgccctccatccctgccccgctgctgcatcatcagagatttcattcaatggcaacctcctccttcattccggggctctcctccaacctcaccagccccggtgctcctgtcttcatgggttgaaaaaggaccccgttggcacagccccacaagccctccctcctggcagttggagggataagagctgagttgggctggggattattgagccagcatgcaccaatgtgccccgatctgattgaaacattggctgtcaaggccttgaatccttgcctcttttcaacgctctttctctggtatgcaggggttaggaaccagctaagttggttcatctggagaagcagcaggctggcagttatgctgacatttcaaatacaactttatttctgattttggttacaacaaaacgcagtctattactgggcaaagcaaagtaaccaaaattaactctaagaataatgataagtattttttttggtatacagataaatcatgatttcttttttttttttttttttcttatggcagggtgtttacaaactgttttagtctgtttaaagtgtatgttcaaaggctggagtgtaaagaggtgttgccttcaccttctctaagccggcctctttgactaacacatttggtctttgtcattgggtcctaaaagacagccatgaattcctagtgagtgactgagccttgagtgtgtgtcctttgatattttgcctgtattgcacagtctgccctcaaactgttcataatctcatgagctgcctgtatttccagttgaagatgagcagccgtcaacactatcaccaaaaaaaaagcaacggaatggaggcatgcggaactcacccaacacctcgcctaagctgatgaggcatgaccccttgttaattcctggcaatgatcagattgacaacatggactccaatgtgaagaagtacgactctactgggatgtttcactggtgtgcacccaaggagatagagaaagtcatcctgactcgaagtgaagctgccatgaccgtcctgagtggccatgtcgtggtctgcatctttggcgacgtcagctcagccctgatcggcctccggaacctggtgatgccgctccgtgccagcaactttcattaccatgagctcaagcacattgtgtttgtgggctctattgagtacctcaagcgggaatgggagacgcttcataacttccccaaagtgtccatattgcctggtacgccattaagtcgggctgatttaagggctgtcaacatcaacctctgtgacatgtgcgttatcctgtcagccaatcagaataatattgatgatacttcgctgcaggacaaggaatgcatcttggcgtcactcaacatcaaatctatgcagtttgatgacagcatcggagtcttgcaggctaattcccaagggttcacacctccaggaatggatagatcctctccagataacagcccagtgcacgggatgttacgtcaaccatccatcacaactggggtcaacatccccatcatcactgaactagctaaaccgggcaagttgcctttggtatcagtcaatcaggaaaaaaacagtgggacgcacattctaatgataactgaactggtgaacgatactaatgttcagtttttggaccaagacgatgatgatgaccctgatacagaactgtacctcacgcagccctttgcctgtgggacagcatttgccgtcagtgtcctggactcactcatgagcgcgacgtacttcaatgacaatatcctcaccctgatacggaccctggtgaccggaggagccacgccggagctggaggctctgattgctgaggaaaacgcccttagaggtggctacagcaccccgcagacactggccaatagggaccgctgccgcgtggcccagttagctctgctcgatgggccatttgcggacttaggggatggtggttgttatggtgatctgttctgcaaagctctgaaaacatataatatgctttgttttggaatttaccggctgagagatgctcacctcagcacccccagtcagtgcacaaagaggtatgtcatcaccaacccgccctatgagtttgagctcgtgccgacggacctgatcttctgcttaatgcagtttgaccacaatgccggccagtcccgggccagcc

SEQ ID NO: 10639 - DNA, 1515 bp, Homo sapiens
  source 1..1515: mol_type = unassigned DNA
gaagttaaaagggcatttttttactgcaaggcctgtcatgatgacatcacagatcccaaaagaataaaaaaatgtggctgcaaacggctgatatattttgaagatgagcagccgtcaacactatcaccaaaaaaaaagcaacggaatggaggcatgcggaactcacccaacacctcgcctaagctgatgaggcatgaccccttgttaattcctggcaatgatcagattgacaacatggactccaatgtgaagaagtacgactctactgggatgtttcactggtgtgcacccaaggagatagagaaagtcatcctgactcgaagtgaagctgccatgaccgtcctgagtggccatgtcgtggtctgcatctttggcgacgtcagctcagccctgatcggcctccggaacctggtgatgccgctccgtgccagcaactttcattaccatgagctcaagcacattgtgtttgtgggctctattgagtacctcaagcgggaatgggagacgcttcataacttccccaaagtgtccatattgcctggtacgccattaagtcgggctgatttaagggctgtcaacatcaacctctgtgacatgtgcgttatcctgtcagccaatcagaataatattgatgatacttcgctgcaggacaaggaatgcatcttggcgtcactcaacatcaaatctatgcagtttgatgacagcatcggagtcttgcaggctaattcccaagggttcacacctccaggaatggatagatcctctccagataacagcccagtgcacgggatgttacgtcaaccatccatcacaactggggtcaacatccccatcatcactgaactagtgaacgatactaatgttcagtttttggaccaagacgatgatgatgaccctgatacagaactgtacctcacgcagccctttgcctgtgggacagcatttgccgtcagtgtcctggactcactcatgagcgcgattctgctgccccacagctctgctcctggatgcctgcatggaaaaatcaaggagagccatcatctgggatgcagtgccagctcagagagcagacaattatgctcagagatatgagtggtcccagagttgttcagacacctgtgaaaccctgggactgactatgaaattgtacctgttgatgagcaattctaaaagtcatgcactctttgactttcacacaatttcaggctaaaccaaggcccaacgattagtaggtgctcaataaatgtcagtgactgatcaaaaagatttgggtataactgatttcaacacagaagtgggaacatgttagggtcaaatcccaaagatttgacaaaacaataacctcccagcctgaccttctagatttatcattgcaatggataacctatagtgccctttgtttaaaaaaaattgactgtgtttttattagaacagttattcatacttcttgatgaaaatttggaaagcacagaaacatataaaagaagacatataaagaagaaacatataaaaata

SEQ ID NO: 10640 - DNA, 580 bp, Homo sapiens
  source 1..580: mol_type = unassigned DNA
atatcttcatgtggcttccgcagcatgaaggcaagtgaaaatgccatagatggaggtgtattgtaattagccaaaatgtaggttaaataagagcttgtaaatttgcatcgtcatgaggtagtggcccactacttcaacacgtttgtctttcatgaaattgaagatgagcagccgtcaacactatcaccaaaaaaaaagcaacggaatggaggcatgcggaactcacccaacacctcgcctaagctgatgaggcatgaccccttgttaattcctggcaatgatcagattgacaacatggactccaatgtgaagaagtacgactctactgggatgtttcactggtgtgcacccaaggagatagagaaagtcatcctgactcgaagtgaagctgccatgaccgtcctgagtggccatgtcgtggtctgcatctttggcgacgtcagctcagccctgatcggcctccggaacctggtgatgccgctccgtgccagcaactttcattaccatgagctcaagcacattgtgtttgtgggctctattgagtacctcaagcgggaatgggagacgcttcataacttcc

SEQ ID NO: 10641 - DNA, 681 bp, Homo sapiens
  source 1..681: mol_type = unassigned DNA
agtcttcaattttgtctggtatctgagccctgcctctggaatcaagtcctgcctcctacctcagtcccatggagtaatctccataaagaactaccatccgaagataagaatcatcactcaaatgctgcagtatcacaacaaggcccatctgctaaacatcccgagctggaattggaaagaaggtgatgacgcaatctgcctcgcagagttgaagttgggcttcatagcccagagctgcctggctcaaggcctctccaccatgcttgccaacctcttctccatgaggtcattcataaagattgaggaagacacatggcagaaatactacttggaaggagtctcaaatgaaatgtacacagaatatctctccagtgccttcgtgggtctgtccttccctactgtttgtgagctgtgttttgtgaagctcaagctcctaatgatagccattgagtacaagtctgccaaccgagagagccgtatattaattaatcctggaaaccatcttaagatccaagaaggtactttaggatttttcatcgcaagtgatgccaaagaagttaaaagggcatttttttactgcaaggcctgtcatgatgacatcacagatcccaaaagaataaaaaaatgtggctgcaaacggcttgaagatgagcagccgtcaacactatcaccaaaaaaaaa

SEQ ID NO: 10642 - DNA, 1643 bp, Homo sapiens
  source 1..1643: mol_type = unassigned DNA
gcctttctgatgtggctgcgtgcatccagtgcccagagcatgccggggttcttgcaagagggactggagggtgagggaggagagagtgtctattggctccaccaggacatagatgctggtgacccacactgcgctggacaggaggacctgtttgcagcacgggtcagaggaacacaggctcctccaggtctttccagagcattgactcctgcaagaagtgaatggaagggagccgaaagcctagcccatctccctccttctaccatgatccccagtaagattctggtgtaccgccacccatccagcagaaccggcacagagctttacagacccggcaggcgccgcaagaagtccctgggggacctgttccataatggctaccgggtgaagtctgggcctgctgctccggagaaggaggaaccgccgaacttccggcagtcattggtgtcttgctgtggtgtttgtgcatcctggggtttgagatttttaagagctctgagactgatacagttttcagaaattttgcagtttctgaatattcttaaaacaagtaattccatcaagctggtgaatctgctctccatatttatcagcacgtggctgactgcagccgggttcatccatttggtggagaattcaggggacccatgggaaaatttccaaaacaaccaggctctcacctactgggaatgtgtctatttactcatggtcacaatgtccaccgttggttatggggatgtttatgcaaaaaccacacttgggcgcctcttcatggtcttcttcatcctcgggggactggccatgtttgccagctacgtccctgaaatcatagagttaataggaaaccgcaagaaatacgggggctcctatagtgcggttagtggaagaaagcacattgtggtctgcggacacatcactctggagagtgtttccaacttcctgaaggactttctgcacaaggaccgggatgacgtcaatgtggagatcgtttttcttcacaacatctcccccaacctggagcttgaagctctgttcaaacgacattttactcaggtggaattttatcagggttccgtcctcaatccacatgatcttgcaagagtcaagatagagtcagcagatgcatgcctgatccttgccaacaagtactgcgctgacccggatgcggaggatgcctcgaatatcatgagagtaatctccataaagaactaccatccgaagataagaatcatcactcaaatgctgcagtatcacaacaagattgaggaagacacatggcagaaatactacttggaaggagtctcaaatgaaatgtacacagaatatctctccagtgccttcgtgggtctgtccttccctactgtttgtgagctgtgttttgtgaagctcaagctcctaatgatagccattgagtacaagtctgccaaccgagagagccgtatattaattaatcctggaaaccatcttaagatccaagaaggtactttaggatttttcatcgcaagtgatgccaaagaagttaaaagggcatttttttactgcaaggcctgtcatgatgacatcacagatcccaaaagaataaaaaaatgtggctgcaaacggctgatatattttgaagatgagcagccgtcaacactatcacc

SEQ ID NO: 10643 - DNA, 709 bp, Homo sapiens
  source 1..709: mol_type = unassigned DNA
agaaggtactttaggatttttcatcgcaagtgatgccaaagaagttaaaagggcatttttttactgcaaggcctgtcatgatgacatcacagatcccaaaagaataaaaaaatgtggctgcaaacggctcaaggttgcagctagatcacgctattccaaagatccatttgagttcaagaaggagactcccaattctcggcttgtgaccgagccaggtgaaggaagactgggacccattcccatttttaataactaccctgcagccctcaacattctactttaccatgctgagctcagttgaagaagagcgatgcactactgtggatttcagcttgcacttagcttgttgggcagcaaaataccaaaagggaaaaccgtaaaaaacgattaataataattaaaacgacctcacccccaaactggcagcttgtgcaagacttcagtcggaagccctgttagctagatgcctttgtgttcaaaccactttgcatgactcttattctgagtgactccagtgtgaatatgacattactaatgacctgctaagtgtgtacagatgtgggtttctccagatgtggtgattaataacataatggagatagcggttgactcatgtttatgagttgtttgccttttattacgtttctgagtttatttgctttgaactgttttttaactccagccaataaactcacctttaaatcttaaa

SEQ ID NO: 10644 - DNA, 996 bp, Homo sapiens
  source 1..996: mol_type = unassigned DNA
agtaatctccataaagaactaccatccgaagataagaatcatcactcaaatgctgcagtatcacaacaaggcccatctgctaaacatcccgagctggaattggaaagaaggtgatgacgcaatctgcctcgcagagttgaagttgggcttcatagcccagagctgcctggctcaaggcctctccaccatgcttgccaacctcttctccatgaggtcattcataaagattgaggaagacacatggcagaaatactacttggaaggagtctcaaatgaaatgtacacagaatatctctccagtgccttcgtgggtctgtccttccctactgtttgtgagctgtgttttgtgaagctcaagctcctaatgatagccattgagtacaagtctgccaaccgagagagccgtatattaattaatcctggaaaccatcttaagatccaagaaggtactttaggatttttcatcgcaagtgatgccaaagaagttaaaagggcatttttttactgcaaggcctgtcatgatgacatcacagatcccaaaagaataaaaaaatgtggctgcaaacggcgacagtggccggttctcaggatactcatcctgacagcttctaccaccaggcagtgaatgcttcctcttacctccatggtggagggcagatgtggccagttagctcctcatcttccatcctcctccactatctcaggcgacagatgccagggccagcccgccttccacttgagctttcttgtcaaggctctgccttgagcccaaatcctgacctttactgtatgaaataaagtactgatgaacaagcagaggtttgaattagagcaggcttggagcaaatgtcaagtccgtctctgcctctttcctccacctgcaccaggagcctcgattagacccagtgtggagtttgcagcgccttaggctttatgggtctggggagacataacttattaacaaagagttattaaatttttatcaattttacaaca

SEQ ID NO: 10645 - DNA, 1355 bp, Homo sapiens
  source 1..1355: mol_type = unassigned DNA
tcatcatcttgctctggcggacgctcaagtacctgtggaccgtgtgctgccactgcgggggcaagacgaaggaggcccagaagattaacaatggctcaagccaggcggatggcactctcaaaccagtggatgaaaaagaggaggcagtggccgccgaggtcggctggatgacctccgtgaaggactgggcgggggtgatgatatccgcccagacactgactggcagagtcctggttgtcttagtctttgctctcagcatcggtgcacttgtaatatacttcatagattcatcaaacccaatagaatcctgccagaatttctacaaagatttcacattacagatcgacatggctttcaacgtgttcttccttctctacttcggcttgcggtttattgcagccaacgataaattgtggttctggctggaagtgaactctgtagtggatttcttcacggtgccccccgtgtttgtgtctgtgtacttaaacagaagttggcttggtttgagatttttaagagctctgagactgatacagttttcagaaattttgcagtttctgaatattcttaaaacaagtaattccatcaagctggtgaatctgctctccatatttatcagcacgtggctgactgcagccgggttcatccatttggtggagaattcaggggacccatgggaaaatttccaaaacaaccaggctctcacctactgggaatgtgtctatttactcatggtcacaatgtccaccgttggttatggggatgtttatgcaaaaaccacacttgggcgcctcttcatggtcttcttcatcctcgggggactggccatgtttgccagctacgtccctgaaatcatagagttaataggaaaccgcaagaaatacgggggctcctatagtgcggttagtggaagaaagcacattgtggtctgcggacacatcactctggagagtgtttccaacttcctgaaggactttctgcacaaggaccgggatgacgtcaatgtggagatcgtttttcttcacaaattgaggaagacacatggcagaaatactacttggaaggagtctcaaatgaaatgtacacagaatatctctccagtgccttcgtgggtctgtccttccctactgtttgtgagctgtgttttgtgaagctcaagctcctaatgatagccattgagtacaagtctgccaaccgagagagccgaagccgaaagcgtatattaattaatcctggaaaccatcttaagatccaagaaggtactttaggatttttcatcgcaagtgatgccaaagaagttaaaagggcatttttttactgcaaggcctgtcatgatgacatcacagatcccaaaa

SEQ ID NO: 10646 - DNA, 1769 bp, Homo sapiens
  source 1..1769: mol_type = unassigned DNA
gaggcccagaagattaacaatggctcaagccaggcggatggcactctcaaaccagtggatgaaaaagaggaggcagtggccgccgaggtcggctggatgacctccgtgaaggactgggcgggggtgatgatatccgcccagacactgactggcagagtcctggttgtcttagtctttgctctcagcatcggtgcacttgtaatatacttcatagattcatcaaagggtgttcttacatgtcgtggggtgcagaccctgccaacttccatgctgagactcaggaaagaggtttgggcttgaagcttgtatgtcccagagaaagaaaaccctaatgtggagcccaatagaatcctgccagaatttctacaaagatttcacattacagatcgacatggctttcaacgtgttcttccttctctacttcggcttgcggtttattgcagccaacgataaattgtggttctggctggaagtgaactctgtagtggatttcttcacggtgccccccgtgtttgtgtctgtgtacttaaacagaagttggcttggtttgagatttttaagagctctgagactgatacagttttcagaaattttgcagtttctgaatattcttaaaacaagtaattccatcaagctggtgaatctgctctccatatttatcagcacgtggctgactgcagccgggttcatccatttggtggagaattcaggggacccatgggaaaatttccaaaacaaccaggctctcacctactgggaatgtgtctatttactcatggtcacaatgtccaccgttggttatggggatgtttatgcaaaaaccacacttgggcgcctcttcatggtcttcttcatcctcgggggactggccatgtttgccagctacgtccctgaaatcatagagttaataggaaaccgcaagaaatacgggggctcctatagtgcggttagtggaagaaagcacattgtggtctgcggacacatcactctggagagtgtttccaacttcctgaaggactttctgcacaaggaccgggatgacgtcaatgtggagatcgtttttcttcacaacatctcccccaacctggagcttgaagctctgttcaaacgacattttactcaggtggaattttatcagggttccgtcctcaatccacatgatcttgcaagagtcaagatagagtcagcagatgcatgcctgatccttgccaacaagtactgcgctgacccggatgcggaggatgcctcgaatatcatgagagtaatctccataaagaactaccatccgaagataagaatcatcactcaaatgctgcagtatcacaacaaggcccatctgctaaacatcccgagctggaattggaaagaaggtgatgacgcaatctgcctcgcagagttgaagttgggcttcatagcccagagctgcctggctcaaggcctctccaccatgcttgccaacctcttctccatgaggtcattcataaagattgaggaagacacatggcagaaatactacttggaaggagtctcaaatgaaatgtacacagaatatctctccagtgccttcgtgggtctgtccttccctactgtttgtgagctgtgttttgtgaagctcaagctcctaatgatagccattgagtacaagtctgccaaccgagagagccgtatattaattaatcctggaaaccatcttaagatccaagaaggtactttaggatttttcatcgcaagtgatgccaaagaagttaaaagggcatttttttactgca

SEQ ID NO: 10647 - DNA, 2808 bp, Homo sapiens
  source 1..2808: mol_type = unassigned DNA
aatgagggggttagtcatatgggctttgggcataaaatttgggtgggtggctaagggaccttcatcaacctagcaggagagcaaagtgatcatgttaagacatctcttctgaagtagctcattgacactcttccctcaccttggtggccgctgcgtgcctgattgctaagtgcaccaccgtaacaataacagtctataatggtgatattattaactgcatcgtgcatattattgatttactctttgttctgcatcattatcctttcaccaatgagtttactgcattattctcacatacttagtcaagcaccaaattacaacgaaagggcaggctcttataatggcatctaatggaacattgcataagccatcatcactgcctcctattatgagccacctccagccaatgagctttctgccttagtggaatgtgcacagagcaattatgaagtgcaagggacatggccattctaaattttacccaggaaattaccatgctgcatgttcaccacctgcccaagtctcagagcgcagctagagactcagatgctgtcactatgagcctggggggcacagggacaggagtcgagcctcttgctacatacagtctcttcactagaagccagtggttttatctccacagtcagtccctggctttttgtcttgtggctgactcttgcatcaaatgctcactcctgactgggcattatgtggcacatataagtggccatgacattgcctggtgccaaagtcagattggccaggagccccgagcggttggagggactgtcagtctcaacagttgtggggctcatctcttccgggtgagccactacttccagaaacagaagtccaaaccaccctcaaacaaggcgagcaattccagcctcatcccttcccagcatctccccatcttgaggtaaattcctttagctctcctggaaatcccgggcaccctaaggaagcagccctctggggacgcacagccagctggcatgatcttccattccataggcatcccagccccatttagccctgagtaatgctcacttactgtaaagtgttacatgcccccattgtcggaggagttatagtggaaaaatgcaaaatttcctttttactgcttatggccagcagaacctataacgtgtcaggccgcacattagccaccctgataaaagtctgctttcttacacacaaaatcatcgtttcagcaagatttgttatctcattacctgataagctctatgtcataaaccaagactcatacagtaaatctccccggaggacgctttgtgggcagaaagggagagatatgaatctgcaagggacttgataatgcagcatttaagcacaagcataatgtcacttattgttaaatgcataaaaccacttggccaaacagttgggcttttaataggattttgtgcagcatcaggtgagaagccatatggcttttctgtctaggagtctcagcacctgctagcaccgctgctttgcctcactgccctctggggatgggagctgggcttttatggaggcggagggaggagatgaatgcttcccctgcagctgcctggcttctgctgtcttgccagggggtgggatgcagggtcctgtcgtggtgcctggcctgatctaactggcctctcctgttcaggcacattgtggtctgcggacacatcactctggagagtgtttccaacttcctgaaggactttctgcacaaggaccgggatgacgtcaatgtggagatcgtttttcttcacaacatctcccccaacctggagcttgaagctctgttcaaacgacattttactcaggtggaattttatcagggttccgtcctcaatccacatgatcttgcaagagtcaagagtcagcagatgcatgcctgatccttgccaacaagtactgcgctgacccggatgcggaggatgcctcgaatatcatgagagtaatctccataaagaactaccatccgaagataagaatcatcactcaaatgctgcagtatcacaacaaggcccatctgctaaacatcccgagctggaattggaaagaaggtgatgacgcaatctgcctcgcagagttgaagttgggcttcatagcccagagctgcctggctcaaggcctctccaccatgcttgccaacctcttctccatgaggtcattcataaagattgaggaagacacatggcagaaatactacttggaaggagtctcaaatgaaatgtacacagaatatctctccagtgccttcgtgggtctgtccttccctactgtttgtgagctgtgttttgtgaagctcaagctcctaatgatagccattgagtacaagtctgccaaccgagagagccgtatattaattaatcctggaaaccatcttaagatccaagaaggtactttaggatttttcatcgcaagtgatgccaaagaagttaaaagacctcctcaactctgtctccctttggctgcccagaaaaggtgctttcagagtgacaagcttgatatttttatttgactgagaaacgacatacttctgccccctcaaatatatatttgaccagactgtgggaattttggtgttgtatttaacttccccaccaagggcccagggctcattgcccacatgtccccacgagtagcatcaaaggctgttctcaaaaatgaaagacgaatgagcagacacagtgtgtcacatcagcaacttttttcccagtttctttgtaaatggaagtttatgaaaaggagcactaactcaaatcacagaatcctgtgtttgaaataaatggtcttgcaacaaac

SEQ ID NO: 10648 - DNA, 1012 bp, Homo sapiens
  source 1..1012: mol_type = unassigned DNA
ggcccattttgctgtgtggaggcccatcagaggctgtcactgagtggagcctgctgtcagtgactggcccaccatccagaacggctgactgctgccagccactgcccagccctcggcaggtggctcccttgcagaacgtgttgttctccagccaacggatttggtggtgggcacccaaggtcacattcgcctgtttgtctctggaaaacccaaggacactgaagagataaagcccatctgctaaacatcccgagctggaattggaaagaaggtgatgacgcaatctgcctcgcagagttgaagttgggcttcatagcccagagctgcctggctcaaggcctctccaccatgcttgccaacctcttctccatgaggtcattcataaagattgaggaagacacatggcagaaatactacttggaaggagtctcaaatgaaatgtacacagaatatctctccagtgccttcgtgggtctgtccttccctactgtttgtgagctgtgttttgtgaagctcaagctcctaatgatagccattgagtacaagtctgccaaccgagagagccgtatattaattaatcctggaaaccatcttaagatccaagaaggtactttaggatttttcatcgcaagtgatgccaaagaagttaaaagacctcctcaactctgtctccctttggctgcccagaaaaggtgctttcagagtgacaagcttgatatttttatttgactgagaaacgacatacttctgccccctcaaatatatatttgaccagactgtgggaattttggtgttgtatttaacttccccaccaagggcccagggctcattgcccacatgtccccacgagtagcatcaaaggctgttctcaaaaatgaaagacgaatgagcagacacagtgtgtcacatcagcaacttttttcccagtttctttgtaaatggaagtttatgaaaaggagcactaactcaaatcacagaatcctgtgtttgaaataaatggtcttgcaacaaa

SEQ ID NO: 10649 - DNA, 2124 bp, Homo sapiens
  source 1..2124: mol_type = unassigned DNA
tcctcttcctcctcgtcctcggtccacgagcccaagatggatgcgctcatcatcccggtgaccatggaggtgccgtgcgacagccggggccaacgcatgtggtgggctttcctggcctcctccatggtgactttcttcgggggcctcttcatcatcttgctctggcggacgctcaagtacctgtggaccgtgtgctgccactgcgggggcaagacgaagagtggcacatatatctgaagactggggccgtgagatgatctgtcggtgagataactccacctggggccctgcatctgataggcgctcaaaattactacctacttgaaactggacttgttttctgcgctcctatgaaactgaacagtggagggttgctcgtgaaggatctgggacatgtttcatatggagcacaagaaaaggacgtcgaacatgcaacggtctgcatccaggaggcccagaagattaacaatggctcaagccaggcggatggcactctcaaaccagtggatgaaaaagaggaggcagtggccgccgaggtcggctggatgacctccgtgaaggactgggcgggggtgatgatatccgcccagacactgactggcagagtcctggttgtcttagtctttgctctcagcatcggtgcacttgtaatatacttcatagattcatcaaacccaatagaatcctgccagaatttctacaaagatttcacattacagatcgacatggctttcaacgtgttcttccttctctacttcggcttgcggtttattgcagccaacgataaattgtggttctggctggaagtgaactctgtagtggatttcttcacggtgccccccgtgtttgtgtctgtgtacttaaacagaagttggcttggtttgagatttttaagagctctgagactgatacagttttcagaaattttgcagtttctgaatattcttaaaacaagtaattccatcaagctggtgaatctgctctccatatttatcagcacgtggctgactgcagccgggttcatccatttggtggagaattcaggggacccatgggaaaatttccaaaacaaccaggctctcacctactgggaatgtgtctatttactcatggtcacaatgtccaccgttggttatggggatgtttatgcaaaaaccacacttgggcgcctcttcatggtcttcttcatcctcgggggactggccatgtttgccagctacgtccctgaaatcatagagttaataggaaaccgcaagaaatacgggggctcctatagtgcggttagtggaagaaagcacattgtggtctgcggacacatcactctggagagtgtttccaacttcctgaaggactttctgcacaaggaccgggatgacgtcaatgtggagatcgtttttcttcacaacatctcccccaacctggagcttgaagctctgttcaaacgacattttactcaggtggaattttatcagggttccgtcctcaatccacatgatcttgcaagagtcaagatagagtcagcagatgcatgcctgatccttgccaacaagtactgcgctgacccggatgcggaggatgcctcgaatatcatgagagtaatctccataaagaactaccatccgaagataagaatcatcactcaaatgctgcagtatcacaacaaggcccatctgctaaacatcccgagctggaattggaaagaaggtgatgacgcaatctgcctcgcagagttgaagttgggcttcatagcccagagctgcctggctcaaggcctctccaccatgcttgccaacctcttctccatgaggtcattcataaagattgaggaagacacatggcagaaatactacttggaaggagtctcaaatgaaatgtacacagaatatctctccagtgccttcgtgggtctgtccttccctactgtttgtgagcctgagagtcttggacttgaattcatcatttatgctaacttatgaactacagttatcctgcatgccttctgtgatgtagacacatttatgaagagtggcataaacccctgcctgtctgattctaagagggcaaaacaaatcttgccagcccctcaatgaaaggaattttaatctgtcttcccatcaagtctga

SEQ ID NO: 10650 - DNA, 2308 bp, Homo sapiens
  source 1..2308: mol_type = unassigned DNA
agcaatatggctgttgatgggtgtttggggtggcgctggcggcgggaggagctcccccgagcccctgcgccggctgcccgttgctagctatggcaaatggtggcggcggcggcggcggcagcagcggcggcggcggcggcggcggaggcagcagtcttagaatgagtagcaatatccacgcgaaccatctcagcctagacgcgtcctcctcctcctcctcctcctcttcctcttcttcttcttcctcctcctcttcctcctcgtcctcggtccacgagcccaagatggatgcgctcatcatcccggtgaccatggaggtgccgtgcgacagccggggccaacgcatgtggtgggctttcctggcctcctccatggtgactttcttcgggggcctcttcatcatcttgctctggcggacgctcaagtacctgtggaccgtgtgctgccactgcgggggcaagacgaaggaggcccagaagattaacaatggctcaagccaggcggatggcactctcaaaccagtggatgaaaaagaggaggcagtggccgccgaggtcggctggatgacctccgtgaaggactgggcgggggtgatgatatccgcccagacactgactggcagagtcctggttgtcttagtctttgctctcagcatcggtgcacttgtaatatacttcatagattcatcaaacccaatagaatcctgccagaatttctacaaagatttcacattacagatcgacatggctttcaacgtgttcttccttctctacttcggcttgcggtttattgcagccaacgataaattgtggttctggctggaagtgaactctgtagtggatttcttcacggtgccccccgtgtttgtgtctgtgtacttaaacagaagttggcttggtttgagatttttaagagctctgagactgatacagttttcagaaattttgcagtttctgaatattcttaaaacaagtaattccatcaagctggtgaatctgctctccatatttatcagcacgtggctgactgcagccgggttcatccatttggtggagaattcaggggacccatgggaaaatttccaaaacaaccaggctctcacctactgggaatgtgtctatttactcatggtcacaatgtccaccgttggttatggggatgtttatgcaaaaaccacacttgggcgcctcttcatggtcttcttcatcctcgggggactggccatgtttgccagctacgtccctgaaatcatagagttaataggaaaccgcaagaaatacgggggctcctatagtgcggttagtggaagaaagcacattgtggtctgcggacacatcactctggagagtgtttccaacttcctgaaggactttctgcacaaggaccgggatgacgtcaatgtggagatcgtttttcttcacaacatctcccccaacctggagcttgaagctctgttcaaacgacattttactcaggtggaattttatcagggttccgtcctcaatccacatgatcttgcaagagtcaagatagagtcagcagatgcatgcctgatccttgccaacaagtactgcgctgacccggatgcggaggatgcctcgaatatcatgagagtaatctccataaagaactaccatccgaagataagaatcatcactcaaatgctgcagtatcacaacaaggcccatctgctaaacatcccgagctggaattggaaagaaggtgatgacgcaatctgcctcgcagagttgaagttgggcttcatagcccagagctgcctggctcaaggcctctccaccatgcttgccaacctcttctccatgaggtcattcataaagctgtaatcacatatggattcttttatatgggtcttggcatggactgaacaaagagaaaggcagcacagaaagattacataacatatacacagagtccggtgcccagcgaggatggggcccgagaagcggcaatggtcaggacttaatgcgaaaatccagtagaagctgacactcaccctggcccttctcggctggcaggatatagtcactgatgtgaaataagagccatcttattgaacaagcctctggccaagcatcagtctgagctctttcagagataattggcctttaattaattgcatgcattcctgagtccacctgggtatccacagactgggtctactctgcctccccactcttccaaatttttgactttggttttttgagtgccatccactgttagtgattgttacatgaaaatcgcaaagtcctatgtaagccataaggaataaaatatcagatttccttaa

SEQ ID NO: 10651 - DNA, 646 bp, Homo sapiens
  source 1..646: mol_type = unassigned DNA
agtaatctccataaagaactaccatccgaagataagaatcatcactcaaatgctgcagtatcacaacaaggcccatctgctaaacatcccgagctggaattggaaagaaggtgatgacgcaatctgcctcgcagagttgaagttgggcttcatagcccagagctgcctggctcaaggcctctccaccatgcttgccaacctcttctccatgaggtcattcataaaggtatcttctttaatccaggctgctctcatcctgcatgggtggaactgaatggaggtggcagggaggtctgtgtagctgtgtttagagacgagaccctgaagccagatgtagccacgtgtctcccagggatcttatgttcaacatgaaaagcccagactcaggataaaggactgtcaccacgagaacttctctggctctttcaatcaagctctggtggttttcttccagggcatggcccatgggaccaagcacatggtgtgtggagctgtgctctgcttcctcgtgttgatgtaacatgggctttggcagggccccaccacagatggggccccttgacatgcgtatgttttgattttgtggtgcctgcatggtaactagagctgtctgtcaaggaaattaataaaatggatgtgatgctga

SEQ ID NO: 10652 - DNA, 599 bp, Homo sapiens
  source 1..599: mol_type = unassigned DNA
atatggcttttctgtctaggagtctcagcacctgctagcaccgctgctttgcctcactgccctctggggatgggagctgggcttttatggaggcggagggaggagatgaatgcttcccctgcagctgcctggcttctgctgtcttgccagggggtgggatgcagggtcctgtcgtggtgcctggcctgatctaactggcctctcctgttcaggcacattgtggtctgcggacacatcactctggagagtgtttccaacttcctgaaggactttctgcacaaggaccgggatgacgtcaatgtggagatcgtttttcttcacaacatctcccccaacctggagcttgaagctctgttcaaacgacattttactcaggtggaattttatcagggttccgtcctcaatccacatgatcttgcaagagtcaagatagagtcagcagatgcatgcctgatccttgccaacaagtactgcgctgacccggatgcggaggatgcctcgaatatcatgagagtaatctccataaagaactaccatccgaagataagaatcatcactcaaatgctgcagtatcacaacaaggcccatctgctaaacat

SEQ ID NO: 10653 - DNA, 897 bp, Homo sapiens
  source 1..897: mol_type = unassigned DNA
gcatgtccagagggttgagccctactcagcctcatctgggtactgactgggggccaggactcaggtccagccagtttcacagcagagcctgtgctcttggccatgatgataatggcactttcccacccagtccttttttttttcaaatttatttattttgagtgctgcattctctaccttttatagttaagaatgttttcaaggtctggtgggaggttttcgtgttttgcatccatgaatgcagtcagtgtttgcctgtaaatagggagggtcaattctcttgggctcctctgctgtgcacctcattgcccatagaatgctactctcggatcttgcactagagcactggatgatgaagtgaagccttgcagagacctgtgagtctgggggaggaaaccaagactccagggtggagtgattggctgtatgtttcacctgcagccacgcgaggcccagaagtcttccagtgctttggaggttcacaagaaatatggtgactcaactggaaccacattagaggaggcccagaagattaacaatggctcaagccaggcggatggcactctcaaaccagtggatgaaaaagaggaggcagtggccgccgaggtcggctggatgacctccgtgaaggactgggcgggggtgatgatatccgcccagacactgactggcagagtcctggttgtcttagtctttgctctcagcatcggtgcacttgtaatatacttcatagattcatcaaacccaatagaatcctgccagaatttctacaaagatttcacattacagatcgacatggctttcaacgtgttcttccttctctacttcggcttgcggtttattgcagccaacgataaattgtggttctggctggaagtgaactctgtagtggatttc

SEQ ID NO: 10654 - DNA, 645 bp, Homo sapiens
  source 1..645: mol_type = unassigned DNA
agctgaagaggggagagagacaccctccccacccccatatgaggatggtctgtgatgatatgcatgcaggggaagggacttatccaaggtccctgatagatagggactggaattttggcagtgtcttttctagagtagaacaaatttatcagttgaatttgctgtagttctctgaaggtttctttggccacattagaatttttgagccctggcatccaagtaggccaacttcaaaatggctgtgtgctccactcagagattctgctgtgaagactggcaggagattttttagcctattctgaactccaactgttccagttcctcttgctttccagaggtgtgagcacctggaagcccctgctctggtctacaccccaggctcaagattcatcctgctcactcagccactcatgctgtcaccagtgataaaactgttgtcttagtctttgctctcagcatcggtgcacttgtaatatacttcatagattcatcaaacccaatagaatcctgccagaatttctacaaagatttcacattacagatcgacatggctttcaacgtgttcttccttctctacttcggcttgcggtttattgcagccaacgataaattgtggttctggctggaagtgaactctgtagtgga

SEQ ID NO: 10655 - DNA, 2507 bp, Homo sapiens
  source 1..2507: mol_type = unassigned DNA
gcatgtccagagggttgagccctactcagcctcatctgggtactgactgggggccaggactcaggtccagccagtttcacagcagagcctgtgctcttggccatgatgataatggcactttcccacccagtccttttttttttcaaatttatttattttgagtgctgcattctctaccttttatagttaagaatgttttcaaggtctggtgggaggttttcgtgttttgcatccatgaatgcagtcagtgtttgcctgtaaatagggagggtcaattctcttgggctcctctgctgtgcacctcattgcccatagaatgctactctcggatcttgcactagagcactggatgatgaagtgaagccttgcagagacctgtgagtctgggggaggaaaccaagactccagggtggagtgattggctgtatgtttcacctgcagccacgcgaggcccagaagtcttccagtgctttggaggttcacaagaaatatggtgactcaactggaaccacattagaggaggcccagaagattaacaatggctcaagccaggcggatggcactctcaaaccagtggatgaaaaagaggaggcagtggccgccgaggtcggctggatgacctccgtgaaggactgggcgggggtgatgatatccgcccagacactgactggcagagtcctggttgtcttagtctttgctctcagcatcggtgcacttgtaatatacttcatagattcatcaaagtgagtattcaaatatactttcttgccctcgtttcataaacaatcatgagcctttacattgatccatttatttaccttgacaccaacctttgcaagaccttctgagtgcagaagattttggaggaagctagtgctgtactgtactgattttctaaatgggaaagaaagttctcagaaggaaggctattttgagtctgctggcataggagggtgaggtatatgaggtcaagtcttcttgctgggtattacttatttttaaagagctgtttcctaatgatgtatttgcactgaagatgtcaagtagttaagatgacttgatgggaatttgcaacttctgggagggtgacagtttcccacagatgagggtctgagccattcttgctatggttgtaggatccttttctcaattgggtttccaatgctttgatcttactggaggtcagattagaaagcatgatgctatcctttcacctgccaatcgggtattcagctgaagcattgcacgctggtgcttcttgacttgtgaaggtaaggagatggatggaggagttcatcatgacccccagaggtggaggccctggccatttgaggacttctagagtggacactcatgcagactccttgggtgccagccgaatggactggtgctccagagtgagcctgggtgacagatgataaagaccttgcagaaggatgaagagggcacagactagaactgcaatgttgcagccagttctgccctgattcctgcaggtgccaaccctgaggaaataatttgttccaactatactattgcaaatcatgaagttgatggcatctgggaaacaagctggagtctaactcattttctgttgtggcgtgaacttggcaactctggtgacaatggccttgagcttgttgcctttattgtccactgtgtgagtgttttgaactttaaactctatccctggcatggttggctactagactttgatactaggaaacctgcttggtgtgcctgttggctcagactctggtgtgcctgaattctgagcttagtgctcctttcctgtggcttgggatggtggtaatttcatgcacagctaaactcagaatttctcagagccatctggtcaccggccaaggattttgtgcatttgggtggagaggccaaaatgtcagtcagggaaaacaaagcaaatatctcctttaataacctgtctctgggaatcagccaagtttaagcctatcagaggtccttcagcccaccccacatgcgaggctgggctgccctcacccatctcagatggagagtcctttaaacgctgtcaggagacaagattccacatgctccctccatcagctctcccgagccaagaaagagaagagcttgtttaagtttggaagactcccattggcatgtcattgaaggtaagcccccttttaaatatttactgttaatgattctggatcctatttgtattgaactgaagatcctctaaagcccctggtcttatttctccaatctctctccaggggtgttcttacatgtcgtggggtgcagaccctgccaacttccatgctgagactcaggaaagaggtttgggcttgaagcttgtatgtcccagagaaagaaaaccctaatgtggaggtgagtgtgttgatgggttagaagtccagatgcctcagccagcaccttccttcccttttcgtttttttattttttttatttttttaaccttttgtccctctgtatttctcagaaataaaatgctctttagatgg

SEQ ID NO: 10656 - DNA, 1866 bp, Homo sapiens
  source 1..1866: mol_type = unassigned DNA
gaacacaccagtctggaaaagtgaagccagccaggttcagtgtgggtggagtctcccaccagggatcccaccctagcactaaccagggttgaggtgctggggaaaatgaaaagcattggtgtctttctgacccacctaggttgtcttagtctttgctctcagcatcggtgcacttgtaatatacttcatagattcatcaaagtgagtattcaaatatactttcttgccctcgtttcataaacaatcatgagcctttacattgatccatttatttaccttgacaccaacctttgcaagaccttctgagtgcagaagattttggaggaagctagtgctgtactgtactgattttctaaatgggaaagaaagttctcagaaggaaggctattttgagtctgctggcataggagggtgaggtatatgaggtcaagtcttcttgctgggtattacttatttttaaagagctgtttcctaatgatgtatttgcactgaagatgtcaagtagttaagatgacttgatgggaatttgcaacttctgggagggtgacagtttcccacagatgagggtctgagccattcttgctatggttgtaggatccttttctcaattgggtttccaatgctttgatcttactggaggtcagattagaaagcatgatgctatcctttcacctgccaatcgggtattcagctgaagcattgcacgctggtgcttcttgacttgtgaaggtaaggagatggatggaggagttcatcatgacccccagaggtggaggccctggccatttgaggacttctagagtggacactcatgcagactccttgggtgccagccgaatggactggtgctccagagtgagcctgggtgacagatgataaagaccttgcagaaggatgaagagggcacagactagaactgcaatgttgcagccagttctgccctgattcctgcaggtgccaaccctgaggaaataatttgttccaactatactattgcaaatcatgaagttgatggcatctgggaaacaagctggagtctaactcattttctgttgtggcgtgaacttggcaactctggtgacaatggccttgagcttgttgcctttattgtccactgtgtgagtgttttgaactttaaactctatccctggcatggttggctactagactttgatactaggaaacctgcttggtgtgcctgttggctcagactctggtgtgcctgaattctgagcttagtgctcctttcctgtggcttgggatggtggtaatttcatgcacagctaaactcagaatttctcagagccatctggtcaccggccaaggattttgtgcatttgggtggagaggccaaaatgtcagtcagggaaaacaaagcaaatatctcctttaataacctgtctctgggaatcagccaagtttaagcctatcagaggtccttcagcccaccccacatgcgaggctgggctgccctcacccatctcagatggagagtcctttaaacgctgtcaggagacaagattccacatgctccctccatcagctctcccgagccaagaaagagaagagcttgtttaagtttggaagactcccattggcatgtcattgaaggtaagcccccttttaaatatttactgttaatgattctggatcctatttgtattgaactgaagatcctctaaagcccctggtcttatttctccaatctctctccaggggtgttcttacatgtcgtggggtgcagaccctgccaacttccatgctgagactcaggaaagaggtttgggcttgaagcttgtatgtcccagagaaagaaaaccctaatgtggaggtgagtgtgttgatgggttagaagtccagatgcct

SEQ ID NO: 10657 - DNA, 2963 bp, Homo sapiens
  source 1..2963: mol_type = unassigned DNA
cccgccaggtcgcgcacagcgccccgagcccaggcgcctccccgcccccctcccgcgctccgcggcggcggcggcggcggcagcagtagcagcaatatggctgttgatgggtgtttggggtggcgctggcggcgggaggagctcccccgagcccctgcgccggctgcccgttgctagctatggcaaatggtggcggcggcggcggcggcagcagcggcggcggcggcggcggcggaggcagcagtcttagaatgagtagcaatatccacgcgaaccatctcagcctagacgcgtcctcctcctcctcctcctcctcttcctcttcttcttcttcctcctcctcttcctcctcgtcctcggtccacgagcccaagatggatgcgctcatcatcccggtgaccatggaggtgccgtgcgacagccggggccaacgcatgtggtgggctttcctggcctcctccatggtgactttcttcgggggcctcttcatcatcttgctctggcggacgctcaagtacctgtggaccgtgtgctgccactgcgggggcaagacgaaggccacccactttgggtccccggaaatgccaccagcagcgcggagctggagcgggagtccgcctgaggccgcggttttacgcggagcgtcttccctggcgctcgaggtggctagatgtcgtcggctttagctattcctggtgcagacgcccaccggcactgaggctggcgacaccttcgatgtatggttgctaggctcactgcctggtctgtagtcgtgtccctagagatgtcttcccttccccacagccactggctggagtgggggacccgacactgatagaaaactgcagaataaaaaagaaagaactggaaaaaagagagtgagccagctgccttctttctgagtaattcccatcctaggggacttcacgcgcgaaccgttttggagggaagggaaatccaggggaatagtgcagggtagatacacattgcagcctccacatgttcacatcttttctagtaaagttaaaccgaggacccctcaaacttctacagggcacagcaacttgtagcagcctccttggcggctgagagaagtagggaagcctggggctatgggtgaaggctggctatgaaaacaccaggggggaaggagcctgtctctcctgatcattaattatacatcctgttgggtgctggagctcagctgtgttttgtggcagcacatttgtgttttggaaaatactggtgtattggaacaaagggagaaatatgaaaaccatcattctcttcgtcattctctggcttctccggaggcctgcaggtgctggtcggagagttttctttggaattaccttctcagccgtagaggtttcttcttatttgttaaggaggcaaacctcccaccttccagagaagccctcaggttaagcaaagccctatacaccagatccctgactagccttcctgctgagaacagcttattcctggagccttcaaattcccacattccctctctccatccttctcctccacctcccccaacagtctcgggaattttgttccccggtttactgagattcagcgactgtctttaggggaaagatagctcatagttgtgtgcctctgaaatgttccctagatagagtgatctgggtgaactttttaacagcttgctttctttcaggcagggggcaatttttatcataatgaaaactttttccatgattgaaaataagttgtggtgtttttgtgaacctggggtcctaaacacagcttccaaagtctttttatgttagggggtacataaatgcaattgcagtgtctgtaatgaaatgctaatcccatcgcacacacaaaggatctcctaaatgatgagcaagcataacttctgtcagtttactcaagaaaataggtttttggcaacgattagaaaaaacaattcgtaaatatttggctatgttttgtagccccaagacctgctgagtggacataactggaagtgagttgctgtaagaaatctgccagggatgagaggtgatggtggtttgtttggaagatgtgaggccagtatagaatgagtgcaggttccttttgataccgtaagtccattttaaagcacacctagaatctcttgatacctgcccctagatttgctcacttaagccataggtagccagctcattatatgcagtaacggtaagttaggccttttaaaagcttttctttctatgcttgaggtctgtatttttattgcaattgtgtgtgtgtgtgtgtgtgtgtgtgtgtgtgtgtttgtctttttttcttttttctttccaagtatttggtagttttgtcaagactcgatacacaggcatgtatttggcttaagcttagaataataatttttgtgctagatttcccaagaaaacataggctgcctttccagaaaattctaccagccctcagatgggttcaccctcaccctccttcagccccaagatggtttgatcaagagctggagtccagaggaaagcaggtctgaaattctgtgggagataaaattcagcaaggagctccaatttcatgagcgtttggtctctgggatcgcaccaaacctttttgatcaaaggaacccaagactgtggacatgcatcgtgggacatctcttcattagtacctttggcctctgaatctcaaacagtgaatgactttagtcttttgaaaagagtggcatgtggactttttcagaaagtgaagaagaaaacattacaatttcctcctgttgggaacttggtcacagtcattccagtactgtgttctttgctgtactttttcacattattgtttttttccttgtgggatttcatcagagctctctattcacttgggtgtgacgttgtgaagttcaatcctgtcatagactatattgaatagggagctgctctggtagcctgaataaagccatgactttgaagaagtta

SEQ ID NO: 10658 - DNA, 1269 bp, Homo sapiens
  source 1..1269: mol_type = unassigned DNA
atggctgttgatgggtgtttggggtggcgctggcggcgggaggagctcccccgagcccctgcgccggctgcccgttgctagctatggcaaatggtggcggcggcggcggcggcagcagcggcggcggcggcggcggcggaggcagcagtcttagaatgagtagcaatatccacgcgaaccatctcagcctagacgcgtcctcctcctcctcctcctcctcttcctcttcttcttcttcctcctcctcttcctcctcgtcctcggtccacgagcccaagatggatgcgctcatcatcccggtgaccatggaggtgccgtgcgacagccggggccaacgcatgtggtgggctttcctggcctcctccatggtgactttcttcgggggcctcttcatcatcttgctctggcggacgctcaagtacctgtggaccgtgtgctgccactgcgggggcaagacgaagggttgttggcggctgcggctggggccggggtcggggactcacaggctcgggtgccgtggtgcggggtggggacagccaactcagcggggacggaggaagctgggggcagctgggtgcgtgttttgcaccgctcacctgccggggctcggctcctggcggtgggcgagagggagcacatccgcccatactttaggaacctgttggggagatgagttcgtggggtcagaaagaagggaaaaatcctttgggcaagggagagaataattttgcacaagggaatcccgggggaggagcatggcccgagataacagggggacttcgaggggcgagagaagttggggagatccatcccactattgggggtagcccacggggctgccacttttggaatgtgtcgaggtcgcatatctgatgtaacctcccactccgtcccttaggtgctctagtggaacataccccaagttcttcggcctctgttcctttgcccccaggccacccactttgggtccccggaaatgccaccagcagcgcggagctggagcgggagtccgcctgaggccgcggttttacgcggagcgtcttccctggcgctcgaggtggctagatgtcgtcggctttagctattcctggtgcagacgcccaccggcactgaggctggcgacaccttcgatgtatggttgctaggctcactgcctggtctgtagtcgtgtccctagagatgtcttcccttccccacagccactggctggagtgggggacccgacactgatagaaaactgcagaataaaaaagaaagaactggaaaaaa

SEQ ID NO: 10659 - DNA, 896 bp, Homo sapiens
  source 1..896: mol_type = unassigned DNA
ggcgcctccccgcccccctcccgcgctccgcggcggcggcggcggcggcagcagtagcagcaatatggctgttgatgggtgtttggggtggcgctggcggcgggaggagctcccccgagcccctgcgccggctgcccgttgctagctatggcaaatggtggcggcggcggcggcggcagcagcggcggcggcggcggcggcggaggcagcagtcttagaatgagtagcaatatccacgcgaaccatctcagcctagacgcgtcctcctcctcctcctcctcctcttcctcttcttcttcttcctcctcctcttcctcctcgtcctcggtccacgagcccaagatggatgcgctcatcatcccggtgaccatggaggtgccgtgcgacagccggggccaacgcatgtggtgggctttcctggcctcctccatggtgactttcttcgggggcctcttcatcatcttgctctggcggacgctcaagtacctgtggaccgtgtgctgccactgcgggggcaagacgaaggtgctctagtggaacataccccaagttcttcggcctctgttcctttgcccccaggccacccactttgggtccccggaaatgccaccagcagcgcggagctggagcgggagtccgcctgaggccgcggttttacgcggagcgtcttccctggcgctcgaggtggctagatgtcgtcggctttagctattcctggtgcagacgcccaccggcactgaggctggcgacaccttcgatgtatggttgctaggctcactgcctggtctgtagtcgtgtccctagagatgtcttcccttccccacagccactggctggagtgggggacccgacactgatagaaaactgcagaataaaaaagaaagaactggaaaaaa

SEQ ID NO: 10660 - DNA, 5639 bp, Homo sapiens
  source 1..5639: mol_type = unassigned DNA
aggaggcccagaagattaacaatggctcaagccaggcggatggcactctcaaaccagtggatgaaaaagaggaggcagtggccgccgaggtcggctggatgacctccgtgaaggactgggcgggggtgatgatatccgcccagacactgactggcagagtcctggttgtcttagtctttgctctcagcatcggtgcacttgtaatatacttcatagattcatcaaacccaatagaatcctgccagaatttctacaaagatttcacattacagatcgacatggctttcaacgtgttcttccttctctacttcggcttgcggtttattgcagccaacgataaattgtggttctggctggaagtgaactctgtagtggatttcttcacggtgccccccgtgtttgtgtctgtgtacttaaacagaagttggcttggtttgagatttttaagagctctgagactgatacagttttcagaaattttgcagtttctgaatattcttaaaacaagtaattccatcaagctggtgaatctgctctccatatttatcagcacgtggctgactgcagccgggttcatccatttggtggagaattcaggggacccatgggaaaatttccaaaacaaccaggctctcacctactgggaatgtgtctatttactcatggtcacaatgtccaccgttggttatggggatgtttatgcaaaaaccacacttgggcgcctcttcatggtcttcttcatcctcgggggactggccatgtttgccagctacgtccctgaaatcatagagttaataggaaaccgcaagaaatacgggggctcctatagtgcggttagtggaagaaagcacattgtggtctgcggacacatcactctggagagtgtttccaacttcctgaaggactttctgcacaaggaccgggatgacgtcaatgtggagatcgtttttcttcacaacatctcccccaacctggagcttgaagctctgttcaaacgacattttactcaggtggaattttatcagggttccgtcctcaatccacatgatcttgcaagagtcaagatagagtcagcagatgcatgcctgatccttgccaacaagtactgcgctgacccggatgcggaggatgcctcgaatatcatgagagtaatctccataaagaactaccatccgaagataagaatcatcactcaaatgctgcagtatcacaacaaggcccatctgctaaacatcccgagctggaattggaaagaaggtgatgacgcaatctgcctcgcagagttgaagttgggcttcatagcccagagctgcctggctcaaggcctctccaccatgcttgccaacctcttctccatgaggtcattcataaagattgaggaagacacatggcagaaatactacttggaaggagtctcaaatgaaatgtacacagaatatctctccagtgccttcgtgggtctgtccttccctactgtttgtgagctgtgttttgtgaagctcaagctcctaatgatagccattgagtacaagtctgccaaccgagagagccgtatattaattaatcctggaaaccatcttaagatccaagaaggtactttaggatttttcatcgcaagtgatgccaaagaagttaaaagggcatttttttactgcaaggcctgtcatgatgacatcacagatcccaaaagaataaaaaaatgtggctgcaaacggctgatatattttgaagatgagcagccgtcaacactatcaccaaaaaaaaagcaacggaatggaggcatgcggaactcacccaacacctcgcctaagctgatgaggcatgaccccttgttaattcctggcaatgatcagattgacaacatggactccaatgtgaagaagtacgactctactgggatgtttcactggtgtgcacccaaggagatagagaaagtcatcctgactcgaagtgaagctgccatgaccgtcctgagtggccatgtcgtggtctgcatctttggcgacgtcagctcagccctgatcggcctccggaacctggtgatgccgctccgtgccagcaactttcattaccatgagctcaagcacattgtgtttgtgggctctattgagtacctcaagcgggaatgggagacgcttcataacttccccaaagtgtccatattgcctggtacgccattaagtcgggctgatttaagggctgtcaacatcaacctctgtgacatgtgcgttatcctgtcagccaatcagaataatattgatgatacttcgctgcaggacaaggaatgcatcttggcgtcactcaacatcaaatctatgcagtttgatgacagcatcggagtcttgcaggctaattcccaagggttcacacctccaggaatggatagatcctctccagataacagcccagtgcacgggatgttacgtcaaccatccatcacaactggggtcaacatccccatcatcactgaactagctaaaccgggcaagttgcctttggtatcagtcaatcaggaaaaaaacagtgggacgcacattctaatgataactgaactggtgaacgatactaatgttcagtttttggaccaagacgatgatgatgaccctgatacagaactgtacctcacgcagccctttgcctgtgggacagcatttgccgtcagtgtcctggactcactcatgagcgcgacgtacttcaatgacaatatcctcaccctgatacggaccctggtgaccggaggagccacgccggagctggaggctctgattgctgaggaaaacgcccttagaggtggctacagcaccccgcagacactggccaatagggaccgctgccgcgtggcccagttagctctgctcgatgggccatttgcggacttaggggatggtggttgttatggtgatctgttctgcaaagctctgaaaacatataatatgctttgttttggaatttaccggctgagagatgctcacctcagcacccccagtcagtgcacaaagaggtatgtcatcaccaacccgccctatgagtttgagctcgtgccgacggacctgatcttctgcttaatgcagtttgaccacaatgccggccagtcccgggccagcctgtcccattcctcccactcgtcgcagtcctccagcaagaagagctcctctgttcactccatcccatccacagcaaaccgacagaaccggcccaagtccagggagtcccgggacaaacagaagtacgtgcaggaagagcggctttgatatgtgtatccaccgccactgtgtgaaactgtatctgccactcatttccccagttggtgtttccaacaaagtaactttccctgttttcccctgtagtccccccctttttttttacacatatttgcatatgtatgatagtgtgcatgtggttgtcatttttatttcaccaccataaaacccttgagcacaacagcaaataagcagacggaccaaaagttatttatgattctgggggaaaaataacccaaaggcatgctccagacataaatagctcactgcaggaacgagttcacagattagaagggagcacttgtgatcaacgtcagttaggcagagcaagtttatttaatgtaaaagaaaagttgattctgatttatcaggattatcagggtgctttgggttttgattttgttgttgttgttgttttcctttctttctttttttatacacacaataagttagcacatgtttatttgaaacaagcaaccaaacagcaatgaaaacatattgattgtttccagtctctgggccgaagtattgcgaagcatttgaaaagctttcacgatttgtgtagatgattatgaaggacctgcttgttgcaagagaacatcagtgatttttttagttactcaccaaggccttttgtcccagagccagttccctctgggagttcttatgaacatttctcaccttaatatggaggagagaatagtattccaatcatggatgtatcaaattctagtcatttagtttaagtgaaaagaggtttgattgcatattaaattgttattctgtctccttatgttgccatatgaatagctattttttttctttcacttttgacatttgggatgaaaagccatatgtatcataaatatcagatgtaagtcattaaaaactgccttcctgggacttttacatcttttaaaaggtgaattacttaccttatgtacagaataaataatgctcaggaaagagcaagtatttttccatgcattctcaggggatctttttactcccctttgtttgattagttagggccccaatgccaggtaggaggaagggctggggcaatggtagagtgagaggaagacaaacccagctgcagatcatgcttttctaggagccgacatgctaaataaattagaatgtaggaggatcagccacagttgactcaacaaagacaaaagccagccaccaccttcaactgttggcacagctgtgcggtgctggctgtcccaatgcagaaagctggtgggaaggaattcctcatcatcactttctttaatgtagccaatttaggcagggtaatgacggcaatagagagctgctccttgtcattatgagacgtgggataagaagagtgcaacagtgagccaaacacattttggtatagttatttttttcttcttttgttttctttcttttttaacacttagtaagcatgagaggagaggtagaaaaatacccttttttcaacatatagttgtcagatgctttgtgcatgcaaatcatgctttaggcagtgcggtatttcttaaaaactggccaattcaccataaccaatttcccttatggatggactaggctggtatatacatatttgaaaagttttacttcaaagaattccatcgaatagaataggggtaaaagggaggaggaaaacatgtcacagctgtaccatctctaaaaaggtgtttttatggtgaatgttttggatttagattttggatcccccgtcccctcaagcatgatagttttggatatttgcttgctgtgtgaattgacaagcacttttactgacaaatggtgaggctcagtcagaacctccaccctcccccacaccaaagacaggggcagcgtagtattcaaaccagtattgtggtggggaataattgtatacatgtaaattatcaagccctatgagtggaagaattttttcaaattatttttgtccctctatatattgatttatattatgtataactatctctttatataaactatatataattatatatatataactatataattatatatatataactatatatataactatatatatgtatcccctagtattggatcatgaagagctcttcatgcattctttgcaaaggaggttataaagttacgccctcagaacatttataactataagaatgtgccagttaaagtgctcaacaggaaatatgacagtttaaaagcattgtaaaactcacatagcttacttctctctctaaagtgcaacaaggatgaatagaatgggccaaggtatgacaattaatggttctgcatgacctagccactgctgggggttttcttctataacgttgtccttgtgaaaacttttgtgaaattaaaaaaaaaggagttacaaatttt

SEQ ID NO: 10661 - DNA, 5732 bp, Homo sapiens
  source 1..5732: mol_type = unassigned DNA
aggaggcccagaagattaacaatggctcaagccaggcggatggcactctcaaaccagtggatgaaaaagaggaggcagtggccgccgaggtcggctggatgacctccgtgaaggactgggcgggggtgatgatatccgcccagacactgactggcagagtcctggttgtcttagtctttgctctcagcatcggtgcacttgtaatatacttcatagattcatcaaacccaatagaatcctgccagaatttctacaaagatttcacattacagatcgacatggctttcaacgtgttcttccttctctacttcggcttgcggtttattgcagccaacgataaattgtggttctggctggaagtgaactctgtagtggatttcttcacggtgccccccgtgtttgtgtctgtgtacttaaacagaagttggcttggtttgagatttttaagagctctgagactgatacagttttcagaaattttgcagtttctgaatattcttaaaacaagtaattccatcaagctggtgaatctgctctccatatttatcagcacgtggctgactgcagccgggttcatccatttggtggagaattcaggggacccatgggaaaatttccaaaacaaccaggctctcacctactgggaatgtgtctatttactcatggtcacaatgtccaccgttggttatggggatgtttatgcaaaaaccacacttgggcgcctcttcatggtcttcttcatcctcgggggactggccatgtttgccagctacgtccctgaaatcatagagttaataggaaaccgcaagaaatacgggggctcctatagtgcggttagtggaagaaagcacattgtggtctgcggacacatcactctggagagtgtttccaacttcctgaaggactttctgcacaaggaccgggatgacgtcaatgtggagatcgtttttcttcacaacatctcccccaacctggagcttgaagctctgttcaaacgacattttactcaggtggaattttatcagggttccgtcctcaatccacatgatcttgcaagagtcaagatagagtcagcagatgcatgcctgatccttgccaacaagtactgcgctgacccggatgcggaggatgcctcgaatatcatgagagtaatctccataaagaactaccatccgaagataagaatcatcactcaaatgctgcagtatcacaacaaggcccatctgctaaacatcccgagctggaattggaaagaaggtgatgacgcaatctgcctcgcagagttgaagttgggcttcatagcccagagctgcctggctcaaggcctctccaccatgcttgccaacctcttctccatgaggtcattcataaagattgaggaagacacatggcagaaatactacttggaaggagtctcaaatgaaatgtacacagaatatctctccagtgccttcgtgggtctgtccttccctactgtttgtgagctgtgttttgtgaagctcaagctcctaatgatagccattgagtacaagtctgccaaccgagagagccgtatattaattaatcctggaaaccatcttaagatccaagaaggtactttaggatttttcatcgcaagtgatgccaaagaagttaaaagggcatttttttactgcaaggcctgtcatgatgacatcacagatcccaaaagaataaaaaaatgtggctgcaaacggcgttgggaagaacattgttctttgtggagactggaaagcaagggaaatgtgagaagattaaactactgcaggggtcagcaaactttctctgtcaaagtcaaggttgcagctagatcacgctattccaaagatccatttgagttcaagaaggagactcccaattctcggcttgtgaccgagccagttgaagatgagcagccgtcaacactatcaccaaaaaaaaagcaacggaatggaggcatgcggaactcacccaacacctcgcctaagctgatgaggcatgaccccttgttaattcctggcaatgatcagattgacaacatggactccaatgtgaagaagtacgactctactgggatgtttcactggtgtgcacccaaggagatagagaaagtcatcctgactcgaagtgaagctgccatgaccgtcctgagtggccatgtcgtggtctgcatctttggcgacgtcagctcagccctgatcggcctccggaacctggtgatgccgctccgtgccagcaactttcattaccatgagctcaagcacattgtgtttgtgggctctattgagtacctcaagcgggaatgggagacgcttcataacttccccaaagtgtccatattgcctggtacgccattaagtcgggctgatttaagggctgtcaacatcaacctctgtgacatgtgcgttatcctgtcagccaatcagaataatattgatgatacttcgctgcaggacaaggaatgcatcttggcgtcactcaacatcaaatctatgcagtttgatgacagcatcggagtcttgcaggctaattcccaagggttcacacctccaggaatggatagatcctctccagataacagcccagtgcacgggatgttacgtcaaccatccatcacaactggggtcaacatccccatcatcactgaactagtgaacgatactaatgttcagtttttggaccaagacgatgatgatgaccctgatacagaactgtacctcacgcagccctttgcctgtgggacagcatttgccgtcagtgtcctggactcactcatgagcgcgacgtacttcaatgacaatatcctcaccctgatacggaccctggtgaccggaggagccacgccggagctggaggctctgattgctgaggaaaacgcccttagaggtggctacagcaccccgcagacactggccaatagggaccgctgccgcgtggcccagttagctctgctcgatgggccatttgcggacttaggggatggtggttgttatggtgatctgttctgcaaagctctgaaaacatataatatgctttgttttggaatttaccggctgagagatgctcacctcagcacccccagtcagtgcacaaagaggtatgtcatcaccaacccgccctatgagtttgagctcgtgccgacggacctgatcttctgcttaatgcagtttgaccacaatgccggccagtcccgggccagcctgtcccattcctcccactcgtcgcagtcctccagcaagaagagctcctctgttcactccatcccatccacagcaaaccgacagaaccggcccaagtccagggagtcccgggacaaacagaagtacgtgcaggaagagcggctttgatatgtgtatccaccgccactgtgtgaaactgtatctgccactcatttccccagttggtgtttccaacaaagtaactttccctgttttcccctgtagtccccccctttttttttacacatatttgcatatgtatgatagtgtgcatgtggttgtcatttttatttcaccaccataaaacccttgagcacaacagcaaataagcagacggaccaaaagttatttatgattctgggggaaaaataacccaaaggcatgctccagacataaatagctcactgcaggaacgagttcacagattagaagggagcacttgtgatcaacgtcagttaggcagagcaagtttatttaatgtaaaagaaaagttgattctgatttatcaggattatcagggtgctttgggttttgattttgttgttgttgttgttttcctttctttctttttttatacacacaataagttagcacatgtttatttgaaacaagcaaccaaacagcaatgaaaacatattgattgtttccagtctctgggccgaagtattgcgaagcatttgaaaagctttcacgatttgtgtagatgattatgaaggacctgcttgttgcaagagaacatcagtgatttttttagttactcaccaaggccttttgtcccagagccagttccctctgggagttcttatgaacatttctcaccttaatatggaggagagaatagtattccaatcatggatgtatcaaattctagtcatttagtttaagtgaaaagaggtttgattgcatattaaattgttattctgtctccttatgttgccatatgaatagctattttttttctttcacttttgacatttgggatgaaaagccatatgtatcataaatatcagatgtaagtcattaaaaactgccttcctgggacttttacatcttttaaaaggtgaattacttaccttatgtacagaataaataatgctcaggaaagagcaagtatttttccatgcattctcaggggatctttttactcccctttgtttgattagttagggccccaatgccaggtaggaggaagggctggggcaatggtagagtgagaggaagacaaacccagctgcagatcatgcttttctaggagccgacatgctaaataaattagaatgtaggaggatcagccacagttgactcaacaaagacaaaagccagccaccaccttcaactgttggcacagctgtgcggtgctggctgtcccaatgcagaaagctggtgggaaggaattcctcatcatcactttctttaatgtagccaatttaggcagggtaatgacggcaatagagagctgctccttgtcattatgagacgtgggataagaagagtgcaacagtgagccaaacacattttggtatagttatttttttcttcttttgttttctttcttttttaacacttagtaagcatgagaggagaggtagaaaaatacccttttttcaacatatagttgtcagatgctttgtgcatgcaaatcatgctttaggcagtgcggtatttcttaaaaactggccaattcaccataaccaatttcccttatggatggactaggctggtatatacatatttgaaaagttttacttcaaagaattccatcgaatagaataggggtaaaagggaggaggaaaacatgtcacagctgtaccatctctaaaaaggtgtttttatggtgaatgttttggatttagattttggatcccccgtcccctcaagcatgatagttttggatatttgcttgctgtgtgaattgacaagcacttttactgacaaatggtgaggctcagtcagaacctccaccctcccccacaccaaagacaggggcagcgtagtattcaaaccagtattgtggtggggaataattgtatacatgtaaattatcaagccctatgagtggaagaattttttcaaattatttttgtccctctatatattgatttatattatgtataactatctctttatataaactatatataattatatatatataactatataattatatatatataactatatatataactatatatatgtatcccctagtattggatcatgaagagctcttcatgcattctttgcaaaggaggttataaagttacgccctcagaacatttataactataagaatgtgccagttaaagtgctcaacaggaaatatgacagtttaaaagcattgtaaaactcacatagcttacttctctctctaaagtgcaacaaggatgaatagaatgggccaaggtatgacaattaatggttctgcatgacctagccactgctgggggttttcttctataacgttgtccttgtgaaaacttttgtgaaattaaaaaaaaaggagttacaaatttt

SEQ ID NO: 10662 - DNA, 13033 bp, Homo sapiens
  source 1..13033: mol_type = unassigned DNA
ttgagccagcgaggagtgaagctgagcctggcctcacacgctcctagaggaccacctcctgagagagttctttcaccccctcttctttctccaagctcccctcctgctctccctccctgcccaatacaatgcattcttgagtggcagcgtctggactccaggcagccccagagaaccgaagcaagccaaagagaggactggagccaagatactggtgggggagattggatgcctggctttctttgaggacatctttggagcgagggtggctttggggtgggggcttgtgctgcagggaatacagccaggccccaagatggacacttctgggcacttccatgactcgggggtgggggacttggatgaagaccccaagtgcccctgtccatcctctggggatgagcagcagcagcagcagcagcagcaacagcagcagcagccaccaccgccagcgccaccagcagccccccagcagcccctgggaccctcgctgcagcctcagcctccgcagcttcagcagcagcagcagcagcagcagcagcagcagcagcagcagccaccgcatcccctgtctcagctcgcccaactccagagccagcccgtccaccctggcctgctgcactcctctcccaccgctttcagggcccccccttcgtccaactccaccgccatcctccacccttcctccaggcaaggcagccagctcaatctcaatgaccacttgcttggccactctccaagttccacagctacaagtgggcctggcggaggcagccggcaccgacaggccagccccctggtgcaccggcgggacagcaaccccttcacggagatcgccatgagctcctgcaagtatagcggtggggtcatgaagcccctcagccgcctcagcgcctcccggaggaacctcatcgaggccgagactgagggccaacccctccagcttttcagccctagcaaccccccggagatcgtcatctcctcccgggaggacaaccatgcccaccagaccctgctccatcaccctaatgccacccacaaccaccagcatgccggcaccaccgccagcagcaccaccttccccaaagccaacaagcggaaaaaccaaaacattggctataagctgggacacaggagggccctgtttgaaaagagaaagcgactgagtgactatgctctgatttttgggatgtttggaattgttgttatggtgatagagaccgagctctcttggggtttgtactcaaaggactccatgttttcgttggccctgaaatgccttatcagtctgtccaccatcatccttttgggcttgatcatcgcctaccacacacgtgaagtccagctcttcgtgatcgacaatggcgcggatgactggcggatagccatgacctacgagcgcatcctgtacatcagcctggagatgctggtgtgcgccatccaccccattcctggcgagtacaagttcttctggacggcacgcctggccttctcctacacaccctcccgggcggaggccgatgtggacatcatcctgtctatccccatgttcctgcgcctgtacctgatcgcccgagtcatgctgctgcacagcaagctcttcaccgatgcctcgtcccgcagcatcggggccctcaacaagatcaacttcaacacccgctttgtcatgaagacgctcatgaccatctgccctggcactgtgctgctcgtgttcagcatctctctgtggatcattgctgcctggaccgtccgtgtctgtgaaaggtaccatgaccagcaggacgtaactagtaactttctgggtgccatgtggctcatctccatcacattcctttccattggttatggggacatggtgccccacacatactgtgggaaaggtgtctgtctcctcactggcatcatgggtgcaggctgcactgcccttgtggtggccgtggtggcccgaaagctggaactcaccaaagcggagaagcacgttcataacttcatgatggacactcagctcaccaagcggatcaagaatgctgcagccaatgtccttcgggaaacatggttaatctataaacacacaaagctgctaaagaagattgaccatgccaaagtgaggaaacaccagaggaagttcctccaagctatccaccagttgaggagcgtcaagatggaacagaggaagctgagtgaccaagccaacactctggtggacctttccaagatgcagaatgtcatgtatgacttaatcacagaactcaatgaccggagcgaagacctggagaagcagattggcagcctggagtcgaagctggagcatctcaccgccagcttcaactccctgccgctgctcatcgccgacaccctgcgccagcagcagcagcagctcctgtctgccatcatcgaggcccggggtgtcagcgtggcagtgggcaccacccacaccccaatctccgatagccccattggggtcagctccacctccttcccgaccccgtacacaagttcaagcagttgctaaataaatctccccactccagaagcattacccataggtcttaagatgcaaatcaactctctcctggtcgctttgccatcaagaaacattcagaccagggaacggaaagaagagagaccgagctaattaactaactcatgttcattcagcgtgcttggtccgacatgccttgaaaccagaaatctaatctctgtttaggtgcctctacttgggagcgggaagaggagatgacaggaagcgacgcctctggcagggcccttgctgcagagttggtggagaacagaaatccacgctcaatctcaggtcttcacgcggggggtgggggtcagatgcactgaagtagccaacagcgaagccagtccagaagaggggtccgctgggagggagggttgtgtcaggcttgggggatgggctcttcgccatgggggtctttgaacacacctctctcctttccttttgtctacggaagcctctgggtgacaaaagtaaaagagagctgcccacaacttgccaaaacagatatactcgaatcagactgaaaaaaaaaaaaaaagacacagacaaataaaaagccagattttccactcgatattaatacccacataaacctgtgtgtttgcaaacgtgtacatgtacacacatacacatcccacgttcgcttcaggtcctttcttatttgagcttaatccaaataaaaagggacttgacaccttaccctgcatacaataggcaccccttacatgtgttttgagttggtctgaatctgaacatggggtgctttcagttcaggtagttagctagttctggccacattctgagtttcactgaagatgtggatcccttcagacataatgcacattgctttgtcctggatatgcaccttgcttgatttgaaatggatgccaagccaaaattgttggcattcaggagggataagcaggcttctaaaaataacagcatctgcagagttttcttcttccatccaaacaagttgtgtttcgatggtccacatgaccaggtgtatgtctgtaagtgtggagggagaggacaagaaattgtgcatgtgtgtgcagacatgcacaaacaggagcaatccaataacaccttagtgaatagaaatatggttggggatttgctgagctgtatttatccagcaacaggtttccagccccagatgttagtagtgcaaaagggccaagtgcctcaattgtgagcctctgagctaggaggagaagtgatgaagagtggcctatgtggtcccttctacctgaccttaagtcatctcaaaatgaaatattgtgagaatgaagggaacccttagggaaccttgtgggtaaggtaagtggacatggatttgtcagtagcctgttcctactgtgccatgttaatcttggtgcgaaaaactattccaatacatctcaaactccaagagacttcagaaacatcaagatttagtgtaatgagcggcgcagaaaaatgttttcattgctccataatctgaccacacgtaacatttgtgacgtgaaaaccatgactttctcattctgaggtctttggtttctgcctgtgggaaattgaatggcactgtatggactatttcatctgttgatggtaaaacaaaagggtgatttttttgcttgtggttgtcatcttgggtttacctttgtaagaagacatcatcaccattctgaaggcagtggcttggcatggagatttttattctgtagcactgggcctgttcttctaaggacagcacaaggtagacaattgtagagccaaggccactttttcaggaagatctagtctcttgctaaccctcttctttctctcttgctattgctgctgctcttttgatggtttatagtcttaatggcctgccttgataattcctttgaacactttcattagttgttttgcataccagagatgccgcacctgctgttggcttatttttttacttgttctattaactgttgattatctgaatgtttcccctcctccttgtttcatgtcccaagaatggtgctcctgttttcagtgacagttcagctgaacatataagcagatgtgtaaacagatgaagtaaccatgcagtttccttgtggcattagttccatttcacaaagtgaagaccactggtgggctgatctgagtgtgccaatcctgatcatttaaacctacagccttcaactggtgattcctacccaccgttttcattctgctataaccctgtgatatgtgtgcgtgtgggtgtgagtgtgggtgtgtgcacatatagagatttagtcttaatttcaaccaaatgacatgcaagattccactgccactcttcctggccaaaagtgtgcacagactgtgatttattcattgtggtctgtgactttaacccatcattgatgctctcacttaggtaaaccctaaagaccaaactagcaacactagtcaagggagtgactggagttatttctggtagcagtagccactggcatcctagaaacacatggacatttgtagcatgaattgacctattggtagtgcaatagctatacatgatttttattcttggcaaaagaaaatgcttcaaaaaaaaagtgatcaaacctgcacattgatcctgtaatagcaaatggaaggctatttctctgtactagcatttcagctttatgtgggaaagttacccgttctcctgcaagtacaatcaacccttgatgacttaagtattaattattctgggtgtagctcacccaagttttcttcctacatcttttggctaattccaccacacctcagcatcacagtcagatgggaaaaggggcaggtggattctcatgtcatgccttcttgtaccttattttcaagttttgtggtggaggaggtttaattatctgctcaagaatctggtatatatagccaggtgcggtggctcatgcctgtaatcccaggactttgggcaaggcgagaggatcacctgaggtcaggagttcaagaccagcctggccaacatggcaaaaccccatctctactaaaaatacaaaaattagctgggtttggtggtggacacctgtagtcccagctacttgggaggctgcggcaggagaatcacttgaaccccggaagtggaggttgcagtgagccaagatcgtgccattgcactccagcttgggtgaccgagcaagactccgtctcaaaaaaaaaaaaaaaatcggctatatgtaaaaactattaattatgtaacctcactccaatactgtactgatcaagatctgcccactcctagaggactgacccaatggcagatcccctactataatctttctgacaactcagtgacaggtaaaatcactctaatattcctaaaatatctagacacttgaattagaaatacagaaccacccccacccctgccattgcttaagccatattaaagcttcatgtactgtaaagtcagggatgtactgtgatactttaagaccactaatctcagtggaatttcaggacatagcattagttggtaaattacaccagactaggggctcactcctccttagattgaagtccaaataaaagtcttcacctttggatcaaaggccacatatatatgatcatcatcaataaattgtcataaagtgtctatgaactgctcttgccatcttcctaatacgtaacttcatgacatcatgtctctagaagtgcttaatacaatccaaaagaacaaggggggaaggccccaagtcaccactgaccgacctcagcaggggccagtggtagaacaacaatcttgtgaattaggagacatagaaaatgtacgcaaaagtaaattccaagcgctgagcatgtacaagctatttttattattaaaagccaagaaggaagagcattgaagaagtaatgattttaatatagtgggggatttcccccttaaatttttataatttccttgtgaataaacaatcatggaaaagaagaaacctagtcatacaaaatcagaataaataaaaatcttaagactggatccacatctttggccaattcatataagcacctaatacatcaatttctctgtacttaaaatgaagagaataattaatattcttaagtacaatgttttcaatagagaacaaatgaaatcacctttgtcatcaacagcagcccagactgactgtatctagatcacaccttgatgttacgtttgaatgcagtcagtagttaccaaaaagtaattagtgcacattaaatagtggtaaaatcagcagggagaaatatgggattagcacgtagttccagaaccttcctcctcctccagagtgcaactcaacaaacagtacactccaaattaagaatcaatgtttcatcccaggacaaacggtgttgctcccatcacagtaccacaactgagatactgtgaagtcattgcactaccagtaggttactactcttttgaagttactgtttttaaatcctaaaatatgtccccagttttctacattcattcttcttcccctaagagttgctagaagcagatgaaggatccctattgactctgcagggtttgatttcagtaccttagacagctatctggtgacttcccagtaggcacgaacaaccccttctctccccttgcagtcggtgggcttgatgacgccccagacagtatcctttccttctctactgccgccaaaataaacattagggaaatgggatcattaacaccactgagaaaggagtttacagggatcgcaatagtaactgtctgcttgtggtagtagaaagcttgtgccaggctgcatgaatagaaattaatgttaaactcctgttagacgagtaatatgtagatttttattgaaacagaccacagcttattaaaaagtactcagtgcaatggtatatacatatatacagatagaaaaaaatataactgtgatctttttgtcttacgccattactggaaacacccaaacgtgaactggagttccctctgaacaaaaccattgtcaaatcttcaacatatgacctccaaatctaggtgccaagtgccctgtgacagttgtttacacacctgaaaaatgtatcctggaagctgtaatcttgggcctgggctatgtgttgaaacaagcaaaagagacacatcgtgaccaaccaagctggtggaggaaaagcacaaaattcaactccaacctgcagttaggatcccaaagagatgttgacatttatagccaaaaagaaaaagtacatatatatatatatatatatatatatatatatatatatatatatatatctgaatcagatcgaagcagccaacgtccagcttcactcaagaaggacaaggaataaacaacattctctagctgtgtcatgttgtctcagtttttgaatctcaaccaggactgatccaccttcatcagatacgttttttaatggcgcaacaactcaattttggtcccagactctccattctgcactggccacgagaacaacaagagaatgacaggatgttaatggaggaaacattttcatggcaagctcagaaactgaagtgtttatattcagaatcagatgagctttaatatgaatttgcatcttgcctctgtactgcttgctattttttaatgataggagaaagcataacagtttattttaaatatgaaatatattgatatattataaaatatattgtaactttcaattaacattttgtatcaaactagtgtttagcaggtccactgtcagcctgctctcccaatgactgtttctgagtacacatcactgttagtgattgccgggcacccagaaaaagggtcctcctaccacagcctactgaactgccatattctaattctccaaggcctgggtattagagacaaaagaacattattccaagagtagaggaataattctaccctaaattctatcaagccatttcagaagagattttaaaagccatcactcctttagtagctctgcaaagccagtttaataaaagttcaggctctttctatataaattcaaaggcctcattacataaattatataagtctcaaacctagccaaccagttttcctttgacaatgtcagaattggacataagaaagagtcctgttttcctgtaacttaaaatactcaaaatcctaggcattctgagtttctccatgtacgtgaaaccggggtcggctttccaaactacacaaggcccaacaagagtccagtgtgcagatgtgcttttctaaattggcaatacccttgagggagcaaggttcccacatgtttatcaaggacatggagcccagctcctaagggagtgatgggaggagccggcaggacatgaacagccagagccagcaaagagccgggctgccttttctgctagcttcctctagctgggaggaaataaagggttcccgttgagatattgtcctttatagcaaaattaagcaactcatggaatctacacccctctttctctacagagcagctgagacatacatgtagaagttctcagttccctccttcatatggctaaggcactacttctagatgaaaacaggatgtgttcggttacagaataaagattttctagaatcagtgagcctcttctcacctgggaccctcacttgctgttgttgctttggtgcaatattgtacaggtgcaaaccaggttgcatcggggcagattaactgagcctatgtgtctcttcccttcccaagccctgaaaattcacatagatttacagatagtgcaaaacaacaagttttctcctgggaaaaggctggaatccttcaaatttcaatttatatgagcttaaaggtatataagtcatggggctcactgacattaggtattcatgctgtttgaaagagaaatgtctaaatgcccgttttcagtctgtttgtgtagctgagccctaacttgtacacaagttttcttgttatggagctaaattctctcagtgcctgtattactcctcagttatatgttaggccgagctccactaaagccatctgaactccagggcacttgtttttatcaggttacttactcaccggataatggaaattggcttattttcaattttacaattgactgatgaatgtattggtggtaattgatttatttcttcacttttttttgctactaaatgattttttcttttttaaaattattattattattattttgagatggagtctcactctgtcgcccaggctggagtgcagtggcgccatctcagctcactgcaagctctgcctcctgggttcatgcaattctcctgcctcagcctcccgagtagctgggattacaggtgcgtgccaccacgaccagctaatttttttgtatttttagtagagacagggtttcatcatgttaaccaggatggtctcgatctcctgacctcgtgatccacctgcctgggcctcccaaagtgagccactgtgcctggcccagtaagtgcttttttcttttggtttttccttctaacactgctcagaccaagacttacatttataaagagcaaatatattctgacctttcccctcaaagttgtattccatctagaatcaaggaaacaaatgcaaattcatcatttggggaaagcagacctcttgacagtaattcaagtccatggctatatgctaacccttgctactcaaagtgtggtccacagaccagcagcgttagcatcatctgtaagcttgttagaaatgcagaatctcaggccccacatcaaaccttcttcatcagaattggccttttaacaaatccccaggtgacctgtatgcaccagaaatattgataagcactggcctcacctcaccgtagtgataactaacctcgttaataattagagaatgaagctatctcttccttgagtctcatttacagaattatttgaagatgtgaaggtcctgaatgatcataaggattaaaaaaatgcatctttaaattccacttgaggttatataacttggatggtctacatcaaacataataaagtcaataagagatagtctttttccggtcttacctaaatagcactccatatccttgagccacctcaaagcccccatttttaagttttagtctttttttttttagaccagactagcaaagccatcagaatatcaggtggaacctcagggcaggtcctctggaaggctacaggagtctctgcttagcatagtacagaaattgttgtgtttctcgatccttgtgttcttcccttgaggaactcagcatctcaccagtaagaactcccctcccctagaggaaaatagcaagagaagttagtttaaccatctagaaacattgctaatctccttgaaagccaattctcttactcattgcaccaacaagaaacactccaaggtgggcaaggaaagacgtgaattctgatattggcgccataactcgatatgtacccagaaacagttatgttctaaattaatggctttaacctgttcattgtaaaaagtgccttggacttcaatctaaagaggtcagtataaatatgtatgtgtgtgtgtgacgtgtatgtaggcaaatatttacagatttatacatacataggtgcacacacatatacccgcacattcatatataatatatacatacatatataaatgcttcataatatatcatattgctattcacagctccatttcttttgtctggtcctatgtttatttgtttagtgagacctttacatagagaggttctattcggaacattgatgtattttttgtttgttttttactttttattaaaaaggtaaaggatattaaaaaaaaaaaaaaaagtcaagtgcctgaaggttttgaatggagttacggtaaactttctcaggtcaccaaagaggaaacatttttcctttggaaaacatttttctgtttcagtgactttgttttcccttggtggtaatgcataaataagagtggttaaagtgattttgtaagttttatttcaatccatttctgtggttcccataaggcaatagctaaaaatttgttcagtctagtgcccagttttctccacacatcagcatcagaagggcccggtcttcacatgctctgtgtggttttgttcgcgttgttactgtgttccttactaaggaaaggcaaatgaaattgcaggggctggagcttagaccagctccaaatatggcttccttttggtaacacacacagaaggtggactagtgggaagtctctctccctgaagcaggtgggaacctgtgtcttagaaggcagaggagtcccagtgaactctccacagctccatgggccctgcctgtctacagttatacaactgcctgtatgagtcagcctttctctaccttagccaaaggtcttctctttctgtggtgtgacagcttgtaatgaaccaacttgctctggttagaagtccctagagctccaggaagagtcgccaggtttccattgctgtgctcaaagctcaaggacacattatacttctttaaaccaactaaatctctctagctccctgcccccatggtgacactttcataataggcagggccaagtcagagaggtcatgccctgtatacagtgtcaatcagaagagacactgcaaaatgtcagaggtgaccagaaagacaacagatctctccagctgtcctcacagctgcaggcacatttgtggaattgtgagtaggaaggcttggcagccaggggatgggaaatgaatttccccaagttgaaaaccctgtacccttactttccttcccataaatttttctgtagttctaggtaaataataataataataaaaatgcaaattaggtgctttagaaggagtatgtaatatctgggactttttctaagttggtagacctaaaaaatgttttcaaaaatatatctagctgcatttctactgctgtcattccttaaagctcttcctccaaaaactccatatgaatgaatacatttaccaactcagtgattactaaataatagtactttatacttatacacagtaatacctttcatctaaggatctcaaatgccaatatattagtcatcaccctgtaaggtggatgacatattattcccattattccaatgggaaaattgggccatagaaaactgaggagcaaatgactcatctacaggaattaaatggaaaaaacaggctaggatttctcagcacactttaggagtgaatgaaaacttacaggcttcagttctactgctggccaccattggatttgtaagatccaggatgtgtattgaccacatgtgtccagacccaggcttagggcatctggaatgagagtggtgggctggtgtgtgggtctgaggatctggatgggagactgcattttcttctctgtgcaaaatatggaagtgtgaccttgaaggtgggcttagtctatggccttccccactcctgcttgaactgaagctggagagaatgggcatttttaaatgttacggcatatgctaatataatattatggcattaaataaaaacaagaagagaactgactaaaaccaaaaaaccaaaaa

SEQ ID NO: 10663 - DNA, 532 bp, Homo sapiens
  source 1..532: mol_type = unassigned DNA
gcgaagacctggagaagcagattggcagcctggagtcgaagctggagcatctcaccgccagcttcaactccctgccgctgctcatcgccgacaccctgcgccagcagcagcagcagctcctgtctgccatcatcgaggcccggggtgtcagcgtggcagtgggcaccacccacaccccaatctccgatagccccattggggtgcctctacttgggagcgggaagaggagatgacaggaagcgacgcctctggcagggcccttgctgcagagttggtggagaacagaaatccacgctcaatctcaggtgccaagtgccctgtgacagttgtttacacacctgaaaaatgtatcctggaagctgtaatcttgggcctgggctatgtgttgaaacaagcaaaagagacacatcgtgaccaaccaagctggtggaggaaaagcacaaaattcaactccaacctgcagttaggatcccaaagagatgttgacatttatagccaaaaagaaaaagtacatatatatatatatatatat

SEQ ID NO: 10664 - DNA, 1962 bp, Homo sapiens
  source 1..1962: mol_type = unassigned DNA
caggaaagtcagcttaaaggacactccttgcagggactgagctggcacctactccttagagcttgctgataccaggcctgccacgcgacatctgcaaggacagttgtttggtgttttgcttcaggttatagatggagagacctataaaggactccatgttttcgttggccctgaaatgccttatcagtctgtccaccatcatccttttgggcttgatcatcgcctaccacacacgtgaagtccagctcttcgtgatcgacaatggcgcggatgactggcggatagccatgacctacgagcgcatcctgtacatcagcctggagatgctggtgtgcgccatccaccccattcctggcgagtacaagttcttctggacggcacgcctggccttctcctacacaccctcccgggcggaggccgatgtggacatcatcctgtctatccccatgttcctgcgcctgtacctgatcgcccgagtcatgctgctgcacagcaagctcttcaccgatgcctcgtcccgcagcatcggggccctcaacaagatcaacttcaacacccgctttgtcatgaagacgctcatgaccatctgccctggcactgtgctgctcgtgttcagcatctctctgtggatcattgctgcctggaccgtccgtgtctgtgaaaggtaccatgaccagcaggacgtaactagtaactttctgggtgccatgtggctcatctccatcacattcctttccattggttatggggacatggtgccccacacatactgtgggaaaggtgtctgtctcctcactggcatcatgggtgcaggctgcactgcccttgtggtggccgtggtggcccgaaagctggaactcaccaaagcggagaagcacgttcataacttcatgatggacactcagctcaccaagcggatcaagaatgctgcagccaatgtccttcgggaaacatggttaatctataaacacacaaagctgctaaagaagattgaccatgccaaagtgaggaaacaccagaggaagttcctccaagctatccaccagttgaggagcgtcaagatggaacagaggaagctgagtgaccaagccaacactctggtggacctttccaagatgcagaatgtcatgtatgacttaatcacagaactcaatgaccggagcgaagacctggagaagcagattggcagcctggagtcgaagctggagcatctcaccgccagcttcaactccctgccgctgctcatcgccgacaccctgcgccagcagcagcagcagctcctgtctgccatcatcgaggcccggggtgtcagcgtggcagtgggcaccacccacaccccaatctccgatagccccattggggtcagctccacctccttcccgaccccgtacacaagttcaagcagttgctaaataaatctccccactccagaagcattacccataggtcttaagatgcaaatcaactctctcctggtcgctttgccatcaagaaacattcagaccagggaacggaaagaagagagaccgagctaattaactaactcatgttcattcagcgtgcttggtccgacatgccttgaaaccagaaatctaatctctgtttaggtgcctctacttgggagcgggaagaggagatgacaggaagcgacgcctctggcagggcccttgctgcagagttggtggagaacagaaatccacgctcaatctcaggtcttcacgcggggggtgggggtcagatgcactgaagtagccaacagcgaagccagtccagaagaggggtccgctgggagggagggttgtgtcaggcttgggggatgggctcttcgccatgggggtctttgaacacacctctctcctttccttttgtctacggaagcctctgggtgacaaaagtaaaagagagctgcccacaacttgccaaaacagatatactcgaatcagactgaaaaaaaaaaaaaaa

SEQ ID NO: 10665 - DNA, 1658 bp, Homo sapiens
  source 1..1658: mol_type = unassigned DNA
gaggactcagaataaacctgctgctgcttcgtaaacatctcctgataaaaatggctacaggtgttacctgggcagagcagctgggcgccgccttggaatcagctgggggagcacctctccttgggacgggatgacagggcttcccaggcggtccccacaagcccgcgccccagctcagccccagttctcccctcccacctcaactcctccttgggataaataaagatgagtgtgtgtgtgagtgcgcgcccggatggagaacagcaggcactggctttagcggggagctggccccactgctccagcctctcagtccagccccaagacggaggagggggtttccctcccagagggagtggagatggaggaaggactccatgttttcgttggccctgaaatgccttatcagtctgtccaccatcatccttttgggcttgatcatcgcctaccacacacgtgaagtccagctcttcgtgatcgacaatggcgcggatgactggcggatagccatgacctacgagcgcatcctgtacatcagcctggagatgctggtgtgcgccatccaccccattcctggcgagtacaagttcttctggacggcacgcctggccttctcctacacaccctcccgggcggaggccgatgtggacatcatcctgtctatccccatgttcctgcgcctgtacctgatcgcccgagtcatgctgctgcacagcaagctcttcaccgatgcctcgtcccgcagcatcggggccctcaacaagatcaacttcaacacccgctttgtcatgaagacgctcatgaccatctgccctggcactgtgctgctcgtgttcagcatctctctgtggatcattgctgcctggaccgtccgtgtctgtgaaaggtaccatgaccagcaggacgtaactagtaactttctgggtgccatgtggctcatctccatcacattcctttccattggttatggggacatggtgccccacacatactgtgggaaaggtgtctgtctcctcactggcatcatgggtgcaggctgcactgcccttgtggtggccgtggtggcccgaaagctggaactcaccaaagcggagaagcacgttcataacttcatgatggacactcagctcaccaagcggatcaagaatgctgcagccaatgtccttcgggaaacatggttaatctataaacacacaaagctgctaaagaagattgaccatgccaaagtgaggaaacaccagaggaagttcctccaagctatccaccagttgaggagcgtcaagatggaacagaggaagctgagtgaccaagccaacactctggtggacctttccaagatgcagaatgtcatgtatgacttaatcacagaactcaatgaccggagcgaagacctggagaagcagattggcagcctggagtcgaagctggagcatctcaccgccagcttcaactccctgccgctgctcatcgccgacaccctgcgccagcagcagcagcagctcctgtctgccatcatcgaggcccggggtgtcagcgtggcagtgggcaccacccacaccccaatctccgatagccccattggggtcagctccacctccttcccgaccccgtacacaagttcaagcagttgctaaataaatctccccactccagaagca

SEQ ID NO: 10666 - DNA, 13057 bp, Homo sapiens
  source 1..13057: mol_type = unassigned DNA
gagccagcgaggagtgaagctgagcctggcctcacacgctcctagaggaccacctcctgagagagttctttcaccccctcttctttctccaagctcccctcctgctctccctccctgcccaatacaatgcattcttgagtggcagcgtctggactccaggcagccccagagaaccgaagcaagccaaagagaggactggagccaagatactggtgggggagattggatgcctggctttctttgaggacatctttggagcgagggtggctttggggtgggggcttgtgctgcagggaatacagccaggccccaagatggacacttctgggcacttccatgactcgggggtgggggacttggatgaagaccccaagtgcccctgtccatcctctggggatgagcagcagcagcagcagcagcagcaacagcagcagcagccaccaccgccagcgccaccagcagccccccagcagcccctgggaccctcgctgcagcctcagcctccgcagcttcagcagcagcagcagcagcagcagcagcagcagcagcagcagccaccgcatcccctgtctcagctcgcccaactccagagccagcccgtccaccctggcctgctgcactcctctcccaccgctttcagggcccccccttcgtccaactccaccgccatcctccacccttcctccaggcaaggcagccagctcaatctcaatgaccacttgcttggccactctccaagttccacagctacaagtgggcctggcggaggcagccggcaccgacaggccagccccctggtgcaccggcgggacagcaaccccttcacggagatcgccatgagctcctgcaagtatagcggtggggtcatgaagcccctcagccgcctcagcgcctcccggaggaacctcatcgaggccgagactgagggccaacccctccagcttttcagccctagcaaccccccggagatcgtcatctcctcccgggaggacaaccatgcccaccagaccctgctccatcaccctaatgccacccacaaccaccagcatgccggcaccaccgccagcagcaccaccttccccaaagccaacaagcggaaaaaccaaaacattggctataagctgggacacaggagggccctgtttgaaaagagaaagcgactgagtgactatgctctgatttttgggatgtttggaattgttgttatggtgatagagaccgagctctcttggggtttgtactcaaaggactccatgttttcgttggccctgaaatgccttatcagtctgtccaccatcatccttttgggcttgatcatcgcctaccacacacgtgaagtccagctcttcgtgatcgacaatggcgcggatgactggcggatagccatgacctacgagcgcatcctgtacatcagcctggagatgctggtgtgcgccatccaccccattcctggcgagtacaagttcttctggacggcacgcctggccttctcctacacaccctcccgggcggaggccgatgtggacatcatcctgtctatccccatgttcctgcgcctgtacctgatcgcccgagtcatgctgctgcacagcaagctcttcaccgatgcctcgtcccgcagcatcggggccctcaacaagatcaacttcaacacccgctttgtcatgaagacgctcatgaccatctgccctggcactgtgctgctcgtgttcagcatctctctgtggatcattgctgcctggaccgtccgtgtctgtgaaagtcctgaatcaccagcccagccttctggctcatcacttcctgcttggtaccatgaccagcaggacgtaactagtaactttctgggtgccatgtggctcatctccatcacattcctttccattggttatggggacatggtgccccacacatactgtgggaaaggtgtctgtctcctcactggcatcatgggtgcaggctgcactgcccttgtggtggccgtggtggcccgaaagctggaactcaccaaagcggagaagcacgttcataacttcatgatggacactcagctcaccaagcggatcaagaatgctgcagccaatgtccttcgggaaacatggttaatctataaacacacaaagctgctaaagaagattgaccatgccaaagtgaggaaacaccagaggaagttcctccaagctatccaccagttgaggagcgtcaagatggaacagaggaagctgagtgaccaagccaacactctggtggacctttccaagatgcagaatgtcatgtatgacttaatcacagaactcaatgaccggagcgaagacctggagaagcagattggcagcctggagtcgaagctggagcatctcaccgccagcttcaactccctgccgctgctcatcgccgacaccctgcgccagcagcagcagcagctcctgtctgccatcatcgaggcccggggtgtcagcgtggcagtgggcaccacccacaccccaatctccgatagccccattggggtcagctccacctccttcccgaccccgtacacaagttcaagcagttgctaaataaatctccccactccagaagcattacccataggtcttaagatgcaaatcaactctctcctggtcgctttgccatcaagaaacattcagaccagggaacggaaagaagagagaccgagctaattaactaactcatgttcattcagcgtgcttggtccgacatgccttgaaaccagaaatctaatctctgtttaggtgcctctacttgggagcgggaagaggagatgacaggaagcgacgcctctggcagggcccttgctgcagagttggtggagaacagaaatccacgctcaatctcaggtcttcacgcggggggtgggggtcagatgcactgaagtagccaacagcgaagccagtccagaagaggggtccgctgggagggagggttgtgtcaggcttgggggatgggctcttcgccatgggggtctttgaacacacctctctcctttccttttgtctacggaagcctctgggtgacaaaagtaaaagagagctgcccacaacttgccaaaacagatatactcgaatcagactgaaaaaaaaaaaaaaagacacagacaaataaaaagccagattttccactcgatattaatacccacataaacctgtgtgtttgcaaacgtgtacatgtacacacatacacatcccacgttcgcttcaggtcctttcttatttgagcttaatccaaataaaaagggacttgacaccttaccctgcatacaataggcaccccttacatgtgttttgagttggtctgaatctgaacatggggtgctttcagttcaggtagttagctagttctggccacattctgagtttcactgaagatgtggatcccttcagacataatgcacattgctttgtcctggatatgcaccttgcttgatttgaaatggatgccaagccaaaattgttggcattcaggagggataagcaggcttctaaaaataacagcatctgcagagttttcttcttccatccaaacaagttgtgtttcgatggtccacatgaccaggtgtatgtctgtaagtgtggagggagaggacaagaaattgtgcatgtgtgtgcagacatgcacaaacaggagcaatccaataacaccttagtgaatagaaatatggttggggatttgctgagctgtatttatccagcaacaggtttccagccccagatgttagtagtgcaaaagggccaagtgcctcaattgtgagcctctgagctaggaggagaagtgatgaagagtggcctatgtggtcccttctacctgaccttaagtcatctcaaaatgaaatattgtgagaatgaagggaacccttagggaaccttgtgggtaaggtaagtggacatggatttgtcagtagcctgttcctactgtgccatgttaatcttggtgcgaaaaactattccaatacatctcaaactccaagagacttcagaaacatcaagatttagtgtaatgagcggcgcagaaaaatgttttcattgctccataatctgaccacacgtaacatttgtgacgtgaaaaccatgactttctcattctgaggtctttggtttctgcctgtgggaaattgaatggcactgtatggactatttcatctgttgatggtaaaacaaaagggtgatttttttgcttgtggttgtcatcttgggtttacctttgtaagaagacatcatcaccattctgaaggcagtggcttggcatggagatttttattctgtagcactgggcctgttcttctaaggacagcacaaggtagacaattgtagagccaaggccactttttcaggaagatctagtctcttgctaaccctcttctttctctcttgctattgctgctgctcttttgatggtttatagtcttaatggcctgccttgataattcctttgaacactttcattagttgttttgcataccagagatgccgcacctgctgttggcttatttttttacttgttctattaactgttgattatctgaatgtttcccctcctccttgtttcatgtcccaagaatggtgctcctgttttcagtgacagttcagctgaacatataagcagatgtgtaaacagatgaagtaaccatgcagtttccttgtggcattagttccatttcacaaagtgaagaccactggtgggctgatctgagtgtgccaatcctgatcatttaaacctacagccttcaactggtgattcctacccaccgttttcattctgctataaccctgtgatatgtgtgcgtgtgggtgtgagtgtgggtgtgtgcacatatagagatttagtcttaatttcaaccaaatgacatgcaagattccactgccactcttcctggccaaaagtgtgcacagactgtgatttattcattgtggtctgtgactttaacccatcattgatgctctcacttaggtaaaccctaaagaccaaactagcaacactagtcaagggagtgactggagttatttctggtagcagtagccactggcatcctagaaacacatggacatttgtagcatgaattgacctattggtagtgcaatagctatacatgatttttattcttggcaaaagaaaatgcttcaaaaaaaaagtgatcaaacctgcacattgatcctgtaatagcaaatggaaggctatttctctgtactagcatttcagctttatgtgggaaagttacccgttctcctgcaagtacaatcaacccttgatgacttaagtattaattattctgggtgtagctcacccaagttttcttcctacatcttttggctaattccaccacacctcagcatcacagtcagatgggaaaaggggcaggtggattctcatgtcatgccttcttgtaccttattttcaagttttgtggtggaggaggtttaattatctgctcaagaatctggtatatatagccaggtgcggtggctcatgcctgtaatcccaggactttgggcaaggcgagaggatcacctgaggtcaggagttcaagaccagcctggccaacatggcaaaaccccatctctactaaaaatacaaaaattagctgggtttggtggtggacacctgtagtcccagctacttgggaggctgcggcaggagaatcacttgaaccccggaagtggaggttgcagtgagccaagatcgtgccattgcactccagcttgggtgaccgagcaagactccgtctcaaaaaaaaaaaaaaaatcggctatatgtaaaaactattaattatgtaacctcactccaatactgtactgatcaagatctgcccactcctagaggactgacccaatggcagatcccctactataatctttctgacaactcagtgacaggtaaaatcactctaatattcctaaaatatctagacacttgaattagaaatacagaaccacccccacccctgccattgcttaagccatattaaagcttcatgtactgtaaagtcagggatgtactgtgatactttaagaccactaatctcagtggaatttcaggacatagcattagttggtaaattacaccagactaggggctcactcctccttagattgaagtccaaataaaagtcttcacctttggatcaaaggccacatatatatgatcatcatcaataaattgtcataaagtgtctatgaactgctcttgccatcttcctaatacgtaacttcatgacatcatgtctctagaagtgcttaatacaatccaaaagaacaaggggggaaggccccaagtcaccactgaccgacctcagcaggggccagtggtagaacaacaatcttgtgaattaggagacatagaaaatgtacgcaaaagtaaattccaagcgctgagcatgtacaagctatttttattattaaaagccaagaaggaagagcattgaagaagtaatgattttaatatagtgggggatttcccccttaaatttttataatttccttgtgaataaacaatcatggaaaagaagaaacctagtcatacaaaatcagaataaataaaaatcttaagactggatccacatctttggccaattcatataagcacctaatacatcaatttctctgtacttaaaatgaagagaataattaatattcttaagtacaatgttttcaatagagaacaaatgaaatcacctttgtcatcaacagcagcccagactgactgtatctagatcacaccttgatgttacgtttgaatgcagtcagtagttaccaaaaagtaattagtgcacattaaatagtggtaaaatcagcagggagaaatatgggattagcacgtagttccagaaccttcctcctcctccagagtgcaactcaacaaacagtacactccaaattaagaatcaatgtttcatcccaggacaaacggtgttgctcccatcacagtaccacaactgagatactgtgaagtcattgcactaccagtaggttactactcttttgaagttactgtttttaaatcctaaaatatgtccccagttttctacattcattcttcttcccctaagagttgctagaagcagatgaaggatccctattgactctgcagggtttgatttcagtaccttagacagctatctggtgacttcccagtaggcacgaacaaccccttctctccccttgcagtcggtgggcttgatgacgccccagacagtatcctttccttctctactgccgccaaaataaacattagggaaatgggatcattaacaccactgagaaaggagtttacagggatcgcaatagtaactgtctgcttgtggtagtagaaagcttgtgccaggctgcatgaatagaaattaatgttaaactcctgttagacgagtaatatgtagatttttattgaaacagaccacagcttattaaaaagtactcagtgcaatggtatatacatatatacagatagaaaaaaatataactgtgatctttttgtcttacgccattactggaaacacccaaacgtgaactggagttccctctgaacaaaaccattgtcaaatcttcaacatatgacctccaaatctaggtgccaagtgccctgtgacagttgtttacacacctgaaaaatgtatcctggaagctgtaatcttgggcctgggctatgtgttgaaacaagcaaaagagacacatcgtgaccaaccaagctggtggaggaaaagcacaaaattcaactccaacctgcagttaggatcccaaagagatgttgacatttatagccaaaaagaaaaagtacatatatatatatatatatatatatatatatatatatatatatatatatctgaatcagatcgaagcagccaacgtccagcttcactcaagaaggacaaggaataaacaacattctctagctgtgtcatgttgtctcagtttttgaatctcaaccaggactgatccaccttcatcagatacgttttttaatggcgcaacaactcaattttggtcccagactctccattctgcactggccacgagaacaacaagagaatgacaggatgttaatggaggaaacattttcatggcaagctcagaaactgaagtgtttatattcagaatcagatgagctttaatatgaatttgcatcttgcctctgtactgcttgctattttttaatgataggagaaagcataacagtttattttaaatatgaaatatattgatatattataaaatatattgtaactttcaattaacattttgtatcaaactagtgtttagcaggtccactgtcagcctgctctcccaatgactgtttctgagtacacatcactgttagtgattgccgggcacccagaaaaagggtcctcctaccacagcctactgaactgccatattctaattctccaaggcctgggtattagagacaaaagaacattattccaagagtagaggaataattctaccctaaattctatcaagccatttcagaagagattttaaaagccatcactcctttagtagctctgcaaagccagtttaataaaagttcaggctctttctatataaattcaaaggcctcattacataaattatataagtctcaaacctagccaaccagttttcctttgacaatgtcagaattggacataagaaagagtcctgttttcctgtaacttaaaatactcaaaatcctaggcattctgagtttctccatgtacgtgaaaccggggtcggctttccaaactacacaaggcccaacaagagtccagtgtgcagatgtgcttttctaaattggcaatacccttgagggagcaaggttcccacatgtttatcaaggacatggagcccagctcctaagggagtgatgggaggagccggcaggacatgaacagccagagccagcaaagagccgggctgccttttctgctagcttcctctagctgggaggaaataaagggttcccgttgagatattgtcctttatagcaaaattaagcaactcatggaatctacacccctctttctctacagagcagctgagacatacatgtagaagttctcagttccctccttcatatggctaaggcactacttctagatgaaaacaggatgtgttcggttacagaataaagattttctagaatcagtgagcctcttctcacctgggaccctcacttgctgttgttgctttggtgcaatattgtacaggtgcaaaccaggttgcatcggggcagattaactgagcctatgtgtctcttcccttcccaagccctgaaaattcacatagatttacagatagtgcaaaacaacaagttttctcctgggaaaaggctggaatccttcaaatttcaatttatatgagcttaaaggtatataagtcatggggctcactgacattaggtattcatgctgtttgaaagagaaatgtctaaatgcccgttttcagtctgtttgtgtagctgagccctaacttgtacacaagttttcttgttatggagctaaattctctcagtgcctgtattactcctcagttatatgttaggccgagctccactaaagccatctgaactccagggcacttgtttttatcaggttacttactcaccggataatggaaattggcttattttcaattttacaattgactgatgaatgtattggtggtaattgatttatttcttcacttttttttgctactaaatgattttttcttttttaaaattattattattattattttgagatggagtctcactctgtcgcccaggctggagtgcagtggcgccatctcagctcactgcaagctctgcctcctgggttcatgcaattctcctgcctcagcctcccgagtagctgggattacaggtgcgtgccaccacgaccagctaatttttttgtatttttagtagagacagggtttcatcatgttaaccaggatggtctcgatctcctgacctcgtgatccacctgcctgggcctcccaaagtgagccactgtgcctggcccagtaagtgcttttttcttttggtttttccttctaacactgctcagaccaagacttacatttataaagagcaaatatattctgacctttcccctcaaagttgtattccatctagaatcaaggaaacaaatgcaaattcatcatttggggaaagcagacctcttgacagtaattcaagtccatggctatatgctaacccttgctactcaaagtgtggtccacagaccagcagcgttagcatcatctgtaagcttgttagaaatgcagaatctcaggccccacatcaaaccttcttcatcagaattggccttttaacaaatccccaggtgacctgtatgcaccagaaatattgataagcactggcctcacctcaccgtagtgataactaacctcgttaataattagagaatgaagctatctcttccttgagtctcatttacagaattatttgaagatgtgaaggtcctgaatgatcataaggattaaaaaaatgcatctttaaattccacttgaggttatataacttggatggtctacatcaaacataataaagtcaataagagatagtctttttccggtcttacctaaatagcactccatatccttgagccacctcaaagcccccatttttaagttttagtctttttttttttagaccagactagcaaagccatcagaatatcaggtggaacctcagggcaggtcctctggaaggctacaggagtctctgcttagcatagtacagaaattgttgtgtttctcgatccttgtgttcttcccttgaggaactcagcatctcaccagtaagaactcccctcccctagaggaaaatagcaagagaagttagtttaaccatctagaaacattgctaatctccttgaaagccaattctcttactcattgcaccaacaagaaacactccaaggtgggcaaggaaagacgtgaattctgatattggcgccataactcgatatgtacccagaaacagttatgttctaaattaatggctttaacctgttcattgtaaaaagtgccttggacttcaatctaaagaggtcagtataaatatgtatgtgtgtgtgtgacgtgtatgtaggcaaatatttacagatttatacatacataggtgcacacacatatacccgcacattcatatataatatatacatacatatataaatgcttcataatatatcatattgctattcacagctccatttcttttgtctggtcctatgtttatttgtttagtgagacctttacatagagaggttctattcggaacattgatgtattttttgtttgttttttactttttattaaaaaggtaaaggatattaaaaaaaaaaaaaaaagtcaagtgcctgaaggttttgaatggagttacggtaaactttctcaggtcaccaaagaggaaacatttttcctttggaaaacatttttctgtttcagtgactttgttttcccttggtggtaatgcataaataagagtggttaaagtgattttgtaagttttatttcaatccatttctgtggttcccataaggcaatagctaaaaatttgttcagtctagtgcccagttttctccacacatcagcatcagaagggcccggtcttcacatgctctgtgtggttttgttcgcgttgttactgtgttccttactaaggaaaggcaaatgaaattgcaggggctggagcttagaccagctccaaatatggcttccttttggtaacacacacagaaggtggactagtgggaagtctctctccctgaagcaggtgggaacctgtgtcttagaaggcagaggagtcccagtgaactctccacagctccatgggccctgcctgtctacagttatacaactgcctgtatgagtcagcctttctctaccttagccaaaggtcttctctttctgtggtgtgacagcttgtaatgaaccaacttgctctggttagaagtccctagagctccaggaagagtcgccaggtttccattgctgtgctcaaagctcaaggacacattatacttctttaaaccaactaaatctctctagctccctgcccccatggtgacactttcataataggcagggccaagtcagagaggtcatgccctgtatacagtgtcaatcagaagagacactgcaaaatgtcagaggtgaccagaaagacaacagatctctccagctgtcctcacagctgcaggcacatttgtggaattgtgagtaggaaggcttggcagccaggggatgggaaatgaatttccccaagttgaaaaccctgtacccttactttccttcccataaatttttctgtagttctaggtaaataataataataataaaaatgcaaattaggtgctttagaaggagtatgtaatatctgggactttttctaagttggtagacctaaaaaatgttttcaaaaatatatctagctgcatttctactgctgtcattccttaaagctcttcctccaaaaactccatatgaatgaatacatttaccaactcagtgattactaaataatagtactttatacttatacacagtaatacctttcatctaaggatctcaaatgccaatatattagtcatcaccctgtaaggtggatgacatattattcccattattccaatgggaaaattgggccatagaaaactgaggagcaaatgactcatctacaggaattaaatggaaaaaacaggctaggatttctcagcacactttaggagtgaatgaaaacttacaggcttcagttctactgctggccaccattggatttgtaagatccaggatgtgtattgaccacatgtgtccagacccaggcttagggcatctggaatgagagtggtgggctggtgtgtgggtctgaggatctggatgggagactgcattttcttctctgtgcaaaatatggaagtgtgaccttgaaggtgggcttagtctatggccttccccactcctgcttgaactgaagctggagagaatgggcatttttaaatgttacggcatatgctaatataatattatggcattaaataaaaacaagaagagaactgact

SEQ ID NO: 10667 - DNA, 11510 bp, Homo sapiens
  source 1..11510: mol_type = unassigned DNA
cgggtgggagcgcggaggagggaggaggcggcggcggcggcgcgtgtggctggcgggcgggagggcggctggcaccgggcttgtaaataaactgcgatgctgtcttgggctcgccggcctgggtgccgccgccgccgccgccgccccggagcgccggttccaggctcccgccgccgcgcgccctagcgcctccgcgccagcctcgcgcgccctcccagcttctccgcagcccccggcccgcgaccctcggggtcctgcggctgacccgcgcgggatgtgaccccctgaccccctgcctggcctcccctgccccccagggggcccgcctttgcctgcttttgggggggggtggggaggggcgcgcggatcatggcattggagttcccgggcttgcagccgccgccgccgcctcgttcacgcaccccgagcgccccttcttcccagagcagcagcggagaaggcgaagcggccggcgggggcgaggcagatggggctcaaggcgcgcagggcggcgggggcggctggcggcggcggcgacgggggcggcggaggcggcggggcggctaacccagccggaggggacgcggcggcggccggcgacgaggagcggaaagtggggctggcgcccggcgacgtggagcaagtcaccttggcgctcggggccggagccgacaaagacgggaccctgctgctggagggcggcggccgcgacgaggggcagcggaggaccccgcagggcatcgggctcctggccaagaccccgctgagccgcccagtcaagagaaacaacgccaagtaccggcgcatccaaactttgatctacgacgccctggagagaccgcggggctgggcgctgctttaccacgcgttggtgttcctgattgtcctggggtgcttgattctggctgtcctgaccacattcaaggagtatgagactgtctcgggagactggcttctgttactggagacatttgctattttcatctttggagccgagtttgctttgaggatctgggctgctggatgttgctgccgatacaaaggctggcggggccgactgaagtttgccaggaagcccctgtgcatgttggacatctttgtgctgattgcctctgtgccagtggttgctgtgggaaaccaaggcaatgttctggccacctccctgcgaagcctgcgcttcctgcagatcctgcgcatgctgcggatggaccggagaggtggcacctggaagcttctgggctcagccatctgtgcccacagcaaagaactcatcacggcctggtacatcggtttcctgacactcatcctttcttcatttcttgtctacctggttgagaaagacgtcccagaggtggatgcacaaggagaggagatgaaagaggagtttgagacctatgcagatgccctgtggtggggcctgatcacactggccaccattggctatggagacaagacacccaaaacgtgggaaggccgtctgattgccgccaccttttccttaattggcgtctccttttttgcccttccagcgggcatcctggggtccgggctggccctcaaggtgcaggagcaacaccgtcagaagcactttgagaaaaggaggaagccagctgctgagctcattcaggctgcctggaggtattatgctaccaaccccaacaggattgacctggtggcgacatggagattttatgaatcagtcgtctcttttcctttcttcaggaaagaacagctggaggcagcatccagccaaaagctgggtctcttggatcgggttcgcctttctaatcctcgtggtagcaatactaaaggaaagctatttacccctctgaatgtagatgccatagaagaaagtccttctaaagaaccaaagcctgttggcttaaacaataaagagcgtttccgcacggccttccgcatgaaagcctacgctttctggcagagttctgaagatgccgggacaggtgaccccatggcggaagacaggggctatgggaatgacttccccatcgaagacatgatccccaccctgaaggccgccatccgagccgtcagaattctacaattccgtctctataaaaaaaaattcaaggagactttgaggccttacgatgtgaaggatgtgattgagcagtattctgccgggcatctcgacatgctttccaggataaagtaccttcagacgagaatagatatgattttcacccctggacctccctccacgccaaaacacaagaagtctcagaaagggtcagcattcaccttcccatcccagcaatctcccaggaatgaaccatatgtagccagaccatccacatcagaaatcgaagaccaaagcatgatggggaagtttgtaaaagttgaaagacaggttcaggacatggggaagaagctggacttcctcgtggatatgcacatgcaacacatggaacggttgcaggtgcaggtcacggagtattacccaaccaagggcacctcctcgccagctgaagcagagaagaaggaggacaacaggtattccgatttgaaaaccatcatctgcaactattctgagacaggccccccggaaccaccctacagcttccaccaggtgaccattgacaaagtcagcccctatgggttttttgcacatgaccctgtgaacctgccccgagggggacccagttctggaaaggttcaggcaactcctccttcctcagcaacaacgtatgtggagaggcccacggtcctgcctatcttgactcttctcgactcccgagtgagctgccactcccaggctgacctgcagggcccctactcggaccgaatctccccccggcagagacgtagcatcacgcgagacagtgacacacctctgtccctgatgtcggtcaaccacgaggagctggagaggtctccaagtggcttcagcatctcccaggacagagatgattatgtgttcggccccaatggggggtcgagctggatgagggagaagcggtacctcgccgagggtgagacggacacagacacggaccccttcacgcccagcggctccatgcctctgtcgtccacaggggatgggatttctgattcagtatggaccccttccaataagcccatttaaaagaggtcactggctgacccctccttgtaatgtagacagactttgtatagttcacttactcttacacccgacgcttaccagcggggacaccaatggctgcatcaaatgcatgcgtgtgcgtggtggccccacccaggcaggggcttcccacagcctcttcctccccatgtcaccacaacaaagtgcttccttttcagcatggtttgcatgactttacactatataaatggttccgctaatctcttctaggatacacatttatctgctgttcttacttttaatcacgattggaccagtacagggagaaattactgatgagccatgctatttgtctgtttggttggctggtttgggttttggtttggtaagcagagaaagtagtttaagttatttctaggatcactgccctcttgtgtaaaacgctccagcaattaactgtttttgaaagcaaggaaataattttctcaacaaaaccacattgtgtatcagtggggctgcctactgagctaacattaggaaaggaatgagatagtcattgtgtctctaaaacaaagaatttaaacaaatatttaaggcaaaaccttttaaaagctctccaaaagacctcacttggcctgatgttacttagtatcatgcctcagtttccttatctgtaaaaagtggtggtaatcccaagtgtagcatttctgatgagttatgaattggcagggagaaaacacacacacacacacacacacacacacacacacacacatacacaaagttaaaatagtttccaatttatgtagccaaggacaatggaatttatcagaagtgaagtgcccctctgggcaggagctgagttcagtgcctttaaaatgaatttccaactctcatttcttcccatgatactgaagtacaaaatatccatctaaaatagaaattaaagtcaagaaggcacacagaaattttctagtccaaggacttccttttataaatgaagaatcttaggctcaggtaaagtgacatacccagagtcactcagttgtcccatagagaaccaggactcaaaagtcaggtctgcccactctccctgaccttgtttcccctcaccacaccattcttccatttatataatgcatcctagagattgtgtcaagatatatgactttgtgtcgcgtggaaagcacccagtttatccagcaggagggggatttccacttttattgcaaaacatgcttgcttgatgcaatgcatttcagatctagaaaaaaataatgcaagcaagctacatttacagatgtgtaaacaggcaaaatttccagaaccgtccaattttacttttccaaatttatggaaccaacccagattttttaaatgaaaatactaaaaccatatgtaaccgtaagacaagctaaaatgtaagcagacagcctgggaagcactgccctactgtacaggtgtgatattaagcacaagccatcctctggcctcttatgagatgttgttattctctgaaaaactttgatggaaaaggtttctgttaggcttagactgaattagctaaatgaccatgccacagtattattgtatcactcttctcacacacctaggcactggttgtggatagttgccatggtgacaatcaagataatccagatgacctaaacaaatgtctgtatgcagctgacactgctattctccctcacagtcttgtcaagagccacagtagctatggcagacatttggttgatggtttcatcatttcctaatacgagagtctggcactatgttggagagaggaatcacttcctcagagataggttcctttcaactcacatgtcaacagttactgtacaaaaagctcagaatacagtaatgattagagcttgacccctgactttaggaacttagaaccaaagcccaaagtcccaggccaagggcagacattgtgagcagcagaagggtgttttttatggagagccccataaatggatgggtgtagaccttgaagtctgagatgggaaatataccagaatgctcaatgcatcagacatgaagccccacgggcttccatttgacatgctggcaatctgaaggacaaagggcatgggttatttgggccttttccccactccttcaatatggctgaaagtgccagtggggattacaacctaagaaaccctatgccccttcctgagggcttgattattgaatcctgatcttcctggaatctttcacttgagatgatcacctgcctaacatccaacatgttactatgctcttctttatgtacatgagttactggaaaccaacaataaaggagagtgagtcatactctccacatatgcgccaattaattttttaacttacttattagtattcttgaagaacttactatcttaagtattttaccaatagatgatgcattttccagcaactcaatggagttctaccttaaagtatttaccattgatccaaaattggaggaactaccttagattcttttaataacctagaaaggattggagcttgtattatttcctaaaccataggcaggcagtctagcttccctgctggatcataagaccaggacagcagagattgggtttgtattgatcagtagtagggaagtattgattgtctaacatctagtaagttgtctttatcagtatagacatagacaaaatacatgttttatgaatgaataaataataagaaccttaagagctgtttttttcccatttaagaaaacaaaaaggaaaagagaaaaatgatcttctggaataactctgctttgatattctccttttgttccccaaaaaatatattccagaaaggcaaaccaaacctgctcaagttgcctatgcacagacaatctcaacaatatggctcacagtgagcaagcagaaattcagggtctggaattgaatgtgagttatgggaagaaacagtgtgtgctttcacaaagatccttttgtcagacaagggaacagcatgataatccaatggaactggttaacatgacccaagatgacatgaccacagatatactagtcgttctgaaacttgcccaagaaattgcaatcgtttcagcagaactccatgaaatattgacaaattaattccatcatcaaactaggagtgatattatcaggtaaaactatgatctcatgtatgtatttggtctttctgggtcacaatgtgacatgaaaaattttaaaggtcatattttagcaagatcaaaatgaattagataaatcaacttcacaaatgttaagcgaaacatgatcctattgagctgagaaagaagtacttgagatcgtttgagttttgactatcaaatgtcagcacaaaagcaaatatcaaaagcttaagaaaaaaattatttcaggaaaagaaaaacacatcaaattgagaaagtgttgttgaataactttgtttttagaactggaaatttaggcttattagacatgacattgatattacaaagccctagttttcatgaaaacataactagataaccccaaggtgtataggttaaaatgaactaattaatcaacaattatgcatcctgtgtctattttgtgcaaggtacttcctagacactgtagtttgaaagaataatttcctgtagaaaaacctaatctaataggacctactcataatttggcaaaatcatcctcataattccatgctactgaaatgggggtgtaataaagaaaaaatcatttgtttattcatttaacagggtttattaagcaccaatatatgcccagaactttgcagtgcactggaagttcagagataagaaaaccacagtttctgccatcaaaatgctaggaatctagaggtctcaaacatcagaggtcccttcaaactatgtctaccaggaaaataaaatacctgatttcatccctgcaaacaactctatacagacagaaatgcttcctagcttggaaactatagaaaattgaacatgaaaatgagagcaaaggttctacatcaaaatggcaatgatccaatcagcccagtcaaggctgagtgggttgaatggggacttcgagtttggattcaatgctttgaacttcatagctccagagaagctgtgcaaaaaggggggattctagggaatctgaggaagattgttggagaaaccagctttcttcttgtctcctaatccctgctaagattgataccagtcaaggagctgagttactttcatttcattatgttgaccaagagaagcttatgatacagactatgacacagcacctatttcaagagaaagatgttactctacttatgggaacctgcagatcaaattctcctggggcaagagaagaaatttgttcagcagcctaagaagtcaactgtactttggacagtgctgccaaacacaccccaggattctcccacccctgtgctttcccagaagatgccacatagctggtatttggttttcatgaataaccaaagattcttctttgcttcctgaaccccaggcatccttaggaatttgcttcatgtcctcacttgtccttgaaggcttgtttttcaggatgaacttttaaagtctaagttgtttatattcaaatcaacccaatgctattgttgctgatattaaaccattccaaactgagccaactggcccctaaacaagccagcaggcagcccctcactaatgcccagtttagaacatgttaggaccaggctatctgcatagctttagtggttttagaagccagtaatggcagtgtaaaagaggaatcatacagagatgacctggaagaaaatttgagtttcagcacattcaaaagcatttgactcttctgccgtgttttgattttcaagtgagacaatcaatgtacacacaaagcctctagtacaatgactgatgcatactagggactgttatttatgttatttttttacagtatgcatggacttcattgtctcagtctttggtgttacttataaactctaaatttacaccaaaaaaattttttttcagaaaaagaatcgtggagaaacaatcctaattattaaatcaaatgctttcacaattgctttttaaataagtacatctctgcaaataaaaatgcttgctcttgtctaccacaataaagaacagaaggaatcttggaatgaagagaggcaggaatgttggatctcagtggctgagttgtggcaattccattggacatatagtaccagatgttgcaccatctggatgatgtgtaggagataaagccaaattgcaaaaataaaagactcatgatttcccaaggaaagtcaactgtgcatggtggctatcagacaacaccctagcaatgaatgggggaacttgcagaagaaagagttaatgcttgcttaaaccttccctggggagatttgttcccaggctttcacggctttaacctcagcaaccctgtaagaaaattgtgattcatattttgatttgttatcatagatgcaaagagacataatttcatggattctaagatacacagagcaagaagagattttgatcacccagaacaaccacctgtctttttagatcaagaagcagaagctcagagcaaagaacatcacaccacgtccctcagtgattgaagcagtgattgagtcacagaataaatctggaactcaggtcttctgatctttgctccagatgttagagacaaaactaaaagtaaaataccaagtgaaatcaaagcatcacgattgagcccagaacatgaaaaagaacttcctggcccacttgagaaactgttaaaccggacatacctttggggacttcttcccttctctggaataagattgatgtttccatgctgtgaaagacgatgatgttccttctcccagattcctgctgtcttcaaaaggcctagcaaaaaccactgctgctgggtgcagttgagaaagggaatgaagaacaatcccatggccatgcaggcactcctcccctccacctctctgccctccacccctctgccctctcctaccttgttccttcttggtcctgccatgtttggactggttcacctttttggcccatcacttgggctcattcagcaacagtcatgccttaggttgcatcctcatctataggccaattaaacagggtttcttcttgataaatccctatggttttgattttaggaagtcaggcatgatttcttttgggatctatatgacccaaagtggccagttttaccaaaggtgtccctttgcactgggatctctgggtctcatttgaacacagcttgggtcctcttgccttgtcccagagaatccccatgttgtcaggacataagcagatactctagggccttcaccaaaagctacaaagaagcagacaggactcaacttaggacatcttatggttatgtaactaagagattattttaggaagtaaacaggcctctgttggctcaaatgaacatcttcattgttagtttccacttacattgttctcgggataaatcggccagaatttggcagggctccccagcagtccttgtgaatccctgtggtaggatgtttcagttctcctgagtcaggctgaagtgaaagctcctaagagatattcagaaagaaggatggtcaagttctagaacaacaatagttggcccagtaattttaaagattgtcattctacctaagccttcatcctccagatagcactgttatgggcttaaaataagcttcaagggaaataatgaatttctttgacaccgccaaaaatcggctgtatataagaataacttgagaatggcttacaatgaggtagtcaaaagcccagctcagtgctcaggaatgtatttgtaattcctcttagacttgtcgaatggactgcaatttgatacctaagagtaataaaaaatgagaccatattttatgttaatgttcccttctcttcctctgcccacaaaagtgaggtcagggaaggggagagaaacttatcctaagcactccttatgagttgcttgtgacatgatagctctctctaaagttcatgcaatcctcatcgcaaccccatgagggagatgttattgtctccatcttatagatgaggaaactgaagacaagaccttgtcaaaggtcacacattgtaagaagtagagctgcatattcaaccaaagcccgtgtacctggaaagctcattctctctcccccttcttcctctcaaatcaggccctagctcctccacaatgcttcgggcttctacgttcactcagctttacagtaaaatgatcacagacccatgagttccctggagagtagagtgatgcctgggtcagctgttcctcttgtctgttcagcaggtcctttgagtggcttcacaatccagctgtcagtggcagaaaataatgcctcataaattattcacctggttcacattggaatccattagctctcggggcttggtgtggctgcagatcatccacaagtgccccttgttctctgcccccaaggagctcctgtcattgtttttaaccaaacaagttcaaatatctccacgtctctgctgactctggtcttttgtctctagactgtacctttatttctgagctctgaaattctgcagaaacaggtgagtctataaaaacattctgtgggaggccaaaagctcagaacagttgtgtctctctttctcagtattaaaagatcaaggtttcccatggaagccaacctgatctggtaattgggcccttctatacccctctgaatacttttccaaggagggggcagttcccacccccatagttcccctgagggttaagagtccaggtggtggccaagttgcaagatttggggcagccattttgccaaggatcagagatttgctgttggagaggtgaagtcggctctgtgccatcctgaaaaatcaacttagaaagataggtggacttcatcagatttgtcagtccttccttgttttaaagagaaaaatgatctctgccttgcttcagataggatatggctattttttttccttctttttctaatgtagcagtgatggaaaacaccagtctttgaagaacaaatggaggttcccagtgacatgaatccattatatttgattttggattgtattttttaacccctttttatggcatagaattctggtgccttgctccctgggtttgtctctgtgctacgagtaggctttcttcacattctggcttacaggggaacacaactattccacaagtggcctttagtgctctttataatatgatttcctgtaatttttaaactgtatgtgtaatttatattctggctctgtccaatatttgaacaactttaataggttgatttccatatatattatgcaaataattcttacctgattttttatgttctatcttaaataaatactgcaccacttattaataaatagacatttcagtgatta

SEQ ID NO: 10668 - DNA, 4943 bp, Homo sapiens
  source 1..4943: mol_type = unassigned DNA
aaacagaagcaggagggccatggtggcacaggcatggaggacctcaatgaggaagcagagggaggaagcgtgtttcaggttcctgattgtcctggggtgcttgattctggctgtcctgaccacattcaaggagtatgagactgtctcgggagactggcttctgttactggagacatttgctattttcatctttggagccgagtttgctttgaggatctgggctgctggatgttgctgccgatacaaaggctggcggggccgactgaagtttgccaggaagcccctgtgcatgttggacatctttgtgctgattgcctctgtgccagtggttgctgtgggaaaccaaggcaatgttctggccacctccctgcgaagcctgcgcttcctgcagatcctgcgcatgctgcggatggaccggagaggtggcacctggaagcttctgggctcagccatctgtgcccacagcaaagaactcatcacggcctggtacatcggtttcctgacactcatcctttcttcatttcttgtctacctggttgagaaagacgtcccagaggtggatgcacaaggagaggagatgaaagaggagtttgagacctatgcagatgccctgtggtggggcctgatcacactggccaccattggctatggagacaagacacccaaaacgtgggaaggccgtctgattgccgccaccttttccttaattggcgtctccttttttgcccttccagcgggcatcctggggtccgggctggccctcaaggtgcaggagcaacaccgtcagaagcactttgagaaaaggaggaagccagctgctgagctcattcaggctgcctggaggtattatgctaccaaccccaacaggattgacctggtggcgacatggagattttatgaatcagtcgtctcttttcctttcttcaggaaagaacagctggaggcagcatccagatgccatagaagaaagtccttctaaagaaccaaagcctgttggcttaaacaataaagagcgtttccgcacggccttccgcatgaaagcctacgctttctggcagagttctgaagatgccgggacaggtgaccccatggcggaagacaggggctatgggaatgacttccccatcgaagacatgatccccaccctgaaggccgccatccgagccgtcagaattctacaattccgtctctataaaaaaaaattcaaggagactttgaggccttacgatgtgaaggatgtgattgagcagtattctgccgggcatctcgacatgctttccaggataaagtaccttcagacgagaatagatatgattttcacccctggacctccctccacgccaaaacacaagaagtctcagaaagggtcagcattcaccttcccatcccagcaatctcccaggaatgaaccatatgtagccagaccatccacatcagaaatcgaagaccaaagcatgatggggaagtttgtaaaagttgaaagacaggttcaggacatggggaagaagctggacttcctcgtggatatgcacatgcaacacatggaacggttgcaggtgcaggtcacggagtattacccaaccaagggcacctcctcgccagctgaagcagagaagaaggaggacaacaggtattccgatttgaaaaccatcatctgcaactattctgagacaggccccccggaaccaccctacagcttccaccaggtgaccattgacaaagtcagcccctatgggttttttgcacatgaccctgtgaacctgccccgagggggacccagttctggaaaggttcaggcaactcctccttcctcagcaacaacgtatgtggagaggcccacggtcctgcctatcttgactcttctcgactcccgagtgagctgccactcccaggctgacctgcagggcccctactcggaccgaatctccccccggcagagacgtagcatcacgcgagacagtgacacacctctgtccctgatgtcggtcaaccacgaggagctggagaggtctccaagtggcttcagcatctcccaggacagagatgattatgtgttcggccccaatggggggtcgagctggatgagggagaagcggtacctcgccgagggtgagacggacacagacacggaccccttcacgcccagcggctccatgcctctgtcgtccacaggggatgggatttctgattcagtatggaccccttccaataagcccatttaaaagaggtcactggctgacccctccttgtaatgtagacagactttgtatagttcacttactcttacacccgacgcttaccagcggggacaccaatggctgcatcaaatgcatgcgtgtgcgtggtggccccacccaggcaggggcttcccacagcctcttcctccccatgtcaccacaacaaagtgcttccttttcagcatggtttgcatgactttacactatataaatggttccgctaatctcttctaggatacacatttatctgctgttcttacttttaatcacgattggaccagtacagggagaaattactgatgagccatgctatttgtctgtttggttggctggtttgggttttggtttggtaagcagagaaagtagtttaagttatttctaggatcactgccctcttgtgtaaaacgctccagcaattaactgtttttgaaagcaaggaaataattttctcaacaaaaccacattgtgtatcagtggggctgcctactgagctaacattaggaaaggaatgagatagtcattgtgtctctaaaacaaagaatttaaacaaatatttaaggcaaaaccttttaaaagctctccaaaagacctcacttggcctgatgttacttagtatcatgcctcagtttccttatctgtaaaaagtggtggtaatcccaagtgtagcatttctgatgagttatgaattggcagggagaaaacacacacacacacacacacacacacacacacacacacatacacaaagttaaaatagtttccaatttatgtagccaaggacaatggaatttatcagaagtgaagtgcccctctgggcaggagctgagttcagtgcctttaaaatgaatttccaactctcatttcttcccatgatactgaagtacaaaatatccatctaaaatagaaattaaagtcaagaaggcacacagaaattttctagtccaaggacttccttttataaatgaagaatcttaggctcaggtaaagtgacatacccagagtcactcagttgtcccatagagaaccaggactcaaaagtcaggtctgcccactctccctgaccttgtttcccctcaccacaccattcttccatttatataatgcatcctagagattgtgtcaagatatatgactttgtgtcgcgtggaaagcacccagtttatccagcaggagggggatttccacttttattgcaaaacatgcttgcttgatgcaatgcatttcagatctagaaaaaaataatgcaagcaagctacatttacagatgtgtaaacaggcaaaatttccagaaccgtccaattttacttttccaaatttatggaaccaacccagattttttaaatgaaaatactaaaaccatatgtaaccgtaagacaagctaaaatgtaagcagacagcctgggaagcactgccctactgtacaggtgtgatattaagcacaagccatcctctggcctcttatgagatgttgttattctctgaaaaactttgatggaaaaggtttctgttaggcttagactgaattagctaaatgaccatgccacagtattattgtatcactcttctcacacacctaggcactggttgtggatagttgccatggtgacaatcaagataatccagatgacctaaacaaatgtctgtatgcagctgacactgctattctccctcacagtcttgtcaagagccacagtagctatggcagacatttggttgatggtttcatcatttcctaatacgagagtctggcactatgttggagagaggaatcacttcctcagagataggttcctttcaactcacatgtcaacagttactgtacaaaaagctcagaatacagtaatgattagagcttgacccctgactttaggaacttagaaccaaagcccaaagtcccaggccaagggcagacattgtgagcagcagaagggtgttttttatggagagccccataaatggatgggtgtagaccttgaagtctgagatgggaaatataccagaatgctcaatgcatcagacatgaagccccacgggcttccatttgacatgctggcaatctgaaggacaaagggcatgggttatttgggccttttccccactccttcaatatggctgaaagtgccagtggggattacaacctaagaaaccctatgccccttcctgagggcttgattattgaatcctgatcttcctggaatctttcacttgagatgatcacctgcctaacatccaacatgttactatgctcttctttatgtacatgagttactggaaaccaacaataaaggagagtgagtcatactctccacatatgcgccaattaattttttaacttacttattagtattcttgaagaacttactatcttaagtattttaccaatagatgatgcattttccagcaactcaatggagttctaccttaaagtatttaccattgatccaaaattggaggaactaccttagattcttttaataacctagaaaggattggagcttgtattatttcctaaaccataggcaggcagtctagcttccctgctggatcataagaccaggacagcagagattgggtttgtattgatcagtagtagggaagtattgattgtctaacatctagtaagttgtctttatcagtatagacatagacaaaatacatgttttatgaatgaataaataataagaaccttaagagctgtttttttcc

SEQ ID NO: 10669 - DNA, 2577 bp, Homo sapiens
  source 1..2577: mol_type = unassigned DNA
acttgttaaaaatcttgttcttgcattcattaccttatgaagcctgcagaacacgccacgatgttcctgattgtcctggggtgcttgattctggctgtcctgaccacattcaaggagtatgagactgtctcgggagactggcttctgttactggagacatttgctattttcatctttggagccgagtttgctttgaggatctgggctgctggatgttgctgccgatacaaaggctggcggggccgactgaagtttgccaggaagcccctgtgcatgttggacatctttgtgctgattgcctctgtgccagtggttgctgtgggaaaccaaggcaatgttctggccacctccctgcgaagcctgcgcttcctgcagatcctgcgcatgctgcggatggaccggagaggtggcacctggaagcttctgggctcagccatctgtgcccacagcaaagaactcatcacggcctggtacatcggtttcctgacactcatcctttcttcatttcttgtctacctggttgagaaagacgtcccagaggtggatgcacaaggagaggagatgaaagaggagtttgagacctatgcagatgccctgtggtggggcctgatcacactggccaccattggctatggagacaagacacccaaaacgtgggaaggccgtctgattgccgccaccttttccttaattggcgtctccttttttgcccttccagcgggcatcctggggtccgggctggccctcaaggtgcaggagcaacaccgtcagaagcactttgagaaaaggaggaagccagctgctgagctcattcaggctgcctggaggtattatgctaccaaccccaacaggattgacctggtggcgacatggagattttatgaatcagtcgtctcttttcctttcttcaggaaagaacagctggaggcagcatccagccaaaagctgggtctcttggatcgggttcgcctttctaatcctcgtggtagcaatactaaaggaaagctatttacccctctgaatgtagatgccatagaagaaagtccttctaaagaaccaaagcctgttggcttaaacaataaagagcgtttccgcacggccttccgcatgaaagcctacgctttctggcagagttctgaagatgccgggacaggtgaccccatggcggaagacaggggctatgggaatgacttccccatcgaagacatgatccccaccctgaaggccgccatccgagccgtcagaattctacaattccgtctctataaaaaaaaattcaaggagactttgaggccttacgatgtgaaggatgtgattgagcagtattctgccgggcatctcgacatgctttccaggataaagtaccttcagacgagaatagatatgattttcacccctggacctccctccacgccaaaacacaagaagtctcagaaagggtcagcattcaccttcccatcccagcaatctcccaggaatgaaccatatgtagccagaccatccacatcagaaatcgaagaccaaagcatgatggggaagtttgtaaaagttgaaagacaggttcaggacatggggaagaagctggacttcctcgtggatatgcacatgcaacacatggaacggttgcaggtgcaggtcacggagtattacccaaccaagggcacctcctcgccagctgaagcagagaagaaggaggacaacaggtattccgatttgaaaaccatcatctgcaactattctgagacaggccccccggaaccaccctacagcttccaccaggtgaccattgacaaagtcagcccctatgggttttttgcacatgaccctgtgaacctgccccgagggggacccagttctggaaaggttcaggcaactcctccttcctcagcaacaacgtatgtggagaggcccacggtcctgcctatcttgactcttctcgactcccgagtgagctgccactcccaggctgacctgcagggcccctactcggaccgaatctccccccggcagagacgtagcatcacgcgagacagtgacacacctctgtccctgatgtcggtcaaccacgaggagctggagaggtctccaagtggcttcagcatctcccaggacagagatgattatgtgttcggccccaatggggggtcgagctggatgagggagaagcggtacctcgccgagggtgagacggacacagacacggaccccttcacgcccagcggctccatgcctctgtcgtccacaggggatgggatttctgattcagtatggaccccttccaataagcccatttaaaagaggtcactggctgacccctccttgtaatgtagacagactttgtatagttcacttactcttacacccgacgcttaccagcggggacaccaatggctgcatcaaatgcatgcgtgtgcgtggtggccccacccaggcaggggcttcccacagcctcttcctccccatgtcaccacaacaaagtgcttccttttcagcatggtttgcatgactttacactatataaatggttccgctaatctcttctaggatacacatttatctgctgttcttacttttaat

SEQ ID NO: 10670 - DNA, 2801 bp, Homo sapiens
  source 1..2801: mol_type = unassigned DNA
cagagcagcagcggagaaggcgaagcggccggcgggggcgaggcagatggggctcaaggcgcgcagggcggcgggggcggctggcggcggcggcgacgggggcggcggaggcggcggggcggctaacccagccggaggggacgcggcggcggccggcgacgaggagcggaaagtggggctggcgcccggcgacgtggagcaagtcaccttggcgctcggggccggagccgacaaagacgggaccctgctgctggagggcggcggccgcgacgaggggcagcggaggaccccgcagggcatcgggctcctggccaagaccccgctgagccgcccagtcaagagaaacaacgccaagtaccggcgcatccaaactttgatctacgacgccctggagagaccgcggggctgggcgctgctttaccacgcgttggtgttcctgattgtcctggggtgcttgattctggctgtcctgaccacattcaaggagtatgagactgtctcgggagactggcttctgttactggagacatttgctattttcatctttggagccgagtttgctttgaggatctgggctgctggatgttgctgccgatacaaaggctggcggggccgactgaagtttgccaggaagcccctgtgcatgttggacatctttgtgctgattgcctctgtgccagtggttgctgtgggaaaccaaggcaatgttctggccacctccctgcgaagcctgcgcttcctgcagatcctgcgcatgctgcggatggaccggagaggtggcacctggaagcttctgggctcagccatctgtgcccacagcaaagaactcatcacggcctggtacatcggtttcctgacactcatcctttcttcatttcttgtctacctggttgagaaagacgtcccagaggtggatgcacaaggagaggagatgaaagaggagtttgagacctatgcagatgccctgtggtggggcctgatcacactggccaccattggctatggagacaagacacccaaaacgtgggaaggccgtctgattgccgccaccttttccttaattggcgtctccttttttgcccttccagcgggcatcctggggtccgggctggccctcaaggtgcaggagcaacaccgtcagaagcactttgagaaaaggaggaagccagctgctgagctcattcaggctgcctggaggtattatgctaccaaccccaacaggattgacctggtggcgacatggagattttatgaatcagtcgtctcttttcctttcttcaggaaagaacagctggaggcagcatccagccaaaagctgggtctcttggatcgggttcgcctttctaatcctcgtggtagcaatactaaaggaaagctatttacccctctgaatgtagatgccatagaagaaagtccttctaaagaaccaaagcctgttggcttaaacaataaagagcgtttccgcacggccttccgcatgaaagcctacgctttctggcagagttctgaagatgccgggacaggtgaccccatggcggaagacaggggctatgggaatgacttccccatcgaagacatgatccccaccctgaaggccgccatccgagccgtcagaattctacaattccgtctctataaaaaaaaattcaaggagactttgaggccttacgatgtgaaggatgtgattgagcagtattctgccgggcatctcgacatgctttccaggataaagtaccttcagacgagaatagatatgattttcacccctggacctccctccacgccaaaacacaagaagtctcagaaagggaatgaaccatatgtagccagaccatccacatcagaaatcgaagaccaaagcatgatggggaagtttgtaaaagttgaaagacaggttcaggacatggggaagaagctggacttcctcgtggatatgcacatgcaacacatggaacggttgcaggtgcaggtcacggagtattacccaaccaagggcacctcctcgccagctgaagcagagaagaaggaggacaacaggtattccgatttgaaaaccatcatctgcaactattctgagacaggccccccggaaccaccctacagcttccaccaggtgaccattgacaaagtcagcccctatgggttttttgcacatgaccctgtgaacctgccccgagggggacccagttctggaaaggttcaggcaactcctccttcctcagcaacaacgtatgtggagaggcccacggtcctgcctatcttgactcttctcgactcccgagtgagctgccactcccaggctgacctgcagggcccctactcggaccgaatctccccccggcagagacgtagcatcacgcgagacagtgacacacctctgtccctgatgtcggtcaaccacgaggagctggagaggtctccaagtggcttcagcatctcccaggacagagatgattatgtgttcggccccaatggggggtcgagctggatgagggagaagcggtacctcgccgagggtgagacggacacagacacggaccccttcacgcccagcggctccatgcctctgtcgtccacaggggatgggatttctgattcagtatggaccccttccaataagcccatttaaaagaggtcactggctgacccctccttgtaatgtagacagactttgtatagttcacttactcttacacccgacgcttaccagcggggacaccaatggctgcatcaaatgcatgcgtgtgcgtggtggccccacccaggcaggggcttcccacagcctcttcctccccatgtca

SEQ ID NO: 10671 - DNA, 3464 bp, Homo sapiens
  source 1..3464: mol_type = unassigned DNA
gacgaggggcagcggaggaccccgcagggcatcgggctcctggccaagaccccgctgagccgcccagtcaagagaaacaacgccaagtaccggcgcatccaaactttgatctacgacgccctggagagaccgcggggctgggcgctgctttaccacgcgttggtgttcctgattgtcctggggtgcttgattctggctgtcctgaccacattcaaggagtatgagactgtctcgggagactggcttctgttactggagacatttgctattttcatctttggagccgagtttgctttgaggatctgggctgctggatgttgctgccgatacaaaggctggcggggccgactgaagtttgccaggaagcccctgtgcatgttggacatctttgtgctgattgcctctgtgccagtggttgctgtgggaaaccaaggcaatgttctggccacctccctgcgaagcctgcgcttcctgcagatcctgcgcatgctgcggatggaccggagaggtggcacctggaagcttctgggctcagccatctgtgcccacagcaaagaactcatcacggcctggtacatcggtttcctgacactcatcctttcttcatttcttgtctacctggttgagaaagacgtcccagaggtggatgcacaaggagaggagatgaaagaggagtttgagacctatgcagatgccctgtggtggggcctgatcacactggccaccattggctatggagacaagacacccaaaacgtgggaaggccgtctgattgccgccaccttttccttaattggcgtctccttttttgcccttccagcgggcatcctggggtccgggctggccctcaaggtgcaggagcaacaccgtcagaagcactttgagaaaaggaggaagccagctgctgagctcattcaggctgcctggaggtattatgctaccaaccccaacaggattgacctggtggcgacatggagattttatgaatcagtcgtctcttttcctttcttcaggaaagaacagctggaggcagcatccagccaaaagctgggtctcttggatcgggttcgcctttctaatcctcgtggtagcaatactaaaggaaagctatttacccctctgaatgtagatgccatagaagaaagtccttctaaagaaccaaagcctgttggcttaaacaataaagagcgtttccgcacggccttccgcatgaaagcctacgctttctggcagagttctgaaggtaatgcctttttatctccctccctgtctcttccacttcttcctcccccaagtccacttccttcctcacctctccctttgcccacttaagaacctttgactccacaaggtaactctctcccttccctcgacaagccaacttcttgcttccctaactcctcctgtcccttgggctgaggcattgtgatgtattcccaggagtctagggctgcaggctcccaagttaggagcctggaaacctgtcaccttggtttctaagggtccgccccgaccccccgccccatgattggattgttatggaggtcaacttgaaggatggggcggtgccaggtgcaaagcaatttagagaccagggcacgggaagagtggcagaaaagcgccctctggaggctgtaggagccatggcctcatgtgcctcttttacttatgcaaagggaggacatgcagaaaagcctgtttcctcagtgtctgagcccacccaggccctcaatcctcattgtatcattcagttctctccaaggcctctgatgtgtgcggctcagaaagtgacttctccaaggtcaccaggatagagactgacagagcaaaagtcccagctgaggcctgcacagtgtgtgttgtttgctggcttctgtgtcctttgctggcttctggctctgggggccactctggaactgcggagctcacttctcctccctgctagccttttccctcactaccagtcatgagctgcgcacacttttgacttggacttctgggtaatagaatgagggtgccaagaaaggctgaacagcatcacagcttgagaataccgtggagtcttgcaacgtggaaataaagactctggggattgacacatccagaggcgtggaaggctttgaccgaacagtggggtccccaagccttttccaggtctgtggcctgccgttcatatgtgtgtctccctcccagatgccgggacaggtgaccccatggcggaagacaggggctatgggaatgacttccccatcgaagacatgatccccaccctgaaggccgccatccgagccgtcagaattctacaattccgtctctataaaaaaaaattcaaggagactttgaggccttacgatgtgaaggatgtgattgagcagtattctgccgggcatctcgacatgctttccaggataaagtaccttcagacgagaatagatatgattttcacccctggacctccctccacgccaaaacacaagaagtctcagaaagggtcagcattcaccttcccatcccagcaatctcccaggaatgaaccatatgtagccagaccatccacatcagaaatcgaagaccaaagcatgatggggaagtttgtaaaagttgaaagacaggttcaggacatggggaagaagctggacttcctcgtggatatgcacatgcaacacatggaacggttgcaggtgcaggtcacggagtattacccaaccaagggcacctcctcgccagctgaagcagagaagaaggaggacaacaggtattccgatttgaaaaccatcatctgcaactattctgagacaggccccccggaaccaccctacagcttccaccaggtgaccattgacaaagtcagcccctatgggttttttgcacatgaccctgtgaacctgccccgagggggacccagttctggaaaggttcaggcaactcctccttcctcagcaacaacgtatgtggagaggcccacggtcctgcctatcttgactcttctcgactcccgagtgagctgccactcccaggctgacctgcagggcccctactcggaccgaatctccccccggcagagacgtagcatcacgcgagacagtgacacacctctgtccctgatgtcggtcaaccacgaggagctggagaggtctccaagtggcttcagcatctcccaggacagagatgattatgtgttcggccccaatggggggtcgagctggatgagggagaagcggtacctcgccgagggtgagacggacacagacacggaccccttcacgcccagcggctccatgcctctgtcgtccacaggggatgggatttctgattcagtatggaccccttccaataagcccatttaaaagaggtcactggctgacccctccttgtaatgtagacagactttgtatagttcacttactcttacacccgacgcttaccagcggggacaccaatggctgcatcaaatgcatgcgtgt

SEQ ID NO: 10672 - DNA, 2190 bp, Homo sapiens
  source 1..2190: mol_type = unassigned DNA
gtgtctgtgtgggaagggagagcaaacagaagcaggagggccatggtggcacaggcatggaggacctcaatgaggaagcagagggaggaagcgtgtttcaggttcctgattgtcctggggtgcttgattctggctgtcctgaccacattcaaggagtatgagactgtctcgggagactggcttctgttactggagacatttgctattttcatctttggagccgagtttgctttgaggatctgggctgctggatgttgctgccgatacaaaggctggcggggccgactgaagtttgccaggaagcccctgtgcatgttggacatctttgtgctgattgcctctgtgccagtggttgctgtgggaaaccaaggcaatgttctggccacctccctgcgaagcctgcgcttcctgcagatcctgcgcatgctgcggatggaccggagaggtggcacctggaagcttctgggctcagccatctgtgcccacagcaaagaactcatcacggcctggtacatcggtttcctgacactcatcctttcttcatttcttgtctacctggttgagaaagacgtcccagaggtggatgcacaaggagaggagatgaaagaggagtttgagacctatgcagatgccctgtggtggggcctgatcacactggccaccattggctatggagacaagacacccaaaacgtgggaaggccgtctgattgccgccaccttttccttaattggcgtctccttttttgcccttccagcgggcatcctggggtccgggctggccctcaaggtgcaggagcaacaccgtcagaagcactttgagaaaaggaggaagccagctgctgagctcattcaggctgcctggaggtattatgctaccaaccccaacaggattgacctggtggcgacatggagattttatgaatcagtcgtctcttttcctttcttcaggaaagaacagctggaggcagcatccagccaaaagctgggtctcttggatcgggttcgcctttctaatcctcgtggtagcaatactaaaggaaagctatttacccctctgaatgtagatgccatagaagaaagtccttctaaagaaccaaagcctgttggcttaaacaataaagagcgtttccgcacggccttccgcatgaaagcctacgctttctggcagagttctgaagatgccgggacaggtgaccccatggcggaagacaggggctatgggaatgacttccccatcgaagacatgatccccaccctgaaggccgccatccgagccgtcagaattctacaattccgtctctataaaaaaaaattcaaggagactttgaggccttacgatgtgaaggatgtgattgagcagtattctgccgggcatctcgacatgctttccaggataaagtaccttcagacgagaatagatatgattttcacccctggacctccctccacgccaaaacacaagaagtctcagaaagggtcagcattcaccttcccatcccagcaatctcccaggaatgaaccatatgtagccagaccatccacatcagaaatcgaagaccaaagcatgatggggaagtttgtaaaagttgaaagacaggttcaggacatggggaagaagctggacttcctcgtggatatgcacatgcaacacatggaacggttgcaggtgcaggtcacggagtattacccaaccaagggcacctcctcgccagctgaagcagagaagaaggaggacaacaggtattccgatttgaaaaccatcatctgcaactattctgagacaggccccccggaaccaccctacagcttccaccaggtgaccattgacaaagtcagcccctatgggttttttgcacatgaccctgtgaacctgccccgagggggacccagttctggaaaggttcaggcaactcctccttcctcagcaacaacgtatgtggagaggcccacggtcctgcctatcttgactcttctcgactcccgagtgagctgccactcccaggctgacctgcagggcccctactcggaccgaatctccccccggcagagacgtagcatcacgcgagacagtgacacacctctgtccctgatgtcggtcaaccacgaggagctggagaggtctccaagtggcttcagcatctcccaggacagagatgattatgtgttcggccccaatggggggtcgagc

SEQ ID NO: 10673 - DNA, 822 bp, Homo sapiens
  source 1..822: mol_type = unassigned DNA
acgaggggcagcggaggaccccgcagggcatcgggctcctggccaagaccccgctgagccgcccagtcaagagaaacaacgccaagtaccggcgcatccaaactttgatctacgacgccctggagagaccgcggggctgggcgctgctttaccacgcgttggtgttcctgattgtcctggggtgcttgattctggctgtcctgaccacattcaaggagtatgagactgtctcgggagactggcttctgttactgacatctttgtgctgattgcctctgtgccagtggttgctgtgggaaaccaaggcaatgttctggccacctccctgcgaagcctgcgcttcctgcagatcctgcgcatgctgcggatggaccggagaggtggcacctggaagcttctgggctcagccatctgtgcccacagcaaagaactcatcacggcctggtacatcggtttcctgacactcatcctttcttcatttcttgtctacctggttgagaaagacgtcccagaggtggatgcacaaggagaggagatgaaagaggagtttgagacctatgcagatgccctgtggtggggcctgatcacactggccaccattggctatggagacaagacacccaaaacgtgggaaggccgtctgattgccgccaccttttccttaattggcgtctccttttttgcccttccagcgggcatcctggggtccgggctggccctcaaggtgcaggagcaacaccgtcagaagcactttgagaaaaggaggaagccagctgctgagctcattcaggctgcctggaggtattatgctaccaaccccaa

SEQ ID NO: 10674 - DNA, 10659 bp, Homo sapiens
  source 1..10659: mol_type = unassigned DNA
aagccaaaaaagcatggtcctatgttcctgattgtcctggggtgcttgattctggctgtcctgaccacattcaaggagtatgagactgtctcgggagactggcttctgttactggagacatttgctattttcatctttggagccgagtttgctttgaggatctgggctgctggatgttgctgccgatacaaaggctggcggggccgactgaagtttgccaggaagcccctgtgcatgttggacatctttgtgctgattgcctctgtgccagtggttgctgtgggaaaccaaggcaatgttctggccacctccctgcgaagcctgcgcttcctgcagatcctgcgcatgctgcggatggaccggagaggtggcacctggaagcttctgggctcagccatctgtgcccacagcaaagaactcatcacggcctggtacatcggtttcctgacactcatcctttcttcatttcttgtctacctggttgagaaagacgtcccagaggtggatgcacaaggagaggagatgaaagaggagtttgagacctatgcagatgccctgtggtggggcctgatcacactggccaccattggctatggagacaagacacccaaaacgtgggaaggccgtctgattgccgccaccttttccttaattggcgtctccttttttgcccttccagcgggcatcctggggtccgggctggccctcaaggtgcaggagcaacaccgtcagaagcactttgagaaaaggaggaagccagctgctgagctcattcaggctgcctggaggtattatgctaccaaccccaacaggattgacctggtggcgacatggagattttatgaatcagtcgtctcttttcctttcttcaggaaagaacagctggaggcagcatccagccaaaagctgggtctcttggatcgggttcgcctttctaatcctcgtggtagcaatactaaaggaaagctatttacccctctgaatgtagatgccatagaagaaagtccttctaaagaaccaaagcctgttggcttaaacaataaagagcgtttccgcacggccttccgcatgaaagcctacgctttctggcagagttctgaagatgccgggacaggtgaccccatggcggaagacaggggctatgggaatgacttccccatcgaagacatgatccccaccctgaaggccgccatccgagccgtcagaattctacaattccgtctctataaaaaaaaattcaaggagactttgaggccttacgatgtgaaggatgtgattgagcagtattctgccgggcatctcgacatgctttccaggataaagtaccttcagacgagaatagatatgattttcacccctggacctccctccacgccaaaacacaagaagtctcagaaagggtcagcattcaccttcccatcccagcaatctcccaggaatgaaccatatgtagccagaccatccacatcagaaatcgaagaccaaagcatgatggggaagtttgtaaaagttgaaagacaggttcaggacatggggaagaagctggacttcctcgtggatatgcacatgcaacacatggaacggttgcaggtgcaggtcacggagtattacccaaccaagggcacctcctcgccagctgaagcagagaagaaggaggacaacaggtattccgatttgaaaaccatcatctgcaactattctgagacaggccccccggaaccaccctacagcttccaccaggtgaccattgacaaagtcagcccctatgggttttttgcacatgaccctgtgaacctgccccgagggggacccagttctggaaaggttcaggcaactcctccttcctcagcaacaacgtatgtggagaggcccacggtcctgcctatcttgactcttctcgactcccgagtgagctgccactcccaggctgacctgcagggcccctactcggaccgaatctccccccggcagagacgtagcatcacgcgagacagtgacacacctctgtccctgatgtcggtcaaccacgaggagctggagaggtctccaagtggcttcagcatctcccaggacagagatgattatgtgttcggccccaatggggggtcgagctggatgagggagaagcggtacctcgccgagggtgagacggacacagacacggaccccttcacgcccagcggctccatgcctctgtcgtccacaggggatgggatttctgattcagtatggaccccttccaataagcccatttaaaagaggtcactggctgacccctccttgtaatgtagacagactttgtatagttcacttactcttacacccgacgcttaccagcggggacaccaatggctgcatcaaatgcatgcgtgtgcgtggtggccccacccaggcaggggcttcccacagcctcttcctccccatgtcaccacaacaaagtgcttccttttcagcatggtttgcatgactttacactatataaatggttccgctaatctcttctaggatacacatttatctgctgttcttacttttaatcacgattggaccagtacagggagaaattactgatgagccatgctatttgtctgtttggttggctggtttgggttttggtttggtaagcagagaaagtagtttaagttatttctaggatcactgccctcttgtgtaaaacgctccagcaattaactgtttttgaaagcaaggaaataattttctcaacaaaaccacattgtgtatcagtggggctgcctactgagctaacattaggaaaggaatgagatagtcattgtgtctctaaaacaaagaatttaaacaaatatttaaggcaaaaccttttaaaagctctccaaaagacctcacttggcctgatgttacttagtatcatgcctcagtttccttatctgtaaaaagtggtggtaatcccaagtgtagcatttctgatgagttatgaattggcagggagaaaacacacacacacacacacacacacacacacacacacacatacacaaagttaaaatagtttccaatttatgtagccaaggacaatggaatttatcagaagtgaagtgcccctctgggcaggagctgagttcagtgcctttaaaatgaatttccaactctcatttcttcccatgatactgaagtacaaaatatccatctaaaatagaaattaaagtcaagaaggcacacagaaattttctagtccaaggacttccttttataaatgaagaatcttaggctcaggtaaagtgacatacccagagtcactcagttgtcccatagagaaccaggactcaaaagtcaggtctgcccactctccctgaccttgtttcccctcaccacaccattcttccatttatataatgcatcctagagattgtgtcaagatatatgactttgtgtcgcgtggaaagcacccagtttatccagcaggagggggatttccacttttattgcaaaacatgcttgcttgatgcaatgcatttcagatctagaaaaaaataatgcaagcaagctacatttacagatgtgtaaacaggcaaaatttccagaaccgtccaattttacttttccaaatttatggaaccaacccagattttttaaatgaaaatactaaaaccatatgtaaccgtaagacaagctaaaatgtaagcagacagcctgggaagcactgccctactgtacaggtgtgatattaagcacaagccatcctctggcctcttatgagatgttgttattctctgaaaaactttgatggaaaaggtttctgttaggcttagactgaattagctaaatgaccatgccacagtattattgtatcactcttctcacacacctaggcactggttgtggatagttgccatggtgacaatcaagataatccagatgacctaaacaaatgtctgtatgcagctgacactgctattctccctcacagtcttgtcaagagccacagtagctatggcagacatttggttgatggtttcatcatttcctaatacgagagtctggcactatgttggagagaggaatcacttcctcagagataggttcctttcaactcacatgtcaacagttactgtacaaaaagctcagaatacagtaatgattagagcttgacccctgactttaggaacttagaaccaaagcccaaagtcccaggccaagggcagacattgtgagcagcagaagggtgttttttatggagagccccataaatggatgggtgtagaccttgaagtctgagatgggaaatataccagaatgctcaatgcatcagacatgaagccccacgggcttccatttgacatgctggcaatctgaaggacaaagggcatgggttatttgggccttttccccactccttcaatatggctgaaagtgccagtggggattacaacctaagaaaccctatgccccttcctgagggcttgattattgaatcctgatcttcctggaatctttcacttgagatgatcacctgcctaacatccaacatgttactatgctcttctttatgtacatgagttactggaaaccaacaataaaggagagtgagtcatactctccacatatgcgccaattaattttttaacttacttattagtattcttgaagaacttactatcttaagtattttaccaatagatgatgcattttccagcaactcaatggagttctaccttaaagtatttaccattgatccaaaattggaggaactaccttagattcttttaataacctagaaaggattggagcttgtattatttcctaaaccataggcaggcagtctagcttccctgctggatcataagaccaggacagcagagattgggtttgtattgatcagtagtagggaagtattgattgtctaacatctagtaagttgtctttatcagtatagacatagacaaaatacatgttttatgaatgaataaataataagaaccttaagagctgtttttttcccatttaagaaaacaaaaaggaaaagagaaaaatgatcttctggaataactctgctttgatattctccttttgttccccaaaaaatatattccagaaaggcaaaccaaacctgctcaagttgcctatgcacagacaatctcaacaatatggctcacagtgagcaagcagaaattcagggtctggaattgaatgtgagttatgggaagaaacagtgtgtgctttcacaaagatccttttgtcagacaagggaacagcatgataatccaatggaactggttaacatgacccaagatgacatgaccacagatatactagtcgttctgaaacttgcccaagaaattgcaatcgtttcagcagaactccatgaaatattgacaaattaattccatcatcaaactaggagtgatattatcaggtaaaactatgatctcatgtatgtatttggtctttctgggtcacaatgtgacatgaaaaattttaaaggtcatattttagcaagatcaaaatgaattagataaatcaacttcacaaatgttaagcgaaacatgatcctattgagctgagaaagaagtacttgagatcgtttgagttttgactatcaaatgtcagcacaaaagcaaatatcaaaagcttaagaaaaaaattatttcaggaaaagaaaaacacatcaaattgagaaagtgttgttgaataactttgtttttagaactggaaatttaggcttattagacatgacattgatattacaaagccctagttttcatgaaaacataactagataaccccaaggtgtataggttaaaatgaactaattaatcaacaattatgcatcctgtgtctattttgtgcaaggtacttcctagacactgtagtttgaaagaataatttcctgtagaaaaacctaatctaataggacctactcataatttggcaaaatcatcctcataattccatgctactgaaatgggggtgtaataaagaaaaaatcatttgtttattcatttaacagggtttattaagcaccaatatatgcccagaactttgcagtgcactggaagttcagagataagaaaaccacagtttctgccatcaaaatgctaggaatctagaggtctcaaacatcagaggtcccttcaaactatgtctaccaggaaaataaaatacctgatttcatccctgcaaacaactctatacagacagaaatgcttcctagcttggaaactatagaaaattgaacatgaaaatgagagcaaaggttctacatcaaaatggcaatgatccaatcagcccagtcaaggctgagtgggttgaatggggacttcgagtttggattcaatgctttgaacttcatagctccagagaagctgtgcaaaaaggggggattctagggaatctgaggaagattgttggagaaaccagctttcttcttgtctcctaatccctgctaagattgataccagtcaaggagctgagttactttcatttcattatgttgaccaagagaagcttatgatacagactatgacacagcacctatttcaagagaaagatgttactctacttatgggaacctgcagatcaaattctcctggggcaagagaagaaatttgttcagcagcctaagaagtcaactgtactttggacagtgctgccaaacacaccccaggattctcccacccctgtgctttcccagaagatgccacatagctggtatttggttttcatgaataaccaaagattcttctttgcttcctgaaccccaggcatccttaggaatttgcttcatgtcctcacttgtccttgaaggcttgtttttcaggatgaacttttaaagtctaagttgtttatattcaaatcaacccaatgctattgttgctgatattaaaccattccaaactgagccaactggcccctaaacaagccagcaggcagcccctcactaatgcccagtttagaacatgttaggaccaggctatctgcatagctttagtggttttagaagccagtaatggcagtgtaaaagaggaatcatacagagatgacctggaagaaaatttgagtttcagcacattcaaaagcatttgactcttctgccgtgttttgattttcaagtgagacaatcaatgtacacacaaagcctctagtacaatgactgatgcatactagggactgttatttatgttatttttttacagtatgcatggacttcattgtctcagtctttggtgttacttataaactctaaatttacaccaaaaaaattttttttcagaaaaagaatcgtggagaaacaatcctaattattaaatcaaatgctttcacaattgctttttaaataagtacatctctgcaaataaaaatgcttgctcttgtctaccacaataaagaacagaaggaatcttggaatgaagagaggcaggaatgttggatctcagtggctgagttgtggcaattccattggacatatagtaccagatgttgcaccatctggatgatgtgtaggagataaagccaaattgcaaaaataaaagactcatgatttcccaaggaaagtcaactgtgcatggtggctatcagacaacaccctagcaatgaatgggggaacttgcagaagaaagagttaatgcttgcttaaaccttccctggggagatttgttcccaggctttcacggctttaacctcagcaaccctgtaagaaaattgtgattcatattttgatttgttatcatagatgcaaagagacataatttcatggattctaagatacacagagcaagaagagattttgatcacccagaacaaccacctgtctttttagatcaagaagcagaagctcagagcaaagaacatcacaccacgtccctcagtgattgaagcagtgattgagtcacagaataaatctggaactcaggtcttctgatctttgctccagatgttagagacaaaactaaaagtaaaataccaagtgaaatcaaagcatcacgattgagcccagaacatgaaaaagaacttcctggcccacttgagaaactgttaaaccggacatacctttggggacttcttcccttctctggaataagattgatgtttccatgctgtgaaagacgatgatgttccttctcccagattcctgctgtcttcaaaaggcctagcaaaaaccactgctgctgggtgcagttgagaaagggaatgaagaacaatcccatggccatgcaggcactcctcccctccacctctctgccctccacccctctgccctctcctaccttgttccttcttggtcctgccatgtttggactggttcacctttttggcccatcacttgggctcattcagcaacagtcatgccttaggttgcatcctcatctataggccaattaaacagggtttcttcttgataaatccctatggttttgattttaggaagtcaggcatgatttcttttgggatctatatgacccaaagtggccagttttaccaaaggtgtccctttgcactgggatctctgggtctcatttgaacacagcttgggtcctcttgccttgtcccagagaatccccatgttgtcaggacataagcagatactctagggccttcaccaaaagctacaaagaagcagacaggactcaacttaggacatcttatggttatgtaactaagagattattttaggaagtaaacaggcctctgttggctcaaatgaacatcttcattgttagtttccacttacattgttctcgggataaatcggccagaatttggcagggctccccagcagtccttgtgaatccctgtggtaggatgtttcagttctcctgagtcaggctgaagtgaaagctcctaagagatattcagaaagaaggatggtcaagttctagaacaacaatagttggcccagtaattttaaagattgtcattctacctaagccttcatcctccagatagcactgttatgggcttaaaataagcttcaagggaaataatgaatttctttgacaccgccaaaaatcggctgtatataagaataacttgagaatggcttacaatgaggtagtcaaaagcccagctcagtgctcaggaatgtatttgtaattcctcttagacttgtcgaatggactgcaatttgatacctaagagtaataaaaaatgagaccatattttatgttaatgttcccttctcttcctctgcccacaaaagtgaggtcagggaaggggagagaaacttatcctaagcactccttatgagttgcttgtgacatgatagctctctctaaagttcatgcaatcctcatcgcaaccccatgagggagatgttattgtctccatcttatagatgaggaaactgaagacaagaccttgtcaaaggtcacacattgtaagaagtagagctgcatattcaaccaaagcccgtgtacctggaaagctcattctctctcccccttcttcctctcaaatcaggccctagctcctccacaatgcttcgggcttctacgttcactcagctttacagtaaaatgatcacagacccatgagttccctggagagtagagtgatgcctgggtcagctgttcctcttgtctgttcagcaggtcctttgagtggcttcacaatccagctgtcagtggcagaaaataatgcctcataaattattcacctggttcacattggaatccattagctctcggggcttggtgtggctgcagatcatccacaagtgccccttgttctctgcccccaaggagctcctgtcattgtttttaaccaaacaagttcaaatatctccacgtctctgctgactctggtcttttgtctctagactgtacctttatttctgagctctgaaattctgcagaaacaggtgagtctataaaaacattctgtgggaggccaaaagctcagaacagttgtgtctctctttctcagtattaaaagatcaaggtttcccatggaagccaacctgatctggtaattgggcccttctatacccctctgaatacttttccaaggagggggcagttcccacccccatagttcccctgagggttaagagtccaggtggtggccaagttgcaagatttggggcagccattttgccaaggatcagagatttgctgttggagaggtgaagtcggctctgtgccatcctgaaaaatcaacttagaaagataggtggacttcatcagatttgtcagtccttccttgttttaaagagaaaaatgatctctgccttgcttcagataggatatggctattttttttccttctttttctaatgtagcagtgatggaaaacaccagtctttgaagaacaaatggaggttcccagtgacatgaatccattatatttgattttggattgtattttttaacccctttttatggcatagaattctggtgccttgctccctgggtttgtctctgtgctacgagtaggctttcttcacattctggcttacaggggaacacaactattccacaagtggcctttagtgctctttataatatgatttcctgtaatttttaaactgtatgtgtaatttatattctggctctgtccaatatttgaacaactttaataggttgatttccatatatattatgcaaataattcttacctgattttttatgttctatcttaaataaatactgcaccacttattaataaatagacatttcagtgatt

SEQ ID NO: 10675 - DNA, 6688 bp, Homo sapiens
  source 1..6688: mol_type = unassigned DNA
ggctgggtgtgcgcgcgtgggagcgcgcctcggagcgccccgcactcccccactctatccccgggggcagtttgggaaggagggagtggtagtcgcgggaatgagggagcaagagaaaccctctcaaagtgacgccccaaacaggtccggatttagaattcgaagctaaaggctgttagaaattgggactcctcggcctcctctgcagcccctcctttcccgccccgaagcccgggcggtttgctggctgcctgcttccccgcccccggctcagaggtctctggctggcgggcgccccgtcggccgccggcttcctccttgaaacccgccggcgcacatgaggccgctgcccccgccgcaggcgctggcggccccctcgcggtgcccgtggtgatgccatgccccgccaccacgcgggaggagaggagggcggcgccgccgggctctgggtgaagagcggcgcagcggcggcggcggcgggcggggggcgcttgggcagcggcatgaaggatgtggagtccggccggggcagggtgctgctgaactcggcagccgccaggggcgacggcctgctactgctgggcacccgcgcggccacgctcggtggcggcggcggtggcctgagggagagccgccggggcaagcagggggcccggatgagcctgctggggaagccgctctcttacacgagtagccagagctgccggcgcaacgtcaagtaccggcgggtgcagaactacctgtacaacgtgctggagagaccccgcggctgggcgttcatctaccacgctttcgtttttctccttgtctttggttgcttgattttgtcagtgttttctaccatccctgagcacacaaaattggcctcaagttgcctcttgatcctggagttcgtgatgattgtcgtctttggtttggagttcatcattcgaatctggtctgcgggttgctgttgtcgatatagaggatggcaaggaagactgaggtttgctcgaaagcccttctgtgttatagataccattgttcttatcgcttcaatagcagttgtttctgcaaaaactcagggtaatatttttgccacgtctgcactcagaagtctccgtttcctacagatcctccgcatggtgcgcatggaccgaaggggaggcacttggaaattactgggttcagtggtttatgctcacagcaaggaattaatcacagcttggtacataggatttttggttcttattttttcgtctttccttgtctatctggtggaaaaggatgccaataaagagttttctacatatgcagatgctctctggtggggcacaattacattgacaactattggctatggagacaaaactcccctaacttggctgggaagattgctttctgcaggctttgcactccttggcatttctttctttgcacttcctgccggcattcttggctcaggttttgcattaaaagtacaagaacaacaccgccagaaacactttgagaaaagaaggaacccagctgccaacctcattcagtgtgtttggcgtagttacgcagctgatgagaaatctgtttccattgcaacctggaagccacacttgaaggccttgcacacctgcagccctaccaagaaagaacaaggggaagcatcaagcagtaagttctgtagtaataagcagaagctcttcagaatgtacacctcacggaagcagagtcagaagctaagttttaaggagcgagtgcgcatggctagccccaggggccagagtattaagagccgacaagcctcagtaggtgacaggaggtccccaagcaccgacatcacagccgagggcagtcccaccaaagtgcagaagagctggagcttcaacgaccgaacccgcttccggccctcgctgcgcctcaaaagttctcagccaaaaccagtgatagatgctgacacagcccttggcactgatgatgtatatgatgaaaaaggatgccagtgtgatgtatcagtggaagacctcaccccaccacttaaaactgtcattcgagctatcagaattatgaaatttcatgttgcaaaacggaagtttaaggaaacattacgtccatatgatgtaaaagatgtcattgaacaatattctgctggtcatctggacatgttgtgtagaattaaaagccttcaaacacgtgttgatcaaattcttggaaaagggcaaatcacatcagataagaagagccgagagaaaataacagcagaacatgagaccacagacgatctcagtatgctcggtcgggtggtcaaggttgaaaaacaggtacagtccatagaatccaagctggactgcctactagacatctatcaacaggtccttcggaaaggctctgcctcagccctcgctttggcttcattccagatcccaccttttgaatgtgaacagacatctgactatcaaagccctgtggatagcaaagatctttcgggttccgcacaaaacagtggctgcttatccagatcaactagtgccaacatctcgagaggcctgcagttcattctgacgccaaatgagttcagtgcccagactttctacgcgcttagccctactatgcacagtcaagcaacacaggtgccaattagtcaaagcgatggctcagcagtggcagccaccaacaccattgcaaaccaaataaatacggcacccaagccagcagccccaacaactttacagatcccacctcctctcccagccatcaagcatctgcccaggccagaaactctgcaccctaaccctgcaggcttacaggaaagcatttctgacgtcaccacctgccttgttgcctccaaggaaaatgttcaggttgcacagtcaaatctcaccaaggaccgttctatgaggaaaagctttgacatgggaggagaaactctgttgtctgtctgtcccatggtgccgaaggacttgggcaaatctttgtctgtgcaaaacctgatcaggtcgaccgaggaactgaatatacaactttcagggagtgagtcaagtggctccagaggcagccaagatttttaccccaaatggagggaatccaaattgtttataactgatgaagaggtgggtcccgaagagacagagacagacacttttgatgccgcaccgcagcctgccagggaagctgcctttgcatcagactctctaaggactggaaggtcacgatcatctcagagcatttgtaaggcaggagaaagtacagatgccctcagcttgcctcatgtcaaactgaaataagttcttcattttctttccaggcatagcagttctttagccatacatatcattgcatgaactatttcgaaagcccttctaaaaagttgaaattgcaagaatcgggaagaacatgaaaggcagtttataagcccgttaccttttaattgcatgaaaatgcatgtttagggatggctaaaattccaaggtgcatcgacattaacccactcatttagtaatgtaccttgagttaaaaagcctgagaaaccaaacacagctaatgctatggggtgtatgaatatgtcaagtttaggtcatttagaagatttgacactgtattttgaaattatgggagtaaacaccttcaaatttcaggcatttctgctttgtgactaaatacaaactacattttcaagattaggccataatgtatatttaaacacaatggctatcaacagctgctaataaggtatcaactaaagcagaattggggaataatagaaatggctgcttatttcaagatatatttgccaacccattcctattcagtcattttattattaatgtaatttgaatgtcaatttgtgtgcttttggtgatttagcgctgtggcaagcaattttgcacatcattttcatgttgttctttatgacaagaatgttcttcaattagaaaatgtgcaaataatgaaattcagggccagtgaggcaaatagactatctgacatatttgactttatgaaaacatattgcctgatggcagaatcaactttataagtggtcaacttctacacaagcgtatgaaatactggtcagtagaacagccattgtgattggactggtttctctgcaatggcgccaaccccaggcttgccaatactgcctatgtaaagggcaagtgtgagaagctattctcatttcgctgacatacaggtaggactatgggggatgggacatttgagtgggactgagataggaaaggcttgaaaagaacccagaaacaccaccaggaagttggcaaagtaaaagaaaatgacttccccctcaaagggcaatgagagggagagaaacaaaccaaaatagaagaactagactttttagaaaatgagtattgctagggaattcaactacctaatcttcccttattcttatatataagcagagaatttttgcaaggtatttattttttaatatgccctgaatgtcttttgctattatgtgtacattttgcatatgaaagtctaaaacgaaacttcctttactttttatactgtagtgaaaattttctattcttcccaagaatgttgtcccaaatctgaaattactggttcaatttcctgatataaacatttacaattagaagctagatagtactggcagagtctgcaaatcagaacacttaaatatatcatggcagcaaaaagaccaagggaaacaaaatgacaaatgtatttatcagaaagcaagcaatgctgactgcttgttagaaacccatctagctatcttaggtcaccagaacttcagccaacgtaatgacattcaaaaaaaaaggacataagagatagcatttcaattcaattaaaccctagccacaggaggactcaagaaaggaagttgtttccttggcagacataaatgctgcctccagaagtacttctccagcagccaagcagaatgagcagggttatcaagtggatgttcaaaggaagaaggaggccctgaactccaccaatcctccccagccctccccaacaggctttctccatcattgactctcccctgcttttcttcttcattaactccttattcattccctgccagtattttgcttctgaacttcaccaggccttaaccagcctccatccccaggtcaaccagttctccgctttacctaaaatgtgcttctcaaccttttagaaccttgtcccttttgataaacatggaaatttttaaagcttcctcttcgcatcccacttggattctaagacaattagaatcatttagaatctttttggctgctggaaatgtatagaagatagaggctaaattttacacttcagttaagacattgtcaatccttttaagcaattgttttcattttcaaaatacagaatgttagtaaattatgaaaatcaatttttcatcttcattcaacctgaagttgtgattcccccttgcaagaatgttgcatacacacacacacacacacacacacacacacacacacacacacacacacacacacacacacacccctccactgacctaaagccagacacctgccgtgactgggcaggctctctcccattattaacagaggaagaggagggaggcagcaactttcaggtagcactgattcttggacatactctgtcctgggtcaaaccccactggcagcaggaattctgaatgtattggggacccctccttaggcctcgttaagtctcaaacacagtacagctcacccagcattgctgacgactgaagattcagaaacaaaacctacacacagcactgaggtcttaatcatagcaaaatgtgataaaccatgttgtgaaaaacttttatacattgaagccatgaccattttgtgtctatcttactctagcacaaaaattgggggatgttaaaagatagttgtgtggaagctataaggttctgtctgtcgtgttactctctgtggaaatgagaggggtctcccatttacactaagcaaatttccattggtcaattttaatgatgtcttgaagcacaatttagctgagcactgagtagccatatgctttctgagtacaagtgtgtctgccttcttcaacatgtagggttgatcaagctaatacttaattgcaaatatcccttgtatgaggttaactaaaaaaattttgctatgtctgatctacatgtttgcattttgttcaactaaattaatatttgtagattgcaagttttgtttaaaataactttattgagtttttaagtcctgatctgttctaaggtgcctttctcacctcccattgattcagtgattctgaagttcttaatttgcaagtaaaataagtctactagagaggaggaaatcaggcacaaattgaccaattctcatgccatttgcaaagcaaaactgtaaggatgatgaaacctggctaactaaattaatggatcatttcactaaatcagatagaggaaatatcataaatattaacttgtctccctagaagctgagatttttcgccttaaatgacatggttgtgtttttgtaagagaaacttaatctaatctaataatgtgcatttaagtaagcagttctaagtcatgtatgacaatgcaattgtctgtttcctgaaaacaaataaatcgggaacaccatatccatttcaagctatcattaaagtgtaatttcctttgctctcttttactgggattatttgttttaaagtaaaacattaaaaagatgtctat

SEQ ID NO: 10676 - DNA, 3527 bp, Homo sapiens
  source 1..3527: mol_type = unassigned DNA
actctatccccgggggcagtttgggaaggagggagtggtagtcgcgggaatgagggagcaagagaaaccctctcaaagtgacgccccaaacaggtccggatttagaattcgaagctaaaggctgttagaaattgggactcctcggcctcctctgcagcccctcctttcccgccccgaagcccgggcggtttgctggctgcctgcttccccgcccccggctcagaggtctctggctggcgggcgccccgtcggccgccggcttcctccttgaaacccgccggcgcacatgaggccgctgcccccgccgcaggcgctggcggccccctcgcggtgcccgtggtgatgccatgccccgccaccacgcgggaggagaggagggcggcgccgccgggctctgggtgaagagcggcgcagcggcggcggcggcgggcggggggcgcttgggcagcggcatgaaggatgtggagtccggccggggcagggtgctgctgaactcggcagccgccaggggcgacggcctgctactgctgggcacccgcgcggccacgctcggtggcggcggcggtggcctgagggagagccgccggggcaagcagggggcccggatgagcctgctggggaagccgctctcttacacgagtagccagagctgccggcgcaacgtcaagtaccggcgggtgcagaactacctgtacaacgtgctggagagaccccgcggctgggcgttcatctaccacgctttcgtttttctccttgtctttggttgcttgattttgtcagtgttttctaccatccctgagcacacaaaattggcctcaagttgcctcttgatcctggagttcgtgatgattgtcgtctttggtttggagttcatcattcgaatctggtctgcgggttgctgttgtcgatatagaggatggcaaggaagactgaggtttgctcgaaagcccttctgtgttatagataccattgttcttatcgcttcaatagcagttgtttctgcaaaaactcagggtaatatttttgccacgtctgcactcagaagtctccgtttcctacagatcctccgcatggtgcgcatggaccgaaggggaggcacttggaaattactgggttcagtggtttatgctcacagcaaggaattaatcacagcttggtacataggatttttggttcttattttttcgtctttccttgtctatctggtggaaaaggatgccaataaagagttttctacatatgcagatgctctctggtggggcacaattacattgacaactattggctatggagacaaaactcccctaacttggctgggaagattgctttctgcaggctttgcactccttggcatttctttctttgcacttcctgccggcattcttggctcaggttttgcattaaaagtacaagaacaacaccgccagaaacactttgagaaaagaaggaacccagctgccaacctcattcagtgtgtttggcgtagttacgcagctgatgagaaatctgtttccattgcaacctggaagccacacttgaaggccttgcacacctgcagccctaccaagaaagaacaaggggaagcatcaagcagaattatgaaatttcatgttgcaaaacggaagtttaaggaaacattacgtccatatgatgtaaaagatgtcattgaacaatattctgctggtcatctggacatgttgtgtagaattaaaagccttcaaacacgtgttgatcaaattcttggaaaagggcaaatcacatcagataagaagagccgagagaaaataacagcagaacatgagaccacagacgatctcagtatgctcggtcgggtggtcaaggttgaaaaacaggtacagtccatagaatccaagctggactgcctactagacatctatcaacaggtccttcggaaaggctctgcctcagccctcgctttggcttcattccagatcccaccttttgaatgtgaacagacatctgactatcaaagccctgtggatagcaaagatctttcgggttccgcacaaaacagtggctgcttatccagatcaactagtgccaacatctcgagaggcctgcagttcattctgacgccaaatgagttcagtgcccagactttctacgcgcttagccctactatgcacagtcaagcaacacaggtgccaattagtcaaagcgatggctcagcagtggcagccaccaacaccattgcaaaccaaataaatacggcacccaagccagcagccccaacaactttacagatcccacctcctctcccagccatcaagcatctgcccaggccagaaactctgcaccctaaccctgcaggcttacaggaaagcatttctgacgtcaccacctgccttgttgcctccaaggaaaatgttcaggttgcacagtcaaatctcaccaaggaccgttctatgaggaaaagctttgacatgggaggagaaactctgttgtctgtctgtcccatggtgccgaaggacttgggcaaatctttgtctgtgcaaaacctgatcaggtcgaccgaggaactgaatatacaactttcagggagtgagtcaagtggctccagaggcagccaagatttttaccccaaatggagggaatccaaattgtttataactgatgaagaggtgggtcccgaagagacagagacagacacttttgatgccgcaccgcagcctgccagggaagctgcctttgcatcagactctctaaggactggaaggtcacgatcatctcagagcatttgtaaggcaggagaaagtacagatgccctcagcttgcctcatgtcaaactgaaataagttcttcattttctttccaggcatagcagttctttagccatacatatcattgcatgaactatttcgaaagcccttctaaaaagttgaaattgcaagaatcgggaagaacatgaaaggcagtttataagcccgttaccttttaattgcatgaaaatgcatgtttagggatggctaaaattccaaggtgcatcgacattaacccactcatttagtaatgtaccttgagttaaaaagcctgagaaaccaaacacagctaatgctatggggtgtatgaatatgtcaagtttaggtcatttagaagatttgacactgtattttgaaattatgggagtaaacaccttcaaatttcaggcatttctgctttgtgactaaatacaaactacattttcaagattaggccataatgtatatttaaacacaatggctatcaacagctgctaataaggtatcaactaaagcagaattggggaataatagaaatggctgcttatttcaagatatatttgccaacccattcctattcagtcattttattattaatgtaatttgaatgtcaatttgtgtgcttttggtgatttagcgctgtggcaagcaattttgcacatcattttcatgttgttctttatgacaagaatgttcttcaattagaaaatgtgcaaataatgaaattcagggccagtgaggcaaatagactatctgacatatttgact

SEQ ID NO: 10677 - DNA, 6345 bp, Homo sapiens
  source 1..6345: mol_type = unassigned DNA
gggcgccccgtcggccgccggcttcctccttgaaacccgccggcgcacatgaggccgctgcccccgccgcaggcgctggcggccccctcgcggtgcccgtggtgatgccatgccccgccaccacgcgggaggagaggagggcggcgccgccgggctctgggtgaagagcggcgcagcggcggcggcggcgggcggggggcgcttgggcagcggcatgaaggatgtggagtccggccggggcagggtgctgctgaactcggcagccgccaggggcgacggcctgctactgctgggcacccgcgcggccacgctcggtggcggcggcggtggcctgagggagagccgccggggcaagcagggggcccggatgagcctgctggggaagccgctctcttacacgagtagccagagctgccggcgcaacgtcaagtaccggcgggtgcagaactacctgtacaacgtgctggagagaccccgcggctgggcgttcatctaccacgctttcgtttttctccttgtctttggttgcttgattttgtcagtgttttctaccatccctgagcacacaaaattggcctcaagttgcctcttgatcctggagttcgtgatgattgtcgtctttggtttggagttcatcattcgaatctggtctgcgggttgctgttgtcgatatagaggatggcaaggaagactgaggtttgctcgaaagcccttctgtgttatagataccattgttcttatcgcttcaatagcagttgtttctgcaaaaactcagggtaatatttttgccacgtctgcactcagaagtctccgtttcctacagatcctccgcatggtgcgcatggaccgaaggggaggcacttggaaattactgggttcagtggtttatgctcacagcaaggaattaatcacagcttggtacataggatttttggttcttattttttcgtctttccttgtctatctggtggaaaaggatgccaataaagagttttctacatatgcagatgctctctggtggggcacaattacattgacaactattggctatggagacaaaactcccctaacttggctgggaagattgctttctgcaggctttgcactccttggcatttctttctttgcacttcctgccggcattcttggctcaggttttgcattaaaagtacaagaacaacaccgccagaaacactttgagaaaagaaggaacccagctgccaacctcattcagtgtgtttggcgtagttacgcagctgatgagaaatctgtttccattgcaacctggaagccacacttgaaggccttgcacacctgcagccctaccaagaaagaacaaggggaagcatcaagcagtcagaagctaagttttaaggagcgagtgcgcatggctagccccaggggccagagtattaagagccgacaagcctcagtaggtgacaggaggtccccaagcaccgacatcacagccgagggcagtcccaccaaagtgcagaagagctggagcttcaacgaccgaacccgcttccggccctcgctgcgcctcaaaagttctcagccaaaaccagtgatagatgctgacacagcccttggcactgatgatgtatatgatgaaaaaggatgccagtgtgatgtatcagtggaagacctcaccccaccacttaaaactgtcattcgagctatcagaattatgaaatttcatgttgcaaaacggaagtttaaggaaacattacgtccatatgatgtaaaagatgtcattgaacaatattctgctggtcatctggacatgttgtgtagaattaaaagccttcaaacacgtgttgatcaaattcttggaaaagggcaaatcacatcagataagaagagccgagagaaaataacagcagaacatgagaccacagacgatctcagtatgctcggtcgggtggtcaaggttgaaaaacaggtacagtccatagaatccaagctggactgcctactagacatctatcaacaggtccttcggaaaggctctgcctcagccctcgctttggcttcattccagatcccaccttttgaatgtgaacagacatctgactatcaaagccctgtggatagcaaagatctttcgggttccgcacaaaacagtggctgcttatccagatcaactagtgccaacatctcgagaggcctgcagttcattctgacgccaaatgagttcagtgcccagactttctacgcgcttagccctactatgcacagtcaagcaacacaggtgccaattagtcaaagcgatggctcagcagtggcagccaccaacaccattgcaaaccaaataaatacggcacccaagccagcagccccaacaactttacagatcccacctcctctcccagccatcaagcatctgcccaggccagaaactctgcaccctaaccctgcaggcttacaggaaagcatttctgacgtcaccacctgccttgttgcctccaaggaaaatgttcaggttgcacagtcaaatctcaccaaggaccgttctatgaggaaaagctttgacatgggaggagaaactctgttgtctgtctgtcccatggtgccgaaggacttgggcaaatctttgtctgtgcaaaacctgatcaggtcgaccgaggaactgaatatacaactttcagggagtgagtcaagtggctccagaggcagccaagatttttaccccaaatggagggaatccaaattgtttataactgatgaagaggtgggtcccgaagagacagagacagacacttttgatgccgcaccgcagcctgccagggaagctgcctttgcatcagactctctaaggactggaaggtcacgatcatctcagagcatttgtaaggcaggagaaagtacagatgccctcagcttgcctcatgtcaaactgaaataagttcttcattttctttccaggcatagcagttctttagccatacatatcattgcatgaactatttcgaaagcccttctaaaaagttgaaattgcaagaatcgggaagaacatgaaaggcagtttataagcccgttaccttttaattgcatgaaaatgcatgtttagggatggctaaaattccaaggtgcatcgacattaacccactcatttagtaatgtaccttgagttaaaaagcctgagaaaccaaacacagctaatgctatggggtgtatgaatatgtcaagtttaggtcatttagaagatttgacactgtattttgaaattatgggagtaaacaccttcaaatttcaggcatttctgctttgtgactaaatacaaactacattttcaagattaggccataatgtatatttaaacacaatggctatcaacagctgctaataaggtatcaactaaagcagaattggggaataatagaaatggctgcttatttcaagatatatttgccaacccattcctattcagtcattttattattaatgtaatttgaatgtcaatttgtgtgcttttggtgatttagcgctgtggcaagcaattttgcacatcattttcatgttgttctttatgacaagaatgttcttcaattagaaaatgtgcaaataatgaaattcagggccagtgaggcaaatagactatctgacatatttgactttatgaaaacatattgcctgatggcagaatcaactttataagtggtcaacttctacacaagcgtatgaaatactggtcagtagaacagccattgtgattggactggtttctctgcaatggcgccaaccccaggcttgccaatactgcctatgtaaagggcaagtgtgagaagctattctcatttcgctgacatacaggtaggactatgggggatgggacatttgagtgggactgagataggaaaggcttgaaaagaacccagaaacaccaccaggaagttggcaaagtaaaagaaaatgacttccccctcaaagggcaatgagagggagagaaacaaaccaaaatagaagaactagactttttagaaaatgagtattgctagggaattcaactacctaatcttcccttattcttatatataagcagagaatttttgcaaggtatttattttttaatatgccctgaatgtcttttgctattatgtgtacattttgcatatgaaagtctaaaacgaaacttcctttactttttatactgtagtgaaaattttctattcttcccaagaatgttgtcccaaatctgaaattactggttcaatttcctgatataaacatttacaattagaagctagatagtactggcagagtctgcaaatcagaacacttaaatatatcatggcagcaaaaagaccaagggaaacaaaatgacaaatgtatttatcagaaagcaagcaatgctgactgcttgttagaaacccatctagctatcttaggtcaccagaacttcagccaacgtaatgacattcaaaaaaaaaggacataagagatagcatttcaattcaattaaaccctagccacaggaggactcaagaaaggaagttgtttccttggcagacataaatgctgcctccagaagtacttctccagcagccaagcagaatgagcagggttatcaagtggatgttcaaaggaagaaggaggccctgaactccaccaatcctccccagccctccccaacaggctttctccatcattgactctcccctgcttttcttcttcattaactccttattcattccctgccagtattttgcttctgaacttcaccaggccttaaccagcctccatccccaggtcaaccagttctccgctttacctaaaatgtgcttctcaaccttttagaaccttgtcccttttgataaacatggaaatttttaaagcttcctcttcgcatcccacttggattctaagacaattagaatcatttagaatctttttggctgctggaaatgtatagaagatagaggctaaattttacacttcagttaagacattgtcaatccttttaagcaattgttttcattttcaaaatacagaatgttagtaaattatgaaaatcaatttttcatcttcattcaacctgaagttgtgattcccccttgcaagaatgttgcatacacacacacacacacacacacacacacacacacacacacacacacacacacacacacacacccctccactgacctaaagccagacacctgccgtgactgggcaggctctctcccattattaacagaggaagaggagggaggcagcaactttcaggtagcactgattcttggacatactctgtcctgggtcaaaccccactggcagcaggaattctgaatgtattggggacccctccttaggcctcgttaagtctcaaacacagtacagctcacccagcattgctgacgactgaagattcagaaacaaaacctacacacagcactgaggtcttaatcatagcaaaatgtgataaaccatgttgtgaaaaacttttatacattgaagccatgaccattttgtgtctatcttactctagcacaaaaattgggggatgttaaaagatagttgtgtggaagctataaggttctgtctgtcgtgttactctctgtggaaatgagaggggtctcccatttacactaagcaaatttccattggtcaattttaatgatgtcttgaagcacaatttagctgagcactgagtagccatatgctttctgagtacaagtgtgtctgccttcttcaacatgtagggttgatcaagctaatacttaattgcaaatatcccttgtatgaggttaactaaaaaaattttgctatgtctgatctacatgtttgcattttgttcaactaaattaatatttgtagattgcaagttttgtttaaaataactttattgagtttttaagtcctgatctgttctaaggtgcctttctcacctcccattgattcagtgattctgaagttcttaatttgcaagtaaaataagtctactagagaggaggaaatcaggcacaaattgaccaattctcatgccatttgcaaagcaaaactgtaaggatgatgaaacctggctaactaaattaatggatcatttcactaaatcagatagaggaaatatcataaatattaacttgtctccctagaagctgagatttttcgccttaaatgacatggttgtgtttttgtaagagaaacttaatctaatctaataatgtgcatttaagtaagcagttctaagtcatgtatgacaatgcaattgtctgtttcctgaaaacaaataaatcgggaacaccatatccatttcaagctatcattaaagtgtaatttcctttgctctcttttactgggattatttgttttaaagtaaaacattaaaaagatgtctataaa

SEQ ID NO: 10678 - DNA, 1469 bp, Homo sapiens
  source 1..1469: mol_type = unassigned DNA
ctccttgaaacccgccggcgcacatgaggccgctgcccccgccgcaggcgctggcggccccctcgcggtgcccgtggtgatgccatgccccgccaccacgcgggaggagaggagggcggcgccgccgggctctgggtgaagagcggcgcagcggcggcggcggcgggcggggggcgcttgggcagcggcatgaaggatgtggagtccggccggggcagggtgctgctgaactcggcagccgccaggggcgacggcctgctactgctgggcacccgcgcggccacgctcggtggcggcggcggtggcctgagggagagccgccggggcaagcagggggcccggatgagcctgctggggaagccgctctcttacacgagtagccagagctgccggcgcaacgtcaagtaccggcgggtgcagaactacctgtacaacgtgctggagagaccccgcggctgggcgttcatctaccacgctttcgtttttctccttgtctttggttgcttgattttgtcagtgttttctaccatccctgagcacacaaaattggcctcaagttgcctcttgatcctggagttcgtgatgattgtcgtctttggtttggagttcatcattcgaatctggtctgcgggttgctgttgtcgatatagaggatggcaaggaagactgaggtttgctcgaaagcccttctgtgttatagataccattgttcttatcgcttcaatagcagttgtttctgcaaaaactcagggtaatatttttgccacgtctgcactcagaagtctccgtttcctacagatcctccgcatggtgcgcatggaccgaaggggaggcacttggaaattactgggttcagtggtttatgctcacagcaaggaattaatcacagcttggtacataggatttttggttcttattttttcgtctttccttgtctatctggtggaaaaggatgccaataaagagttttctacatatgcagatgctctctggtggggcacaattacattgacaactattggctatggagacaaaactcccctaacttggctgggaagattgctttctgcaggctttgcactccttggcatttctttctttgcacttcctgccggcattcttggctcaggttttgcattaaaagtacaagaacaacaccgccagaaacactttgagaaaagaaggaacccagctgccaacctcattcagtgtgtttggcgtagttacgcagctgatgagaaatctgtttccattgcaacctggaagccacacttgaaggccttgcacacctgcagccctaccaagaaagaacaaggggaagcatcaagcaggtttgtgatttctctcttgctacatgtttgtttataaatctgatacctaccaggtgttttaaatgtgtctcatgtgagtaaaatcgatcaacaaatacaagatgattaaaagtgacctttcacaagattgcctgcaaa

SEQ ID NO: 10679 - DNA, 2830 bp, Homo sapiens
  source 1..2830: mol_type = unassigned DNA
ggtgcccgtggtgatgccatgccccgccaccacgcgggaggagaggagggcggcgccgccgggctctgggtgaagagcggcgcagcggcggcggcggcgggcggggggcgcttgggcagcggcatgaaggatgtggagtccggccggggcagggtgctgctgaactcggcagccgccaggggcgacggcctgctactgctgggcacccgcgcggccacgctcggtggcggcggcggtggcctgagggagagccgccggggcaagcagggggcccggatgagcctgctggggaagccgctctcttacacgagtagccagagctgccggcgcaacgtcaagtaccggcgggtgcagaactacctgtacaacgtgctggagagaccccgcggctgggcgttcatctaccacgctttcgtttttctccttgtctttggttgcttgattttgtcagtgttttctaccatccctgagcacacaaaattggcctcaagttgcctcttgatcctggagttcgtgatgattgtcgtctttggtttggagttcatcattcgaatctggtctgcgggttgctgttgtcgatatagaggatggcaaggaagactgaggtttgctcgaaagcccttctgtgttatagataccattgttcttatcgcttcaatagcagttgtttctgcaaaaactcagggtaatatttttgccacgtctgcactcagaagtctccgtttcctacagatcctccgcatggtgcgcatggaccgaaggggaggcacttggaaattactgggttcagtggtttatgctcacagcaaggaattaatcacagcttggtacataggatttttggttcttattttttcgtctttccttgtctatctggtggaaaaggatgccaataaagagttttctacatatgcagatgctctctggtggggcacaattacattgacaactattggctatggagacaaaactcccctaacttggctgggaagattgctttctgcaggctttgcactccttggcatttctttctttgcacttcctgccggcattcttggctcaggttttgcattaaaagtacaagaacaacaccgccagaaacactttgagaaaagaaggaacccagctgccaacctcattcagtgtgtttggcgtagttacgcagctgatgagaaatctgtttccattgcaacctggaagccacacttgaaggccttgcacacctgcagccctaccaatcagaagctaagttttaaggagcgagtgcgcatggctagccccaggggccagagtattaagagccgacaagcctcagtaggtgacaggaggtccccaagcaccgacatcacagccgagggcagtcccaccaaagtgcagaagagctggagcttcaacgaccgaacccgcttccggccctcgctgcgcctcaaaagttctcagccaaaaccagtgatagatgctgacacagcccttggcactgatgatgtatatgatgaaaaaggatgccagtgtgatgtatcagtggaagacctcaccccaccacttaaaactgtcattcgagctatcagaattatgaaatttcatgttgcaaaacggaagtttaaggaaacattacgtccatatgatgtaaaagatgtcattgaacaatattctgctggtcatctggacatgttgtgtagaattaaaagccttcaaacacgtgttgatcaaattcttggaaaagggcaaatcacatcagataagaagagccgagagaaaataacagcagaacatgagaccacagacgatctcagtatgctcggtcgggtggtcaaggttgaaaaacaggtacagtccatagaatccaagctggactgcctactagacatctatcaacaggtccttcggaaaggctctgcctcagccctcgctttggcttcattccagatcccaccttttgaatgtgaacagacatctgactatcaaagccctgtggatagcaaagatctttcgggttccgcacaaaacagtggctgcttatccagatcaactagtgccaacatctcgagaggcctgcagttcattctgacgccaaatgagttcagtgcccagactttctacgcgcttagccctactatgcacagtcaagcaacacaggtgccaattagtcaaagcgatggctcagcagtggcagccaccaacaccattgcaaaccaaataaatacggcacccaagccagcagccccaacaactttacagatcccacctcctctcccagccatcaagcatctgcccaggccagaaactctgcaccctaaccctgcaggcttacaggaaagcatttctgacgtcaccacctgccttgttgcctccaaggaaaatgttcaggttgcacagtcaaatctcaccaaggaccgttctatgaggaaaagctttgacatgggaggagaaactctgttgtctgtctgtcccatggtgccgaaggacttgggcaaatctttgtctgtgcaaaacctgatcaggtcgaccgaggaactgaatatacaactttcagggagtgagtcaagtggctccagaggcagccaagatttttaccccaaatggagggaatccaaattgtttataactgatgaagaggtgggtcccgaagagacagagacagacacttttgatgccgcaccgcagcctgccagggaagctgcctttgcatcagactctctaaggactggaaggtcacgatcatctcagagcatttgtaaggcaggagaaagtacagatgccctcagcttgcctcatgtcaaactgaaataagttcttcattttctttccaggcatagcagttctttagcca

SEQ ID NO: 10680 - DNA, 255 bp, Homo sapiens
  source 1..255: mol_type = unassigned DNA
ctggagttcgtgatgattgtcgtctttggtttggagttcatcattcgaatctggtctgcgggttgctgttgtcgatatagaggatggcaaggaagactgaggtttgctcgaaagcccttctgtgttataggtgaatatcagagtctcagatacctggactatgacaccaacattcttgtcttctatctcctgttttgcaatatttgattaatattaaaagctaacatccatggagtacttatcatggaccgggca

SEQ ID NO: 10681 - DNA, 321 bp, Homo sapiens
  source 1..321: mol_type = unassigned DNA
gagttcgtgatgattgtcgtctttggtttggagttcatcattcgaatctggtctgcgggttgctgttgtcgatatagaggatggcaaggaagactgaggtttgctcgaaagcccttctgtgttataggagtcaggaattgttgcgtaatcttctcagtttcctcccttactcctgttccctatggtgggggcagagtggatttaaggaagaaagtgtatcaccatccatgggcactgttaagaagaatcctttattccatacttctttcatagtatgcacatctcaaaagtctccacttattaaaccagaatttatggaaa

SEQ ID NO: 10682 - DNA, 649 bp, Homo sapiens
  source 1..649: mol_type = unassigned DNA
gcacacctgcagccctaccaatcagaagctaagttttaaggagcgagtgcgcatggctagccccaggggccagagtattaagagccgacaagcctcagtaggtgacaggaggtccccaagcaccgacatcacagccgagggcagtcccaccaaagtgcagaagagctggagcttcaacgaccgaacccgcttccggccctcgctgcgcctcaaaagttctcagccaaaaccagtgatagatgacaagggccacattaagatcaatgggactgtcattctgatgtatttgtgacgtctgaccagcaaaggtccaagacccagggacaaccaggtgcttgctctgtgaatatcttgaaacacagtaaggaggatgatcatttctggtcaacaatgaaggtgctctttccctctctcacacactccatctaccagcaaatcagagaccactgcttatcttccttagagaggttcctgttgaaagttatttcgaagtcttccaatgataagtaaaattcaagttcttctcccaagaggaattaacctattttatttatcatattatgtagcagacattcacttgccaacacattttattgagtgccacataattttcatgtttataaaataaaatattttatttttcatttaa

SEQ ID NO: 10683 - DNA, 6539 bp, Homo sapiens
  source 1..6539: mol_type = unassigned DNA
actctatccccgggggcagtttgggaaggagggagtggtagtcgcgggaatgagggagcaagagaaaccctctcaaagtgacgccccaaacaggtccggatttagaattcgaagctaaaggctgttagaaattgggactcctcggcctcctctgcagcccctcctttcccgccccgaagcccgggcggtttgctggctgcctgcttccccgcccccggctcagaggtctctggctggcgggcgccccgtcggccgccggcttcctccttgaaacccgccggcgcacatgaggccgctgcccccgccgcaggcgctggcggccccctcgcggtgcccgtggtgatgccatgccccgccaccacgcgggaggagaggagggcggcgccgccgggctctgggtgaagagcggcgcagcggcggcggcggcgggcggggggcgcttgggcagcggcatgaaggatgtggagtccggccggggcagggtgctgctgaactcggcagccgccaggggcgacggcctgctactgctgggcacccgcgcggccacgctcggtggcggcggcggtggcctgagggagagccgccggggcaagcagggggcccggatgagcctgctggggaagccgctctcttacacgagtagccagagctgccggcgcaacgtcaagtaccggcgggtgcagaactacctgtacaacgtgctggagagaccccgcggctgggcgttcatctaccacgctttcgtttttctccctgtctttggttgcttgattttgtcagtgttttctaccatccctgagcacacaaaattggcctcaagttgcctcttgatcctggagttcgtgatgattgtcgtctttggtttggagttcatcattcgaatctggtctgcgggttgctgttgtcgatatagaggatggcaaggaagactgaggtttgctcgaaagcccttctgtgttatagataccattgttcttatcgcttcaatagcagttgtttctgcaaaaactcagggtaatatttttgccacgtctgcactcagaagtctccgtttcctacagatcctccgcatggtgcgcatggaccgaaggggaggcacttggaaattactgggttcagtggtttatgctcacagcaaggaattaatcacagcttggtacataggatttttggttcttattttttcgtctttccttgtctatctggtggaaaaggatgccaataaagagttttctacatatgcagatgctctctggtggggcacaattacattgacaactattggctatggagacaaaactcccctaacttggctgggaagattgctttctgcaggctttgcactccttggcatttctttctttgcacttcctgccggcattcttggctcaggttttgcattaaaagtacaagaacaacaccgccagaaacactttgagaaaagaaggaacccagctgccaacctcattcagtgtgtttggcgtagttacgcagctgatgagaaatctgtttccattgcaacctggaagccacacttgaaggccttgcacacctgcagccctaccaatcagaagctaagttttaaggagcgagtgcgcatggctagccccaggggccagagtattaagagccgacaagcctcagtaggtgacaggaggtccccaagcaccgacatcacagccgagggcagtcccaccaaagtgcagaagagctggagcttcaacgaccgaacccgcttccggccctcgctgcgcctcaaaagttctcagccaaaaccagtgatagatgctgacacagcccttggcactgatgatgtatatgatgaaaaaggatgccagtgtgatgtatcagtggaagacctcaccccaccacttaaaactgtcattcgagctatcagaattatgaaatttcatgttgcaaaacggaagtttaaggaaacattacgtccatatgatgtaaaagatgtcattgaacaatattctgctggtcatctggacatgttgtgtagaattaaaagccttcaaacacgtgttgatcaaattcttggaaaagggcaaatcacatcagataagaagagccgagagaaaataacagcagaacatgagaccacagacgatctcagtatgctcggtcgggtggtcaaggttgaaaaacaggtacagtccatagaatccaagctggactgcctactagacatctatcaacaggtccttcggaaaggctctgcctcagccctcgctttggcttcattccagatcccaccttttgaatgtgaacagacatctgactatcaaagccctgtggatagcaaagatctttcgggttccgcacaaaacagtggctgcttatccagatcaactagtgccaacatctcgagaggcctgcagttcattctgacgccaaatgagttcagtgcccagactttctacgcgcttagccctactatgcacagtcaagcaacacaggtgccaattagtcaaagcgatggctcagcagtggcagccaccaacaccattgcaaaccaaataaatacggcacccaagccagcagccccaacaactttacagatcccacctcctctcccagccatcaagcatctgcccaggccagaaactctgcaccctaaccctgcaggcttacaggaaagcatttctgacgtcaccacctgccttgttgcctccaaggaaaatgttcaggttgcacagtcaaatctcaccaaggaccgttctatgaggaaaagctttgacatgggaggagaaactctgttgtctgtctgtcccatggtgccgaaggacttgggcaaatctttgtctgtgcaaaacctgatcaggtcgaccgaggaactgaatatacaactttcagggagtgagtcaagtggctccagaggcagccaagatttttaccccaaatggagggaatccaaattgtttataactgatgaagaggtgggtcccgaagagacagagacagacacttttgatgccgcaccgcagcctgccagggaagctgcctttgcatcagactctctaaggactggaaggtcacgatcatctcagagcatttgtaaggcaggagaaagtacagatgccctcagcttgcctcatgtcaaactgaaataagttcttcattttctttccaggcatagcagttctttagccatacatatcattgcatgaactatttcgaaagcccttctaaaaagttgaaattgcaagaatcgggaagaacatgaaaggcagtttataagcccgttaccttttaattgcatgaaaatgcatgtttagggatggctaaaattccaaggtgcatcgacattaacccactcatttagtaatgtaccttgagttaaaaagcctgagaaaccaaacacagctaatgctatggggtgtatgaatatgtcaagtttaggtcatttagaagatttgacactgtattttgaaattatgggagtaaacaccttcaaatttcaggcatttctgctttgtgactaaatacaaactacattttcaagattaggccataatgtatatttaaacacaatggctatcaacagctgctaataaggtatcaactaaagcagaattggggaataatagaaatggctgcttatttcaagatatatttgccaacccattcctattcagtcattttattattaatgtaatttgaatgtcaatttgtgtgcttttggtgatttagcgctgtggcaagcaattttgcacatcattttcatgttgttctttatgacaagaatgttcttcaattagaaaatgtgcaaataatgaaattcagggccagtgaggcaaatagactatctgacatatttgactttatgaaaacatattgcctgatggcagaatcaactttataagtggtcaacttctacacaagcgtatgaaatactggtcagtagaacagccattgtgattggactggtttctctgcaatggcgccaaccccaggcttgccaatactgcctatgtaaagggcaagtgtgagaagctattctcatttcgctgacatacaggtaggactatgggggatgggacatttgagtgggactgagataggaaaggcttgaaaagaacccagaaacaccaccaggaagttggcaaagtaaaagaaaatgacttccccctcaaagggcaatgagagggagagaaacaaaccaaaatagaagaactagactttttagaaaatgagtattgctagggaattcaactacctaatcttcccttattcttatatataagcagagaatttttgcaaggtatttattttttaatatgccctgaatgtcttttgctattatgtgtacattttgcatatgaaagtctaaaacgaaacttcctttactttttatactgtagtgaaaattttctattcttcccaagaatgttgtcccaaatctgaaattactggttcaatttcctgatataaacatttacaattagaagctagatagtactggcagagtctgcaaatcagaacacttaaatatatcatggcagcaaaaagaccaagggaaacaaaatgacaaatgtatttatcagaaagcaagcaatgctgactgcttgttagaaacccatctagctatcttaggtcaccagaacttcagccaacgtaatgacattcaaaaaaaaaggacataagagatagcatttcaattcaattaaaccctagccacaggaggactcaagaaaggaagttgtttccttggcagacataaatgctgcctccagaagtacttctccagcagccaagcagaatgagcagggttatcaagtggatgttcaaaggaagaaggaggccctgaactccaccaatcctccccagccctccccaacaggctttctccatcattgactctcccctgcttttcttcttcattaactccttattcattccctgccagtattttgcttctgaacttcaccaggccttaaccagcctccatccccaggtcaaccagttctccgctttacctaaaatgtgcttctcaaccttttagaaccttgtcccttttgataaacatggaaatttttaaagcttcctcttcgcatcccacttggattctaagacaattagaatcatttagaatctttttggctgctggaaatgtatagaagatagaggctaaattttacacttcagttaagacattgtcaatccttttaagcaattgttttcattttcaaaatacagaatgttagtaaattatgaaaatcaatttttcatcttcattcaacctgaagttgtgattcccccttgcaagaatgttgcatacacacacacacacacacacacacacacacacacacacacacacacacacacacacacacacccctccactgacctaaagccagacacctgccgtgactgggcaggctctctcccattattaacagaggaagaggagggaggcagcaactttcaggtagcactgattcttggacatactctgtcctgggtcaaaccccactggcagcaggaattctgaatgtattggggacccctccttaggcctcgttaagtctcaaacacagtacagctcacccagcattgctgacgactgaagattcagaaacaaaacctacacacagcactgaggtcttaatcatagcaaaatgtgataaaccatgttgtgaaaaacttttatacattgaagccatgaccattttgtgtctatcttactctagcacaaaaattgggggatgttaaaagatagttgtgtggaagctataaggttctgtctgtcgtgttactctctgtggaaatgagaggggtctcccatttacactaagcaaatttccattggtcaattttaatgatgtcttgaagcacaatttagctgagcactgagtagccatatgctttctgagtacaagtgtgtctgccttcttcaacatgtagggttgatcaagctaatacttaattgcaaatatcccttgtatgaggttaactaaaaaaattttgctatgtctgatctacatgtttgcattttgttcaactaaattaatatttgtagattgcaagttttgtttaaaataactttattgagtttttaagtcctgatctgttctaaggtgcctttctcacctcccattgattcagtgattctgaagttcttaatttgcaagtaaaataagtctactagagaggaggaaatcaggcacaaattgaccaattctcatgccatttgcaaagcaaaactgtaaggatgatgaaacctggctaactaaattaatggatcatttcactaaatcagatagaggaaatatcataaatattaacttgtctccctagaagctgagatttttcgccttaaatgacatggttgtgtttttgtaagagaaacttaatctaatctaataatgtgcatttaagtaagcagttctaagtcatgtatgacaatgcaattgtctgtttcctgaaaacaaataaatcgggaacaccatatccatttcaagctatcattaaagtgtaatttcctttgctctcttttactgggattatttgttttaaagtaaaacatt

SEQ ID NO: 10684 - DNA, 6236 bp, Homo sapiens
  source 1..6236: mol_type = unassigned DNA
actctatccccgggggcagtttgggaaggagggagtggtagtcgcgggaatgagggagcaagagaaaccctctcaaagtgacgccccaaacaggtccggatttagaattcgaagctaaaggctgttagaaattgggactcctcggcctcctctgcagcccctcctttcccgccccgaagcccgggcggtttgctggctgcctgcttccccgcccccggctcagaggtctctggctggcgggcgccccgtcggccgccggcttcctccttgaaacccgccggcgcacatgaggccgctgcccccgccgcaggcgctggcggccccctcgcggtgcccgtggtgatgccatgccccgccaccacgcgggaggagaggagggcggcgccgccgggctctgggtgaagagcggcgcagcggcggcggcggcgggcggggggcgcttgggcagcggcatgaaggatgtggagtccggccggggcagggtgctgctgaactcggcagccgccaggggcgacggcctgctactgctgggcacccgcgcggccacgctcggtggcggcggcggtggcctgagggagagccgccggggcaagcagggggcccggatgagcctgctggggaagccgctctcttacacgagtagccagagctgccggcgcaacgtcaagtaccggcgggtgcagaactacctgtacaacgtgctggagagaccccgcggctgggcgttcatctaccacgctttcgtttttctccctgtctttggttgcttgattttgtcagtgttttctaccatccctgagcacacaaaattggcctcaagttgcctcttgatcctggagttcgtgatgattgtcgtctttggtttggagttcatcattcgaatctggtctgcgggttgctgttgtcgatatagaggatggcaaggaagactgaggtttgctcgaaagcccttctgtgttatagataccattgttcttatcgcttcaatagcagttgtttctgcaaaaactcagggtaatatttttgccacgtctgcactcagaagtctccgtttcctacagatcctccgcatggtgcgcatggaccgaaggggaggcacttggaaattactgggttcagtggtttatgctcacagcaaggaattaatcacagcttggtacataggatttttggttcttattttttcgtctttccttgtctatctggtggaaaaggatgccaataaagagttttctacatatgcagatgctctctggtggggcacaattacattgacaactattggctatggagacaaaactcccctaacttggctgggaagattgctttctgcaggctttgcactccttggcatttctttctttgcacttcctgccggcattcttggctcaggttttgcattaaaagtacaagaacaacaccgccagaaacactttgagaaaagaaggaacccagctgccaacctcattcagtgtgtttggcgtagttacgcagctgatgagaaatctgtttccattgcaacctggaagccacacttgaaggccttgcacacctgcagccctaccaagaaagaacaaggggaagcatcaagcagaattatgaaatttcatgttgcaaaacggaagtttaaggaaacattacgtccatatgatgtaaaagatgtcattgaacaatattctgctggtcatctggacatgttgtgtagaattaaaagccttcaaacacgtgttgatcaaattcttggaaaagggcaaatcacatcagataagaagagccgagagaaaataacagcagaacatgagaccacagacgatctcagtatgctcggtcgggtggtcaaggttgaaaaacaggtacagtccatagaatccaagctggactgcctactagacatctatcaacaggtccttcggaaaggctctgcctcagccctcgctttggcttcattccagatcccaccttttgaatgtgaacagacatctgactatcaaagccctgtggatagcaaagatctttcgggttccgcacaaaacagtggctgcttatccagatcaactagtgccaacatctcgagaggcctgcagttcattctgacgccaaatgagttcagtgcccagactttctacgcgcttagccctactatgcacagtcaagcaacacaggtgccaattagtcaaagcgatggctcagcagtggcagccaccaacaccattgcaaaccaaataaatacggcacccaagccagcagccccaacaactttacagatcccacctcctctcccagccatcaagcatctgcccaggccagaaactctgcaccctaaccctgcaggcttacaggaaagcatttctgacgtcaccacctgccttgttgcctccaaggaaaatgttcaggttgcacagtcaaatctcaccaaggaccgttctatgaggaaaagctttgacatgggaggagaaactctgttgtctgtctgtcccatggtgccgaaggacttgggcaaatctttgtctgtgcaaaacctgatcaggtcgaccgaggaactgaatatacaactttcagggagtgagtcaagtggctccagaggcagccaagatttttaccccaaatggagggaatccaaattgtttataactgatgaagaggtgggtcccgaagagacagagacagacacttttgatgccgcaccgcagcctgccagggaagctgcctttgcatcagactctctaaggactggaaggtcacgatcatctcagagcatttgtaaggcaggagaaagtacagatgccctcagcttgcctcatgtcaaactgaaataagttcttcattttctttccaggcatagcagttctttagccatacatatcattgcatgaactatttcgaaagcccttctaaaaagttgaaattgcaagaatcgggaagaacatgaaaggcagtttataagcccgttaccttttaattgcatgaaaatgcatgtttagggatggctaaaattccaaggtgcatcgacattaacccactcatttagtaatgtaccttgagttaaaaagcctgagaaaccaaacacagctaatgctatggggtgtatgaatatgtcaagtttaggtcatttagaagatttgacactgtattttgaaattatgggagtaaacaccttcaaatttcaggcatttctgctttgtgactaaatacaaactacattttcaagattaggccataatgtatatttaaacacaatggctatcaacagctgctaataaggtatcaactaaagcagaattggggaataatagaaatggctgcttatttcaagatatatttgccaacccattcctattcagtcattttattattaatgtaatttgaatgtcaatttgtgtgcttttggtgatttagcgctgtggcaagcaattttgcacatcattttcatgttgttctttatgacaagaatgttcttcaattagaaaatgtgcaaataatgaaattcagggccagtgaggcaaatagactatctgacatatttgactttatgaaaacatattgcctgatggcagaatcaactttataagtggtcaacttctacacaagcgtatgaaatactggtcagtagaacagccattgtgattggactggtttctctgcaatggcgccaaccccaggcttgccaatactgcctatgtaaagggcaagtgtgagaagctattctcatttcgctgacatacaggtaggactatgggggatgggacatttgagtgggactgagataggaaaggcttgaaaagaacccagaaacaccaccaggaagttggcaaagtaaaagaaaatgacttccccctcaaagggcaatgagagggagagaaacaaaccaaaatagaagaactagactttttagaaaatgagtattgctagggaattcaactacctaatcttcccttattcttatatataagcagagaatttttgcaaggtatttattttttaatatgccctgaatgtcttttgctattatgtgtacattttgcatatgaaagtctaaaacgaaacttcctttactttttatactgtagtgaaaattttctattcttcccaagaatgttgtcccaaatctgaaattactggttcaatttcctgatataaacatttacaattagaagctagatagtactggcagagtctgcaaatcagaacacttaaatatatcatggcagcaaaaagaccaagggaaacaaaatgacaaatgtatttatcagaaagcaagcaatgctgactgcttgttagaaacccatctagctatcttaggtcaccagaacttcagccaacgtaatgacattcaaaaaaaaaggacataagagatagcatttcaattcaattaaaccctagccacaggaggactcaagaaaggaagttgtttccttggcagacataaatgctgcctccagaagtacttctccagcagccaagcagaatgagcagggttatcaagtggatgttcaaaggaagaaggaggccctgaactccaccaatcctccccagccctccccaacaggctttctccatcattgactctcccctgcttttcttcttcattaactccttattcattccctgccagtattttgcttctgaacttcaccaggccttaaccagcctccatccccaggtcaaccagttctccgctttacctaaaatgtgcttctcaaccttttagaaccttgtcccttttgataaacatggaaatttttaaagcttcctcttcgcatcccacttggattctaagacaattagaatcatttagaatctttttggctgctggaaatgtatagaagatagaggctaaattttacacttcagttaagacattgtcaatccttttaagcaattgttttcattttcaaaatacagaatgttagtaaattatgaaaatcaatttttcatcttcattcaacctgaagttgtgattcccccttgcaagaatgttgcatacacacacacacacacacacacacacacacacacacacacacacacacacacacacacacacccctccactgacctaaagccagacacctgccgtgactgggcaggctctctcccattattaacagaggaagaggagggaggcagcaactttcaggtagcactgattcttggacatactctgtcctgggtcaaaccccactggcagcaggaattctgaatgtattggggacccctccttaggcctcgttaagtctcaaacacagtacagctcacccagcattgctgacgactgaagattcagaaacaaaacctacacacagcactgaggtcttaatcatagcaaaatgtgataaaccatgttgtgaaaaacttttatacattgaagccatgaccattttgtgtctatcttactctagcacaaaaattgggggatgttaaaagatagttgtgtggaagctataaggttctgtctgtcgtgttactctctgtggaaatgagaggggtctcccatttacactaagcaaatttccattggtcaattttaatgatgtcttgaagcacaatttagctgagcactgagtagccatatgctttctgagtacaagtgtgtctgccttcttcaacatgtagggttgatcaagctaatacttaattgcaaatatcccttgtatgaggttaactaaaaaaattttgctatgtctgatctacatgtttgcattttgttcaactaaattaatatttgtagattgcaagttttgtttaaaataactttattgagtttttaagtcctgatctgttctaaggtgcctttctcacctcccattgattcagtgattctgaagttcttaatttgcaagtaaaataagtctactagagaggaggaaatcaggcacaaattgaccaattctcatgccatttgcaaagcaaaactgtaaggatgatgaaacctggctaactaaattaatggatcatttcactaaatcagatagaggaaatatcataaatattaacttgtctccctagaagctgagatttttcgccttaaatgacatggttgtgtttttgtaagagaaacttaatctaatctaataatgtgcatttaagtaagcagttctaagtcatgtatgacaatgcaattgtctgtttcctgaaaacaaataaatcgggaacaccatatccatttcaagctatcattaaagtgtaatttcctttgctctcttttactgggattatttgttttaaagtaaaacatt

SEQ ID NO: 10685 - DNA, 6566 bp, Homo sapiens
  source 1..6566: mol_type = unassigned DNA
actctatccccgggggcagtttgggaaggagggagtggtagtcgcgggaatgagggagcaagagaaaccctctcaaagtgacgccccaaacaggtccggatttagaattcgaagctaaaggctgttagaaattgggactcctcggcctcctctgcagcccctcctttcccgccccgaagcccgggcggtttgctggctgcctgcttccccgcccccggctcagaggtctctggctggcgggcgccccgtcggccgccggcttcctccttgaaacccgccggcgcacatgaggccgctgcccccgccgcaggcgctggcggccccctcgcggtgcccgtggtgatgccatgccccgccaccacgcgggaggagaggagggcggcgccgccgggctctgggtgaagagcggcgcagcggcggcggcggcgggcggggggcgcttgggcagcggcatgaaggatgtggagtccggccggggcagggtgctgctgaactcggcagccgccaggggcgacggcctgctactgctgggcacccgcgcggccacgctcggtggcggcggcggtggcctgagggagagccgccggggcaagcagggggcccggatgagcctgctggggaagccgctctcttacacgagtagccagagctgccggcgcaacgtcaagtaccggcgggtgcagaactacctgtacaacgtgctggagagaccccgcggctgggcgttcatctaccacgctttcgtttttctccctgtctttggttgcttgattttgtcagtgttttctaccatccctgagcacacaaaattggcctcaagttgcctcttgatcctggagttcgtgatgattgtcgtctttggtttggagttcatcattcgaatctggtctgcgggttgctgttgtcgatatagaggatggcaaggaagactgaggtttgctcgaaagcccttctgtgttatagataccattgttcttatcgcttcaatagcagttgtttctgcaaaaactcagggtaatatttttgccacgtctgcactcagaagtctccgtttcctacagatcctccgcatggtgcgcatggaccgaaggggaggcacttggaaattactgggttcagtggtttatgctcacagcaaggaattaatcacagcttggtacataggatttttggttcttattttttcgtctttccttgtctatctggtggaaaaggatgccaataaagagttttctacatatgcagatgctctctggtggggcacaattacattgacaactattggctatggagacaaaactcccctaacttggctgggaagattgctttctgcaggctttgcactccttggcatttctttctttgcacttcctgccggcattcttggctcaggttttgcattaaaagtacaagaacaacaccgccagaaacactttgagaaaagaaggaacccagctgccaacctcattcagtgtgtttggcgtagttacgcagctgatgagaaatctgtttccattgcaacctggaagccacacttgaaggccttgcacacctgcagccctaccaagaaagaacaaggggaagcatcaagcagtcagaagctaagttttaaggagcgagtgcgcatggctagccccaggggccagagtattaagagccgacaagcctcagtaggtgacaggaggtccccaagcaccgacatcacagccgagggcagtcccaccaaagtgcagaagagctggagcttcaacgaccgaacccgcttccggccctcgctgcgcctcaaaagttctcagccaaaaccagtgatagatgctgacacagcccttggcactgatgatgtatatgatgaaaaaggatgccagtgtgatgtatcagtggaagacctcaccccaccacttaaaactgtcattcgagctatcagaattatgaaatttcatgttgcaaaacggaagtttaaggaaacattacgtccatatgatgtaaaagatgtcattgaacaatattctgctggtcatctggacatgttgtgtagaattaaaagccttcaaacacgtgttgatcaaattcttggaaaagggcaaatcacatcagataagaagagccgagagaaaataacagcagaacatgagaccacagacgatctcagtatgctcggtcgggtggtcaaggttgaaaaacaggtacagtccatagaatccaagctggactgcctactagacatctatcaacaggtccttcggaaaggctctgcctcagccctcgctttggcttcattccagatcccaccttttgaatgtgaacagacatctgactatcaaagccctgtggatagcaaagatctttcgggttccgcacaaaacagtggctgcttatccagatcaactagtgccaacatctcgagaggcctgcagttcattctgacgccaaatgagttcagtgcccagactttctacgcgcttagccctactatgcacagtcaagcaacacaggtgccaattagtcaaagcgatggctcagcagtggcagccaccaacaccattgcaaaccaaataaatacggcacccaagccagcagccccaacaactttacagatcccacctcctctcccagccatcaagcatctgcccaggccagaaactctgcaccctaaccctgcaggcttacaggaaagcatttctgacgtcaccacctgccttgttgcctccaaggaaaatgttcaggttgcacagtcaaatctcaccaaggaccgttctatgaggaaaagctttgacatgggaggagaaactctgttgtctgtctgtcccatggtgccgaaggacttgggcaaatctttgtctgtgcaaaacctgatcaggtcgaccgaggaactgaatatacaactttcagggagtgagtcaagtggctccagaggcagccaagatttttaccccaaatggagggaatccaaattgtttataactgatgaagaggtgggtcccgaagagacagagacagacacttttgatgccgcaccgcagcctgccagggaagctgcctttgcatcagactctctaaggactggaaggtcacgatcatctcagagcatttgtaaggcaggagaaagtacagatgccctcagcttgcctcatgtcaaactgaaataagttcttcattttctttccaggcatagcagttctttagccatacatatcattgcatgaactatttcgaaagcccttctaaaaagttgaaattgcaagaatcgggaagaacatgaaaggcagtttataagcccgttaccttttaattgcatgaaaatgcatgtttagggatggctaaaattccaaggtgcatcgacattaacccactcatttagtaatgtaccttgagttaaaaagcctgagaaaccaaacacagctaatgctatggggtgtatgaatatgtcaagtttaggtcatttagaagatttgacactgtattttgaaattatgggagtaaacaccttcaaatttcaggcatttctgctttgtgactaaatacaaactacattttcaagattaggccataatgtatatttaaacacaatggctatcaacagctgctaataaggtatcaactaaagcagaattggggaataatagaaatggctgcttatttcaagatatatttgccaacccattcctattcagtcattttattattaatgtaatttgaatgtcaatttgtgtgcttttggtgatttagcgctgtggcaagcaattttgcacatcattttcatgttgttctttatgacaagaatgttcttcaattagaaaatgtgcaaataatgaaattcagggccagtgaggcaaatagactatctgacatatttgactttatgaaaacatattgcctgatggcagaatcaactttataagtggtcaacttctacacaagcgtatgaaatactggtcagtagaacagccattgtgattggactggtttctctgcaatggcgccaaccccaggcttgccaatactgcctatgtaaagggcaagtgtgagaagctattctcatttcgctgacatacaggtaggactatgggggatgggacatttgagtgggactgagataggaaaggcttgaaaagaacccagaaacaccaccaggaagttggcaaagtaaaagaaaatgacttccccctcaaagggcaatgagagggagagaaacaaaccaaaatagaagaactagactttttagaaaatgagtattgctagggaattcaactacctaatcttcccttattcttatatataagcagagaatttttgcaaggtatttattttttaatatgccctgaatgtcttttgctattatgtgtacattttgcatatgaaagtctaaaacgaaacttcctttactttttatactgtagtgaaaattttctattcttcccaagaatgttgtcccaaatctgaaattactggttcaatttcctgatataaacatttacaattagaagctagatagtactggcagagtctgcaaatcagaacacttaaatatatcatggcagcaaaaagaccaagggaaacaaaatgacaaatgtatttatcagaaagcaagcaatgctgactgcttgttagaaacccatctagctatcttaggtcaccagaacttcagccaacgtaatgacattcaaaaaaaaaggacataagagatagcatttcaattcaattaaaccctagccacaggaggactcaagaaaggaagttgtttccttggcagacataaatgctgcctccagaagtacttctccagcagccaagcagaatgagcagggttatcaagtggatgttcaaaggaagaaggaggccctgaactccaccaatcctccccagccctccccaacaggctttctccatcattgactctcccctgcttttcttcttcattaactccttattcattccctgccagtattttgcttctgaacttcaccaggccttaaccagcctccatccccaggtcaaccagttctccgctttacctaaaatgtgcttctcaaccttttagaaccttgtcccttttgataaacatggaaatttttaaagcttcctcttcgcatcccacttggattctaagacaattagaatcatttagaatctttttggctgctggaaatgtatagaagatagaggctaaattttacacttcagttaagacattgtcaatccttttaagcaattgttttcattttcaaaatacagaatgttagtaaattatgaaaatcaatttttcatcttcattcaacctgaagttgtgattcccccttgcaagaatgttgcatacacacacacacacacacacacacacacacacacacacacacacacacacacacacacacacccctccactgacctaaagccagacacctgccgtgactgggcaggctctctcccattattaacagaggaagaggagggaggcagcaactttcaggtagcactgattcttggacatactctgtcctgggtcaaaccccactggcagcaggaattctgaatgtattggggacccctccttaggcctcgttaagtctcaaacacagtacagctcacccagcattgctgacgactgaagattcagaaacaaaacctacacacagcactgaggtcttaatcatagcaaaatgtgataaaccatgttgtgaaaaacttttatacattgaagccatgaccattttgtgtctatcttactctagcacaaaaattgggggatgttaaaagatagttgtgtggaagctataaggttctgtctgtcgtgttactctctgtggaaatgagaggggtctcccatttacactaagcaaatttccattggtcaattttaatgatgtcttgaagcacaatttagctgagcactgagtagccatatgctttctgagtacaagtgtgtctgccttcttcaacatgtagggttgatcaagctaatacttaattgcaaatatcccttgtatgaggttaactaaaaaaattttgctatgtctgatctacatgtttgcattttgttcaactaaattaatatttgtagattgcaagttttgtttaaaataactttattgagtttttaagtcctgatctgttctaaggtgcctttctcacctcccattgattcagtgattctgaagttcttaatttgcaagtaaaataagtctactagagaggaggaaatcaggcacaaattgaccaattctcatgccatttgcaaagcaaaactgtaaggatgatgaaacctggctaactaaattaatggatcatttcactaaatcagatagaggaaatatcataaatattaacttgtctccctagaagctgagatttttcgccttaaatgacatggttgtgtttttgtaagagaaacttaatctaatctaataatgtgcatttaagtaagcagttctaagtcatgtatgacaatgcaattgtctgtttcctgaaaacaaataaatcgggaacaccatatccatttcaagctatcattaaagtgtaatttcctttgctctcttttactgggattatttgttttaaagtaaaacatt

SEQ ID NO: 10686 - DNA, 6596 bp, Homo sapiens
  source 1..6596: mol_type = unassigned DNA
actctatccccgggggcagtttgggaaggagggagtggtagtcgcgggaatgagggagcaagagaaaccctctcaaagtgacgccccaaacaggtccggatttagaattcgaagctaaaggctgttagaaattgggactcctcggcctcctctgcagcccctcctttcccgccccgaagcccgggcggtttgctggctgcctgcttccccgcccccggctcagaggtctctggctggcgggcgccccgtcggccgccggcttcctccttgaaacccgccggcgcacatgaggccgctgcccccgccgcaggcgctggcggccccctcgcggtgcccgtggtgatgccatgccccgccaccacgcgggaggagaggagggcggcgccgccgggctctgggtgaagagcggcgcagcggcggcggcggcgggcggggggcgcttgggcagcggcatgaaggatgtggagtccggccggggcagggtgctgctgaactcggcagccgccaggggcgacggcctgctactgctgggcacccgcgcggccacgctcggtggcggcggcggtggcctgagggagagccgccggggcaagcagggggcccggatgagcctgctggggaagccgctctcttacacgagtagccagagctgccggcgcaacgtcaagtaccggcgggtgcagaactacctgtacaacgtgctggagagaccccgcggctgggcgttcatctaccacgctttcgtttttctccctgtctttggttgcttgattttgtcagtgttttctaccatccctgagcacacaaaattggcctcaagttgcctcttgatcctggagttcgtgatgattgtcgtctttggtttggagttcatcattcgaatctggtctgcgggttgctgttgtcgatatagaggatggcaaggaagactgaggtttgctcgaaagcccttctgtgttatagataccattgttcttatcgcttcaatagcagttgtttctgcaaaaactcagggtaatatttttgccacgtctgcactcagaagtctccgtttcctacagatcctccgcatggtgcgcatggaccgaaggggaggcacttggaaattactgggttcagtggtttatgctcacagcaaggaattaatcacagcttggtacataggatttttggttcttattttttcgtctttccttgtctatctggtggaaaaggatgccaataaagagttttctacatatgcagatgctctctggtggggcacaattacattgacaactattggctatggagacaaaactcccctaacttggctgggaagattgctttctgcaggctttgcactccttggcatttctttctttgcacttcctgccggcattcttggctcaggttttgcattaaaagtacaagaacaacaccgccagaaacactttgagaaaagaaggaacccagctgccaacctcattcagtgtgtttggcgtagttacgcagctgatgagaaatctgtttccattgcaacctggaagccacacttgaaggccttgcacacctgcagccctaccaataagttctgtagtaataagcagaagctcttcagaatgtacacctcacggaagcagagtcagaagctaagttttaaggagcgagtgcgcatggctagccccaggggccagagtattaagagccgacaagcctcagtaggtgacaggaggtccccaagcaccgacatcacagccgagggcagtcccaccaaagtgcagaagagctggagcttcaacgaccgaacccgcttccggccctcgctgcgcctcaaaagttctcagccaaaaccagtgatagatgctgacacagcccttggcactgatgatgtatatgatgaaaaaggatgccagtgtgatgtatcagtggaagacctcaccccaccacttaaaactgtcattcgagctatcagaattatgaaatttcatgttgcaaaacggaagtttaaggaaacattacgtccatatgatgtaaaagatgtcattgaacaatattctgctggtcatctggacatgttgtgtagaattaaaagccttcaaacacgtgttgatcaaattcttggaaaagggcaaatcacatcagataagaagagccgagagaaaataacagcagaacatgagaccacagacgatctcagtatgctcggtcgggtggtcaaggttgaaaaacaggtacagtccatagaatccaagctggactgcctactagacatctatcaacaggtccttcggaaaggctctgcctcagccctcgctttggcttcattccagatcccaccttttgaatgtgaacagacatctgactatcaaagccctgtggatagcaaagatctttcgggttccgcacaaaacagtggctgcttatccagatcaactagtgccaacatctcgagaggcctgcagttcattctgacgccaaatgagttcagtgcccagactttctacgcgcttagccctactatgcacagtcaagcaacacaggtgccaattagtcaaagcgatggctcagcagtggcagccaccaacaccattgcaaaccaaataaatacggcacccaagccagcagccccaacaactttacagatcccacctcctctcccagccatcaagcatctgcccaggccagaaactctgcaccctaaccctgcaggcttacaggaaagcatttctgacgtcaccacctgccttgttgcctccaaggaaaatgttcaggttgcacagtcaaatctcaccaaggaccgttctatgaggaaaagctttgacatgggaggagaaactctgttgtctgtctgtcccatggtgccgaaggacttgggcaaatctttgtctgtgcaaaacctgatcaggtcgaccgaggaactgaatatacaactttcagggagtgagtcaagtggctccagaggcagccaagatttttaccccaaatggagggaatccaaattgtttataactgatgaagaggtgggtcccgaagagacagagacagacacttttgatgccgcaccgcagcctgccagggaagctgcctttgcatcagactctctaaggactggaaggtcacgatcatctcagagcatttgtaaggcaggagaaagtacagatgccctcagcttgcctcatgtcaaactgaaataagttcttcattttctttccaggcatagcagttctttagccatacatatcattgcatgaactatttcgaaagcccttctaaaaagttgaaattgcaagaatcgggaagaacatgaaaggcagtttataagcccgttaccttttaattgcatgaaaatgcatgtttagggatggctaaaattccaaggtgcatcgacattaacccactcatttagtaatgtaccttgagttaaaaagcctgagaaaccaaacacagctaatgctatggggtgtatgaatatgtcaagtttaggtcatttagaagatttgacactgtattttgaaattatgggagtaaacaccttcaaatttcaggcatttctgctttgtgactaaatacaaactacattttcaagattaggccataatgtatatttaaacacaatggctatcaacagctgctaataaggtatcaactaaagcagaattggggaataatagaaatggctgcttatttcaagatatatttgccaacccattcctattcagtcattttattattaatgtaatttgaatgtcaatttgtgtgcttttggtgatttagcgctgtggcaagcaattttgcacatcattttcatgttgttctttatgacaagaatgttcttcaattagaaaatgtgcaaataatgaaattcagggccagtgaggcaaatagactatctgacatatttgactttatgaaaacatattgcctgatggcagaatcaactttataagtggtcaacttctacacaagcgtatgaaatactggtcagtagaacagccattgtgattggactggtttctctgcaatggcgccaaccccaggcttgccaatactgcctatgtaaagggcaagtgtgagaagctattctcatttcgctgacatacaggtaggactatgggggatgggacatttgagtgggactgagataggaaaggcttgaaaagaacccagaaacaccaccaggaagttggcaaagtaaaagaaaatgacttccccctcaaagggcaatgagagggagagaaacaaaccaaaatagaagaactagactttttagaaaatgagtattgctagggaattcaactacctaatcttcccttattcttatatataagcagagaatttttgcaaggtatttattttttaatatgccctgaatgtcttttgctattatgtgtacattttgcatatgaaagtctaaaacgaaacttcctttactttttatactgtagtgaaaattttctattcttcccaagaatgttgtcccaaatctgaaattactggttcaatttcctgatataaacatttacaattagaagctagatagtactggcagagtctgcaaatcagaacacttaaatatatcatggcagcaaaaagaccaagggaaacaaaatgacaaatgtatttatcagaaagcaagcaatgctgactgcttgttagaaacccatctagctatcttaggtcaccagaacttcagccaacgtaatgacattcaaaaaaaaaggacataagagatagcatttcaattcaattaaaccctagccacaggaggactcaagaaaggaagttgtttccttggcagacataaatgctgcctccagaagtacttctccagcagccaagcagaatgagcagggttatcaagtggatgttcaaaggaagaaggaggccctgaactccaccaatcctccccagccctccccaacaggctttctccatcattgactctcccctgcttttcttcttcattaactccttattcattccctgccagtattttgcttctgaacttcaccaggccttaaccagcctccatccccaggtcaaccagttctccgctttacctaaaatgtgcttctcaaccttttagaaccttgtcccttttgataaacatggaaatttttaaagcttcctcttcgcatcccacttggattctaagacaattagaatcatttagaatctttttggctgctggaaatgtatagaagatagaggctaaattttacacttcagttaagacattgtcaatccttttaagcaattgttttcattttcaaaatacagaatgttagtaaattatgaaaatcaatttttcatcttcattcaacctgaagttgtgattcccccttgcaagaatgttgcatacacacacacacacacacacacacacacacacacacacacacacacacacacacacacacacccctccactgacctaaagccagacacctgccgtgactgggcaggctctctcccattattaacagaggaagaggagggaggcagcaactttcaggtagcactgattcttggacatactctgtcctgggtcaaaccccactggcagcaggaattctgaatgtattggggacccctccttaggcctcgttaagtctcaaacacagtacagctcacccagcattgctgacgactgaagattcagaaacaaaacctacacacagcactgaggtcttaatcatagcaaaatgtgataaaccatgttgtgaaaaacttttatacattgaagccatgaccattttgtgtctatcttactctagcacaaaaattgggggatgttaaaagatagttgtgtggaagctataaggttctgtctgtcgtgttactctctgtggaaatgagaggggtctcccatttacactaagcaaatttccattggtcaattttaatgatgtcttgaagcacaatttagctgagcactgagtagccatatgctttctgagtacaagtgtgtctgccttcttcaacatgtagggttgatcaagctaatacttaattgcaaatatcccttgtatgaggttaactaaaaaaattttgctatgtctgatctacatgtttgcattttgttcaactaaattaatatttgtagattgcaagttttgtttaaaataactttattgagtttttaagtcctgatctgttctaaggtgcctttctcacctcccattgattcagtgattctgaagttcttaatttgcaagtaaaataagtctactagagaggaggaaatcaggcacaaattgaccaattctcatgccatttgcaaagcaaaactgtaaggatgatgaaacctggctaactaaattaatggatcatttcactaaatcagatagaggaaatatcataaatattaacttgtctccctagaagctgagatttttcgccttaaatgacatggttgtgtttttgtaagagaaacttaatctaatctaataatgtgcatttaagtaagcagttctaagtcatgtatgacaatgcaattgtctgtttcctgaaaacaaataaatcgggaacaccatatccatttcaagctatcattaaagtgtaatttcctttgctctcttttactgggattatttgttttaaagtaaaacatt

SEQ ID NO: 10687 - DNA, 6623 bp, Homo sapiens
  source 1..6623: mol_type = unassigned DNA
actctatccccgggggcagtttgggaaggagggagtggtagtcgcgggaatgagggagcaagagaaaccctctcaaagtgacgccccaaacaggtccggatttagaattcgaagctaaaggctgttagaaattgggactcctcggcctcctctgcagcccctcctttcccgccccgaagcccgggcggtttgctggctgcctgcttccccgcccccggctcagaggtctctggctggcgggcgccccgtcggccgccggcttcctccttgaaacccgccggcgcacatgaggccgctgcccccgccgcaggcgctggcggccccctcgcggtgcccgtggtgatgccatgccccgccaccacgcgggaggagaggagggcggcgccgccgggctctgggtgaagagcggcgcagcggcggcggcggcgggcggggggcgcttgggcagcggcatgaaggatgtggagtccggccggggcagggtgctgctgaactcggcagccgccaggggcgacggcctgctactgctgggcacccgcgcggccacgctcggtggcggcggcggtggcctgagggagagccgccggggcaagcagggggcccggatgagcctgctggggaagccgctctcttacacgagtagccagagctgccggcgcaacgtcaagtaccggcgggtgcagaactacctgtacaacgtgctggagagaccccgcggctgggcgttcatctaccacgctttcgtttttctccctgtctttggttgcttgattttgtcagtgttttctaccatccctgagcacacaaaattggcctcaagttgcctcttgatcctggagttcgtgatgattgtcgtctttggtttggagttcatcattcgaatctggtctgcgggttgctgttgtcgatatagaggatggcaaggaagactgaggtttgctcgaaagcccttctgtgttatagataccattgttcttatcgcttcaatagcagttgtttctgcaaaaactcagggtaatatttttgccacgtctgcactcagaagtctccgtttcctacagatcctccgcatggtgcgcatggaccgaaggggaggcacttggaaattactgggttcagtggtttatgctcacagcaaggaattaatcacagcttggtacataggatttttggttcttattttttcgtctttccttgtctatctggtggaaaaggatgccaataaagagttttctacatatgcagatgctctctggtggggcacaattacattgacaactattggctatggagacaaaactcccctaacttggctgggaagattgctttctgcaggctttgcactccttggcatttctttctttgcacttcctgccggcattcttggctcaggttttgcattaaaagtacaagaacaacaccgccagaaacactttgagaaaagaaggaacccagctgccaacctcattcagtgtgtttggcgtagttacgcagctgatgagaaatctgtttccattgcaacctggaagccacacttgaaggccttgcacacctgcagccctaccaagaaagaacaaggggaagcatcaagcagtaagttctgtagtaataagcagaagctcttcagaatgtacacctcacggaagcagagtcagaagctaagttttaaggagcgagtgcgcatggctagccccaggggccagagtattaagagccgacaagcctcagtaggtgacaggaggtccccaagcaccgacatcacagccgagggcagtcccaccaaagtgcagaagagctggagcttcaacgaccgaacccgcttccggccctcgctgcgcctcaaaagttctcagccaaaaccagtgatagatgctgacacagcccttggcactgatgatgtatatgatgaaaaaggatgccagtgtgatgtatcagtggaagacctcaccccaccacttaaaactgtcattcgagctatcagaattatgaaatttcatgttgcaaaacggaagtttaaggaaacattacgtccatatgatgtaaaagatgtcattgaacaatattctgctggtcatctggacatgttgtgtagaattaaaagccttcaaacacgtgttgatcaaattcttggaaaagggcaaatcacatcagataagaagagccgagagaaaataacagcagaacatgagaccacagacgatctcagtatgctcggtcgggtggtcaaggttgaaaaacaggtacagtccatagaatccaagctggactgcctactagacatctatcaacaggtccttcggaaaggctctgcctcagccctcgctttggcttcattccagatcccaccttttgaatgtgaacagacatctgactatcaaagccctgtggatagcaaagatctttcgggttccgcacaaaacagtggctgcttatccagatcaactagtgccaacatctcgagaggcctgcagttcattctgacgccaaatgagttcagtgcccagactttctacgcgcttagccctactatgcacagtcaagcaacacaggtgccaattagtcaaagcgatggctcagcagtggcagccaccaacaccattgcaaaccaaataaatacggcacccaagccagcagccccaacaactttacagatcccacctcctctcccagccatcaagcatctgcccaggccagaaactctgcaccctaaccctgcaggcttacaggaaagcatttctgacgtcaccacctgccttgttgcctccaaggaaaatgttcaggttgcacagtcaaatctcaccaaggaccgttctatgaggaaaagctttgacatgggaggagaaactctgttgtctgtctgtcccatggtgccgaaggacttgggcaaatctttgtctgtgcaaaacctgatcaggtcgaccgaggaactgaatatacaactttcagggagtgagtcaagtggctccagaggcagccaagatttttaccccaaatggagggaatccaaattgtttataactgatgaagaggtgggtcccgaagagacagagacagacacttttgatgccgcaccgcagcctgccagggaagctgcctttgcatcagactctctaaggactggaaggtcacgatcatctcagagcatttgtaaggcaggagaaagtacagatgccctcagcttgcctcatgtcaaactgaaataagttcttcattttctttccaggcatagcagttctttagccatacatatcattgcatgaactatttcgaaagcccttctaaaaagttgaaattgcaagaatcgggaagaacatgaaaggcagtttataagcccgttaccttttaattgcatgaaaatgcatgtttagggatggctaaaattccaaggtgcatcgacattaacccactcatttagtaatgtaccttgagttaaaaagcctgagaaaccaaacacagctaatgctatggggtgtatgaatatgtcaagtttaggtcatttagaagatttgacactgtattttgaaattatgggagtaaacaccttcaaatttcaggcatttctgctttgtgactaaatacaaactacattttcaagattaggccataatgtatatttaaacacaatggctatcaacagctgctaataaggtatcaactaaagcagaattggggaataatagaaatggctgcttatttcaagatatatttgccaacccattcctattcagtcattttattattaatgtaatttgaatgtcaatttgtgtgcttttggtgatttagcgctgtggcaagcaattttgcacatcattttcatgttgttctttatgacaagaatgttcttcaattagaaaatgtgcaaataatgaaattcagggccagtgaggcaaatagactatctgacatatttgactttatgaaaacatattgcctgatggcagaatcaactttataagtggtcaacttctacacaagcgtatgaaatactggtcagtagaacagccattgtgattggactggtttctctgcaatggcgccaaccccaggcttgccaatactgcctatgtaaagggcaagtgtgagaagctattctcatttcgctgacatacaggtaggactatgggggatgggacatttgagtgggactgagataggaaaggcttgaaaagaacccagaaacaccaccaggaagttggcaaagtaaaagaaaatgacttccccctcaaagggcaatgagagggagagaaacaaaccaaaatagaagaactagactttttagaaaatgagtattgctagggaattcaactacctaatcttcccttattcttatatataagcagagaatttttgcaaggtatttattttttaatatgccctgaatgtcttttgctattatgtgtacattttgcatatgaaagtctaaaacgaaacttcctttactttttatactgtagtgaaaattttctattcttcccaagaatgttgtcccaaatctgaaattactggttcaatttcctgatataaacatttacaattagaagctagatagtactggcagagtctgcaaatcagaacacttaaatatatcatggcagcaaaaagaccaagggaaacaaaatgacaaatgtatttatcagaaagcaagcaatgctgactgcttgttagaaacccatctagctatcttaggtcaccagaacttcagccaacgtaatgacattcaaaaaaaaaggacataagagatagcatttcaattcaattaaaccctagccacaggaggactcaagaaaggaagttgtttccttggcagacataaatgctgcctccagaagtacttctccagcagccaagcagaatgagcagggttatcaagtggatgttcaaaggaagaaggaggccctgaactccaccaatcctccccagccctccccaacaggctttctccatcattgactctcccctgcttttcttcttcattaactccttattcattccctgccagtattttgcttctgaacttcaccaggccttaaccagcctccatccccaggtcaaccagttctccgctttacctaaaatgtgcttctcaaccttttagaaccttgtcccttttgataaacatggaaatttttaaagcttcctcttcgcatcccacttggattctaagacaattagaatcatttagaatctttttggctgctggaaatgtatagaagatagaggctaaattttacacttcagttaagacattgtcaatccttttaagcaattgttttcattttcaaaatacagaatgttagtaaattatgaaaatcaatttttcatcttcattcaacctgaagttgtgattcccccttgcaagaatgttgcatacacacacacacacacacacacacacacacacacacacacacacacacacacacacacacacccctccactgacctaaagccagacacctgccgtgactgggcaggctctctcccattattaacagaggaagaggagggaggcagcaactttcaggtagcactgattcttggacatactctgtcctgggtcaaaccccactggcagcaggaattctgaatgtattggggacccctccttaggcctcgttaagtctcaaacacagtacagctcacccagcattgctgacgactgaagattcagaaacaaaacctacacacagcactgaggtcttaatcatagcaaaatgtgataaaccatgttgtgaaaaacttttatacattgaagccatgaccattttgtgtctatcttactctagcacaaaaattgggggatgttaaaagatagttgtgtggaagctataaggttctgtctgtcgtgttactctctgtggaaatgagaggggtctcccatttacactaagcaaatttccattggtcaattttaatgatgtcttgaagcacaatttagctgagcactgagtagccatatgctttctgagtacaagtgtgtctgccttcttcaacatgtagggttgatcaagctaatacttaattgcaaatatcccttgtatgaggttaactaaaaaaattttgctatgtctgatctacatgtttgcattttgttcaactaaattaatatttgtagattgcaagttttgtttaaaataactttattgagtttttaagtcctgatctgttctaaggtgcctttctcacctcccattgattcagtgattctgaagttcttaatttgcaagtaaaataagtctactagagaggaggaaatcaggcacaaattgaccaattctcatgccatttgcaaagcaaaactgtaaggatgatgaaacctggctaactaaattaatggatcatttcactaaatcagatagaggaaatatcataaatattaacttgtctccctagaagctgagatttttcgccttaaatgacatggttgtgtttttgtaagagaaacttaatctaatctaataatgtgcatttaagtaagcagttctaagtcatgtatgacaatgcaattgtctgtttcctgaaaacaaataaatcgggaacaccatatccatttcaagctatcattaaagtgtaatttcctttgctctcttttactgggattatttgttttaaagtaaaacatt

SEQ ID NO: 10688 - DNA, 5883 bp, Homo sapiens
  source 1..5883: mol_type = unassigned DNA
acagcgtcttgttagtcctctccctgtactccgcaatattttctttctttctccctcctctcctccatttgttgtttgatgtttcccactctttgaggaaggatggttgatttggagagcgaagtgccccctctgcctcccaggtacaggtttcgagatttgctgctaggggaccaaggatggcaaaacgacgacagggtacaagttgaattctatatgaatgaaaatacatttaaagaaagactaaaattatttttcataaaaaaccagagatcaagtctaaggatacgcctgttcaatttttctctcaaattactaagctgcttattatacataatccgagtactactagaaaacccttcacaaggaaatgaatggtctcatatcttttgggtgaacagaagtctacctttgtggggcttacaggtttcagtggcattgataagtctgtttgaaacaatattacttggttatcttagttataagggaaacatctgggaacagattttacgaatacccttcatcttggaaataattaatgcagttcccttcattatctcaatattctggccttccttaaggaatctatttgtcccagtctttctgaactgttggcttgccaaacatgccttggaaaatatgattaatgatctacacagagccattcagcgtacacagtctgcaatgtttaatcaagttttgattttaatatctacattactatgccttatcttcacctgcatttgtgggatccaacatctggaacgaataggaaagaagctgaatctctttgactccctttatttctgcattgtgacgttttctactgtgggcttcggggatgtcactcctgaaacatggtcctccaagctttttgtagttgctatgatttgtgttgctcttgtggttctacccatacagtttgaacagctggcttatttgtggatggagagacaaaagtcaggaggaaactatagtcgacatagagctcaaactgaaaagcatgtcgtcctgtgtgtcagctcactgaagattgatttacttatggattttttaaatgaattctatgctcatcctaggctccaggattattatgtggtgattttgtgtcctactgaaatggatgtacaggttcgaagggtactgcagattccaatgtggtcccaacgagttatctaccttcaaggttcagcccttaaagatcaagacctattgagagcaaagatggatgacgctgaggcctgttttattctcagtagccgttgtgaagtggataggacatcatctgatcaccaaacaattttgagagcatgggctgtgaaagattttgctccaaattgtcctttgtatgtccagatattaaagcctgaaaataaatttcacatcaaatttgctgatcatgttgtttgtgaagaagagtttaaatacgccatgttagctttaaactgtatatgcccagcaacatctacacttattacactactggttcatacctctagagggcaagaaggccagcaatcgccagaacaatggcagaagatgtacggtagatgctccgggaatgaagtctaccacattgttttggaagaaagtacattttttgctgaatatgaaggaaagagttttacatatgcctctttccatgcacacaaaaagtttggcgtctgcttgattggtgttaggagggaggataataaaaacattttgctgaatccaggtcctcgatacattatgaattctacagacatatgcttttatattaatattaccaaagaagagaattcagcatttaaaaaccaagaccagcagagaaaaagcaatgtgtccaggtcgttttatcatggaccttccagattacctgtacatagcataattgccagcatgggtactgtggctatagacttgcaagatacaagctgtagatcagcaagtggccctaccctgtctcttcctacagagggaagcaaagaaataagaagacctagcattgctcctgttttagaggttgcagatacatcatcgattcaaacatgtgatcttctaagtgaccaatcagaagatgaaactacaccagatgaagaaatgtcttcaaacttagagtatgctaaaggttacccaccttattctccatatataggaagttcacccactttttgtcatctccttcatgaaaaagtaccattttgctgcttaagattagacaagagttgccaacataactactatgaggatgcaaaagcctatggattcaaaaataaactaattatagttgcagctgaaacagctggaaatggattatataactttattgttcctctcagggcatattatagaccaaagaaagaacttaatcccatagtactgctattggataaccccctagatgacttactcaggtgtggagtgacttttgctgctaatatggtggttgtggataaagagagcaccatgagtgccgaggaagactacatggcagatgccaaaaccattgtgaacgtgcagacactcttcaggttgttttccagtctcagtattatcacagagctaactcaccccgccaacatgagattcatgcaattcagagccaaagactgttactctcttgctctttcaaaactggaaaagaaagaacgggagagaggctctaacttggcctttatgtttcgactgccttttgctgctgggagggtgtttagcatcagtatgttggacactctgctgtatcagtcatttgtgaaggattatatgatttctatcacgagacttctgttgggactggacactacaccaggatctgggtttctttgttctatgaaaatcactgcagatgacttatggatcagaacttatgccagactttatcagaagttgtgttcttctactggagatgttcccattggaatctacaggactgagtctcagaaacttactacatctgagtctcaaatatctatcagtgtagaagagtgggaagacaccaaagactccaaagaacaagggcaccaccgcagcaaccaccgcaactcaacatccagtgatcagtcggaccatcccttgctgcggagaaaaagcatgcagtgggcccgaagactgagcagaaaaggcccaaaacactctggtaaaacagctgaaaaaataacccagcagcgactgaacctctacaggaggtcagaaagacaagagcttgctgaacttgtgaaaaatagaatgaaacacttgggtctttctacagtgggatatgatgaaatgaatgatcatcaaagtaccctctcctacatcctgattaacccatctccagataccagaatagagctgaatgatgttgtatacttaattcgaccagatccactggcctaccttccaaacagtgagcccagtcgaagaaacagcatctgcaatgtcactggtcaagattctcgggaggaaactcaactttgataaaaataaaatgagaaacttttttcctacaaagaccttgcttgaaaccacaaaagttttgctggcacgaaagaaactagatggaaatatatgtaattctctcatatttaaaaacgtaatctcttctcttagaagtatagatcattttgaaacttaatgtactacttactggtactctccctattaatatttgaaggacctcaatggaataaatttgaaaagctaaattaaaatacaaaaatttaaatctgacatttaattgttttataataatccaaactctatgaaagcaattttaaaaattattaaggttttatgaagttgacaaaatctaactatatttggtgcatcacaatggacacagaatgctgctgctcctcttaaaaattaaatgtgtcatattatattctttaaacttactgttttacaaaattgagctcatcgtaaatgtctagtcttctcacatagagattaaccaacaaacttgtgtggctgacttttgtgtaagaatcatagtttgctttagaatacaaatctttaagtcattttaacttttttttctgccttacgatataaaaatatttatcttagaatttgagatgttcatagcatgttttattacattgaagaaactaaaacataaatgaaaagaaacactaggttcctgcactttttggtaactttatgtctagcaaatattttatgccaagaaaagcatactataaagcaaatatctattattctcctaaacgaatgcctagcatagagaaaatacttaatacacatttgttgacttaaatttaattcaaggattgaaaaattaactggatatcttgaaatatacagtaatgattgtccttagactcttgaactttaccatctttcctattcatatatctatatagtaaatttcactagaaaaattcttttaaaattgacagaagataatttataccttttatggactctgaagacacttcaaaacattaaaagtccttatgtctttggtaatgaaacaataacactcaatgaaggatgtattaaaatttttgacttaattttgaaatcgtatatatgagctatactttaacattatgagagaaaagcataaaacaaaaataggtagttcttggcttttaacattaatgcaaatcatgcagaatttgagttataaatttaaatataaattgaccattgatgatatccagtttttcattttttacctgtattgcattttccccctagagaaatagatcaaaagagcacaagagtatgcgtacatagtttaccaggtagtagaagtgtgttaaaatgttcctgtaaaagaaacattggtaaatttaaatacatactgttctaattttgtattttttaatttttgaatttgacattgagtttaattcagcaacaacaaaaaatacatataaaactagaaagggactttttttcctttcttttcataatgaagcagatcaacttaaaggataataaaatttttaaagaaaagatattctaatgtactctcaataattctacagaaataaaactgtaaagtgcaatgtgaaatcaaagattatagtcattgtataatttggcttggaggctatgaaatgtctttttttctttttggtattttacattattcacattttagaataacaagaacaccaagaattacccctaaaacagagaccctgtatttaatctactttgatcagagaagtagaatttataacaggttagctaaaattgggagcatgccttaaaacttaaagattgtatgcatatatgtgtatatgttataaacgtgaaatatatttgacacacacattcacatataaattgttaaaaactgaaggcagaatggaactaatatatgtaacagagaaaaacaataaattttatgaacttgttttatatttgcatatcaagagtcaagtatgatgtttctttaagttgactttttttacttcattatttttaggaataaatgtaagattttacaaatcttttatttccccacaagatctgaagtttggtatttttgcattatgacagttgttgagactaggattttaagctaggatatgattatatttcctatataactaaaaattttgtttcataaattttaaaataattatttttgactatgaacattagtccaaatttaatatttgacacagttcataccagcttgctacaataatgataatttattagtctttctgttatttaaagaataaaaacatgcttataaaagacttttaatgaaatgttgcctttttaaaataattatacttgcacatgaaaataaaatataaagtcaataatagtccttgtagcccaatgggaattgattctgtttattgtctgtaccattttgctaccagttacattgaactgctttaaaataaataataaaattatttctaatgatgaaaa

SEQ ID NO: 10689 - DNA, 5157 bp, Homo sapiens
  source 1..5157: mol_type = unassigned DNA
aatgatctacacagagccattcagcgtacacagtctgcaatgtttaatcaagttttgattttaatatctacattactatgccttatcttcacctgcatttgtgggatccaacatctggaacgaataggaaagaagctgaatctctttgactccctttatttctgcattgtgacgttttctactgtgggcttcggggatgtcactcctgaaacatggtcctccaagctttttgtagttgctatgatttgtgttgctcttgtggttctacccatacagtttgaacagctggcttatttgtggatggagagacaaaagtcaggaggaaactatagtcgacatagagctcaaactgaaaagcatgtcgtcctgtgtgtcagctcactgaagattgatttacttatggattttttaaatgaattctatgctcatcctaggctccaggattattatgtggtgattttgtgtcctactgaaatggatgtacaggttcgaagggtactgcagattccaatgtggtcccaacgagttatctaccttcaaggttcagcccttaaagatcaagacctattgagagcaaagatggatgacgctgaggcctgttttattctcagtagccgttgtgaagtggataggacatcatctgatcaccaaacaattttgagagcatgggctgtgaaagattttgctccaaattgtcctttgtatgtccagatattaaagcctgaaaataaatttcacatcaaatttgctgatcatgttgtttgtgaagaagagtttaaatacgccatgttagctttaaactgtatatgcccagcaacatctacacttattacactactggttcatacctctagagggcaagaaggccagcaatcgccagaacaatggcagaagatgtacggtagatgctccgggaatgaagtctaccacattgttttggaagaaagtacattttttgctgaatatgaaggaaagagttttacatatgcctctttccatgcacacaaaaagtttggcgtctgcttgattggtgttaggagggaggataataaaaacattttgctgaatccaggtcctcgatacattatgaattctacagacatatgcttttatattaatattaccaaagaagagaattcagcatttaaaaaccaagaccagcagagaaaaagcaatgtgtccaggtcgttttatcatggaccttccagattacctgtacatagcataattgccagcatgggtactgtggctatagacttgcaagatacaagctgtagatcagcaagtggccctaccctgtctcttcctacagagggaagcaaagaaataagaagacctagcattgctcctgttttagaggttgcagatacatcatcgattcaaacatgtgatcttctaagtgaccaatcagaagatgaaactacaccagatgaagaaatgtcttcaaacttagagtatgctaaaggttacccaccttattctccatatataggaagttcacccactttttgtcatctccttcatgaaaaagtaccattttgctgcttaagattagacaagttttagccataaaatctctgccacagaccattgttcctgattcaagcgaaatattttttctggactactcctggggatcttggactcaaggctttgcctagatgacttactcaggtgtggagtgacttttgctgctaatatggtggttgtggataaagagagcaccatgagtgccgaggaagactacatggcagatgccaaaaccattgtgaacgtgcagacactcttcaggttgttttccagtctcagtattatcacagagctaactcaccccgccaacatgagattcatgcaattcagagccaaagactgttactctcttgctctttcaaaactggaaaagaaagaacgggagagaggctctaacttggcctttatgtttcgactgccttttgctgctgggagggtgtttagcatcagtatgttggacactctgctgtatcagtcatttgtgaaggattatatgatttctatcacgagacttctgttgggactggacactacaccaggatctgggtttctttgttctatgaaaatcactgcagatgacttatggatcagaacttatgccagactttatcagaagttgtgttcttctactggagatgttcccattggaatctacaggactgagtctcagaaacttactacatctgagtctcaaatatctatcagtgtagaagagtgggaagacaccaaagactccaaagaacaagggcaccaccgcagcaaccaccgcaactcaacatccagtgatcagtcggaccatcccttgctgcggagaaaaagcatgcagtgggcccgaagactgagcagaaaaggcccaaaacactctggtaaaacagctgaaaaaataacccagcagcgactgaacctctacaggaggtcagaaagacaagagcttgctgaacttgtgaaaaatagaatgaaacacttgggtctttctacagtgggatatgatgaaatgaatgatcatcaaagtaccctctcctacatcctgattaacccatctccagataccagaatagagctgaatgatgttgtatacttaattcgaccagatccactggcctaccttccaaacagtgagcccagtcgaagaaacagcatctgcaatgtcactggtcaagattctcgggaggaaactcaactttgataaaaataaaatgagaaacttttttcctacaaagaccttgcttgaaaccacaaaagttttgctggcacgaaagaaactagatggaaatatatgtaattctctcatatttaaaaacgtaatctcttctcttagaagtatagatcattttgaaacttaatgtactacttactggtactctccctattaatatttgaaggacctcaatggaataaatttgaaaagctaaattaaaatacaaaaatttaaatctgacatttaattgttttataataatccaaactctatgaaagcaattttaaaaattattaaggttttatgaagttgacaaaatctaactatatttggtgcatcacaatggacacagaatgctgctgctcctcttaaaaattaaatgtgtcatattatattctttaaacttactgttttacaaaattgagctcatcgtaaatgtctagtcttctcacatagagattaaccaacaaacttgtgtggctgacttttgtgtaagaatcatagtttgctttagaatacaaatctttaagtcattttaacttttttttctgccttacgatataaaaatatttatcttagaatttgagatgttcatagcatgttttattacattgaagaaactaaaacataaatgaaaagaaacactaggttcctgcactttttggtaactttatgtctagcaaatattttatgccaagaaaagcatactataaagcaaatatctattattctcctaaacgaatgcctagcatagagaaaatacttaatacacatttgttgacttaaatttaattcaaggattgaaaaattaactggatatcttgaaatatacagtaatgattgtccttagactcttgaactttaccatctttcctattcatatatctatatagtaaatttcactagaaaaattcttttaaaattgacagaagataatttataccttttatggactctgaagacacttcaaaacattaaaagtccttatgtctttggtaatgaaacaataacactcaatgaaggatgtattaaaatttttgacttaattttgaaatcgtatatatgagctatactttaacattatgagagaaaagcataaaacaaaaataggtagttcttggcttttaacattaatgcaaatcatgcagaatttgagttataaatttaaatataaattgaccattgatgatatccagtttttcattttttacctgtattgcattttccccctagagaaatagatcaaaagagcacaagagtatgcgtacatagtttaccaggtagtagaagtgtgttaaaatgttcctgtaaaagaaacattggtaaatttaaatacatactgttctaattttgtattttttaatttttgaatttgacattgagtttaattcagcaacaacaaaaaatacatataaaactagaaagggactttttttcctttcttttcataatgaagcagatcaacttaaaggataataaaatttttaaagaaaagatattctaatgtactctcaataattctacagaaataaaactgtaaagtgcaatgtgaaatcaaagattatagtcattgtataatttggcttggaggctatgaaatgtctttttttctttttggtattttacattattcacattttagaataacaagaacaccaagaattacccctaaaacagagaccctgtatttaatctactttgatcagagaagtagaatttataacaggttagctaaaattgggagcatgccttaaaacttaaagattgtatgcatatatgtgtatatgttataaacgtgaaatatatttgacacacacattcacatataaattgttaaaaactgaaggcagaatggaactaatatatgtaacagagaaaaacaataaattttatgaacttgttttatatttgcatatcaagagtcaagtatgatgtttctttaagttgactttttttacttcattatttttaggaataaatgtaagattttacaaatcttttatttccccacaagatctgaagtttggtatttttgcattatgacagttgttgagactaggattttaagctaggatatgattatatttcctatataactaaaaattttgtttcataaattttaaaataattatttttgactatgaacattagtccaaatttaatatttgacacagttcataccagcttgctacaataatgataatttattagtctttctgttatttaaagaataaaaacatgcttataaaagacttttaatgaaatgttgcctttttaaaataattatacttgcacatgaaaataaaatataaagtcaataatagtccttgtagcccaatgggaattgattctgtttattgtctgtaccattttgctaccagttacattgaactgctttaaaataaataataaaattatttctaatgatg

SEQ ID NO: 10690 - DNA, 3622 bp, Homo sapiens
  source 1..3622: mol_type = unassigned DNA
ccctcctctcctccatttgttgtttgatgtttcccactctttgaggaaggatggttgatttggagagcgaagtgccccctctgcctcccaggtacaggtttcgagatttgctgctaggggaccaaggatggcaaaacgacgacagggtacaagttgaattctatatgaatgaaaatacatttaaagaaagactaaaattatttttcataaaaaaccagagatcaagtctaaggatacgcctgttcaatttttctctcaaattactaagctgcttattatacataatccgagtactactagaaaacccttcacaaggaaatgaatggtctcatatcttttgggtgaacagaagtctacctttgtggggcttacaggtttcagtggcattgataagtctgtttgaaacaatattacttggttatcttagttataagggaaacatctgggaacagattttacgaatacccttcatcttggaaataattaatgcagttcccttcattatctcaatattctggccttccttaaggaatctatttgtcccagtctttctgaactgttggcttgccaaacatgccttggaaaatatgattaatgatctacacagagccattcagcgtacacagtctgcaatgtttaatcaagttttgattttaatatctacattactatgccttatcttcacctgcatttgtgggatccaacatctggaacgaataggaaagaagctgaatctctttgactccctttatttctgcattgtgacgttttctactgtgggcttcggggatgtcactcctgaaacatggtcctccaagctttttgtagttgctatgatttgtgttgctcttgtggttctacccatacagtttgaacagctggcttatttgtggatggagagacaaaagtcaggaggaaactatagtcgacatagagctcaaactgaaaagcatgtcgtcctgtgtgtcagctcactgaagattgatttacttatggattttttaaatgaattctatgctcatcctaggctccaggattattatgtggtgattttgtgtcctactgaaatggatgtacaggttcgaagggtactgcagattccaatgtggtcccaacgagttatctaccttcaaggttcagcccttaaagatcaagacctattgagagcaaagatggatgacgctgaggcctgttttattctcagtagccgttgtgaagtggataggacatcatctgatcaccaaacaattttgagagcatgggctgtgaaagattttgctccaaattgtcctttgtatgtccagatattaaagcctgaaaataaatttcacatcaaatttgctgatcatgttgtttgtgaagaagagtttaaatacgccatgttagctttaaactgtatatgcccagcaacatctacacttattacactactggttcatacctctagagggcagtttggcgtctgcttgattggtgttaggagggaggataataaaaacattttgctgaatccaggtcctcgatacattatgaattctacagacatatgcttttatattaatattaccaaagaagagaattcagcatttaaaaaccaagaccagcagagaaaaagcaatgtgtccaggtcgttttatcatggaccttccagattacctgtacatagcataattgccagcatgggtactgtggctatagacttgcaagatacaagctgtagatcagcaagtggccctaccctgtctcttcctacagagggaagcaaagaaataagaagacctagcattgctcctgttttagaggttgcagatacatcatcgattcaaacatgtgatcttctaagtgaccaatcagaagatgaaactacaccagatgaagaaatgtcttcaaacttagagtatgctaaaggttacccaccttattctccatatataggaagttcacccactttttgtcatctccttcatgaaaaagtaccattttgctgcttaagattagacaagagttgccaacataactactatgaggatgcaaaagcctatggattcaaaaataaactaattatagttgcagctgaaacagctggaaatggattatataactttattgttcctctcagggcatattatagaccaaagaaagaacttaatcccatagtactgctattggataaccccctagatgacttactcaggtgtggagtgacttttgctgctaatatggtggttgtggataaagagagcaccatgagtgccgaggaagactacatggcagatgccaaaaccattgtgaacgtgcagacactcttcaggttgttttccagtctcagtattatcacagagctaactcaccccgccaacatgagattcatgcaattcagagccaaagactgttactctcttgctctttcaaaactggaaaagaaagaacgggagagaggctctaacttggcctttatgtttcgactgccttttgctgctgggagggtgtttagcatcagtatgttggacactctgctgtatcagtcatttgtgaaggattatatgatttctatcacgagacttctgttgggactggacactacaccaggatctgggtttctttgttctatgaaaatcactgcagatgacttatggatcagaacttatgccagactttatcagaagttgtgttcttctactggagatgttcccattggaatctacaggactgagtctcagaaacttactacatctgagtctcgaaaaatagcatcacaatctcaaatatctatcagtgtagaagagtgggaagacaccaaagactccaaagaacaagggcaccaccgcagcaaccaccgcaactcaacatccagtgatcagtcggaccatcccttgctgcggagaaaaagcatgcagtgggcccgaagactgagcagaaaaggcccaaaacactctggtaaaacagctgaaaaaataacccagcagcgactgaacctctacaggaggtcagaaagacaagagcttgctgaacttgtgaaaaatagaatgaaacacttgggtctttctacagtgggatatgatgaaatgaatgatcatcaaagtaccctctcctacatcctgattaacccatctccagataccagaatagagctgaatgatgttgtatacttaattcgaccagatccactggcctaccttccaaacagtgagcccagtcgaagaaacagcatctgcaatgtcactggtcaagattctcgggaggaaactcaactttgataaaaataaaatgagaaacttttttcctacaaagaccttgcttgaaaccacaaaagttttgctggcacgaaagaaactagatggaaatatatgtaattctctcatatttaaaaacgtaatctcttctcttagaagtatagatcattttgaaacttaatgtactacttactggtactctccctattaatatttgaaggacctcaatggaataaatttgaaaagctaaattaaaatacaaaaatttaaatctgacatttaattgttttataataatccaaactctatgaaagcaattttaaaaattattaaggttttatgaagttgacaaaatctaactatatttggtgcatcacaatggacacaga

SEQ ID NO: 10691 - DNA, 4409 bp, Homo sapiens
  source 1..4409: mol_type = unassigned DNA
tttttccccgagttcagggaaacacctcccttctttcagaatgtgagaaaaaaatgggattttcctggggctgagagtggggattccctttccagaaacgtgcaattttttcatcccgcccacctggactgaaggcaatcaaagcgagggagctcgtggcatagtggaacactccaagcaccctggcccccctcctcccagagaagggtctggagccccgcaatccgctaattagctcgcccccattggttgtccccaaggcacccccgtgccgtcactgtgctatgctaatgagggggagtctcattggctgggcctccagctccatctccacagggagattgcggggagagccgggttggccgcgtctggggccgaaacccaccgcccccgattcccgccagctcagggctgtgccggatgcaagcccgcccgagggaacagtagccgggaggctgccctctgggaggatctggcaactgcctttaaggaaagtgcttcaccatcaagcggcgctcactcccacccctctcccctctttctaggcaccgcgcgtctttttcggcgaagtaactttttatacccgcctccccctagtcctggggaccagaggcggtgccgagcctgggggcggttccttggcagcgttgattcttgtcagagccagacttttgctcctgggttgggtttgcatcatccccattacaccctcgggaaagaggagccagccccctttcaagccttagcttccggctccaagcggaccccctccccctccctgtccccttccccttctcccatccctctctcggccacagcgtcttgttagtcctctccctgtactccgcaatattttctttctttctccctcctctcctccatttgttgtttgatgtttcccactctttgaggaaggatggttgatttggagagcgaagtgccccctctgcctcccaggtacaggtttcgagatttgctgctaggggaccaaggatggcaaaacgacgacagggtacaagttgaattctatatgaatgaaaatacatttaaagaaagactaaaattatttttcataaaaaaccagagatcaagtctaaggatacgcctgttcaatttttctctcaaattactaagctgcttattatacataatccgagtactactagaaaacccttcacaaggaaatgaatggtctcatatcttttgggtgaacagaagtctacctttgtggggcttacaggtttcagtggcattgataagtctgtttgaaacaatattacttggttatcttagttataagggaaacatctgggaacagattttacgaatacccttcatcttggaaataattaatgcagttcccttcattatctcaatattctggccttccttaaggaatctatttgtcccagtctttctgaactgttggcttgccaaacatgccttggaaaatatgattaatgatctacacagagccattcagcgtacacagtctgcaatgtttaatcaagttttgattttaatatctacattactatgccttatcttcacctgcatttgtgggatccaacatctggaacgaataggaaagaagctgaatctctttgactccctttatttctgcattgtgacgttttctactgtgggcttcggggatgtcactcctgaaacatggtcctccaagctttttgtagttgctatgatttgtgttgctcttgtggttctacccatacagtttgaacagctggcttatttgtggatggagagacaaaagtcaggaggaaactatagtcgacatagagctcaaactgaaaagcatgtcgtcctgtgtgtcagctcactgaagattgatttacttatggattttttaaatgaattctatgctcatcctaggctccaggattattatgtggtgattttgtgtcctactgaaatggatgtacaggttcgaagggtactgcagattccaatgtggtcccaacgagttatctaccttcaaggttcagcccttaaagatcaagacctattgagagcaaagatggatgacgctgaggcctgttttattctcagtagccgttgtgaagtggataggacatcatctgatcaccaaacaattttgagagcatgggctgtgaaagattttgctccaaattgtcctttgtatgtccagatattaaagcctgaaaataaatttcacatcaaatttgctgatcatgttgtttgtgaagaagagtttaaatacgccatgttagctttaaactgtatatgcccagcaacatctacacttattacactactggttcatacctctagagggcaagaaggccagcaatcgccagaacaatggcagaagatgtacggtagatgctccgggaatgaagtctaccacattgttttggaagaaagtacattttttgctgaatatgaaggaaagagttttacatatgcctctttccatgcacacaaaaagtttggcgtctgcttgattggtgttaggagggaggataataaaaacattttgctgaatccaggtcctcgatacattatgaattctacagacatatgcttttatattaatattaccaaagaagagaattcagcatttaaaaaccaagaccagcagagaaaaagcaatgtgtccaggtcgttttatcatggaccttccagattacctgtacatagcataattgccagcatgggtactgtggctatagacttgcaagatacaagctgtagatcagcaagtggccctaccctgtctcttcctacagagggaagcaaagaaataagaagacctagcattgctcctgttttagaggttgcagatacatcatcgattcaaacatgtgatcttctaagtgaccaatcagaagatgaaactacaccagatgaagaaatgtcttcaaacttagagtatgctaaaggttacccaccttattctccatatataggaagttcacccactttttgtcatctccttcatgaaaaagtaccattttgctgcttaagattagacaagagttgccaacataactactatgaggatgcaaaagcctatggattcaaaaataaactaattatagttgcagctgaaacagctggaaatggattatataactttattgttcctctcagggcatattatagaccaaagaaagaacttaatcccatagtactgctattggataacccgccagatatgcattttctggatgcaatctgttggtttccaatggtttactacatggtgggctctattgacaacctagatgacttactcaggtgtggagtgacttttgctgctaatatggtggttgtggataaagagagcaccatgagtgccgaggaagactacatggcagatgccaaaaccattgtgaacgtgcagacactcttcaggttgttttccagtctcagtattatcacagagctaactcaccccgccaacatgagattcatgcaattcagagccaaagactgttactctcttgctctttcaaaactggaaaagaaagaacgggagagaggctctaacttggcctttatgtttcgactgccttttgctgctgggagggtgtttagcatcagtatgttggacactctgctgtatcagtcatttgtgaaggattatatgatttctatcacgagacttctgttgggactggacactacaccaggatctgggtttctttgttctatgaaaatcactgcagatgacttatggatcagaacttatgccagactttatcagaagttgtgttcttctactggagatgttcccattggaatctacaggactgagtctcagaaacttactacatctgagtctcaaatatctatcagtgtagaagagtgggaagacaccaaagactccaaagaacaagggcaccaccgcagcaaccaccgcaactcaacatccagtgatcagtcggaccatcccttgctgcggagaaaaagcatgcagtgggcccgaagactgagcagaaaaggcccaaaacactctggtaaaacagctgaaaaaataacccagcagcgactgaacctctacaggaggtcagaaagacaagagcttgctgaacttgtgaaaaatagaatgaaacacttgggtctttctacagtgggatatgatgaaatgaatgatcatcaaagtaccctctcctacatcctgattaacccatctccagataccagaatagagctgaatgatgttgtatacttaattcgaccagatccactggcctaccttccaaacagtgagcccagtcgaagaaacagcatctgcaatgtcactggtcaagattctcgggaggaaactcaactttgataaaaataaaatgagaaacttttttcctacaaagaccttgcttgaaaccacaaaagttttgctggcacgaaagaaactagatgga

SEQ ID NO: 10692 - DNA, 3462 bp, Homo sapiens
  source 1..3462: mol_type = unassigned DNA
agacttttgctcctgggttgggtttgcatcatccccattacaccctcgggaaagaggagccagccccctttcaagccttagcttccggctccaagcggaccccctccccctccctgtccccttccccttctcccatccctctctcggccacagcgtcttgttagtcctctccctgtactccgcaatattttctttctttctccctcctctcctccatttgttgtttgatgtttcccactctttgaggaaggatggttgatttggagagcgaagtgccccctctgcctcccaggtacaggtttcgagatttgctgctaggggaccaaggatggcaaaacgacgacagggtacaagttgaattctatatgaatgaaaatacatttaaagaaagactaaaattatttttcataaaaaaccagagatcaagtctaaggatacgcctgttcaatttttctctcaaattactaagctgcttattatacataatccgagtactactagaaaacccttcacaaggaaatgaatggtctcatatcttttgggtgaacagaagtctacctttgtggggcttacaggtttcagtggcattgataagtctgtttgaaacaatattacttggttatcttagttataagatattctggccttccttaaggaatctatttgtcccagtctttctgaactgttggcttgccaaacatgccttggaaaatatgattaatgatctacacagagccattcagcgtacacagtctgcaatgtttaatcaagttttgattttaatatctacattactatgccttatcttcacctgcatttgtgggatccaacatctggaacgaataggaaagaagctgaatctctttgactccctttatttctgcattgtgacgttttctactgtgggcttcggggatgtcactcctgaaacatggtcctccaagctttttgtagttgctatgatttgtgttgctcttgtggttctacccatacagtttgaacagctggcttatttgtggatggagagacaaaagtcaggaggaaactatagtcgacatagagctcaaactgaaaagcatgtcgtcctgtgtgtcagctcactgaagattgatttacttatggattttttaaatgaattctatgctcatcctaggctccaggattattatgtggtgattttgtgtcctactgaaatggatgtacaggttcgaagggtactgcagattccaatgtggtcccaacgagttatctaccttcaaggttcagcccttaaagatcaagacctattgagagcaaagatggatgacgctgaggcctgttttattctcagtagccgttgtgaagtggataggacatcatctgatcaccaaacaattttgagagcatgggctgtgaaagattttgctccaaattgtcctttgtatgtccagatattaaagcctgaaaataaatttcacatcaaatttgctgatcatgttgtttgtgaagaagagtttaaatacgccatgttagctttaaactgtatatgcccagcaacatctacacttattacactactggttcatacctctagagggcagtgtgtgtgcctgtgttgcagagaaggccagcaatcgccagaacaatggcagaagatgtacggtagatgctccgggaatgaagtctaccacattgttttggaagaaagtacattttttgctgaatatgaaggaaagagttttacatatgcctctttccatgcacacaaaaagtttggcgtctgcttgattggtgttaggagggaggataataaaaacattttgctgaatccaggtcctcgatacattatgaattctacagacatatgcttttatattaatattaccaaagaagagaattcagcatttaaaaaccaagaccagcagagaaaaagcaatgtgtccaggtcgttttatcatggaccttccagattacctgtacatagcataattgccagcatgggtactgtggctatagacttgcaagatacaagctgtagatcagcaagtggccctaccctgtctcttcctacagagggaagcaaagaaataagaagacctagcattgctcctgttttagaggttgcagatacatcatcgattcaaacatgtgatcttctaagtgaccaatcagaagatgaaactacaccagatgaagaaatgtcttcaaacttagagtatgctaaaggttacccaccttattctccatatataggaagttcacccactttttgtcatctccttcatgaaaaagtaccattttgctgcttaagattagacaagagttgccaacataactactatgaggatgcaaaagcctatggattcaaaaataaactaattatagttgcagctgaaacagctggaaatggattatataactttattgttcctctcagggcatattatagaccaaagaaagaacttaatcccatagtactgctattggataaccccctagatgacttactcaggtgtggagtgacttttgctgctaatatggtggttgtggataaagagagcaccatgagtgccgaggaagactacatggcagatgccaaaaccattgtgaacgtgcagacactcttcaggttgttttccagtctcagtattatcacagagctaactcaccccgccaacatgagattcatgcaattcagagccaaagactgttactctcttgctctttcaaaactggaaaagaaagaacgggagagaggctctaacttggcctttatgtttcgactgccttttgctgctgggagggtgtttagcatcagtatgttggacactctgctgtatcagtcatttgtgaaggattatatgatttctatcacgagacttctgttgggactggacactacaccaggatctgggtttctttgttctatgaaaatcactgcagatgacttatggatcagaacttatgccagactttatcagaagttgtgttcttctactggagatgttcccattggaatctacaggactgagtctcagaaacttactacatctgagtctcgaaaaatagcatcacaatctcaaatatctatcagtgtagaagagtgggaagacaccaaagactccaaagaacaagggcaccaccgcagcaaccaccgcaactcaacatccagtgatcagtcggaccatcccttgctgcggagaaaaagcatgcagtgggcccgaagactgagcagaaaaggcccaaaacactctggtaaaacagctgaaaaaataacccagcagcgactgaacctctacaggaggtcagaaagacaagagcttgctgaacttgtgaaaaatagaatgaaacacttgggtctttctacagtgggatatggtatgctctttaaaaactactgtatatatggactcgtgatttcttgccattagtagtaatatagttggttctaatttaataaagaattgaatttttgcttcacag

SEQ ID NO: 10693 - DNA, 695 bp, Homo sapiens
  source 1..695: mol_type = unassigned DNA
tagagctcaaactgaaaagcatgtcgtcctgtgtgtcagctcactgaagattgatttacttatggattttttaaatgaattctatgctcatcctaggctccaggattattatgtggtgattttgtgtcctactgaaatggatgtacaggttcgaagggtactgcagattccaatgtggtcccaacgagttatctaccttcaaggttcagcccttaaagatcaagacctattgagagcaaagatggatgacgctgaggcctgttttattctcagtagccgttgtgaagtggataggacatcatctgatcaccaaacaattttgagagcatgggctgtgaaagattttgctccaaattgtcctttgtatgtccagatattaaagcctgaaaataaatttcacatcaaatttgctgttctgaaggctggaaatccaagatctaggtgccaacatgatccagtgctgagaaggccagcaatcgccagaacaatggcagaagatgtacggtagatgctccgggaatgaagtctaccacattgttttggaagaaagtacattttttgctgaatatgaaggaaagagttttacatatgcctctttccatgcacacaaaaagtttggcgtctgcttgattggtgttaggagggaggataataaaaacattttgctgaatccaggtcctcgatacattatgaat

SEQ ID NO: 10694 - DNA, 3146 bp, Homo sapiens
  source 1..3146: mol_type = unassigned DNA
ccctcctctcctccatttgttgtttgatgtttcccactctttgaggaaggatggttgatttggagagcgaagtgccccctctgcctcccaggtacaggtttcgagatttgctgctaggggaccaaggatggcaaaacgacgacagggtacaagttgaattctatatgaatgaaaatacatttaaagaaagactaaaattatttttcataaaaaaccagagatcaagtctaaggatacgcctgttcaatttttctctcaaattactaagctgcttattatacataatccgagtactactagaaaacccttcacaaggaaatgaatggtctcatatcttttgggtgaacagaagtctacctttgtggggcttacaggtttcagtggcattgataagtctgtttgaaacaatattacttggttatcttagttataagggaaacatctgggaacagattttacgaatacccttcatcttggaaataattaatgcagttcccttcattatctcaatattctggccttccttaaggaatctatttgtcccagtctttctgaactgttggcttgccaaacatgccttggaaaatatgattaatgatctacacagagccattcagcgtacacagtctgcaatgtttaatcaagttttgattttaatatctacattactatgccttatcttcacctggatcaccaaacaattttgagagcatgggctgtgaaagattttgctccaaattgtcctttgtatgtccagatattaaagcctgaaaataaatttcacatcaaatttgctgatcatgttgtttgtgaagaagagtttaaatacgccatgttagctttaaactgtatatgcccagcaacatctacacttattacactactggttcatacctctagagggcaagaaggccagcaatcgccagaacaatggcagaagatgtacggtagatgctccgggaatgaagtctaccacattgttttggaagaaagtacattttttgctgaatatgaaggaaagagttttacatatgcctctttccatgcacacaaaaagtttggcgtctgcttgattggtgttaggagggaggataataaaaacattttgctgaatccaggtcctcgatacattatgaattctacagacatatgcttttatattaatattaccaaagaagagaattcagcatttaaaaaccaagaccagcagagaaaaagcaatgtgtccaggtcgttttatcatggaccttccagattacctgtacatagcataattgccagcatgggtactgtggctatagacttgcaagatacaagctgtagatcagcaagtggccctaccctgtctcttcctacagagggaagcaaagaaataagaagacctagcattgctcctgttttagaggttgcagatacatcatcgattcaaacatgtgatcttctaagtgaccaatcagaagatgaaactacaccagatgaagaaatgtcttcaaacttagagtatgctaaaggttacccaccttattctccatatataggaagttcacccactttttgtcatctccttcatgaaaaagtaccattttgctgcttaagattagacaagagttgccaacataactactatgaggatgcaaaagcctatggattcaaaaataaactaattatagttgcagctgaaacagctggaaatggattatataactttattgttcctctcagggcatattatagaccaaagaaagaacttaatcccatagtactgctattggataacccatgacttactcaggtgtggagtgacttttgctgctaatatggtggttgtggataaagagagcaccatgagtgccgaggaagactacatggcagatgccaaaaccattgtgaacgtgcagacactcttcagaaagaacgggagagaggctctaacttggcctttatgtttcgactgccttttgctgctgggagggtgtttagcatcagtatgttggacactctgctgtatcagtcatttgtgaaggattatatgatttctatcacgagacttctgttgggactggacactacaccaggatctgggtttctttgttctatgaaaatcactgcagatgacttatggatcagaacttatgccagactttatcagaagttgtgttcttctactggagatgttcccattggaatctacaggactgagtctcagaaacttactacatctgagtctcgaaaaatagcatcacaagattttattggatctacttcctgacgttacttaaattgtctcaaatatctatcagtgtagaagagtgggaagacaccaaagactccaaagaacaagggcaccaccgcagcaaccaccgcaactcaacatccagtgatcagtcggaccatcccttgctgcggagaaaaagcatgcagtgggcccgaagactgagcagaaaaggcccaaaacactctggtaaaacagctgaaaaaataacccagcagcgactgaacctctacaggaggtcagaaagacaagagcttgctgaacttgtgaaaaatagaatgaaacacttgggtctttctacagtgggatatgatgaaatgaatgatcatcaaagtaccctctcctacatcctgattaacccatctccagataccagaatagagctgaatgatgttgtatacttaattcgaccagatccactggcctaccttccaaacagtgagcccagtcgaagaaacagcatctgcaatgtcactggtcaagattctcgggaggaaactcaactttgataaaaataaaatgagaaacttttttcctacaaagaccttgcttgaaaccacaaaagttttgctggcacgaaagaaactagatggaaatatatgtaattctctcatatttaaaaacgtaatctcttctcttagaagtatagatcattttgaaacttaatgtactacttactggtactctccctattaatatttgaaggacctcaatggaataaatttgaaaagctaaattaaaatacaaaaatttaaatctgacatttaattgttttataataatccaaactctatgaaagcaattttaaaaattattaaggttttatgaagttgacaaaatctaactatatttggtgcatcacaatggacacaga

SEQ ID NO: 10695 - DNA, 6979 bp, Homo sapiens
  source 1..6979: mol_type = unassigned DNA
agagcgggcggggcggacacgcttagcgtaagcgcaggggccaggagcccggagggaggtggaggcggggcaaggcaaggcagcaggcgctgggtagagctcagctggaacacagtttccctcctggaccggtcgagtcagacctcacgtgtagactaagaggatcaaaagaagagtacgttacctgcggcgccggttgtgcgcagaccagatgtgccgggagctgcaggaggtcagaacctaagggagacggcggaagaaaatggagcgtcagtgatcatcagactagaatgagagtgaattgggagaaaatggtgcggccccctcacccagagaaccctcccccacctgctcacacccccagcgaacaccccgggggaggcctatgaagcagcagtaaaagaaaagggaggaatataaattctcaagttggaagggacccggttaccacttcctttgctttctgaactttttgttttggtctcctgcgggcaggagtgagtctcgccatcccccttgcttgcttgcttgcttgcgttcagctaagagtcatcttctctcctcttcctcctcctccgccccacatctccctccttcctcccttccccaacccctccacccaccaagtagcgagtcattcaatctgtacacctcctgggctgggaatcgcaattgcgaagttgggaggcggggtgacaacgtttgggaagggccagggcgaccggcagtgtgcacagggactgtgtcgggcttggacctcacctgatcctctctcttagcgcgacccttcctctgctccctgtctcctctttctgccacttgtgcgctgcttccgcgcactcccggctccctagcggcaggaggaggaaggcgcacagcgggtggagagggtgcgccaaggagaggtaaccccttcgggagcccggggaatcccggccgccaccaggggccgtgccaccgccctcgcgggaccaaagcttccggcgtgtccccaactttgtggcgccctcaggccgcggcgactgggttagagatgccttccagcggcagagcgctgctggactcgccgctggacagcggctccctgacctccctggactctagtgtcttctgcagcgagggtgaaggggagcccttggcgctcggggactgcttcacggtcaacgtgggcggcagccgcttcgtgctctcgcagcaggcgctgtcctgcttcccgcacacgcgccttggcaagctggccgtggtggtggcttcctaccgccgccccggggccctggccgccgtgcccagccctctggagctttgcgacgatgccaaccccgtggacaacgagtacttcttcgaccgcagctcgcaggcgttccgatatgtcctgcactactaccgcaccggccgcctgcatgtcatggagcagctgtgcgcgctctccttcctgcaggagatccagtactggggcatcgatgagctcagcatcgattcctgctgcagggacagatacttcagaaggaaagagctgagtgaaactttagacttcaagaaggacacagaagaccaggaaagtcaacatgagagtgaacaggacttctcccaaggaccttgtcccactgttcgccagaagctctggaatatcctggagaaacctggatcttccacagctgcccgtatctttggcgtcatctccattatcttcgtggtggtgtccatcattaacatggccctgatgtcagctgagttaagctggctggacctgcagctgctggaaatcctggagtatgtgtgcattagctggttcaccggggagtttgtcctccgcttcctgtgtgtgcgggacaggtgtcgcttcctaagaaaggtgccaaacatcatagacctccttgccatcttgcccttctacatcactcttctggtagagagcctaagtgggagccagaccacgcaggagctggagaacgtggggcgcattgtccaggtgttgaggctgctcagggctctgcgcatgctaaagctgggcagacattccacaggattacgctcccttgggatgacaatcacccagtgttacgaagaagtcggcctactgctcctatttctatccgtgggaatctctatattttcaactgtagaatactttgctgagcaaagcattcctgacacaaccttcacaagtgtcccttgtgcatggtggtgggccaccacctctatgactactgtgggatatggggacattagaccagacaccaccacaggcaaaatcgtggccttcatgtgtatattatcgggaattcttgtcttggccttgcctattgctattattaacgatcgcttctctgcttgctacttcaccttgaaactcaaggaagcagctgttagacagcgtgaagccctaaagaagcttaccaagaatatagccactgactcatatatcagtgttaacttgagagatgtctatgcccggagtatcatggagatgctgcgactgaaaggcagagaaagagcaagtactaggagcagcgggggagatgatttctggttttgaattaattttcaatttatttacaaaagctatgtacaattaactaaaatgataaagcagtgatgtggatttctgtattctgatgatgagtctcttcagagtactgctcatcttaattaatttttgctgatatattgcttcatctactagaatatttcacatcacctataacaactgcacagtgttctgacacatttgagtgtccaaaatagccaattaacacaaccaaatacaactgggccaatataaacatgtttgaattgtcaaatataaaataatgttattgcaatacatacaaaaaagttaaagattttatgtatcactaacattagaagttttttgcaccactaattttttaaaaatggaaggtaaactgcatagcccagagaaagataagtaaatatttaagaacatattgaacaactttgctatttaaagatattatccaagtacataaattactccgttctctatcagttaaagctattgaatataatacttagctttacaagagaaaacccatatttgatgggcagagattatatccctatcttctttttcatgtaaaccactggtcacaaatgaactgatctctgtatcccattattactataagaggtgggaatcccaaaactgcttagattgcagtacatgagtctacacaaagacttcaacaattgcacatcttcattctcccaactgagtgtagtatgtggagcataaaacagcatatttcttagtatttcatgaatatcagatggtctttaaatgtctctttatggatgtattgttcacattatggctttaaaataatgaatatgtaaaagtgaggtagtgaacatcctaaatttctacactggaattactaaataatcttatttcataaaatgggaaatatatgttaaatgacatcactggatgaacttgaagatcttttacttgttaacaaaaaaatactatggacagctttctgattgttggggtaaatagcaaatgttcaaactttgcaggcattttgacattcatcataacaacacaattcctagacattgtattatataattaaagccaaaacctctaaagctaagaactagctcatgattcccattattttagtaaatgagattctacaacctaagaataacaaggaatgcatcactttaatacctacatttccaatataatagagcccccaaggggaagaaaattggttcttgaggaaaaaaaaatcttatcacttcatttacaaaacacagataagcatattgagtatatctgtggtattaacatttcatgggggtgagatgttagggaaaaaagcctagaaggctctttgccaggggtgaatggtgataagaaataaacattgaggactgctttaatatatagctataaggtatttcataaactctatttaagacatcatattatgctatgcactaccaagaaagaaagatgccagtcaattgtaagatgccattaactgtaaaatgcatccggatttcagatatgtaaaaatttaaaataagcaccttaaaatcaatgaaatatcgcatgtactacctcctgttttctggtatgcatggttaagctctgaaaacattttcactgatggcatgagttttagattgtgtgctaaagtactttaattcatttaacttgtttccacttctcctaaatattataaaaggttcaggagatatgaatattagtaagataaatattttacttcttacacacatacatgggtgctagattgtggcacagggccactagtcatagtataaatcccttccacaatctgaagggaaagtagaagttagacacagaaggtaaacttactccagcttttctagaactttccctaataagaatagttactctgatccaggactatgctctgtattcatcatgtattatgccattttatcctcaaaatatccctattatataattactattcttatactcttcaaaatacatattttatatatttattaactcaacaaatatttattaaggatctttggtgttctggggactagggagtctttcttaaacaagactaggtcctgttttcttgtagttaatattctgttcaaaggtgtgtgaggaaaagacagcgaaactgaaacattaaaaggtataaacttgcctaaattcacacaggctatagatggcagagccagcgctgaataccaatctgcctgacccggaaaacgacactcctaaaagtcaaattgcagatttcattcttcctacacaagctctgcatagaaatttattttttaggcaggcaagccaacttcttgtgcatggagaagttcaatatgccttaagtaaaatatcagcttattctcagaggtggaatggtgcttttaagaaaaggctgtggtgacaccttatagtcattattagattaaaaatatattatctttagagtaaatagtagttggaaataaaaaaaattaaaaactatgtgtatacatatgtatatatgtttttatcatggaggatcctaaacatcttctctacaaatgtgctgttagctatataaatgttgtcaagatgtaggtcttcagaaagaagttttaaaatatcattgcttactcaattttgctgttaaataaaatatcattttatttattcaatgaatgtatatataagcaaaccaaatttcatttaggtaaaaaaatcaaggcaggaactctgccaattttataacccattattttaaaacagtaaacactttttaaacatctaagaattattgttataaaacaatatttaattttttaaaatataaaataattgaattattgtctttctctaagctatttagagaacactactttctttgttttgttttggtttggttttttgagacggagtgtccgtctgtcgcccaggctggagtgccagtggcgcgatctcggctcactgcaagctccacctcttgggttcacaccattctcctgcgtcaacctcgcgagtagctgggactagaggcgcccgccaccacgcctggctaattttttgtatttttagcagagacggggtttcaccgtgttagccactttctttgttaatttaactgttattttaagttcagggatacatgtgcgggtttgttatacaggtaatcttgtgtcatgagagtttttttgcacggattatttcatcacccaggtattaaacctagcaccagttatttttcctgattctctccctcctcctacccagcaccctctgataggccccaatgtgtgttgtttccctctatgtgttcatgtgctctcatcatttagctcccacttataagtgagaacatgtggtatttggttttctcttcctgcattagtttgctaaggataatagcctccagctccatccatgtccctgcaaatgacatgatctcattctttcatatggctggatagtacttcatggtgtatacatacattttctttatccagtctacagttgatgggcatttaggtttattccatgtctttgctactgtgaataatgctgcattgaacatacgtgtgcatgtatctttataataaaacaatttatatttcttgggtatatacccattaatgggattgctggatccagtggtatttctgtttttaggtctttgaggaattgccacactctcacatggctgaactaatttacactcccagtatcagtgtatatgcgttccaattgctccataacttcgccagcatctgcttttttttttttgctttttaataatagccattctgactagtgtgagatggtatctcattatggttttgatttgcgtttctctaatgatcagtgatattgaggctttttttcatatcattgttggctgcatgtatgttttcttttgaaaagtgtctgttcatatcctttgcccactttttaatgggatttttttttcttgtaaatttgtttaagtttcttatagatgctggaatattagacttttgtagatgtatagtttgcaaatattttcccccaatctgtaggttgtctgttcactctgttgataggttcctttgctctgacaaagctctagagtttaattagatcccatttgccaatttttgctttcgttgcaaccaccttttgtgtcttcatcatgaaatctttgcctgttagaaaacactactttcagacatttaaatgcatataggcaatgcttaagtacctaaaaaagcaattttaagaaattactgaggtatctctattaagagtgacatattcatattttattttatgtatatattatttctataacatacaagaaattgttgcatttatcattttaatgcaaagtagtatcaagtataatggattagatgcaaaaataactgaggtaggaatctcagttctgtgttttaatgtggaattcttatgcttattaaaatattttgattagctgttgca

SEQ ID NO: 10696 - DNA, 2927 bp, Homo sapiens
  source 1..2927: mol_type = unassigned DNA
ggtgacaacgtttgggaagggccagggcgaccggcagtgtgcacagggactgtgtcgggcttggacctcacctgatcctctctcttagcgcgacccttcctctgctccctgtctcctctttctgccacttgtgcgctgcttccgcgcactcccggctccctagcggcaggaggaggaaggcgcacagcgggtggagagggtgcgccaaggagaggtaaccccttcgggagcccggggaatcccggccgccaccaggggccgtgccaccgccctcgcgggaccaaagcttccggcgtgtccccaactttgtggcgccctcaggccgcggcgactgggttagagatgccttccagcggcagagcgctgctggactcgccgctggacagcggctccctgacctccctggactctagtgtcttctgcagcgagggtgaaggggagcccttggcgctcggggactgcttcacggtcaacgtgggcggcagccgcttcgtgctctcgcagcaggcgctgtcctgcttcccgcacacgcgccttggcaagctggccgtggtggtggcttcctaccgccgccccggggccctggccgccgtgcccagccctctggagctttgcgacgatgccaaccccgtggacaacgagtacttcttcgaccgcagctcgcaggcgttccgatatgtcctgcactactaccgcaccggccgcctgcatgtcatggagcagctgtgcgcgctctccttcctgcaggagatccagtactggggcatcgatgagctcagcatcgattcctgctgcagggacagatacttcagaaggaaagagctgagtgaaactttagacttcaagaaggacacagaagaccaggaaagtcaacatgagagtgaacaggacttctcccaaggaccttgtcccactgttcgccagaagctctggaatatcctggagaaacctggatcttccacagctgcccgtatctttggcgtcatctccattatcttcgtggtggtgtccatcattaacatggccctgatgtcagctgagttaagctggctggacctgcagctgctggaaatcctggagtatgtgtgcattagctggttcaccggggagtttgtcctccgcttcctgtgtgtgcgggacaggtgtcgcttcctaagaaaggtgccaaacatcatagacctccttgccatcttgcccttctacatcactcttctggtagagagcctaagtgggagccagaccacgcaggagctggagaacgtggggcgcattgtccaggtgttgaggctgctcagggctctgcgcatgctaaagctgggcagacattccacaggattacgctcccttgggatgacaatcacccagtgttacgaagaagtcggcctactgctcctatttctatccgtgggaatctctatattttcaactgtagaatactttgctgagcaaagcattcctgacacaaccttcacaagtgtcccttgtgcatggtggtgggccaccacctctatgactactgtgggatatggggacattagaccagacaccaccacaggcaaaatcgtggccttcatgtgtatattatcgggaattcttgtcttggccttgcctattgctattattaacgatcgcttctctgcttgctacttcaccttgaaactcaaggaagcagctgttagacagcgtgaagccctaaagaagcttaccaagaatatagccactgactcatatatcagtgttaacttgagagatgtctatgcccggagtatcatggagatgctgcgactgaaaggcagagaaagagcaagtactaggagcagcgggggagatgatttctggttttgaattaattttcaatttatttacaaaagctatgtacaattaactaaaatgataaagcagtgatgtggatttctgtattctgatgatgagtctcttcagagtactgctcatcttaattaatttttgctgatatattgcttcatctactagaatatttcacatcacctataacaactgcacagtgttctgacacatttgagtgtccaaaatagccaattaacacaaccaaatacaactgggccaatataaacatgtttgaattgtcaaatataaaataatgttattgcaatacatacaaaaaagttaaagattttatgtatcactaacattagaagttttttgcaccactaattttttaaaaatggaaggtaaactgcatagcccagagaaagataagtaaatatttaagaacatattgaacaactttgctatttaaagatattatccaagtacataaattactccgttctctatcagttaaagctattgaatataatacttagctttacaagagaaaacccatatttgatgggcagagattatatccctatcttctttttcatgtaaaccactggtcacaaatgaactgatctctgtatcccattattactataagaggtgggaatcccaaaactgcttagattgcagtacatgagtctacacaaagacttcaacaattgcacatcttcattctcccaactgagtgtagtatgtggagcataaaacagcatatttcttagtatttcatgaatatcagatggtctttaaatgtctctttatggatgtattgttcacattatggctttaaaataatgaatatgtaaaagtgaggtagtgaacatcctaaatttctacactggaattactaaataatcttatttcataaaatgggaaatatatgttaaatgacatcactggatgaacttgaagatcttttacttgttaacaaaaaaatactatggacagctttctgattgttggggtaaatagcaaatgttcaaactttgcaggcattttgacattcatcataacaacacaattcctagacattgtattatataattaaagccaaaacctctaaagct

SEQ ID NO: 10697 - DNA, 1685 bp, Homo sapiens
  source 1..1685: mol_type = unassigned DNA
ttccgggtggtgcgagcgagatggggcggagggccggtcttgcagagtagctgcggtgagtgggcgtgtgcgccgagcggtctggcccaagggctgggggccggccgagggtcttcgggagcaggccgcagggcgcggagagatcctgggatcgccgtccgccgctgctacccggcatgtcggcggaggcctcgggcccggctgccgccgcggccccgtccctggaagcccccaagccctcgggtctcgagcctggccccgccgcctacggtctcaagccgctgaccccgaacagcaaatacgtgaagctgaacgtgggcggctcgttgcactacaccacgctgcgcaccctcacgggacaggacaccatgctcaaagccatgttcagcggccgcgtggaggtgctgaccgatgccggaggttgggtgctgattgaccggagcggccgtcactttggtacaatcctcaattacctgcgggatgggtctgtgccactgccggagagtacgagagaactgggggagctgctgggcgaagcacgctactacctggtgcagggcctgattgaggactgccagctggcgctgcagcaaaaaagggagacgctgtccccgctgtgcctcatccccatggtgacatctccccgggaggagcagcagctcctggccagcacctccaagcccgtggtgaagctcctgcacaaccgcagtaacaacaagtactcctacaccagcacttcagatgacaacctacttaagaacatcgagctgttcgacaagctggccctgcgcttccacgggcggctactcttcctcaaggatgtcctgggggacgagatctgctgctggtctttctacgggcagggccgcaaaatcgccgaggtgtgctgcacctccattgtctatgctacggagaagaagcagaccaaggtggaatttccagaggcccggatcttcgaggagaccctgaacatcctcatctacgagactccccggggcccagacccagccctcctggaggccacagggggagcagctggagctggtggggctggccgcggggaggatgaagagaaccgagagcaccgtgtccgcaggatccatgtccggcgccatatcacccacgacgagcgtcctcatggccaacaaattgtcttcaaggactgacctctgaccctccccctgccttcctcttgccttgggacccagtccctctctctttccctccccttcccagacttttgccccggctctgctggccaagtcgtgggtcctcctctgtcccttcattgcatggcacagctcactttggcccttctccacccatcccaaccccattgctaacaacatggtacattccggccccaccactcagagccttccgaagccaacacttgtccccaccctggccctgcgtccttccctctccagctggttaagagggatttagaattccctttctctttttttagtgcatcgtccatgccaaagtgtgcggcccttcctgacatcaccacagtctgagcagcctcccgcgtcctgcaggttacttgatgaagaaggtggtggtcctagggcattggagaagttatgcggcttgttcaaggtcatgcagctggaagatggtggtggtaggacaggaagtccgttgggcctgattctgctgccttctagtcaacgctcctt

SEQ ID NO: 10698 - DNA, 2528 bp, Homo sapiens
  source 1..2528: mol_type = unassigned DNA
gggattgggtgctaggtcccacgacattagctgggattctaagacctttgctcagctgctgcggccaccactgacacgccctctgctcctcaaatacggagaacagttcagtgttcctgcctgaggatctctgcatttgccttccctctgcctggaactcttccctcacatccgcttcccagcttcagctcggcatcacctcctcagagaggccttccatccttggtgcccgggcaccactgctacccgttttggcctctgttttttttttttttttcaaaggacgttatgttgcccaggctagagtgcaacggtccgatcacggattactgcagcttccaactcctggcttcaagcgctccttctgcctcggcctcccgagtagctaggcttacaggctggggttacaggtgtgagccacagcgcccggccgctttggcctcctttaagagcttccctccgcgctttgttcgcagttctggtcacagtctgttcagtgcgcggggctgggaggcgggaaactgcccaatgcccagacctctctgtctgtttcccctcaagctcgtgaagctctctgacagcagagacccaatcacgaggtggagacttcgctttccacatcgggcagggggtcggccgcatcctcgatctggtcctggtgactcgagaccagagaggagcgcacgtcgacccgcccggggaacccgcaggccacacgccaaacctctacgggatcccccagcgaggccactgcgcatgctccatactcgcagccccgcccccattcaggggcggggccgcgcctgcgcagctgcccggcgccggcttccgggtggtgcgagcgagatggggcggagggccggtcttgcagagtagctgcggtgagtgggcgtgtgcgccgagcggtctggcccaagggctgggggccggccgagggtcttcgggagcaggccgcagggcgcggagagatcctgggatcgccgtccgccgctgctacccggcatgtcggcggaggcctcgggcccggctgccgccgcggccccgtccctggaagcccccaagccctcgggtctcgagcctggccccgccgcctacggtctcaagccgctgaccccgaacagcaaatacgtgaagctgaacgtgggcggctcgttgcactacaccacgctgcgcaccctcacgggacaggacaccatgctcaaagccatgttcagcggccgcgtggaggtgctgaccgatgccggaggttgggtgctgattgaccggagcggccgtcactttggtacaatcctcaattacctgcgggatgggtctgtgccactgccggagagtacgagagaactgggggagctgctgggcgaagcacgctactacctggtgcagggcctgattgaggactgccagctggcgctgcagcaaaaaagggagacgctgtccccgctgtgcctcatccccatggtgacatctccccgggaggagcagcagctcctggccagcacctccaagcccgtggtgaagctcctgcacaaccgcagtaacaacaagtactcctacaccagcacttcagatgacaacctacttaagaacatcgagctgttcgacaagctggccctgcgcttccacgggcggctactcttcctcaaggatgtcctgggggacgagatctgctgctggtctttctacgggcagggccgcaaaatcgccgaggtgtgctgcacctccattgtctatgctacggagaagaagcagaccaaggtggaatttccagaggcccggatcttcgaggagaccctgaacatcctcatctacgagactccccggggcccagacccagccctcctggaggccacagggggagcagctggagctggtggggctggccgcggggaggatgaagagaaccgagagcaccgtgtccgcaggatccatgtccggcgccatatcacccacgacgagcgtcctcatggccaacaaattgtcttcaaggactgacctctgaccctccccctgccttcctcttgccttgggacccagtccctctctctttccctccccttcccagacttttgccccggctctgctggccaagtcgtgggtcctcctctgtcccttcattgcatggcacagctcactttggcccttctccacccatcccaaccccattgctaacaacatggtacattccggccccaccactcagagccttccgaagccaacacttgtccccaccctggccctgcgtccttccctctccagctggttaagagggatttagaattccctttctctttttttagtgcatcgtccatgccaaagtgtgcggcccttcctgacatcaccacagtctgagcagcctcccgcgtcctgcagggtagtccgccccctcctccccaccatcctccctacctccttaactttgtactagactggcctgggcctgcccagctcagcgttatcagtctgtttcatattatttattattttaattttctattaaattattgaaataaagttaagttgagaaactg

SEQ ID NO: 10699 - DNA, 1860 bp, Homo sapiens
  source 1..1860: mol_type = unassigned DNA
aaagccatgttcagcggccgcgtggaggtgctgaccgatgccggaggttgggtgctgattgaccggagcggccgtcactttggtacaatcctcaattacctgcgggatgggtctgtgccactgccggagagtacgagagaactgggggagctgctgggcgaagcacgctactacctggtgcagggcctgattgaggactgccagctggcgctgcagcaaaaaagggagacgctgtccccgctgtgcctcatccccatggtgacatctccccgggaggagcagcagctcctggccagcacctccaagcccgtggtgaagctcctgcacaaccgcagtaacaacaagtactcctacaccaggtgaccgccggggtgcggggcactgggcgggaccctgggatgcagcacagccctgcttctgcccaaggcgagggccacggccacacggggggcctacaagaacatctgtgcctgctcgcagattcggcttcgcctcttacccctgacgctctaggaactggcagagtcctcccccttgaggtcagtactgttgtgagctccattttacagatgaggaggtcgggacaccaagaggtgaagtaacttgcctagtgtcacccagttaaaaaatggggacaccaggacccccggggaggtggcctggctcccggtccctcactggagctgctgtgctgtgctgtgctgggatttgctcagcgcatgtggcttcccttctgagacccgtttagcctggccccaggggtggaggaggctctctgttgagcaccaaagccctgggcaggagcagaggactgggaatgcatccaggcccgtcttctgggggtacagagggaggggtgccaactgcgctgaggcctcctggtcccctggtccccagcacttcagatgacaacctacttaagaacatcgagctgttcgacaagctggccctgcgcttccacgggcggctactcttcctcaaggatgtcctgggggacgagatctgctgctggtctttctacgggcagggccgcaaaatcgccgaggtgtgctgcacctccattgtctatgctacggagaagaagcagaccaaggtggaatttccagaggcccggatcttcgaggagaccctgaacatcctcatctacgagactccccggggcccagacccagccctcctggaggccacagggggagcagctggagctggtggggctggccgcggggaggatgaagagaaccgagagcaccgtgtccgcaggatccatgtccggcgccatatcacccacgacgagcgtcctcatggccaacaaattgtcttcaaggactgacctctgaccctccccctgccttcctcttgccttgggacccagtccctctctctttccctccccttcccagacttttgccccggctctgctggccaagtcgtgggtcctcctctgtcccttcattgcatggcacagctcactttggcccttctccacccatcccaaccccattgctaacaacatggtacattccggccccaccactcagagccttccgaagccaacacttgtccccaccctggccctgcgtccttccctctccagctggttaagagggatttagaattccctttctctttttttagtgcatcgtccatgccaaagtgtgcggcccttcctgacatcaccacagtctgagcagcctcccgcgtcctgcagggtagtccgccccctcctccccaccatcctccctacctccttaactttgtactagactggcctgggcctgcccagctcagcgttatcagtctgtttcatattatttattattttaattttctattaaattattgaaataaagttaagttgag

SEQ ID NO: 10700 - DNA, 601 bp, Homo sapiens
  source 1..601: mol_type = unassigned DNA
tactacctggtgcagggcctgattgaggactgccagctggcgctgcagcaaaaaagggagacgctgtccccgctgtgcctcatccccatggtgacatctccccgggaggagcagcagctcctggccagcacctccaagcccgtggtgaagctcctgcacaaccgcagtaacaacaagtactcctacaccagcacttcagatgacaacctacttaagaacatcgagctgttcgacaagctggccctgcgcttccacgggcggctactcttcctcaaggatgtcctgggggacgagatctgctgctggtctttctacgggcagggccgcaaaatcgccgaggtgtgctgcacctccattgtctatgctacggagaagaagcagaccaagtgcatcgtccatgccaaagtgtgcggcccttcctgacatcaccacagtctgagcagcctcccgcgtcctgcagggtagtccgccccctcctccccaccatcctccctacctccttaactttgtactagactggcctgggcctgcccagctcagcgttatcagtctgtttcatattatttattattttaattttctattaaattattgaaataaa

SEQ ID NO: 10701 - DNA, 806 bp, Homo sapiens
  source 1..806: mol_type = unassigned DNA
gaggcactgtgtgacctgcgatctgaatggcatgacggacacgccacgctgacagctgagcaaagaagcatcccgggcaggggcacagccagtggccggggcaggcacaagctggatgtgtgaagcagcaaggtgtccgtgggaccaaggcccagcaagcaaagggagagtggcagagaggctggcggagcttggagcctgcagagccctgcggaccactgaggagtctggagttgttcccaaccagcttttgaaggcttttaagtgggggagtacgtggcctttggttgtgctgttaaccaccttccgcttcttccccagcaaaaaagggagacgctgtccccgctgtgcctcatccccatggtgacatctccccgggaggagcagcagctcctggccagcacctccaagcccgtggtgaagctcctgcacaaccgcagtaacaacaagtactcctacaccagcacttcagatgacaacctacttaagaacatcgagctgttcgacaagctggccctgcgcttccacgggcggctactcttcctcaaggatgtcctgggggacgagatctgctgctggtctttctacgggcagggccgcaaaatcgccgaggtgtgctgcacctccattgtctatgctacggagaagaagcagaccaaggtggaatttccagaggcccggatcttcgaggagaccctgaacatcctcatctacgagactccccggggcccagacccagccctcctggaggccacagggggagcagctggagctggtggggctggccgcggggaggatgaagagaa

SEQ ID NO: 10702 - DNA, 440 bp, Homo sapiens
  source 1..440: mol_type = unassigned DNA
aggttgggtgctgattgaccggagcggccgtcactttggtacaatcctcaattacctgcgggatgggtctgtgccactgccggagagtacgagagaactgggggagctgctgggcgaagcacgctactacctggtgcagggcctgattgaggactgccagctggcgctgcagcaaaaaagggagacgctgtccccgctgtgcctcatccccatggtgacatctccccgggaggagcagcagctcctggccagcacctccaagcccgtggtgaagctcctgcacaaccgcagtaacaacaagtactcctacaccaggaactggcagagtcctcccccttgaggtcagtactgttgtgagctccattttacagatgaggaggtcgggacaccaagaggtgaagtaacttgcctagtgtcacccagttaaaaaatggggacac

SEQ ID NO: 10703 - DNA, 264 bp, Homo sapiens
  source 1..264: mol_type = unassigned DNA
caatcctcaattacctgcgggatgggtctgtgccactgccggagagtacgagagaactgggggagctgctgggcgaagcacgctactacctggtgcagggcctgattgaggactgccagctggcgctgcagtccagggcatactccggtttctccagttgttccagaaatgtgtttttacagctggttcatcaaaccagggtccagtctagatcttcacgttgcatctggttatctgcaagttaacaatggaaagcatgacttt

SEQ ID NO: 10704 - DNA, 1773 bp, Homo sapiens
  source 1..1773: mol_type = unassigned DNA
gcgcctgcgcagctgcccggcgccggcttccgggtggtgcgagcgagatggggcggagggccggtcttgcagagtagctgcggtgagtgggcgtgtgcgccgagcggtctggcccaagggctgggggccggccgagggtcttcgggagcaggccgcagggcgcggagagatcctgggatcgccgtccgccgctgctacccggcatgtcggcggaggcctcgggcccggctgccgccgcggccccgtccctggaagcccccaagccctcgggtctcgagcctggccccgccgcctacggtctcaagccgctgaccccgaacagcaaatacgtgaagctgaacgtgggcggctcgttgcactacaccacgctgcgcaccctcacgggacaggacaccatgctcaaagccatgttcagcggccgcgtggaggtgctgaccgatgccggaggttgggtgctgattgaccggagcggccgtcactttggtacaatcctcaattacctgcgggatgggtctgtgccactgccggagagtacgagagaactgggggagctgctgggcgaagcacgctactacctggtgcagggcctgattgaggactgccagctggcgctgcaggtgagggccttcggagtccccatgcctatgttcctgggagagctgcccaagcaggtattagagcagaaaaaaggagatatggggtatggcttggagagcctggctttggctggccataaccccagagaatttgaggtgccatcttctgcatccctgccgcctcaggcagcacccccaccccagcctcatgccaggacctttgcaatggttaaatagctgctctctacttcccactgttcctatgcagccagtccagctgttacactcgcacctgagtaattatctttcagcacaaccccgatctattctctctcttgcttagaaatcctaaatagctccctcatgtcactagggaaaaacatctaaatttaaattgaaatataataacctctgcgatctggccctatcctgggaggcagcattctcccatggcttccgccccccaggagctttctaattcttttttttttttaaacagtgaaattctttattcaaatgaaatctcacagaagcagggccactcccagtaaaacagggttggggattctagagaccccacctgctaggctccacttttgtggaccccttagggttctgaggagcagagcttggaaagtgaagccaggacataagggttctgtgtcacctctgtcacagctgactcagtgaccttcagtgagtccattcctacctctgggattctgtcctcgggttccgaaagacagggaagggagaaaaataagtacaaagtagtgagttttacataaagcctgttattctgttctatttttacaatgttaaaaatgtcctttcttttatgttacaatagtaagagaagattataaaagtttctttttgaatgccctttatagattaaaaggttgcctccctgaacaacttttgtctcagggaatacttactggttcttgaagcccaaaggtgtagaactcctttggacaatatccatgtttttcaaactttttgattgcctgccatagggaaaaaatgcattttagtactcattatatataactgaaataacagttctataaaaagatacttttagtgaaatgtactctgataatctttctttttaatgctgtttgggacccattacttatttcatgacccattaataaattaccacttgcatttg

SEQ ID NO: 10705 - DNA, 589 bp, Homo sapiens
  source 1..589: mol_type = unassigned DNA
ggcttccgggtggtgcgagcgagatggggcggagggccggtcttgcagagtagctgcggtgagtgggcgtgtgcgccgagcggtctggcccaagggctgggggccggccgagggtcttcgggagcaggccgcagggcgcggagagatcctgggatcgccgtccgccgctgctacccggcatgtcggcggaggcctcgggcccggctgccgccgcggccccgtccctggaagcccccaagccctcgggtctcgagcctggccccgccgcctacggtctcaagccgctgaccccgaacagcaaatacgtgaagctgaacgtgggcggctcgttgcactacaccacgctgcgcaccctcacgggacaggacaccatgctcaaagccatgttcagcggccgcgtggaggtgctgaccgatgccggagcaataaccaacacttacggaacccctaactgccaggcgctgtggttgggtgctgattgaccggagcggccgtcactttggtacaatcctcaattacctgcgggatgggtctgtgccactgccggagagtacgagagaactgggggagctgctgggcgaagcacgct

SEQ ID NO: 10706 - DNA, 856 bp, Homo sapiens
  source 1..856: mol_type = unassigned DNA
cccgggccggaagggctcctgcgcaggcgtttgtagccacttttaagttttatcagctagttcatgcttgcgttgaaagagtggtcgtttgcgctgggtcatcactgtgtagtattggggatacttaggtgagaaaaaaacttaacgctagagacgttcacgcactagtggagaagccaggattgttgccctagagttacagtagataaaagtacctcagagaactgcgggggctcccaacctggacgcttgcaccggagtattaaatccagctagagaatggcatgtgcaaagatacagagcttttagaagttgcctgcattccttggccccttcctcacatcattccaaccaacttccatccttacaatcgattactttcctgtaatagctacagtcaaatgggcagctgaagatgatgatgatgatgatcttgacaccgagaagcagaagaccaatgaagatgaccagacagcaaaaaaggataagttaaaagaaggtaaaagaaggccactcgtacttgctgtctcagtatctaaaggtggtcaccttccagtagagaggcccacccactgcagaccgtgccaccgaaggtgacatgcactttctgccacccatccaaaaccgtaacgtgaatctgcaacaggagaggaaagaagaaccaaaacttccaaggccttgcattttttcttaaaagcatttttttttttttttggagatggagtctcactctattgcctggagtgcagtggcgtaatttcggctcactgaagcctctgcttcccgggtttaagaaattctctgcctcagcctcccaagtagctgggattacaggcacatgccaccacacctgtct

SEQ ID NO: 10707 - DNA, 555 bp, Homo sapiens
  source 1..555: mol_type = unassigned DNA
gcaggcgtttgtagccacttttaagttttatcagctagttcatgcttgcgttgaaagagtggtcgtttgcgctgggtcatcactgtgtagtattggggatacttaggtgagaaaaaaacttaacgctagagacgttcacgcactagtggagaagccaggattgttgccctagagttacagtagataaaagtacctcagagaactgcgggggctcccaacctggacgcttgcaccggagtattaaatccagctagagaatggcatgtgcaaagatacagagggtctcgctctgtatcccaggctggagttcagtggcacgatctccgctcgctgcaacctccgcctcctgggttcaagtgattctcctgcctcagcctcccaagtagctggattacagagcatgtgggtgagaagaatcgatgcagaagccatcgctcagagcgattttcagtacctcttccacgaagacctggaagctgttgatctgcttgttggcgggcaccacccagagcctcttgaggttctgcttggtgtactcctcctctggcaggccct

SEQ ID NO: 10708 - DNA, 910 bp, Homo sapiens
  source 1..910: mol_type = unassigned DNA
aggcgtttgtagccacttttaagttttatcagctagttcatgcttgcgttgaaagagtggtcgtttgcgctgggtcatcactgtgtagtattggggatacttaggtgagaaaaaaacttaacgctagagacgttcacgcactagtggagaagccaggattgttgccctagagttacagtagataaaagtacctcagagaactgcgggggctcccaacctggacgcttgcaccggagtattaaatccagctagagaatggcatgtgcaaagatacagagctacagtcaaatgggcagctgaagatgatgatgatgatgatcttgacaccgagaagcagaagaccaatgaagatgaccagacagcaaaaaaggataagttaaaagaagggtctcgctctgtatcccaggctggagttcagtggcacgatctccgctcgctgcaacctccgcctcctgggttcaagtgattctcctgcctcagcctcccaagtagctggattacagggccttcttacagatggataaatgcggcactggctagcggtacagagagatggagcccaggagaaaactgctgctcttttgtcctggctggaaaatcctcctatggcctcctttagtacacatcagctgactcttcacttgtcataataaaccgcctgtctgcagctcaaaatggcaagaaaaaaggtggttctgttcagaggacactggattccaaaaggtggacttcatcatggggggaatcaagtcctgctacacaattaatacagattagtatagtcccctgcctcgcaccactggcgagatgccctccaagacctggctgacatgagcttcctgggactccccatctccagtgttgttggggtccttttacctgtaccgtattaatcgaataatcttattgt

SEQ ID NO: 10709 - DNA, 1789 bp, Homo sapiens
  source 1..1789: mol_type = unassigned DNA
gtagccacttttaagttttatcagctagttcatgcttgcgttgaaagagtggtcgtttgcgctgggtcatcactgtgtagtattggggatacttagttctgtaaaccagaaatctaaaatcagtcactggagtaaagtcaaggtgtcatttggattggttgcttccagaggctctgcagggagattgtttttcttgtctttttcagcttttagaagttgcctgcattccttggccccttcctcacatcattccaaccaacttccatccttacaatcgattactttcctgtaatagctacagtcaaatgggcagctgaagatgatgatgatgatgatcttgacaccgagaagcagaagaccaatgaagatgaccagacagcaaaaaaggataagttaaaagaaggtaaaagaaggccactcgtacttgctgtctcagtatctaaaggtggtcaccttccagtagagaggcccacccactgcagaccgtgccaccgaaggtgacatgcactttctgccacccatccaaaaccgtaacgtgaatctgcaacaggagaggaaagaagaaccaaaacttccaaggccttgcattttttcttaaaagcatttttttttttttttggagatggagtctcactctattgcctggagtgcagtggcgtaatttcggctcactgaagcctctgcttcccgggtttaagaaattctctgcctcagcctcccaagtagctgggattacaggcacatgccaccacacctgtctaatttttgtatttttaggagagacagggtttcaccgtgttggccaggctggtcttgaactcctgacctcgtgatccacctgccttggcctcccaaagtgctgggattacaggcctgagccactgcacctagccaaaagcattttttaaagaaaaattggtctatattttttgtttctactttatatctttgtacatatttttagagtgcaggcatttttaataatcttggatgaccaaagcagctttcagaatgttctttgcccaacttctgactttacttgtagtgtgaccatgttcattagaatctcaaaggaggaagaaaagaaaaaacaaacttgtaaaaaatgaaaaatagatctggcgaggtgattcacggctgtaagcccagcactttgagaggctaaggcgggtggatcacctgaggtcaggagttcgagaccagcctggccaacatggtgaaatcctatctctactaaatatacaaaaattagccaggtgtggtggtgggtgcctgtagtcccagctactcaggaggctgaggcaggagaatctggaaccccggaggcagaggttgcagtgagccgagatcgcaccattgcactccagcctgggcgacagagtgagactatctgaaaaaaagcaaaaataggccaggcatggtggctcatgccttgatcccagcactttggtaagcctaggcaggtggatcacttgaggtcaggggttcgagaccagcttagccaacatggtgaaaacctgtctctactgaaaatacaaaaattagccaggcgtggtggtgggtacctgtaatcccagctacgcgggaggctgaggcatgagaattgcttgaactcaggaggcggaggttgcagtgagcagcagtcatgccattgcactccagcctggtgacagagtaagactctgtctcaaaaataaataaatgcaaaaacaacaaatcttattttttcagcctgttcgatgtatgtgtgaaacaatgttgtccaacaataaacgggaatcttattttt

SEQ ID NO: 10710 - DNA, 586 bp, Homo sapiens
  source 1..586: mol_type = unassigned DNA
aagttttatcagctagttcatgcttgcgttgaaagagtggtcgtttgcgctgggtcatcactgtgtagtattggggatacttaggtgagaaaaaaacttaacgctagagacgttcacgcactagtggagaagccaggattgttgccctagagttacagtagataaaagtacctcagagaactgcgggggctcccaacctggacgcttgcaccggagtattaaatccagctagagaatggcatgtgcaaagatacagagctacagtcaaatgggcagctgaagatgatgatgatgatgatcttgacaccgagaagcagaagaccaatgaagatgaccagacagcaaaaaaggataagttaaaagaaggtaaaagaaggccactcgtacttgctgtctcagtatctaaaggtggtcaccttccagtagagaggcccacccactgcagaccgtgccaccgaaggtgacatgcactttctgccacccatccaaaaccgtaacgtgaatctgcaacaggagaggaaagaagaaccaaaacttccaaggccttgcattttttcttaaaagcatttttttttttttttggaga

SEQ ID NO: 10711 - DNA, 554 bp, Homo sapiens
  source 1..554: mol_type = unassigned DNA
gacgtgggtcagcttgttaacggatacaagaaggcagcagagggaatatgcctggacatggccttcttacagatggataaatgcggcactggctagcggtacagagagatggagcccaggagaaaactgctgctcttttgtcctggctggaaaatcctcctatggcctcctttagtacacatcagctgactcttcacttgtcataataaaccgcctgtctgcagctcaaaatggcaagaaaaaaggtggttctgttcagaggacactggattccaaaaggtggacttcatcatggggggaatcaagtcctgctacacaattaatacagattagtatagtcccctgcctcgcaccactggcgagatgccctccaagacctggctgacatgagcttcctgggactccccatctccagtgttgttggggtccttttacctgtaccgtattaatcgaataatcttattgttcataaaatccagagcatgtgggtgagaagaatcgatgcagaagccatcgctcagagcgattttcagtacctcttccacgaagacctg

SEQ ID NO: 10712 - DNA, 1549 bp, Homo sapiens
  source 1..1549: mol_type = unassigned DNA
cctgtaccgtattaatcgaataatcttattgttcataaaatccagagcatgtgggtgagaagaatcgatgcagaagccatcgctcagagcgattttcagtacctcttccacgaagacctggaagctgttgatctgcttgttggcgggcaccacccagagcctcttgaggttctgcttggtgtactcctcctctggcaggccctccacattggccacccagtccagagtcaggtggttggggtcctgcaagtggctggtgatggaggagagattgccattggagcagtagaagagcttagagccaaggagcttgaggaagaggcaggaggtgctgaagatgttggcgttgaagacctccatgctggaagaggagaggctgtagatctggggtgcctcgcgcacagtgaagtggaccgtctgcacacgctggttcagtgtgatgttgagcatggcattcttctcggccttggagagctccacttccttctcctgcagggcctcaatcaggggctgcacctggtagaagtcggcctccctgcggagcagccccatctcctggaagtcctcaggcaggtcaaggtgggaggtccgcaggaagttgaggatatagcggaacactttgccgtcacggtcaatgaagcagttgccctggctgtccctcttggtgggcatcttcccgctgaacatggcgcctagcatggagtcagggaagctggtcagggtcgccagtgaggttgtatagagcttccccccgacgttcagcgtgatggggtcggacatggcaggagactgggttgctggaagtagtcctggagagggtgagaagtgagaaatgactataaccaaaccttatcagagaactcacagtccttaactccttattgtacatcaagcctatgcccttgggatcgaaatgaattaatacctgatgaatgggtgataattgctaacactgtgcaaagtacattagcttcactagggagagggaaaggagaaagggaaaaggaaaggaaaaaggaaacagggaaagaaagggaaggacccctaaagcctgggtcccccgcgcccccctctgctgccgacattctattttaattggtctggaatactgccccagccctggtattttgaaagagttcccttagtgattctaaatgttcagttagaatagagaaccactggtctaaagaaagaaaggaaaacgtgcctggactgaaagctatgctacgtgtttatacatatatttgcttacataatagttgtatcagccaggtgcggtggctcacacctgtaatcccagcacttagggaggccgaggcgggcagatcacctgagatcaggagttcaagatcagactggccaacatggtgaaaccccatctctactaaaaatacaaaaattagctgggcatggtggtgggtgcctgtaatcccagctgttcaggaggctggggcaggagaatcatttgaactcaggaggtggaggttgcagtgagccgggactgaacaactgcactccagcctggacaacaagagtgaaactctgtctc

SEQ ID NO: 10713 - DNA, 3931 bp, Homo sapiens
  source 1..3931: mol_type = unassigned DNA
gtcggtggcagcggagcacggagaagaggcccgggcggcccggcggcctggaggccgcgaaaggtggaggccgggccgcccttgtgcaccgcaggattgacccgggaaggggcagaagctagcgagccccgcccggccgccgggaaggtgggggaagccccgtgcaccccccgccctccggccgccgccgccccgctggccctgcagccgtcgccgctgcctcgggctacagccccgggctcggcggtcccggctggggaaggagggcggcgagcgcgtccggagccgccggagatggcgggagggcactgcggcagcttccccgcggcggcggccggcagcggcgagatcgtccaactgaacgtaggggggaccagatttagtacctcaagacaaactcttatgtggattccagattcttttttttccagtttgctgagtgggagaatttcaacacttcgagatgaaactggtgctatatttattgatagagatccagcagcatttgcacccattttaaattttcttcggacaaaagaactagacttaaggggagtgagtattaatgttctcaggcatgaagcagaattttacgggatcactccattagtaagaaggcttctcttatgtgaagaattggagcgttcctcttgtggcagtgtcctttttcatggttacttgcccccaccaggtattcctagtcgtaaaataaacaacacagtcagatctgctgattctaggaatggtctaaattctacagaaggtgaagcccggggaaatggtacacagcctgttctctctggaacgggagaagaaactgttaggctaggatttcctgtggatccacgaaaggtgctaatagtagctggccatcacaactggattgtagctgcatatgcccattttgctgtgtgttacagaatcaaagaatcttcaggatggcagcaagtgtttacgagcccatatttggattggactatcgaacgagtagctttaaatgcaaaggtggttggagggccacatggagacaaagacaaaatggttgctgttgcctcagagagtagcatcatcttgtggagtgttcaggatgggggaagtggaagtgaaattggagtgttcagcctgggtgttcctgtagatgctctcttctttattggtaaccagttggtggccacgagtcatacagggaaagtgggagtgtggaatgctgtcactcagcactggcaggttcaagatgttgttcctataactagttatgacactgctggatcattccttctgcttggatgtaacaatggatcaatatattacatagatatgcagaagttccccttgcgaatgaaagataatgatcttcttgtaactgaactgtatcatgatccttcaaatgatgctattactgctctgagtgtttacctcacacccaaaacaagtgtcagtggtaactggatcgagatcgcctatggtacgagctctggagcagtacgagtgattgtacaacacccagagacagttgggtcaggtcctcagctttttcagactttcacagttcaccgaagtcccgtaacaaaaatcatgctatcagagaagcatcttgtatcagtctgtgcagataataatcatgtccggacgtggacagtaacacgattcagaggaatgatctctactcagccaggttctactcctttagcgtcattcaagatactatccctggaggagacagaaagtcatggtagctattcctctggaaatgacataggaccttttggagagcgagacgatcaacaggtgtttatccagaaagttgttcccatcaccaacaaactatttgtaagactctcatcgactggaaaaagaatatgtgagatccaggctgttgactgtactacaatatcctcatttacagtgagggaatgtgagggatccagtaggatgggctcaagaccaaggcgctacttgttcacaggccatacaaatggcagtattcaaatgtgggatctgaccactgctatggatatggttaacaaaagtgaagataaggatgtaggtggtccaaccgaagaagagctactcaaattactcgatcaatgtgatttgagcacatctcgctgtgctactcctaacatcagtccagcaacttccgtagttcagcatagccacttacgagaatcaaattctagccttcagcttcagcaccatgataccacccatgaagcagctacttacggttccatgaggccttacagagaaagtcctttattagcaagggcaagaaggactgagagctttcacagttatagggacttccagactattaatttgaacagaaatgtagaaagagctgtccctgaaaatggtaacttgggtccaatacaagctgaagtgaaaggggcaacaggggaatgtaatatatctgagagaaagtctcctggagtagaaataaaaagtttgagagaattggatagtggattggaagtgcataaaatagctgaaggtttttcagaatccaagaaaaggtcatcagaagatgaaaatgaaaataaaatagagtttaggaagaaaggaggatttgaagggggaggattccttggaagaaagaaagttccctatctggcgtcatcaccaagtacttccgatggaggaactgactcacctggtactgcgtccccatctcctacaaagactactccatctcctcggcataaaaaaagtgattcttcaggtcaggagtacagcttgtgaaaactcaccaaaatgaatagttgtttcgttacatttagatgaaagttaaactttactgaatttcagtacattagtttttacactaaaactttacaagataaaattggacttcatttagtatctttttaacagaattacttggaataatgagatacaataatcatatctcttttgacattttggaaatttttttaattttacaagtacatttaacagatcatttataaagcaggagtccattttaacacttaccgactttttttggtttggaaacatattaccacgtcttaataggatggtgcccatataggtgagcatccctttagatcatgggaaccagcagactgcattcctaatcttcattatgcctgagacttgtcttacaatgttacctttaagtgaatcacataattgtctttggaacttggtctcccaacacttattgtgattgcaaagtgtttaccagatatttgatgaggtgctatgtttgtgaaaaacatatcatgtaattcaaaaacactattgatattgaataccagataccactatgtagtaagtcttttaggatgattttaatttagtcgtgcgtcattttctgattctcatcattgggagatcttaaatcttagcaagcattagcaatattaaatgccaaaattccattgaaactttcaagttggagcaattgtctgtgtttgaaaagatgaaataaaaataataatcaagggcaaagctttgagtgcccagaagggaaagctgtaccagttgctaacctgtcttgtttcaggagccaccatgtttttttttcagtgttaacaacaatcatgataattaaattaaaacactagtttgttcacttgtaggactgcagttctgaattttgggttaaaggttttggctgctgtaagaatgtgaatttgaatgtattttgaattgtaagagcaaaagaacgtttttgtacaattttttttcatttaattggaatgatcttcaggtttctacaaatagggtaattgtaaatttaaagcattagcatttattggtgaataatgtatatatccccattccaagaaatataagtgagtgaagttgaaataaaatctttaaaatttactatattgccagtggtttcacaacagttctcttgtatttatttatcaattaaatcaaataaaaatgattatgtcaa

SEQ ID NO: 10714 - DNA, 751 bp, Homo sapiens
  source 1..751: mol_type = unassigned DNA
atttagtacctcaagacaaactcttatgtggattccagattcttttttttccagtttgctgagtgggagaatttcaacacttcgagatgaaactggtgctatatttattgatagagatccagcagcatttgcacccattttaaattttcttcggacaaaagaactagacttaaggggagtgagtattaatgttctcaggcatgaagcagaattttacgggatcactccattagtaagaaggcttctcttatgtgaagaattggagcgttcctcttgtggcagtgtcctttttcatggttacttgcccccaccaggtattcctagtcgtaaaataaacaacacagtcagatctgctgattctaggaatggtctaaattctacagaaggtgaagcccggggaaatggtacacagcctgttctctctggaacgggagaagaaactgttaggctaggatttcctgtggatccacgaaaggtgctaatagtagctggccatcacaactggattgtagctgcatatgcccattttgctgtgtgttacagagtgttttggctgggcacggtgggtcacgcctgtaatcccagcactttgggaggccgagatgggtggagttcaagatcagcccgaccaacatggtgaaaccccatctctactgaagatacaaaaattagccaggtgtggtgatgcatgcctgtaatcccagctactcgggaggctgaggcaggagaatcacttgaacccaggaggtgg

SEQ ID NO: 10715 - DNA, 589 bp, Homo sapiens
  source 1..589: mol_type = unassigned DNA
tgctctgagtgtttacctcacacccaaaacaagtgtcagtggtaactggatcgagatcgcctatggtacgagctctggagcagtacgagtgattgtacaacacccagagacagttgggtcaggtcctcagctttttcagactttcacagttcaccgaagtcccgtaacaaaaatcatgctatcagagaagcatcttgtatcagtctgtgcagataataatcatgtccggacgtggacagtaacacgattcagaggaatgatctctactcagccaggttctactcctttagcgtcattcaagatactatccctggaggagacagaaagtcatggtagctattcctctggaaatgacataggaccttttggagagcgagacgatcaacaggtgtttatccagaaagttgttcccatcaccaacaaactatttgtaagactctcatcgactggaaaaagtctgtgtggtgtcagtttggtttctagatccagccaagagcccacataactaaaagggcatttggagaatatgtgagatccaggctgttgactgtactacaatatcctcatttacagtgagggaatgtgaggg

SEQ ID NO: 10716 - DNA, 2722 bp, Homo sapiens
  source 1..2722: mol_type = unassigned DNA
gctcaagaatgagactaggatagtctttatcactacatgtgggcatgtaggaattatctttttccctcctttttgtccggcctactaggaagctcatctaagcttcatattctattcctgtatgcttctcaaattcatgtggattgtatttttttttgtctatttttttgaccttgcgtttgcctatactgatttttcttttttaataaactccctcaactcttttgaagtaggctgggataactaattcagtcaagtacaattcagttagcccttacgtgactttggaacaatcatttgctgatgttatcccattgtttcctgatccgtcaatgtggataaaaattgttctctctcaggttcttttatcttttatgaaaatcaactaaaaagtcataaaaatctttttttgaagttgagtattatcctaatgatggatacaatatgggccatctccatagagctgtatattttttctggtttcagattttaaagatttacacataaattttaaatgattttttaaaagtcttttctagtataacatgtttgctttctttctttctgtctttttagtttcatagcttctttttaaataattgctcattcccatcagggctctttctgcttttcttttgcagaatatgtgagatccaggctgttgactgtactacaatatcctcatttacagtgagggaatgtgagggatccagtaggatgggctcaagaccaaggcgctacttgttcacaggccatacaaatggcagtattcaaatgtgggatctgaccactgctatggatatggttaacaaaagtgaagataagggtaggttctcatacagaaagatgtttgtcacaaggttaagcttttcacttaagtgattttaatgactatttgttctcctaagatgtaggtggtccaaccgaagaagagctactcaaattactcgatcaatgtgatttgagcacatctcgctgtgctactcctaacatcagtccagcaacttccgtagttcagcatagccacttacgagaatcaaattctagccttcagcttcagcaccatgataccacccatgaagcagctacttacggttccatgaggccttacagagaaagtcctttattagcaagggcaagaaggactgagagctttcacagttatagggacttccagactattaatttgaacagaaatgtagaaagagctgtccctgaaaatggtaacttgggtccaatacaagctgaagtgaaaggggcaacaggggaatgtaatatatctgagagaaagtctcctggagtagaaataaaaagtttgagagaattggatagtggattggaagtgcataaaatagctgaaggtttttcagaatccaagaaaaggtcatcagaagatgaaaatgaaaataaaatagagtttaggaagaaaggaggatttgaagggggaggattccttggaagaaagaaagttccctatctggcgtcatcaccaagtacttccgatggaggaactgactcacctggtactgcgtccccatctcctacaaagactactccatctcctcggcataaaaaaagtgattcttcaggtcaggagtacagcttgtgaaaactcaccaaaatgaatagttgtttcgttacatttagatgaaagttaaactttactgaatttcagtacattagtttttacactaaaactttacaagataaaattggacttcatttagtatctttttaacagaattacttggaataatgagatacaataatcatatctcttttgacattttggaaatttttttaattttacaagtacatttaacagatcatttataaagcaggagtccattttaacacttaccgactttttttggtttggaaacatattaccacgtcttaataggatggtgcccatataggtgagcatccctttagatcatgggaaccagcagactgcattcctaatcttcattatgcctgagacttgtcttacaatgttacctttaagtgaatcacataattgtctttggaacttggtctcccaacacttattgtgattgcaaagtgtttaccagatatttgatgaggtgctatgtttgtgaaaaacatatcatgtaattcaaaaacactattgatattgaataccagataccactatgtagtaagtcttttaggatgattttaatttagtcgtgcgtcattttctgattctcatcattgggagatcttaaatcttagcaagcattagcaatattaaatgccaaaattccattgaaactttcaagttggagcaattgtctgtgtttgaaaagatgaaataaaaataataatcaagggcaaagctttgagtgcccagaagggaaagctgtaccagttgctaacctgtcttgtttcaggagccaccatgtttttttttcagtgttaacaacaatcatgataattaaattaaaacactagtttgttcacttgtaggactgcagttctgaattttgggttaaaggttttggctgctgtaagaatgtgaatttgaatgtattttgaattgtaagagcaaaagaacgtttttgtacaattttttttcatttaattggaatgatcttcaggtttctacaaatagggtaattgtaaatttaaagcattagcatttattggtgaataatgtatatatccccattccaagaaatataagtgagtgaagttgaaataaaatctttaaaattta

SEQ ID NO: 10717 - DNA, 652 bp, Homo sapiens
  source 1..652: mol_type = unassigned DNA
gagctgtatattttttctggtttcagattttaaagatttacacataaattttaaatgattttttaaaagtcttttctagtataacatgtttgctttctttctttctgtctttttagtttcatagcttctttttaaataattgctcattcccatcagggctctttctgcttttcttttgcagaatatgtgagatccaggctgttgactgtactacaatatcctcatttacagtgagggaatgtgagggatccagtaggatgggctcaagaccaaggcgctacttgttcacaggccatacaaatggcagtattcaaatgtgggatctgaccactgctatggatatggttaacaaaagtgaagataaggatgtaggtggtccaaccgaagaagagctactcaaattactcgatcaatgtgatttgagcacatctcgctgtgctactcctaacatcagtccagcaacttccgtagttcagcatagccacttacgagaatcaaattctagccttcagcttcagcaccatgataccacccatgaagcagctacttacggttccatgaggccttacagagaaagtcctttattagcaagggcaagaaggactgagagctttcacagttatagggacttccagactattaatttgaacag

SEQ ID NO: 10718 - DNA, 1728 bp, Homo sapiens
  source 1..1728: mol_type = unassigned DNA
ccggccaagagtgcgtgggcggcggcgcgcgggtgcgatcgcggagctgtgaggcgcaggcagggctctggggcacctagagaccggggccggagacgtggcagccgccctgcccgccagaaagtttcctagaagtttgctgggcgcgggcgcacgactgactggctggaccatgaacgtgttccgaatcctcggcgacctgagccacctcctggccatgatcttgctgctggggaagatctggaggtccaagtgctgcaagggcatctctgggaagagccagatcctgtttgctctcgtcttcaccaccaggtacctggacctgttcaccaacttcatctccatctacaacacagtaatgaaggtggtttttctcctctgtgcctatgttacagtgtacatgatatatgggaaattccgtaaaacttttgacagtgagaatgacacattccgcctggagtttcttctggtcccagtcattggcctttccttccttgaaaactacagtttcactctgctggagatcctctggactttctctatctatctggaatcagtggctatcctgccccagctcttcatgatcagcaagactggagaggctgagaccataactactcactacctgttctttctgggtctgtaccgggcactctacctggctaactggatcaggcggtaccagactgagaatttctatgaccaaattgcagtcgtgtctggagtagtacaaaccatcttctactgtgacttcttctacttgtatgtgaccaaagtccttaagggaaagaagttaagtcttccaatgccaatctgaggaccttcagagacagtctacgccttaacaagcacatgaaggaaactattttgaatgttctctttggcaacttatccataatttgggatcaaatgttaaaaccagaaaagtgtttagtgtggatttcagcaaaacctgatcatcccacccagaagaccttctcatcaatagatcgcccttaaagacccattgtaaggtcataaaaaacctcggccacctgcacaaagatggtgcctcactgcaacaagaaaccttaaggtgtcttaccgacgaaataaaaaacataaatgattgttctccaaggcctgagggcaagactcatgatgagcaagtcaaccccaatctggaacaatgtccctcctcttagaatgtcccaactaaagaccagttaaaatattagggtacgttcttgtgaatttccactttccaggtagatgaccaaatttaggtggtcaagatataaaggtgtcagctagttttaagtgtgaaacttatttcactttcacactgccttcaggccagaagcaaaccaaatttaccaggtttggctggaggagttttgtgactcatcttttactggtttgaattttttcaaaccagtggctgatacctgccttgtacttagtaccttaataccaataacctaatggtacttaggcgagtaccatttgcacaatcactgttttacttatgagcagatacagatatatccaaacccttacctactaggtatcctgctagggttttcaattccaattcttgtattaagttttttcctttcagttttaggtgcgaaagtaatcagtcaatccaatatcccccatctttgtcttgaaacaaaaactgttttaagacgtctacgttgaattattcagagaattaagcaataaaagctcacaccttattgtcaa

SEQ ID NO: 10719 - DNA, 931 bp, Homo sapiens
  source 1..931: mol_type = unassigned DNA
gggcggcggcgcgcgggtgcgatcgcggagctgtgaggcgcaggcagggctctggggcacctagagaccggggccggagacgtggcagccgccctgcccgccagaaagtttcctagaagtttgctgggcgcgggcgcacgactgactggctggaccatgaacgtgttccgaatcctcggcgacctgagccacctcctggccatgatcttgctgctggggaagatctggaggtccaagtgctgcaagggcatctctgggaagagccagatcctgtttgctctcgtcttcaccaccaggtacctggacctgttcaccaacttcatctccatctacaacacagtaatgaaggtggtttttctcctctgtgcctatgttacagtgtacatgatatatgggaaattccgtaaaacttttgacagtgagaatgacacattccgcctggagtttcttctggtcccagtcattggcctttccttccttgaaaactacagtttcactctgctggagatcctctggactttctctatctatctggaatcagtggctatcctgccccagctcttcatgatcagcaagactggagaggctgagaccataactactcactacctgttctttctgggtctgtaccgggcactctacctggctaactggatcaggcggtaccagactgagaatttctatgaccaaattgcagtcgtgtctggagtagtacaaaccatcttctactgtgacttcttctacttgtatgtgaccaaaggtaggtcctgggatgacagcaatgctgacactggcctaaggagttactcatccatttaataagtattccagcagatacagatgtgaacagtcaagtctctgccatccacaatgcttgtgttctaatgcaagaagacaaatattttcaataaagaaacaaatgccataaaaa

SEQ ID NO: 10720 - DNA, 970 bp, Homo sapiens
  source 1..970: mol_type = unassigned DNA
aacgacgactcaagtgatccgatgggaagggcatctctgggaagagccagatcctgtttgctctcgtcttcaccaccaggtacctggacctgttcaccaacttcatctccatctacaacacagtaatgaaggtggtttttctcctctgtgcctatgttacagtgtacatgatatatgggaaattccgtaaaacttttgacagtgagaatgacacattccgcctggagtttcttctggtcccagtcattggcctttccttccttgaaaactacagtttcactctgctggagatcctctggactttctctatctatctggaatcagtggctatcctgccccagctcttcatgatcagcaagactggagaggctgagaccataactactcactacctgttctttctgggtctgtaccgggcactctacctggctaactggatcaggcggtaccagactgagaatttctatgaccaaattgcagtcgtgtctggagtagtacaaaccatcttctactgtgacttcttctacttgtatgtgaccaaagtccttaagggaaagaagttaagtcttccaatgccaatctgaggaccttcagagacagtctacgccttaacaagcacatgaaggaaactattttgaatgttctctttggcaacttatccataatttgggatcaaatgttaaaaccagaaaagtgtttagtgtggatttcagcaaaacctgatcatcccacccagaagaccttctcatcaatagatcgcccttaaagacccattgtaaggtcataaaaaacctcggccacctgcacaaagatggtgcctcactgcaacaagaaaccttaaggtgtcttaccgacgaaataaaaaacataaatgattgttctccaaggcctgagggcaagactcatgatgagcaagtcaaccccaatctggaacaatgtccctcctcttagaatgtcccaactaaagacc

SEQ ID NO: 10721 - DNA, 6031 bp, Homo sapiens
  source 1..6031: mol_type = unassigned DNA
cttgttcctccgccgttgcaatgaactattttctctcagtccggggtggtacttttgagtaaccccttccaaatagaaacccataccagcctatttagctcggtctccactatatgaaggtttcctagggcttggtgtgacgcaacgtatacgaggctcggaaggacaccccgcggaaggatccggtttgttgtggtgtggggaggggagacgctgacaaaccaagatggcggcggcggcgctgaaggccgcggcgtttgggaggtaactgtggtggcgaaggctgcggtagtggggaggcaaccacacagtttggaagaaacggagcgggacgaagaggcggtagcagtagagtcagcctgagactctcagagcacgacggccacacgcccccttaggccctcggcgggcggcggctgccccgcttagggcctagcctccgagcattgcctcggcttcaaacagcggcggcgccatgagtccttaagggcggtccaagcctcccgatccctggcccagacctcgggcccaccatggagccggggtccgacgatttcctaccgccaccggagtgcccggtgttcgagcctagctgggccgagttccgagaccctcttggctacatcgcgaaaatcaggcccatcgcagagaaatcgggcatttgcaagatccgcccacccgcggactggcagccaccctttgctgtggaagtggacaacttcaggtttaccccccgaatccagaggctgaatgagctagaggcccagacgagagtgaaactgaactacttggaccagattgccaaattctgggaaatccagggctcctccttaaagattcccaatgtagaacggcggatcttggacctctacagtctcagcaaaattgtggtggaggaaggtggttatgaagctatctgcaaggaccgtcggtgggctcgggtagcccagcgcctcaactatccaccaggcaaaaatattggctccttgctacgctcccactacgaacgcattgtttatccctatgaaatgtaccagtctggagccaaccttgtgcagtgtaacacacgtccatttgataatgaggagaaggacaaggaatacaaaccccacagcatccccctacgacagtctgtgcagccttccaagttcaacagctatggccggcgggccaagagactgcagcctgatccggaacccacagaggaagacattgagaagaatccagagctgaaaaagctacagatctatggggcaggccccaagatgatgggcctgggcctcatggccaaagacaagactctgcggaagaaagataaggaggggcctgagtgtccccccacagtagtggtgaaggaggagttaggtggggatgtgaaggtggagtcaacatcgcctaagaccttcctggagagcaaggaggagctgagtcacagcccagaaccctgcaccaagatgaccatgaggctacggaggaaccacagcaatgcccagtttattgagtcatatgtctgccggatgtgttctcgaggggatgaggatgacaagctcctgctgtgtgatggctgtgatgacaactaccacatcttctgcctgctgcctcctctgcctgagatccccaagggtgtctggcggtgcccaaagtgtgtcatggcggagtgtaagcggcccccagaagcctttggctttgagcaggctacccgggaatacactctgcagagctttggcgagatggccgactcctttaaagctgactacttcaacatgcccgtgcatatggtgcccacagaacttgtggagaaggagttctggaggctggtaaatagcattgaggaagatgtgactgttgagtatggagctgacatccattccaaagaatttggcagcggtttccctgtcagtgacagtaaacggcacctaacccccgaagaggaggagtatgctaccagtggttggaacctaaatgtgatgccggtgttggaacagtctgtactgtgccacatcaatgcagatatctctggcatgaaggtgccctggctctacgtgggcatggtcttctcagccttttgctggcatattgaggatcactggagttactccattaactacctccactggggtgagccgaagacctggtatggggtgccctcacttgcagcagaacatttggaagaagtgatgaagaagctgacacctgaactatttgatagccagcctgacctcctgcaccaacttgtcaccctcatgaatcccaacaccctcatgtcccatggtgtgccagttgtccgcacaaaccagtgtgcaggagagtttgtcatcaccttcccccgtgcttaccacagcggcttcaaccaaggctacaactttgccgaggctgtcaacttttgcactgctgactggttgcctgctgggcgccagtgcattgagcactaccgccggctccggagatactgcgtcttctcccatgaggagcttatctgcaagatggctgcctgcccagagaagctagacctgaacctggcggcagctgtgcataaggagatgttcatcatggtgcaagaagagcggcgtctacgaaaggccctgctggagaagggtatcacagaggctgagcgagaggctttcgagctgctcccagatgatgagcgccagtgtatcaagtgcaagactacgtgtttcctgtcagccctggcctgctacgactgcccagacggccttgtctgcctttcccacatcaatgatctctgcaagtgctccagtagccggcagtacctgcggtatcggtataccttggatgagcttcctgccatgctgcataagctgaaggttcgggctgagtcctttgacacctgggccaacaaagtgcgagtggccctggaggtggaggatgggcggaagcgcagccttgaagaactgagggcactagagtctgaagcccgtgagcggaggtttcctaatagtgagctgctgcagcaactaaagaactgcctgagtgaggcagaggcttgcgtgtcccgagctctgggactggtcagcggccaggaagctggcccccacagggtggctggtctacagatgaccctgactgagctccgggcctttctggaccagatgaacaacctgccttgcgccatgcaccagattggggatgtcaagggtgttctggaacaggtggaggcctaccaggctgaggctcgtgaggccctggcctcactgccctccagtccagggctactgcagtccctgttggagagggggcggcagctgggggtggaggtgcctgaggcccagcagctccagcggcaggtggaacaggcgcgatggctggatgaggtgaaacgcacactggccccctcagcccgaaggggcaccttggctgtcatgcgaggactgttggtcgcgggtgccagtgtagcccctagccctgctgtggataaagcccaggccgagctgcaggaactgctgaccattgctgaacgctgggaggagaaagcccacctctgcctggaggccaggcagaagcatccaccagccacacttgaggccataatccgtgaagcggaaaacatccctgttcacctgcccaacatccaggctctcaaggaggctcttgctaaggcccgggcctggattgctgatgttgatgagatccaaaatggtgaccactacccctgcctggatgacttggagggcctagtagctgtgggccgggacctacctgtggggctggaggagctgagacagctagagctacaggtactgacagcgcactcctggagggagaaggcctccaagaccttcctcaagaaaaattcttgctacacgctgctggaggttctctgcccatgtgcagatgccggctcagacagcaccaagcgcagccggtggatggagaaggagctggggttgtacaaatctgacacagagctgctggggctgtctgcgcaggacctcagggacccaggctctgtgatcgtggccttcaaggagggggaacagaaggagaaggagggtatcctgcagctgcgtcgcaccaattcggccaagcccagtccactggcatcatcgagcacggcctcctctacaacctctatctgtgtgtgtgggcaggtgctggctggggcgggagctctgcagtgtgacctgtgtcaggactggttccatgggcggtgtgtgtcagtgcctcgcctcctcagctctccgaggcccaatcccacctcatccccactgctggcctggtgggaatgggacaccaaattcctgtgtccactgtgtatgcgctcaaggcgcccgcgcctggagaccatcctggcactgctggtagccctgcagagactgcctgtgcggctgcccgagggcgaggccctgcagtgcctcacagagagggccatcagctggcaaggccgcgccaggcaggctctggcctctgaagatgtgactgctcttttgggacggctggctgagctccgccaacggctacaggctgaacctagacctgaggagcctcctaactaccctgcagcccctgcttctgaccccctcagagagggcagtggcaaggatatgcctaaggtccagggcttactggagaatggagacagtgtgaccagtcctgagaaggtagccccggaggagggctcaggtaagagagatctggagctgctgtcctcgctgttgccacagttgactggccctgtgttggaactgcctgaggcaacccgggcccccttggaggagctcatgatggagggggacctgctcgaggtgaccctggatgagaaccacagcatatggcagctgctgcaggctggacagcccccagacctggagaggatccgcacacttctggagctggagaaggcagagcgtcacgggagtcgggctcggggccgggccctggagaggcggcggcggcggaaggtggatcggggtggggagggcgatgacccagcccgagaggagctagagccaaagagggtacggagctcagggccagaggctgaggaggtccaggaggaggaagagctggaggaggagactgggggtgagggcccccctgcacccatccccaccactggcagccccagcacccaggagaaccagaatggcttggaaccggcggaagggaccacttcaggcccctcggcccctttctccactctgactccccggctgcatctgccctgcccacagcagccgcctcagcaacagttgtgacagtggctgagcctagcacagaccctgacagagacccccctcggcctcaaggatcctctttctgaccatcaagcctgcttcttggggggtgggcgggtaggggggtggccatccctgctacccgcccacccctgagtcccttgacttttgtattctgactccaaggtattgttcagacctcagctcctgggggccggcccctggagtcttccctccctggtagcctctaaccagcattcccagacacctgaggcagatagatggatgggctggtgggcaggggggtggctggggctgggccatcaccattccagagacaaggccagtgtatatgcaaactgggggactctcctcccttctctccccagttctggtcctggccaggccatgctacactaacccctgcccccactctcctcccctcttttccttccttcctacccccttctccctctcccttcccctgactgttccacccaggaggaggaaacttcacatagccgtgctcacagttttttattttaaaggaatttggctggggagctgaacagggctccctgtgatctgaagaaagcttttggtgcttgtcctcacaaccacctcagtcctccctccctgtcctcccctgtctcctttcctcctcctgggttcatgttgtaataaaagaagattgttggtgtgtaattaatttgttcaaaagaaaaaaaaaagcaaaacaagaaacttggttccaactgaagcctattttaattttattttattattttcctcttgttagaaataaaacccttagaaacattttttggaaacatgtt

SEQ ID NO: 10722 - DNA, 5677 bp, Homo sapiens
  source 1..5677: mol_type = unassigned DNA
ggccgcggcgtttgggaggtaactgtggtggcgaaggctgcggtagtggggaggcaaccacacagtttggaagaaacggagcgggacgaagaggcggtagcagtagagtcagcctgagactctcagagcacgacggccacacgcccccttaggccctcggcgggcggcggctgccccgcttagggcctagcctccgagcattgcctcggcttcaaacagcggcggcgccatgagtccttaagggcggtccaagcctcccgatccctggcccagacctcgggcccaccatggagccggggtccgacgatttcctaccgccaccggagtgcccggtgttcgagcctagctgggccgagttccgagaccctcttggctacatcgcgaaaatcaggcccatcgcagagaaatcgggcatttgcaagatccgcccacccgcggactggcagccaccctttgctgtggaagtggacaacttcaggtttaccccccgaatccagaggctgaatgagctagaggcccagacgagagtgaaactgaactacttggaccagattgccaaattctgggaaatccagggctcctccttaaagattcccaatgtagaacggcggatcttggacctctacagtctcagcaaaattgtggtggaggaaggtggttatgaagctatctgcaaggaccgtcggtgggctcgggtagcccagcgcctcaactatccaccaggcaaaaatattggctccttgctacgctcccactacgaacgcattgtttatccctatgaaatgtaccagtctggagccaaccttgtgtgtaacacacgtccatttgataatgaggagaaggacaaggaatacaaaccccacagcatccccctacgacagtctgtgcagccttccaagttcaacagctatggccggcgggccaagagactgcagcctgatccggaacccacagaggaagacattgagaagaatccagagctgaaaaagctacagatctatggggcaggccccaagatgatgggcctgggcctcatggccaaagacaagactctgcggaagaaagataaggaggggcctgagtgtccccccacagtagtggtgaaggaggagttaggtggggatgtgaaggtggagtcaacatcgcctaagaccttcctggagagcaaggaggagctgagtcacagcccagaaccctgcaccaagatgaccatgaggctacggaggaaccacagcaatgcccagtttattgagtcatatgtctgccggatgtgttctcgaggggatgaggatgacaagctcctgctgtgtgatggctgtgatgacaactaccacatcttctgcctgctgcctcctctgcctgagatccccaagggtgtctggcggtgcccaaagtgtgtcatggcggagtgtaagcggcccccagaagcctttggctttgagcaggctacccgggaatacactctgcagagctttggcgagatggccgactcctttaaagctgactacttcaacatgcccgtgcatatggtgcccacagaacttgtggagaaggagttctggaggctggtaaatagcattgaggaagatgtgactgttgagtatggagctgacatccattccaaagaatttggcagcggtttccctgtcagtgacagtaaacggcacctaacccccgaagaggaggagtatgctaccagtggttggaacctaaatgtgatgccggtgttggaacagtctgtactgtgccacatcaatgcagatatctctggcatgaaggtgccctggctctacgtgggcatggtcttctcagccttttgctggcatattgaggatcactggagttactccattaactacctccactggggtgagccgaagacctggtatggggtgccctcacttgcagcagaacatttggaagaagtgatgaagaagctgacacctgaactatttgatagccagcctgacctcctgcaccaacttgtcaccctcatgaatcccaacaccctcatgtcccatggtgtgccagttgtccgcacaaaccagtgtgcaggagagtttgtcatcaccttcccccgtgcttaccacagcggcttcaaccaaggctacaactttgccgaggctgtcaacttttgcactgctgactggttgcctgctgggcgccagtgcattgagcactaccgccggctccggagatactgcgtcttctcccatgaggagcttatctgcaagatggctgcctgcccagagaagctagacctgaacctggcggcagctgtgcataaggagatgttcatcatggtgcaagaagagcggcgtctacgaaaggccctgctggagaagggtatcacagaggctgagcgagaggctttcgagctgctcccagatgatgagcgccagtgtatcaagtgcaagactacgtgtttcctgtcagccctggcctgctacgactgcccagacggccttgtctgcctttcccacatcaatgatctctgcaagtgctccagtagccggcagtacctgcggtatcggtataccttggatgagcttcctgccatgctgcataagctgaaggttcgggctgagtcctttgacacctgggccaacaaagtgcgagtggccctggaggtggaggatgggcggaagcgcagccttgaagaactgagggcactagagtctgaagcccgtgagcggaggtttcctaatagtgagctgctgcagcaactaaagaactgcctgagtgaggcagaggcttgcgtgtcccgagctctgggactggtcagcggccaggaagctggcccccacagggtggctggtctacagatgaccctgactgagctccgggcctttctggaccagatgaacaacctgccttgcgccatgcaccagattggggatgtcaagggtgttctggaacaggtggaggcctaccaggctgaggctcgtgaggccctggcctcactgccctccagtccagggctactgcagtccctgttggagagggggcggcagctgggggtggaggtgcctgaggcccagcagctccagcggcaggtggaacaggcgcgatggctggatgaggtgaaacgcacactggccccctcagcccgaaggggcaccttggctgtcatgcgaggactgttggtcgcgggtgccagtgtagcccctagccctgctgtggataaagcccaggccgagctgcaggaactgctgaccattgctgaacgctgggaggagaaagcccacctctgcctggaggccaggcagaagcatccaccagccacacttgaggccataatccgtgaagcggaaaacatccctgttcacctgcccaacatccaggctctcaaggaggctcttgctaaggcccgggcctggattgctgatgttgatgagatccaaaatggtgaccactacccctgcctggatgacttggagggcctagtagctgtgggccgggacctacctgtggggctggaggagctgagacagctagagctacaggtactgacagcgcactcctggagggagaaggcctccaagaccttcctcaagaaaaattcttgctacacgctgctggaggttctctgcccatgtgcagatgccggctcagacagcaccaagcgcagccggtggatggagaaggagctggggttgtacaaatctgacacagagctgctggggctgtctgcgcaggacctcagggacccaggctctgtgatcgtggccttcaaggagggggaacagaaggagaaggagggtatcctgcagctgcgtcgcaccaattcggccaagcccagtccactggcatcatcgagcacggcctcctctacaacctctatctgtgtgtgtgggcaggtgctggctggggcgggagctctgcagtgtgacctgtgtcaggactggttccatgggcggtgtgtgtcagtgcctcgcctcctcagctctccgaggcccaatcccacctcatccccactgctggcctggtgggaatgggacaccaaattcctgtgtccactgtgtatgcgctcaaggcgcccgcgcctggagaccatcctggcactgctggtagccctgcagagactgcctgtgcggctgcccgagggcgaggccctgcagtgcctcacagagagggccatcagctggcaaggccgcgccaggcaggctctggcctctgaagatgtgactgctcttttgggacggctggctgagctccgccaacggctacaggctgaacctagacctgaggagcctcctaactaccctgcagcccctgcttctgaccccctcagagagggcagtggcaaggatatgcctaaggtccagggcttactggagaatggagacagtgtgaccagtcctgagaaggtagccccggaggagggctcaggtaagagagatctggagctgctgtcctcgctgttgccacagttgactggccctgtgttggaactgcctgaggcaacccgggcccccttggaggagctcatgatggagggggacctgctcgaggtgaccctggatgagaaccacagcatatggcagctgctgcaggctggacagcccccagacctggagaggatccgcacacttctggagctggagaaggcagagcgtcacgggagtcgggctcggggccgggccctggagaggcggcggcggcggaaggtggatcggggtggggagggcgatgacccagcccgagaggagctagagccaaagagggtacggagctcagggccagaggctgaggaggtccaggaggaggaagagctggaggaggagactgggggtgagggcccccctgcacccatccccaccactggcagccccagcacccaggagaaccagaatggcttggaaccggcggaagggaccacttcaggcccctcggcccctttctccactctgactccccggctgcatctgccctgcccacagcagccgcctcagcaacagttgtgacagtggctgagcctagcacagaccctgacagagacccccctcggcctcaaggatcctctttctgaccatcaagcctgcttcttggggggtgggcgggtaggggggtggccatccctgctacccgcccacccctgagtcccttgacttttgtattctgactccaaggtattgttcagacctcagctcctgggggccggcccctggagtcttccctccctggtagcctctaaccagcattcccagacacctgaggcagatagatggatgggctggtgggcaggggggtggctggggctgggccatcaccattccagagacaaggccagtgtatatgcaaactgggggactctcctcccttctctccccagttctggtcctggccaggccatgctacactaacccctgcccccactctcctcccctcttttccttccttcctacccccttctccctctcccttcccctgactgttccacccaggaggaggaaacttcacatagccgtgctcacagttttttattttaaaggaatttggctggggagctgaacagggctccctgtgatctgaagaaagcttttggtgcttgtcctcacaaccacctcagtcctccctccctgtcctcccctgtctcctttcctcctcctgggttcatgttgtaataaaagaagattgttggtgtgtaattaatttgttcaaaagaaaaaaaaaa

SEQ ID NO: 10723 - DNA, 5245 bp, Homo sapiens
  source 1..5245: mol_type = unassigned DNA
cttgttcctccgccgttgcaatgaactattttctctcagtccggggtggtacttttgagtaaccccttccaaatagaaacccataccagcctatttagctcggtctccactatatgaaggtttcctagggcttggtgtgacgcaacgtatacgaggctcggaaggacaccccgcggaaggatccggtttgttgtggtgtggggaggggagacgctgacaaaccaagatggcggcggcggcgctgaaggccgcggcgtttgggaggtaactgtggtggcgaaggctgcggtagtggggaggcaaccacacagtttggaagaaacggagcgggacgaagaggcggtagcagtagagtcagcctgagactctcagagcacgacggccacacgcccccttaggccctcggcgggcggcggctgccccgcttagggcctagcctccgagcattgcctcggcttcaaacagcggcggcgccatgagtccttaagggcggtccaagcctcccgatccctggcccagacctcgggcccaccatggagccggggtccgacgatttcctaccgccaccggagtgcccggtgttcgagcctagctgggccgagttccgagaccctcttggctacatcgcgaaaatcaggcccatcgcagagaaatcgggcatttgcaagatccgcccacccgcggactggcagccaccctttgctgtggaagtggacaacttcaggtttaccccccgaatccagaggctgaatgagctagaggcccagacgagagtgaaactgaactacttggaccagattgccaaattctgggaaatccagggctcctccttaaagattcccaatgtagaacggcggatcttggacctctacagtctcagcaaaattgtggtggaggaaggtggttatgaagctatctgcaaggaccgtcggtgggctcgggtagcccagcgcctcaactatccaccaggcaaaaatattggctccttgctacgctcccactacgaacgcattgtttatccctatgaaatgtaccagtctggagccaaccttgtgcagtgtaacacacgtccatttgataatgaggagaaggacaaggaatacaaaccccacagcatccccctacgacagtctgtgcagccttccaagttcaacagctatggccggcgggccaagagactgcagcctgatccggaacccacagaggaagacattgagaagaatccagagctgaaaaagctacagatctatggggcaggccccaagatgatgggcctgggcctcatggccaaagacaagactctgcggaagaaagataaggaggggcctgagtgtccccccacagtagtggtgaaggaggagttaggtggggatgtgaaggtggagtcaacatcgcctaagaccttcctggagagcaaggaggagctgagtcacagcccagaaccctgcaccaagatgaccatgaggctacggaggaaccacagcaatgcccagtttattgagtcatatgtctgccggatgtgttctcgaggggatgaggatgacaagctcctgctgtgtgatggctgtgatgacaactaccacatcttctgcctgctgcctcctctgcctgagatccccaagggtgtctggcggtgcccaaagtgtgtcatggcggagtgtaagcggcccccagaagcctttggctttgagcaggctacccgggaatacactctgcagagctttggcgagatggccgactcctttaaagctgactacttcaacatgcccgtgcatatggtgcccacagaacttgtggagaaggagttctggaggctggtaaatagcattgaggaagatgtgactgttgagtatggagctgacatccattccaaagaatttggcagcggtttccctgtcagtgacagtaaacggcacctaacccccgaagaggaggagtatgctaccagtggttggaacctaaatgtgatgccggtgttggaacagtctgtactgtgccacatcaatgcagatatctctggcatgaaggtgccctggctctacgtgggcatggtcttctcagccttttgctggcatattgaggatcactggagttactccattaactacctccactggggtgagccgaagacctggtatggggtgccctcacttgcagcagaacatttggaagaagtgatgaagaagctgacacctgaactatttgatagccagcctgacctcctgcaccaacttgtcaccctcatgaatcccaacaccctcatgtcccatggtgtgccagttgtccgcacaaaccagtgtgcaggagagtttgtcatcaccttcccccgtgcttaccacagcggcttcaaccaaggctacaactttgccgaggctgtcaacttttgcactgctgactggttgcctgctgggcgccagtgcattgagcactaccgccggctccggagatactgcgtcttctcccatgaggagcttatctgcaagatggctgcctgcccagagaagctagacctgaacctggcggcagctgtgcataaggagatgttcatcatggtgcaagaagagcggcgtctacgaaaggccctgctggagaagggtatcacagaggctgagcgagaggctttcgagctgctcccagatgatgagcgccagtgtatcaagtgcaagactacgtgtttcctgtcagccctggcctgctacgactgcccagacggccttgtctgcctttcccacatcaatgatctctgcaagtgctccagtagccggcagtacctgcggtatcggtataccttggatgagcttcctgccatgctgcataagctgaaggttcgggctgagtcctttgacacctgggccaacaaagtgcgagtggccctggaggtggaggatgggcggaagcgcagccttgaagaactgagggcactagagtctgaagcccgtgagcggaggtttcctaatagtgagctgctgcagcaactaaagaactgcctgagtgaggcagaggcttgcgtgtcccgagctctgggactggtcagcggccaggaagctggcccccacagggtggctggtctacagatgaccctgactgagctccgggcctttctggaccagatgaacaacctgccttgcgccatgcaccagattggggatgtcaagggtgttctggaacaggtggaggcctaccaggctgaggctcgtgaggccctggcctcactgccctccagtccagggctactgcagtccctgttggagagggggcggcagctgggggtggaggtgcctgaggcccagcagctccagcggcaggtggaacaggcgcgatggctggatgaggtgaaacgcacactggccccctcagcccgaaggggcaccttggctgtcatgcgaggactgttggtcgcgggtgccagtgtagcccctagccctgctgtggataaagcccaggccgagctgcaggaactgctgaccattgctgaacgctgggaggagaaagcccacctctgcctggaggccaggcagaagcatccaccagccacacttgaggccataatccgtgaagcggaaaacatccctgttcacctgcccaacatccaggctctcaaggaggctcttgctaaggcccgggcctggattgctgatgttgatgagatccaaaatggtgaccactacccctgcctggatgacttggagggcctagtagctgtgggccgggacctacctgtggggctggaggagctgagacagctagagctacaggtactgacagcgcactcctggagggagaaggcctccaagaccttcctcaagaaaaattcttgctacacgctgctggaggttctctgcccatgtgcagatgccggctcagacagcaccaagcgcagccggtggatggagaaggagctggggttgtacaaatctgacacagagctgctggggctgtctgcgcaggacctcagggacccaggctctgtgatcgtggccttcaaggagggggaacagaaggagaaggagggtatcctgcagctgcgtcgcaccaattcggccaagcccagtccactggcatcatcgagcacggcctcctctacaacctctatctgtgtgtgtgggcaggtgctggctggggcgggagctctgcagtgtgacctgtgtcaggactggttccatgggcggtgtgtgtcagtgcctcgcctcctcagctctccgaggcccaatcccacctcatccccactgctggcctggtgggaatgggacaccaaattcctgtgtccactgtgtatgcgctcaaggcgcccgcgcctggagaccatcctggcactgctggtagccctgcagagactgcctgtgcggctgcccgagggcgaggccctgcagtgcctcacagagagggccatcagctggcaaggccgcgccaggcaggctctggcctctgaagatgtgactgctcttttgggacggctggctgagctccgccaacggctacaggctgaacctagacctgaggagcctcctaactaccctgcagcccctgcttctgaccccctcagagagggcagtggcaaggatatgcctaaggtccagggcttactggagaatggagacagtgtgaccagtcctgagaaggtagccccggaggagggctcagatctggagctgctgtcctcgctgttgccacagttgactggccctgtgttggaactgcctgaggcaacccgggcccccttggaggagctcatgatggagggggacctgctcgaggtgaccctggatgagaaccacagcatatggcagctgctgcaggctggacagcccccagacctggagaggatccgcacacttctggagctggagaaggcagagcgtcacgggagtcgggctcggggccgggccctggagaggcggcggcggcggaaggtggatcggggtggggagggcgatgacccagcccgagaggagctagagccaaagagggtacggagctcagggccagaggctgaggaggtccaggaggaggaagagctggaggaggagactgggggtgagggcccccctgcacccatccccaccactggcagccccagcacccaggagaaccagaatggcttggaaccggcggaagggaccacttcaggcccctcggcccctttctccactctgactccccggctgcatctgccctgcccacagcagccgcctcagcaacagttgtgacagtggctgagcctagcacagaccctgacagagacccc

SEQ ID NO: 10724 - DNA, 5122 bp, Homo sapiens
  source 1..5122: mol_type = unassigned DNA
cttgttcctccgccgttgcaatgaactattttctctcagtccggggtggtacttttgagtaaccccttccaaatagaaacccataccagcctatttagctcggtctccactatatgaaggtttcctagggcttggtgtgacgcaacgtatacgaggctcggaaggacaccccgcggaaggatccggtttgttgtggtgtggggaggggagacgctgacaaaccaagatggcggcggcggcgctgaaggccgcggcgtttgggaggtaactgtggtggcgaaggctgcggtagtggggaggcaaccacacagtttggaagaaacggagcgggacgaagaggcggtagcagtagagtcagcctgagactctcagagcacgacggccacacgcccccttaggccctcggcgggcggcggctgccccgcttagggcctagcctccgagcattgcctcggcttcaaacagcggcggcgccatgagtccttaagggcggtccaagcctcccgatccctggcccagacctcgggcccaccatggagccggggtccgacgatttcctaccgccaccggagtgcccggtgttcgagcctagctgggccgagttccgagaccctcttggctacatcgcgaaaatcaggcccatcgcagagaaatcgggcatttgcaagatccgcccacccgcggactggcagccaccctttgctgtggaagtggacaacttcaggtttaccccccgaatccagaggctgaatgagctagagattgtggtggaggaaggtggttatgaagctatctgcaaggaccgtcggtgggctcgggtagcccagcgcctcaactatccaccaggcaaaaatattggctccttgctacgctcccactacgaacgcattgtttatccctatgaaatgtaccagtctggagccaaccttgtgcagtgtaacacacgtccatttgataatgaggagaaggacaaggaatacaaaccccacagcatccccctacgacagtctgtgcagccttccaagttcaacagctatggccggcgggccaagagactgcagcctgatccggaacccacagaggaagacattgagaagaatccagagctgaaaaagctacagatctatggggcaggccccaagatgatgggcctgggcctcatggccaaagacaagactctgcggaagaaagataaggaggggcctgagtgtccccccacagtagtggtgaaggaggagttaggtggggatgtgaaggtggagtcaacatcgcctaagaccttcctggagagcaaggaggagctgagtcacagcccagaaccctgcaccaagatgaccatgaggctacggaggaaccacagcaatgcccagtttattgagtcatatgtctgccggatgtgttctcgaggggatgaggatgacaagctcctgctgtgtgatggctgtgatgacaactaccacatcttctgcctgctgcctcctctgcctgagatccccaagggtgtctggcggtgcccaaagtgtgtcatggcggagtgtaagcggcccccagaagcctttggctttgagcaggctacccgggaatacactctgcagagctttggcgagatggccgactcctttaaagctgactacttcaacatgcccgtgcatatggtgcccacagaacttgtggagaaggagttctggaggctggtaaatagcattgaggaagatgtgactgttgagtatggagctgacatccattccaaagaatttggcagcggtttccctgtcagtgacagtaaacggcacctaacccccgaagaggaggagtatgctaccagtggttggaacctaaatgtgatgccggtgttggaacagtctgtactgtgccacatcaatgcagatatctctggcatgaaggtgccctggctctacgtgggcatggtcttctcagccttttgctggcatattgaggatcactggagttactccattaactacctccactggggtgagccgaagacctggtatggggtgccctcacttgcagcagaacatttggaagaagtgatgaagaagctgacacctgaactatttgatagccagcctgacctcctgcaccaacttgtcaccctcatgaatcccaacaccctcatgtcccatggtgtgccagttgtccgcacaaaccagtgtgcaggagagtttgtcatcaccttcccccgtgcttaccacagcggcttcaaccaaggctacaactttgccgaggctgtcaacttttgcactgctgactggttgcctgctgggcgccagtgcattgagcactaccgccggctccggagatactgcgtcttctcccatgaggagcttatctgcaagatggctgcctgcccagagaagctagacctgaacctggcggcagctgtgcataaggagatgttcatcatggtgcaagaagagcggcgtctacgaaaggccctgctggagaagggtatcacagaggctgagcgagaggctttcgagctgctcccagatgatgagcgccagtgtatcaagtgcaagactacgtgtttcctgtcagccctggcctgctacgactgcccagacggccttgtctgcctttcccacatcaatgatctctgcaagtgctccagtagccggcagtacctgcggtatcggtataccttggatgagcttcctgccatgctgcataagctgaaggttcgggctgagtcctttgacacctgggccaacaaagtgcgagtggccctggaggtggaggatgggcggaagcgcagccttgaagaactgagggcactagagtctgaagcccgtgagcggaggtttcctaatagtgagctgctgcagcaactaaagaactgcctgagtgaggcagaggcttgcgtgtcccgagctctgggactggtcagcggccaggaagctggcccccacagggtggctggtctacagatgaccctgactgagctccgggcctttctggaccagatgaacaacctgccttgcgccatgcaccagattggggatgtcaagggtgttctggaacaggtggaggcctaccaggctgaggctcgtgaggccctggcctcactgccctccagtccagggctactgcagtccctgttggagagggggcggcagctgggggtggaggtgcctgaggcccagcagctccagcggcaggtggaacaggcgcgatggctggatgaggtgaaacgcacactggccccctcagcccgaaggggcaccttggctgtcatgcgaggactgttggtcgcgggtgccagtgtagcccctagccctgctgtggataaagcccaggccgagctgcaggaactgctgaccattgctgaacgctgggaggagaaagcccacctctgcctggaggccaggcagaagcatccaccagccacacttgaggccataatccgtgaagcggaaaacatccctgttcacctgcccaacatccaggctctcaaggaggctcttgctaaggcccgggcctggattgctgatgttgatgagatccaaaatggtgaccactacccctgcctggatgacttggagggcctagtagctgtgggccgggacctacctgtggggctggaggagctgagacagctagagctacaggtactgacagcgcactcctggagggagaaggcctccaagaccttcctcaagaaaaattcttgctacacgctgctggaggttctctgcccatgtgcagatgccggctcagacagcaccaagcgcagccggtggatggagaaggagctggggttgtacaaatctgacacagagctgctggggctgtctgcgcaggacctcagggacccaggctctgtgatcgtggccttcaaggagggggaacagaaggagaaggagggtatcctgcagctgcgtcgcaccaattcggccaagcccagtccactggcatcatcgagcacggcctcctctacaacctctatctgtgtgtgtgggcaggtgctggctggggcgggagctctgcagtgtgacctgtgtcaggactggttccatgggcggtgtgtgtcagtgcctcgcctcctcagctctccgaggcccaatcccacctcatccccactgctggcctggtgggaatgggacaccaaattcctgtgtccactgtgtatgcgctcaaggcgcccgcgcctggagaccatcctggcactgctggtagccctgcagagactgcctgtgcggctgcccgagggcgaggccctgcagtgcctcacagagagggccatcagctggcaaggccgcgccaggcaggctctggcctctgaagatgtgactgctcttttgggacggctggctgagctccgccaacggctacaggctgaacctagacctgaggagcctcctaactaccctgcagcccctgcttctgaccccctcagagagggcagtggcaaggatatgcctaaggtccagggcttactggagaatggagacagtgtgaccagtcctgagaaggtagccccggaggagggctcagatctggagctgctgtcctcgctgttgccacagttgactggccctgtgttggaactgcctgaggcaacccgggcccccttggaggagctcatgatggagggggacctgctcgaggtgaccctggatgagaaccacagcatatggcagctgctgcaggctggacagcccccagacctggagaggatccgcacacttctggagctggagaaggcagagcgtcacgggagtcgggctcggggccgggccctggagaggcggcggcggcggaaggtggatcggggtggggagggcgatgacccagcccgagaggagctagagccaaagagggtacggagctcagggccagaggctgaggaggtccaggaggaggaagagctggaggaggagactgggggtgagggcccccctgcacccatccccaccactggcagccccagcacccaggagaaccagaatggcttggaaccggcggaagggaccacttcaggcccctcggcccctttctccactctgactccccggctgcatctgccctgcccacagcagccgcctcagcaacagttgtgacagtggctgagcctagcacagaccctgacagagacccc

SEQ ID NO: 10725 - DNA, 297 bp, Homo sapiens
  source 1..297: mol_type = unassigned DNA
caactaaagaactgcctgagtgaggcagaggcttgcgtgtcccgagctctgggactggtcagcggccaggaagctggcccccacagggtggctggtctacagatgaccctgactgagctccgggcctttctggaccagatgaacaacctgccttgcgccatgcaccagattggggatgtcaaggtgaggacgcttggagtgctgatgagggatcaaggggaccaggggacctgagcagcaggccatgcttggctcctttcaaaagcttaaagtgttcaggcaagacaggacacacgt

SEQ ID NO: 10726 - DNA, 1403 bp, Homo sapiens
  source 1..1403: mol_type = unassigned DNA
cagatggtgcccacagaacttgtggagaaggagttctggaggctggtaaatagcattgaggaagatgtgactgttgagtatggagctgacatccattccaaagaatttggcagcggtttccctgtcagtgacagtaaacggcacctaacccccgaagaggaggagtatgctaccagtggttggaacctaaatgtgatgccggtgttggaacagtctgtactgtgccacatcaatgcagatatctctggcatgaaggtgccctggctctacgtgggcatggtcttctcagccttttgctggcatattgaggatcactggagttactccattaactacctccactggggtgagccgaagacctggtatggggtgccctcacttgcagcagaacatttggaagaagtgatgaagaagctgacacctgaactatttgatagccagcctgacctcctgcaccaacttgtcaccctcatgaatcccaacaccctcatgtcccatggtgtgccagttgtccgcacaaaccagtgtgcaggagagtttgtcatcaccttcccccgtgcttaccacagcggcttcaaccaaggctacaactttgccgaggctgtcaacttttgcactgctgactggttgcctgctgggcgccagtgcattgagcactaccgccggctccggagatactgcgtcttctcccatgaggagcttatctgcaagatggctgcctgcccagagaagctagacctgaacctggcggcagctgtgcataaggagatgttcatcatggtgcaagaagagcggcgtctacgaaaggccctgctggagaagggtatcacagaggctgagcgagaggctttcgagctgctcccagatgatgagcgccagtgtatcaagtgcaagactacgtgtttcctgtcagccctggcctgctacgactgcccagacggccttgtctgcctttcccacatcaatgatctctgcaagtgctccagtagccggcagtacctgcggtatcggtataccttggatgagcttcctgccatgctgcataagctgaaggttcgggctgagtcctttgacacctgggccaacaaagtgcgagtggccctggaggtggaggatgggcggaagcgcagtgagtgatgggggggatggagggactccacaggcaagttctattccctttcttctgtactctgacccccttcctctgcctctattcaatactgcctactctttgctgccctcatttttcttccaggccttgaagaactgagggcactagagtctgaagcccgtgagcggaggtttcctaatagtgagctgctgcagcaactaaagaactgcctgagtgaggcagaggcttgcgtgtcccgagctctgggactggtcagcggccaggaagctgg

SEQ ID NO: 10727 - DNA, 720 bp, Homo sapiens
  source 1..720: mol_type = unassigned DNA
cctcacttgcagcagaacatttggaagaagtgatgaagaagctgacacctgaactatttgatagccagcctgacctcctgcaccaacttgtcaccctcatgaatcccaacaccctcatgtcccatggtgtgccagttgtccgcacaaaccagtgtgcaggagagtttgtcatcaccttcccccgtgcttaccacagcggcttcaaccaaggctacaactttgccgaggctgtcaacttttgcactgctgactggttgcctgctgggcgccagtgcattgagcactaccgccggctccggagatactgcgtcttctcccatgaggagcttatctgcaagatggctgcctgcccagagaagctagacctgaacctggcggcagctgtgcataaggagatgttcatcatggtgcaagaagagcggcgtctacgaaaggccctgctggagaaggtggggagagtaccccagatcaagcaccctattctggtggaagttcggggaggcagaggcagcaccaagaagatgtagcctctactcttggcgtatagtgaaaagaactagatgcatctcgattgaaaaccacataccattctctgctataccctttaccagcaaccttaagtcgatttacttcattgtcagttttcccctctgaaaaatgggattatgataatgcttatctttttggatagttgattgtattaaagataatgtttgctta

SEQ ID NO: 10728 - DNA, 1361 bp, Homo sapiens
  source 1..1361: mol_type = unassigned DNA
atagagactttctttaaaaaaagaaaagtaggttcttcacaccatttctcaggaaactgttggaggatgttcttaagcatagcaaaggaataaaccaagaaagaggaagacgtgggatctaggaaataggagatctgtcacaagagagtgatgatccagggaggacagctggtccagattgggacagatcagaaggttgcatgagactgctacagaaagatgaaaattgataggaaaagagatttaaatattggtcagaaaattagggatatatgcataaaaaactgagcaaattgagaaacaggaggctgtttttaacatagtctagaagcatgttatttaaggtagttataatcaacgccaaaataatcagaagaggtggaagtgattggctgtggggaagggagaatggcaaggctggctgattttataacagatctttatagagccatttgactctacaaactgcatatataactgatgaaagtaaataactaaaaaagcttgtccagcttgattaaaagtgatatttataatttttgcaaaaattactaaggaagttggaatattttgacagatatattttttaatctcaaatcttcctatcatctcaacacacatcaaaaccttgagagcagagaccagtggtccttcctttcagagttggagagtctgggattctgttgtcagactgtgttccctgaggcttttctttgtctccttaattaccttgcacttaagtcaggtctgtatacaggaaaatctctatctcaacagccatggccttttgtgttcttcaggttgtccgcacaaaccagtgtgcaggagagtttgtcatcaccttcccccgtgcttaccacagcggcttcaaccaaggctacaactttgccgaggctgtcaacttttgcactgctgactggttgcctgctgggcgccagtgcattgagcactaccgccggctccggagatactgcgtcttctcccatgaggagcttatctgcaagatggctgcctgcccagagaagctagacctgaacctggcggcagctgtgcataaggagatgttcatcatggtgcaagaagagcggcgtctacgaaaggccctgctggagaaggtggggagagtaccccagatcaagcaccctattctggtggaagttcggggaggcagaggcagcaccaagaagatgtagcctctactcttggcgtatagtgaaaagaactagatgcatctcgattgaaaaccacataccattctctgctataccctttaccagcaaccttaagtcgatttacttcattgtcagttttcccctctgaaaaatgggattatgataatgcttatctttttggatagttga

SEQ ID NO: 10729 - DNA, 394 bp, Homo sapiens
  source 1..394: mol_type = unassigned DNA
gcctgatccggaacccacagaggaagacattgagaagaatccagagctgaaaaagctacagatctatggggcaggccccaagatgatgggcctgggcctcatggccaaagacaagactctgcggaagaaagataaggaggggcctgagtgtccccccacagtagtggtgaaggaggagttaggtggggatgtgaaggtggagtcaacatcgcctaagaccttcctggagagcaaggaggagctgagtcacagcccagaaccctgcaccaagatgaccatgaggctacggaggaaccacagcaatgcccagtttgtaaggacccagccctgacttcttaatgctctgcttcttgtcccttcaataagcattcccctgcatggcactggaccagtt

SEQ ID NO: 10730 - DNA, 870 bp, Homo sapiens
  source 1..870: mol_type = unassigned DNA
tgacaaaccaagatggcggcggcggcgctgaaggccgcggcgtttgggaggtaactgtggtggcgaaggctgcggtagtggggaggcaaccacacagtttggaagaaacggagcgggacgaagaggcggtagcagtagagtcagcctgagactctcagagcacgacggccacacgcccccttaggccctcggcgggcggcggctgccccgcttagggcctagcctccgagcattgcctcggcttcaaacagcggcggcgccatgagtccttaagggcggtccaagcctcccgatccctggcccagacctcgggcccaccatggagccggggtccgacgatttcctaccgccaccggagtgcccggtgttcgagcctagctgggccgagttccgagaccctcttggctacatcgcgaaaatcaggcccatcgcagagaaatcgggcatttgcaagatccgcccacccgcggcaggtgtatgagagaggatctacaggaagccttccagactgggactggcagccaccctttgctgtggaagtggacaacttcaggtttaccccccgaatccagaggctgaatgagctagaggcccagacgagagtgaaactgaactacttggaccagattgccaaattctgggaaatccagggctcctccttaaagattcccaatgtagaacggcggatcttggacctctacagtctcagcaaaattgtggtggaggaaggtggttatgaagctatctgcaaggaccgtcggtgggctcgggtagcccagcgcctcaactatccaccaggcaaaaatattggctccttgctacgctcccactacgaacgcattgtttatccctatgaaatgtaccagtctg

SEQ ID NO: 10731 - DNA, 600 bp, Homo sapiens
  source 1..600: mol_type = unassigned DNA
cgggcgtggtggcgtgcgcctatagttccagctactcaggaggctgaggcaggaggatcacttgagcccaggaggtcaagtctacagtcagccgtgattgcaccactccattccagcttgggcgacagagcaagaccgtctcaaaaaaacaaaaacgaaagaaatgagagtgaggtggggctaagcactgcctagagtctgggatccggttcattgggagaaaccctgggtagtgaaagtgtggagtgctgtattcctctgttctcccctaagactggacccaaagatagtggtcagtgggagggggtggccagcctctttgagccatttcttcttcaggcccagacgagagtgaaactgaactacttggaccagattgccaaattctgggaaatccagggctcctccttaaagattcccaatgtagaacggcggatcttggacctctacagtctcagcaaaattgtggtggaggaaggtggttatgaagctatctgcaaggaccgtcggtgggctcgggtagcccagcgcctcaactatccaccaggcaaaaatattggctccttgctacgctcccactacgaacgcattgtttatccc

SEQ ID NO: 10732 - DNA, 446 bp, Homo sapiens
  source 1..446: mol_type = unassigned DNA
atcctcccattctttgccaccacagtcaggcatcccagcacttacccccaccccctggggcttcctcccctgcctcttcctgtaccaggcaggtgtatgagagaggatctacaggaagccttccagactgggactggcagccaccctttgctgtggaagtggacaacttcaggtttaccccccgaatccagaggctgaatgagctagaggcccagacgagagtgaaactgaactacttggaccagattgccaaattctgggaaatccagggctcctccttaaagattcccaatgtagaacggcggatcttggacctctacagtctcagcaaaattgtggtggaggaaggtggttatgaagctatctgcaaggaccgtcggtgggctcgggtagcccagcgcctcaactatccaccaggcaaaaatattggctccttgctacgctcc

SEQ ID NO: 10733 - DNA, 766 bp, Homo sapiens
  source 1..766: mol_type = unassigned DNA
ggcggcggcggcgctgaaggccgcggcgtttgggaggtaactgtggtggcgaaggctgcggtagtggggaggcaaccacacagtttggaagaaacggagcgggacgaagaggcggtagcagtagagtcagcctgagactctcagagcacgacggccacacgcccccttaggccctcggcgggcggcggctgccccgcttagggcctagcctccgagcattgcctcggcttcaaacagcggcggcgccatgagtccttaagggcggtccaagcctcccgatccctggcccagacctcgggcccaccatggagccggggtccgacgatttcctaccgccaccggagtgcccggtgttcgagcctagctgggccgagttccgagaccctcttggctacatcgcgaaaatcaggcccatcgcagagaaatcgggcatttgcaagatccgcccacccgcggactggcagccaccctttgctgtggaagtggacaacttcaggtttaccccccgaatccagaggctgaatgagctagagttccagctactcaggaggctgaggcaggaggatcacttgagcccaggaggtcaagtctacagtcagccgtgattgcaccactccattccagcttgggcgacagagcaagaccgtctcaaaaaaacaaaaacgaaagaaatgagagtgaggcccagacgagagtgaaactgaactacttggaccagattgccaaattctgggaaatccagggctcctccttaaagattcccaat

SEQ ID NO: 10734 - DNA, 548 bp, Homo sapiens
  source 1..548: mol_type = unassigned DNA
agatggcggcggcggcgctgaaggccgcggcgtttgggaggtaactgtggtggcgaaggctgcggtagtggggaggcaaccacacagtttggaagaaacggagcgggacgaagaggcggtagcagtagagtcagcctgagactctcagagcacgacggccacacgcccccttaggccctcggcgggcggcggctgccccgcttagggcctagcctccgagcattgcctcggcttcaaacagcggcggcgccatgagtccttaagggcggtccaagcctcccgatccctggcccagacctcgggcccaccatggagccggggtccgacgatttcctaccgccaccggagtgcccggtgttcgagcctagctgggccgagttccgagaccctcttggctacatcgcgaaaatcaggcccatcgcagagaaatcgggcatttgcaagatccgcccacccgcgtcaggcatcccagcacttacccccaccccctggggcttcctcccctgcctcttcctgtaccaggcaggtgtatgagagaggatctacag

SEQ ID NO: 10735 - DNA, 6096 bp, Homo sapiens
  source 1..6096: mol_type = unassigned DNA
cttgttcctccgccgttgcaatgaactattttctctcagtccggggtggtacttttgagtaaccccttccaaatagaaacccataccagcctatttagctcggtctccactatatgaaggtttcctagggcttggtgtgacgcaacgtatacgaggctcggaaggacaccccgcggaaggatccggtttgttgtggtgtggggaggggagacgctgacaaaccaagatggcggcggcggcgctgaaggccgcggcgtttgggaggtaactgtggtggcgaaggctgcggtagtggggaggcaaccacacagtttggaagaaacggagcgggacgaagaggcggtagcagtagagtcagcctgagactctcagagcacgacggccacacgcccccttaggccctcggcgggcggcggctgccccgcttagggcctagcctccgagcattgcctcggcttcaaacagcggcggcgccatgagtccttaagggcggtccaagcctcccgatccctggcccagacctcgggcccaccatggagccggggtccgacgatttcctaccgccaccggagtgcccggtgttcgagcctagctgggccgagttccgagaccctcttggctacatcgcgaaaatcaggcccatcgcagagaaatcgggcatttgcaagatccgcccacccgcgattgtggtggaggaaggtggttatgaagctatctgcaaggaccgtcggtgggctcgggtagcccagcgcctcaactatccaccaggcaaaaatattggctccttgctacgctcccactacgaacgcattgtttatccctatgaaatgtaccagtctggagccaaccttgtgcagtgtaacacacgtccatttgataatgaggagaaggacaaggaatacaaaccccacagcatccccctacgacagtctgtgcagccttccaagttcaacagctatggccggcgggccaagagactgcagcctgatccggaacccacagaggaagacattgagaagaatccagagctgaaaaagctacagatctatggggcaggccccaagatgatgggcctgggcctcatggccaaagacaagactctgcggaagaaagataaggaggggcctgagtgtccccccacagtagtggtgaaggaggagttaggtggggatgtgaaggtggagtcaacatcgcctaagaccttcctggagagcaaggaggagctgagtcacagcccagaaccctgcaccaagatgaccatgaggctacggaggaaccacagcaatgcccagtttattgagtcatatgtctgccggatgtgttctcgaggggatgaggatgacaagctcctgctgtgtgatggctgtgatgacaactaccacatcttctgcctgctgcctcctctgcctgagatccccaagggtgtctggcggtgcccaaagtgtgtcatggcggagtgtaagcggcccccagaagcctttggctttgagcaggctacccgggaatacactctgcagagctttggcgagatggccgactcctttaaagctgactacttcaacatgcccgtgcatatggtgcccacagaacttgtggagaaggagttctggaggctggtaaatagcattgaggaagatgtgactgttgagtatggagctgacatccattccaaagaatttggcagcggtttccctgtcagtgacagtaaacggcacctaacccccgaagaggaggagtatgctaccagtggttggaacctaaatgtgatgccggtgttggaacagtctgtactgtgccacatcaatgcagatatctctggcatgaaggtgccctggctctacgtgggcatggtcttctcagccttttgctggcatattgaggatcactggagttactccattaactacctccactggggtgagccgaagacctggtatggggtgccctcacttgcagcagaacatttggaagaagtgatgaagaagctgacacctgaactatttgatagccagcctgacctcctgcaccaacttgtcaccctcatgaatcccaacaccctcatgtcccatggtgtgccagttgtccgcacaaaccagtgtgcaggagagtttgtcatcaccttcccccgtgcttaccacagcggcttcaaccaaggctacaactttgccgaggctgtcaacttttgcactgctgactggttgcctgctgggcgccagtgcattgagcactaccgccggctccggagatactgcgtcttctcccatgaggagcttatctgcaagatggctgcctgcccagagaagctagacctgaacctggcggcagctgtgcataaggagatgttcatcatggtgcaagaagagcggcgtctacgaaaggccctgctggagaagggtatcacagaggctgagcgagaggctttcgagctgctcccagatgatgagcgccagtgtatcaagtgcaagactacgtgtttcctgtcagccctggcctgctacgactgcccagacggccttgtctgcctttcccacatcaatgatctctgcaagtgctccagtagccggcagtacctgcggtatcggtataccttggatgagcttcctgccatgctgcataagctgaaggttcgggctgagtcctttgacacctgggccaacaaagtgcgagtggccctggaggtggaggatgggcggaagcgcagccttgaagaactgagggcactagagtctgaagcccgtgagcggaggtttcctaatagtgagctgctgcagcaactaaagaactgcctgagtgaggcagaggcttgcgtgtcccgagctctgggactggtcagcggccaggaagctggcccccacagggtggctggtctacagatgaccctgactgagctccgggcctttctggaccagatgaacaacctgccttgcgccatgcaccagattggggatgtcaagggtgttctggaacaggtggaggcctaccaggctgaggctcgtgaggccctggcctcactgccctccagtccagggctactgcagtccctgttggagagggggcggcagctgggggtggaggtgcctgaggcccagcagctccagcggcaggtggaacaggcgcgatggctggatgaggtgaaacgcacactggccccctcagcccgaaggggcaccttggctgtcatgcgaggactgttggtcgcgggtgccagtgtagcccctagccctgctgtggataaagcccaggccgagctgcaggaactgctgaccattgctgaacgctgggaggagaaagcccacctctgcctggaggccaggcagaagcatccaccagccacacttgaggccataatccgtgaagcggaaaacatccctgttcacctgcccaacatccaggctctcaaggaggctcttgctaaggcccgggcctggattgctgatgttgatgagatccaaaatggtgaccactacccctgcctggatgacttggagggcctagtagctgtgggccgggacctacctgtggggctggaggagctgagacagctagagctacaggtactgacagcgcactcctggagggagaaggcctccaagaccttcctcaagaaaaattcttgctacacgctgctggaggttctctgcccatgtgcagatgccggctcagacagcaccaagcgcagccggtggatggagaaggagctggggttgtacaaatctgacacagagctgctggggctgtctgcgcaggacctcagggacccaggctctgtgatcgtggccttcaaggagggggaacagaaggagaaggagggtatcctgcagctgcgtcgcaccaattcggccaagcccagtccactggcatcatcgagcacggcctcctctacaacctctatctgtgtgtgtgggcaggtgctggctggggcgggagctctgcagtgtgacctgtgtcaggactggttccatgggcggtgtgtgtcagtgcctcgcctcctcagctctccgaggcccaatcccacctcatccccactgctggcctggtgggaatgggacaccaaattcctgtgtccactgtgtatgcgctcaaggcgcccgcgcctggagaccatcctggcactgctggtagccctgcagagactgcctgtgcggctgcccgagggcgaggccctgcagtgcctcacagagagggccatcagctggcaaggccgcgccaggcaggctctggcctctgaagatgtgactgctcttttgggacggctggctgagctccgccaacggctacaggctgaacctagacctgaggagcctcctaactaccctgcagcccctgcttctgaccccctcagagagggcagtggcaaggatatgcctaaggtccagggcttactggagaatggagacagtgtgaccagtcctgagaaggtagccccggaggagggctcagatctggagctgctgtcctcgctgttgccacagttgactggccctgtgttggaactgcctgaggcaacccgggcccccttggaggagctcatgatggagggggacctgctcgaggtgaccctggatgagaaccacagcatccctgagtcccttgacttttgtattctgactccaaggtattgttcagacctcagctcctgggggccggcccctggagtcttccctccctggtagcctctaaccagcattcccagacacctgaggcagatagatggatgggctggtgggcaggggggtggctggggctgggccatcaccattccagagacaaggccagtgtatatgcaaactgggggactctcctcccttctctccccagttctggtcctggccaggccatgctacactaacccctgcccccactctcctcccctcttttccttccttcctacccccttctccctctcccttcccctgactgttccacccaggaggaggaaacttcacatagccgtgctcacagttttttattttaaaggaatttggctggggagctgaacagggctccctgtgatctgaagaaagcttttggtgcttgtcctcacaaccacctcagtcctccctccctgtcctcccctgtctcctttcctcctcctgggttcatgttgtaataaaagaagattgttggtgtgtaattaatttgttcaaaagaaaaaaaaaagcaaaacaagaaacttggttccaactgaagcctattttaattttattttattattttcctcttgttagaaataaaacccttagaaacattttttggaaacatgtttctgaagtgcatttctcttagacggggaagacagtgcttccatcaccagtcagtggagcagctgtagtgctggcaggagcactagggctgaagccagggagctctgggttctgaaatcaagttccaccagcttcttaaccttgggcaagacattctgatcctcccccgactctaaccccaagccactttccctcaagtccaaacagatgggctcgggccccctcacccaaactcctacactacaacctcccccagttgatgccctccagtttatcctcctcaagctcccaaagggatttttttgttaatggctttattgagatataatttacatactataaaattcacttgtttgaaatgtacaattcagtgatttggggggtttctaaagtgtagatctgattatatactgcttaaaaccttccatgatgctttattgcccttaagattatacatagaatctcgttcttcctagaatgttttcctgtctaacccatctactgcataattccctgatttttctccacaggttatgcccctgatgaatggggactaaagctcagatgtgtggtcatttgcaacccctgagttcacttttttaagacagcttattgatatatataatgtacataccatacagtcacccacttaaaagtatacaattaaatagcttttagtatattcagagttgtgcagccatcattcgaaaaaaaatttcagaacattttcatcactgcagaaagaaactccatatcccttaggcgtcctttacccctcatcccatttgcctattctggacattttacataaatggaatcgtataatatgtga

SEQ ID NO: 10736 - DNA, 5501 bp, Homo sapiens
  source 1..5501: mol_type = unassigned DNA
tgcaggggagtttgtcatcacttttcctcgtgcttaccacagtggttttaaccaaggctacaattttgctgaagctgtcaacttttgtactgctgactggctacctgctggacgccagtgcattgaacactaccgccggctccggcgctattgtgtcttctcccacgaggagctcatctgcaagatggctgccttcccagagacgttggatctcaatctagcagtagctgtgcacaaggagatgttcattatggttcaggaggagcgacgtctacgaaaggcccttttggagaagggcgtcacggaggctgagcgagaggcttttgagctgctcccagatgatgaacgccagtgcatcaagtgcaagaccacgtgcttcttgtcagccctggcctgctacgactgcccagatggccttgtatgcctttcccacatcaatgacctctgcaagtgctctagtagccgacagtacctccggtatcggtacaccttggatgagctccccaccatgctgcataaactgaagattcgggctgagtcttttgacacctgggccaacaaagtgcgagtggccttggaggtggaggatggccgtaaacgcagtgagtgacaggaaatggaaggaacccttgtgatggacactccacagctgaccttgactgaactccgggtccttcttgagcagatgggcagcctgccctgtgccatgcatcagattggggatgtcaaggttctttcctggaagtggcggagatatgtgttcccataccatctctgtgtgtacagcatgcaaggaaatatccttccagactgaaataattaaaaactctaaactgggcctacataagacactggctcttgggaatggggtggagaggactgattggttggttggttgatttccctccagacaccagagtcttagaaagcttactagatggataagattgtattaaagtgggtttggaaaaagaaatttaggtaattaaaggagaaaaatgtcattctaggtaaacagagggcctttgttattatcagatagatcatgttttaggatgtggttgagaataagtattaagcaataggaaatgcctataagagaagatgagaagtggagcaaatctaggtggttgagtatttatgtggctaaagaatctgcattttatcctatgtccttgcaggatgtcctggaacaggtggaggcctatcaagctgaggctcgtgaggctctggccacactgccctctagtccagggctattgcggtccctgttggagagggggcagcagctgggtgtagaggtgcctgaagcccatcagcttcagcagcaggtggagcaggcgcaatggctagatgaagtgaagcaggccctggccccttctgctcacaggggctctctggtcatcatgcaggggcttttggttatgggtgccaagatagcctccagcccttctgtggacaaggcccgggctgagctgcaagaactactgaccattgcagagcgctgggaagaaaaggctcatttctgcctggaggccaggcagaagcatccaccagccacattggaagccataattcgtgagacagaaaacatccctgttcacctgcctaacatccaggctctcaaagaagctctgactaaggcacaagcttggattgctgatgtggatgagatccaaaatggtgaccactacccctgtctagatgacttggagggcctggtggctgtgggccgggacctgcctgtggggctggaagagctgagacagctagagctgcaggtattgacagcacattcctggagagagaaggcctccaagacctttctcaagaagaattcttgctacacactgcttgaggtgctttgcccgtgtgcagacgctggctcagacagcaccaagcgtagccggtggatggagaaggcgctggggttgtaccagtgtgacacagagctgctggggctgtctgcacaggacctcagagacccaggctctgtgattgtggccttcaaggaaggggaacagaaggagaaggagggtatcctgcagctgcgtcgcaccaactcagccaagcccagtccactggcaccatccctcatggcctcttctccgacttctatctgtgtgtgtgggcaggtgccagctggggtgggagttctgcagtgtgacctgtgtcaggactggttccatgggcagtgtgtgtcagtgccccatctcctcacctctccaaagcccagtctcacttcatctccactgctagcctggtgggaatgggacacaaaattcctgtgtccactgtgtatgcgctcacgacggccacgcctagagacaatcctagccttgctggttgccctgcagaggctgcccgtgcggctgcctgagggtgaggcccttcagtgtctcacagagagggccattggctggcaagaccgtgccagaaaggctctggcctctgaagatgtgactgctctgttgcgacagctggctgagcttcgccaacagctacaggccaaacccagaccagaggaggcctcagtctacacttcagccactgcctgtgaccctatcagagaaggcagtggcaacaatatttctaaggtccaagggctgctggagaatggagacagtgtgaccagtcctgagaacatggctccaggaaagggctctggtaagacaggtgtggtttgggtaggctgttggctaaacataactgagtgacccatgtatttgtcacctctgttgtggccatggaggataagaccaagagtggcctctaacccagtctgtccctgcacctttcaccgcaccaccttccgcccagacctggagctactgtcctcactgttgccgcagttgactggccctgtgttggagctgcctgaggcaatccgggctcccctggaggagctcatgatggaaggggacctgcttgaggtgaccctggatgagaaccacagcatctggcagctgctgcaggctggacagcctccagacctggacagaattcgcacacttctggagctggaaaaatttgaacatcaagggagtcggacaaggagccgggctctggagaggcgacggcggcggcagaaggtggatcagggtagaaacgttgagaatcttgttcaacaggagcttcagtcaaaaagggctcggagctcagggattatgtctcaggtgggccgagaagaagaacattatcaggagaaagcagaccgtgaaaatatgttcctgacaccttccacagaccacagccctttcttgaaaggaaaccaaaatagcttacaacacaaggattcaggctcttcagctgcttgtccttctttaatgcctttgctacaactctcctactctgatgagcaacagttgtgacagtggcaccaaaggtcatttgtggttgtttttgtttgtttgtttcttaaatcctactatctcctggcctggacctcagaaggagctttttgcttatctataatttttcactgccaatttttgatatcctctctcctagagttactgttaaaaggttggttcgtaaagtccacaccccgatgctcagaagtgtcttgccagcaacattcctgctagcatacaggagtgatttcctaaaccagtttcattctagtctgaatagggacaaacaaatcttgaggaagcccaagtgcgtacctttatttttgcccccaccaccctctttctgtacttcaatttttgtttgttttttgtttttttgtccctgtcataaaatattttggtgcttcaaaacttgtaccttcattgtacatccttttcttttctccccttgggtcttattataaaagaagacaatgtacgttgtaattaccaaaaagaatagggaaaaacaagaatttcatgactctacctgtggtctatctttaatttcatttcttttgttaaaaataaaacaatgagtatgtttggatactatgaatatgatttgaacttcttaaattgtacgagtgaaggactgaggttaggaaacaacagtagcatgggtcaacgtaatttttaatagtctttttcggggcagtggggaagggtaaattttacttagaaaacatacatgagacttaggccaaggttaatgttttctcaaaggatgtccagttgacccagcaccagcaatagaaaacttacctgtcctacacttaattgctttgtgctttttattgaaaatctgttggctggacttgcatgtgccaatatctgagttaacttgttgcattgcatcatttaactatgtgtctgtcccctgtggccagatcacaatgtcttggttacagtcgctttataataagtcttacatcagggtagacagattcatctcacttttttgtttttcagattgttttagcaagttaagtcaccagctctctttttcattatgtagtagcttttgtgtcctaaatctgattaagttgcactgacacaagttatctccctcaatattttctgttctttcaactggtgaatacaatagctaatctaaatcatttgttgtaagaattcagtaggattgatgtgtaaatatttcaggtaaaaccactctattagtataccactaattcaattcacggttcttgttttgtgtgtctctgggtgatctaataatacagactgtattatacttcttttaatccctttaaaggtgaacgcattctgtcatcctggattgaatctctcgcttttccacctactccttgctgacttgagtcagtgtagaacacgttattacccatagcatttctcatgcctataatcatacctaccttccttattgtctactcttttcacctctttctttctttgatactgtcatagggaactataattagctttcccagtaacaaagctatgcttggtgatgacctagtagagtagaaattgcttcacctgtccaagtacagtgtactttaccttaccacaccatagggaccaggtaaaatatatagaaaatcctgagataatttatctaaatctgagaattgtcttcgaaatttcttttttctcctcttccataaataggaggaaagtcatgattctcaagccattacagattctctgacacttgttaacggaaaattctgatgaggcatgatgagaacttctgcctataaaaatctcactaaagttctgagtcacaaattgttcacatacttcacagtaagcaggcaatccaatgtcaggacagttgtacacctttcttaggttgcctcccctaattggggctgtatttgacatgaggggccagttttgacactttttaaaaccatacacaaggatgcagcactaagtttttgcacataggcaagaatttatcttgtgattagaagttagttatatgttcattaagaaacatgacgaaatctgcagcaaaaattgaatttcataggccattcagtgttctctgcgataattctaattcagaaaaaaattgaatcttggtttaaaaaaattgtaataaaactttaccactggtaa

SEQ ID NO: 10737 - DNA, 5472 bp, Homo sapiens
  source 1..5472: mol_type = unassigned DNA
cggccatactatttttatcttgctttttcgttctgtcgcagtactgtttaatatgagtccagcgacggctctgtgactgttttcctctggtaaaatcgctcttgcgtcctcagcgtttatctcaggtgcggaaggtctcacaggtttggaaatagcgccggaaaaatcgatccgcggagtgagacggctcgtaccacactgcagggcccggaggtcaagatggtggctgtaaaactaggatccctgacgattgcttagcattaaggcccgacatggaaccggggtgtgacgagttcctgccgccaccggagtgcccggtttttgagcctagctgggctgaattccaagacccgcttggctacattgcgaaaataaggcccatagcagagaagtctggcatctgcaaaatccgcccacccgcggattggcagcctccttttgcagtagaagttgacaatttcagatttactcctcgcgtccaaaggctaaatgaactggaggcccaaactagagtgaaattgaactatttggatcagattgcaaaattctgggaaattcaaggctcctctttaaagattcccaatgtggagcggaagatcttggacctctacagccttagtaagattgtgattgaggaaggtggctatgaagccatctgcaaggatcgtcggtgggctcgagttgcccagcgtctccactacccaccaggcaaaaacattggctccctgctacgatcacattacgaacgcattatttacccctatgaaatgtttcagtctggagccaaccatgtgcaatgtaacacacacccgtttgacaatgaggtaaaagataaggaatacaagccccacagcatcccccttagacagtctgtgcagccttcaaagttcagcagctacagtcgacgggcaaaaaggctacagcctgatccagagcctacagaggaggacattgagaagcatccagagctaaagaagttacagatatatgggccaggtcccaaaatgatgggcttgggccttatggctaaggataaggataagactgtgcataagaaagtcacatgccccccaactgttacggtgaaggatgagcaaagtggaggtgggaacgtgtcatcaacattgctcaagcagcacttgagcctagagccctgcactaagacaaccatgcaacttcgaaagaatcacagcagtgcccagtttattgactcatatatttgccaagtatgctcccgtggggatgaagatgataagcttcttttctgtgatggctgtgatgacaattaccacatcttctgcttgttaccaccccttcctgaaatccccagaggcatctggaggtgcccaaaatgtatcttggcggagtgtaaacagcctcctgaagcttttggatttgaacaggctacccaggagtacagtttgcagagttttggtgaaatggctgattccttcaagtccgactacttcaacatgcctgtacatatggtgcctacagaacttgtagagaaggaattctggaggctggtgagcagcattgaggaagacgtgacagttgaatatggagctgatattcattccaaagaatttggcagtggctttcctgtcagcaatagcaaacaaaacttatctcctgaggagaaggagtatgcgaccagtggttggaacctgaatgtgatgccagtgctagatcagtctgttctctgtcacatcaatgcagacatctcaggcatgaaggtgccctggctgtacgtgggcatggttttctcagcattttgttggcatattgaggatcactggagttactctattaactatctgcattggggtgagccgaagacctggtatggtgtaccctccctggcagcagagcatttggaggaggtgatgaagatgctgacacctgagctgtttgatagccagcctgatctcctacaccagcttgtcactctcatgaatcccaacactttgatgtcccatggtgtgccagttgtccgcacaaaccagtgtgcaggggagtttgtcatcacttttcctcgtgcttaccacagtggttttaaccaaggctacaattttgctgaagctgtcaacttttgtactgctgactggctacctgctggacgccagtgcattgaacactaccgccggctccggcgctattgtgtcttctcccacgaggagctcatctgcaagatggctgccttcccagagacgttggatctcaatctagcagtagctgtgcacaaggagatgttcattatggttcaggaggagcgacgtctacgaaaggcccttttggagaagggcgtcacggaggctgagcgagaggcttttgagctgctcccagatgatgaacgccagtgcatcaagtgcaagaccacgtgcttcttgtcagccctggcctgctacgactgcccagatggccttgtatgcctttcccacatcaatgacctctgcaagtgctctagtagccgacagtacctccggtatcggtacaccttggatgagctccccaccatgctgcataaactgaagattcgggctgagtcttttgacacctgggccaacaaagtgcgagtggccttggaggtggaggatggccgtaaacgcagctttgaagagctaagggcactggagtctgaggctcgtgagaggaggtttcctaatagtgagctgcttcagcgactgaagaactgcctgagtgaggtggaggcttgtattgctcaagtcctggggctggtcagtggtcaggtggccaggatggacactccacagctgaccttgactgaactccgggtccttcttgagcagatgggcagcctgccctgtgccatgcatcagattggggatgtcaaggatgtcctggaacaggtggaggcctatcaagctgaggctcgtgaggctctggccacactgccctctagtccagggctattgcggtccctgttggagagggggcagcagctgggtgtagaggtgcctgaagcccatcagcttcagcagcaggtggagcaggcgcaatggctagatgaagtgaagcaggccctggccccttctgctcacaggggctctctggtcatcatgcaggggcttttggttatgggtgccaagatagcctccagcccttctgtggacaaggcccgggctgagctgcaagaactactgaccattgcagagcgctgggaagaaaaggctcatttctgcctggaggccaggcagaagcatccaccagccacattggaagccataattcgtgagacagaaaacatccctgttcacctgcctaacatccaggctctcaaagaagctctgactaaggcacaagcttggattgctgatgtggatgagatccaaaatggtgaccactacccctgtctagatgacttggagggcctggtggctgtgggccgggacctgcctgtggggctggaagagctgagacagctagagctgcaggtattgacagcacattcctggagagagaaggcctccaagacctttctcaagaagaattcttgctacacactgcttgaggtgctttgcccgtgtgcagacgctggctcagacagcaccaagcgtagccggtggatggagaaggcgctggggttgtaccagtgtgacacagagctgctggggctgtctgcacaggacctcagagacccaggctctgtgattgtggccttcaaggaaggggaacagaaggagaaggagggtatcctgcagctgcgtcgcaccaactcagccaagcccagtccactggcaccatccctcatggcctcttctccgacttctatctgtgtgtgtgggcaggtgccagctggggtgggagttctgcagtgtgacctgtgtcaggactggttccatgggcagtgtgtgtcagtgccccatctcctcacctctccaaagcccagtctcacttcatctccactgctagcctggtgggaatgggacacaaaattcctgtgtccactgtgtatgcgctcacgacggccacgcctagagacaatcctagccttgctggttgccctgcagaggctgcccgtgcggctgcctgagggtgaggcccttcagtgtctcacagagagggccattggctggcaagaccgtgccagaaaggctctggcctctgaagatgtgactgctctgttgcgacagctggctgagcttcgccaacagctacaggccaaacccagaccagaggaggcctcagtctacacttcagccactgcctgtgaccctatcagagaaggcagtggcaacaatatttctaaggtccaagggctgctggagaatggagacagtgtgaccagtcctgagaacatggctccaggaaagggctctgacctggagctactgtcctcactgttgccgcagttgactggccctgtgttggagctgcctgaggcaatccgggctcccctggaggagctcatgatggaaggggacctgcttgaggtgaccctggatgagaaccacagcatctggcagctgctgcaggctggacagcctccagacctggacagaattcgcacacttctggagctggaaaaatttgaacatcaagggagtcggacaaggagccgggctctggagaggcgacggcggcggcagaaggtggatcagggtagaaacgttgagaatcttgttcaacaggagcttcagtcaaaaagggctcggagctcagggattatgtctcaggtgggccgagaagaagaacattatcaggagaaagcagaccgtgaaaatatgttcctgacaccttccacagaccacagccctttcttgaaaggaaaccaaaatagcttacaacacaaggattcaggctcttcagctgcttgtccttctttaatgcctttgctacaactctcctactctgatgagcaacagttgtgacagtggcaccaaaggtcatttgtggttgtttttgtttgtttgtttcttaaatcctactatctcctggcctggacctcagaaggagctttttgcttatctataatttttcactgccaatttttgatatcctctctcctagagttactgttaaaaggttggttcgtaaagtccacaccccgatgctcagaagtgtcttgccagcaacattcctgctagcatacaggagtgatttcctaaaccagtttcattctagtctgaatagggacaaacaaatcttgaggaagcccaagtgcgtacctttatttttgcccccaccaccctctttctgtacttcaatttttgtttgttttttgtttttttgtccctgtcataaaatattttggtgcttcaaaacttgtaccttcattgtacatccttttcttttctccccttgggtcttattataaaagaagacaatgtacgttgtaattaccaaaaagaatagggaaaaacaagaatttcatgactctacctgtggtctatctttaatttcatttcttttgttaaaaataaaacaatgagtatgtttggatactatgaa

SEQ ID NO: 10738 - DNA, 5134 bp, Homo sapiens
  source 1..5134: mol_type = unassigned DNA
aaaatcgatccgcggagtgagacggctcgtaccacactgcagggcccggaggtcaagatggtggctgtaaaactaggatccctgacgattgcttagcattaaggcccgacatggaaccggggtgtgacgagttcctgccgccaccggagtgcccggtttttgagcctagctgggctgaattccaagacccgcttggctacattgcgaaaataaggcccatagcagagaagtctggcatctgcaaaatccgcccacccgcggattggcagcctccttttgcagtagaagttgacaatttcagatttactcctcgcgtccaaaggctaaatgaactggaggcccaaactagagtgaaattgaactatttggatcagattgcaaaattctgggaaattcaaggctcctctttaaagattcccaatgtggagcggaagatcttggacctctacagccttagtaagcaatgtaacacacacccgtttgacaatgaggtaaaagataaggaatacaagccccacagcatcccccttagacagtctgtgcagccttcaaagttcagcagctacagtcgacgggcaaaaaggctacagcctgatccagagcctacagaggaggacattgagaagcatccagagctaaagaagttacagatatatgggccaggtcccaaaatgatgggcttgggccttatggctaaggataaggataagactgtgcataagaaagtcacatgccccccaactgttacggtgaaggatgagcaaagtggaggtgggaacgtgtcatcaacattgctcaagcagcacttgagcctagagccctgcactaagacaaccatgcaacttcgaaagaatcacagcagtgcccagtttattgactcatatatttgccaagtatgctcccgtggggatgaagatgataagcttcttttctgtgatggctgtgatgacaattaccacatcttctgcttgttaccaccccttcctgaaatccccagaggcatctggaggtgcccaaaatgtatcttggcggagtgtaaacagcctcctgaagcttttggatttgaacaggctacccaggagtacagtttgcagagttttggtgaaatggctgattccttcaagtccgactacttcaacatgcctgtacatatggtgcctacagaacttgtagagaaggaattctggaggctggtgagcagcattgaggaagacgtgacagttgaatatggagctgatattcattccaaagaatttggcagtggctttcctgtcagcaatagcaaacaaaacttatctcctgaggagaaggagtatgcgaccagtggttggaacctgaatgtgatgccagtgctagatcagtctgttctctgtcacatcaatgcagacatctcaggcatgaaggtgccctggctgtacgtgggcatggttttctcagcattttgttggcatattgaggatcactggagttactctattaactatctgcattggggtgagccgaagacctggtatggtgtaccctccctggcagcagagcatttggaggaggtgatgaagatgctgacacctgagctgtttgatagccagcctgatctcctacaccagcttgtcactctcatgaatcccaacactttgatgtcccatggtgtgccagttgtccgcacaaaccagtgtgcaggggagtttgtcatcacttttcctcgtgcttaccacagtggttttaaccaaggctacaattttgctgaagctgtcaacttttgtactgctgactggctacctgctggacgccagtgcattgaacactaccgccggctccggcgctattgtgtcttctcccacgaggagctcatctgcaagatggctgccttcccagagacgttggatctcaatctagcagtagctgtgcacaaggagatgttcattatggttcaggaggagcgacgtctacgaaaggcccttttggagaagggcgtcacggaggctgagcgagaggcttttgagctgctcccagatgatgaacgccagtgcatcaagtgcaagaccacgtgcttcttgtcagccctggcctgctacgactgcccagatggccttgtatgcctttcccacatcaatgacctctgcaagtgctctagtagccgacagtacctccggtatcggtacaccttggatgagctccccaccatgctgcataaactgaagattcgggctgagtcttttgacacctgggccaacaaagtgcgagtggccttggaggtggaggatggccgtaaacgcagctttgaagagctaagggcactggagtctgaggctcgtgagaggaggtttcctaatagtgagctgcttcagcgactgaagaactgcctgagtgaggtggaggcttgtattgctcaagtcctggggctggtcagtggtcaggtggccaggatggacactccacagctgaccttgactgaactccgggtccttcttgagcagatgggcagcctgccctgtgccatgcatcagattggggatgtcaaggatgtcctggaacaggtggaggcctatcaagctgaggctcgtgaggctctggccacactgccctctagtccagggctattgcggtccctgttggagagggggcagcagctgggtgtagaggtgcctgaagcccatcagcttcagcagcaggtggagcaggcgcaatggctagatgaagtgaagcaggccctggccccttctgctcacaggggctctctggtcatcatgcaggggcttttggttatgggtgccaagatagcctccagcccttctgtggacaaggcccgggctgagctgcaagaactactgaccattgcagagcgctgggaagaaaaggctcatttctgcctggaggccaggcagaagcatccaccagccacattggaagccataattcgtgagacagaaaacatccctgttcacctgcctaacatccaggctctcaaagaagctctgactaaggcacaagcttggattgctgatgtggatgagatccaaaatggtgaccactacccctgtctagatgacttggagggcctggtggctgtgggccgggacctgcctgtggggctggaagagctgagacagctagagctgcaggtattgacagcacattcctggagagagaaggcctccaagacctttctcaagaagaattcttgctacacactgcttgaggtgctttgcccgtgtgcagacgctggctcagacagcaccaagcgtagccggtggatggagaaggcgctggggttgtaccagtgtgacacagagctgctggggctgtctgcacaggacctcagagacccaggctctgtgattgtggccttcaaggaaggggaacagaaggagaaggagggtatcctgcagctgcgtcgcaccaactcagccaagcccagtccactggcaccatccctcatggcctcttctccgacttctatctgtgtgtgtgggcaggtgccagctggggtgggagttctgcagtgtgacctgtgtcaggactggttccatgggcagtgtgtgtcagtgccccatctcctcacctctccaaagcccagtctcacttcatctccactgctagcctggtgggaatgggacacaaaattcctgtgtccactgtgtatgcgctcacgacggccacgcctagagacaatcctagccttgctggttgccctgcagaggctgcccgtgcggctgcctgagggtgaggcccttcagtgtctcacagagagggccattggctggcaagaccgtgccagaaaggctctggcctctgaagatgtgactgctctgttgcgacagctggctgagcttcgccaacagctacaggccaaacccagaccagaggaggcctcagtctacacttcagccactgcctgtgaccctatcagagaaggcagtggcaacaatatttctaaggtccaagggctgctggagaatggagacagtgtgaccagtcctgagaacatggctccaggaaagggctctgacctggagctactgtcctcactgttgccgcagttgactggccctgtgttggagctgcctgaggcaatccgggctcccctggaggagctcatgatggaaggggacctgcttgaggtgaccctggatgagaaccacagcatctggcagctgctgcaggctggacagcctccagacctggacagaattcgcacacttctggagctggaaaaatttgaacatcaagggagtcggacaaggagccgggctctggagaggcgacggcggcggcagaaggtggatcagggtagaaacgttgagaatcttgttcaacaggagcttcagtcaaaaagggctcggagctcagggattatgtctcaggtgggccgagaagaagaacattatcaggagaaagcagaccgtgaaaatatgttcctgacaccttccacagaccacagccctttcttgaaaggaaaccaaaatagcttacaacacaaggattcaggctcttcagctgcttgtccttctttaatgcctttgctacaactctcctactctgatgagcaacagttgtgacagtggcaccaaaggtcatttgtggttgtttttgtttgtttgtttcttaaatcctactatctcctggcctggacctcagaaggagctttttgcttatctataatttttcactgccaatttttgatatcctctctcctagagttactgttaaaaggttggttcgtaaagtccacaccccgatgctcagaagtgtcttgccagcaacattcctgctagcatacaggagtgatttcctaaaccagtttcattctagtctgaatagggacaaacaaatcttgaggaagcccaagtgcgtacctttatttttgcccccaccaccctctttctgtacttcaatttttgtttgttttttgtttttttgtccctgtcataaaatattttggtgcttcaaaacttgtaccttcattgtacatccttttcttttctccccttgggtcttattataaaagaagacaatgtacgttgtaattaccaaaaagaatagggaaaaacaagaatttcatgactctacctgtggtctatctttaatttcatttcttttgttaaaaataaaacaatgagtatgtttggatact

SEQ ID NO: 10739 - DNA, 5235 bp, Homo sapiens
  source 1..5235: mol_type = unassigned DNA
atgtcatggagctttcctcttatgtcttcttttagtagtttgataattttggattttacatattttacatttaagtttttacttcctttggggttggtttttgtacatggtgaaagatgggtcaagtttcatccttttgcatgtggatatccaggttttccaacaatggatactgaagagactttcctttcctctctgtgtgttcttggtgtctttgtggaacttctgttggctgaaaatgcagagatttatttctgggctattattttccatggagctgtgtgtttgtttttaatggcagtactaagcccttttagttactatagctttgtgatataatagtaaattagtgtgaatactctcagcttttttgtttgttggtttgttttgtttcacatattgctttgggtattttgagtctttggggttccatatcaatttaagggttgcttttttgaaaatttctgtgaaggatgctgttatttttgacagggattaaattgaatttctagatcagtttggatagtatggacattttagcaatattaattcttgtggtctgtgaggacaaggtgtcttaaaatttctttgtgtgttcttcagtttacttcatcattatttgtatagtttgcagtgtagttatttttttacctctttaaatttattgctagagatttttttcagctgttacaaatgaagtttttattttgtttttttcagataattttctactaatgtatacaaacaccactgatttttatattgattttgtatcctgcaaatttactgaatttgttagttctaacaccatttttacggaggccttagcatcctcttaaaaaagaagtgttttctttaagacttttttataaatcttcaaacagggataacataactttctcttttccaatttgaatgtttttttaatttcttttcctgcctcattgctctggctgggacctccggcactgtgttagttgacagtggcaaaacagggcattatttttgagtttacaatatggacctcttgtgaccaggaataccagaggcagcatgttctaagacacagttgtcttcttatgtatgttttgctcagtttgcctctcctcatcgtatcctactccctactcactctggcaaatctctgacccaacaggagtatgcgaccagtggttggaacctgaatgtgatgccagtgctagatcagtctgttctctgtcacatcaatgcagacatctcaggcatgaaggtgccctggctgtacgtgggcatggttttctcagcattttgttggcatattgaggatcactggagttactctattaactatctgcattggggtgagccgaagacctggtatggtgtaccctccctggcagcagagcatttggaggaggtgatgaagatgctgacacctgagctgtttgatagccagcctgatctcctacaccagcttgtcactctcatgaatcccaacactttgatgtcccatggtgtgccagttgtccgcacaaaccagtgtgcaggggagtttgtcatcacttttcctcgtgcttaccacagtggttttaaccaaggctacaattttgctgaagctgtcaacttttgtactgctgactggctacctgctggacgccagtgcattgaacactaccgccggctccggcgctattgtgtcttctcccacgaggagctcatctgcaagatggctgccttcccagagacgttggatctcaatctagcagtagctgtgcacaaggagatgttcattatggttcaggaggagcgacgtctacgaaaggcccttttggagaagctttccttacaaggttgagtccacatcagggctcagtgttggctgaggtggggtgtccacaaccctactcctagtctttacagtatatgtgggttgaacacccccagggcgtcacggaggctgagcgagaggcttttgagctgctcccagatgatgaacgccagtgcatcaagtgcaagaccacgtgcttcttgtcagccctggcctgctacgactgcccagatggccttgtatgcctttcccacatcaatgacctctgcaagtgctctagtagccgacagtacctccggtatcggtacaccttggatgagctccccaccatgctgcataaactgaagattcgggctgagtcttttgacacctgggccaacaaagtgcgagtggccttggaggtggaggatggccgtaaacgcagctttgaagagctaagggcactggagtctgaggctcgtgagaggaggtttcctaatagtgagctgcttcagcgactgaagaactgcctgagtgaggtggaggcttgtattgctcaagtcctggggctggtcagtggtcaggtggccaggatggacactccacagctgaccttgactgaactccgggtccttcttgagcagatgggcagcctgccctgtgccatgcatcagattggggatgtcaaggatgtcctggaacaggtggaggcctatcaagctgaggctcgtgaggctctggccacactgccctctagtccagggctattgcggtccctgttggagagggggcagcagctgggtgtagaggtgcctgaagcccatcagcttcagcagcaggtggagcaggcgcaatggctagatgaagtgaagcaggccctggccccttctgctcacaggggctctctggtcatcatgcaggggcttttggttatgggtgccaagatagcctccagcccttctgtggacaaggcccgggctgagctgcaagaactactgaccattgcagagcgctgggaagaaaaggctcatttctgcctggaggccaggcagaagcatccaccagccacattggaagccataattcgtgagacagaaaacatccctgttcacctgcctaacatccaggctctcaaagaagctctgactaaggcacaagcttggattgctgatgtggatgagatccaaaatggtgaccactacccctgtctagatgacttggagggcctggtggctgtgggccgggacctgcctgtggggctggaagagctgagacagctagagctgcaggtattgacagcacattcctggagagagaaggcctccaagacctttctcaagaagaattcttgctacacactgcttgaggtgctttgcccgtgtgcagacgctggctcagacagcaccaagcgtagccggtggatggagaaggcgctggggttgtaccagtgtgacacagagctgctggggctgtctgcacaggacctcagagacccaggctctgtgattgtggccttcaaggaaggggaacagaaggagaaggagggtatcctgcagctgcgtcgcaccaactcagccaagcccagtccactggcaccatccctcatggcctcttctccgacttctatctgtgtgtgtgggcaggtgccagctggggtgggagttctgcagtgtgacctgtgtcaggactggttccatgggcagtgtgtgtcagtgccccatctcctcacctctccaaagcccagtctcacttcatctccactgctagcctggtgggaatgggacacaaaattcctgtgtccactgtgtatgcgctcacgacggccacgcctagagacaatcctagccttgctggttgccctgcagaggctgcccgtgcggctgcctgagggtgaggcccttcagtgtctcacagagagggccattggctggcaagaccgtgccagaaaggctctggcctctgaagatgtgactgctctgttgcgacagctggctgagcttcgccaacagctacaggccaaacccagaccagaggaggcctcagtctacacttcagccactgcctgtgaccctatcagagaaggcagtggcaacaatatttctaaggtccaagggctgctggagaatggagacagtgtgaccagtcctgagaacatggctccaggaaagggctctggtaagacaggtgtggtttgggtaggctgttggctaaacataactgagtgacccatgtatttgtcacctctgttgtggccatggaggataagaccaagagtggcctctaacccagtctgtccctgcacctttcaccgcaccaccttccgcccagacctggagctactgtcctcactgttgccgcagttgactggccctgtgttggagctgcctgaggcaatccgggctcccctggaggagctcatgatggaaggggacctgcttgaggtgaccctggatgagaaccacagcatctggcagctgctgcaggctggacagcctccagacctggacagaattcgcacacttctggagctggaaaaatttgaacatcaagggagtcggacaaggagccgggctctggagaggcgacggcggcggcagaaggtggatcagggtagaaacgttgagaatcttgttcaacaggagcttcagtcaaaaagggctcggagctcagggattatgtctcaggtgggccgagaagaagaacattatcaggagaaagcagaccgtgaaaatatgttcctgacaccttccacagaccacagccctttcttgaaaggaaaccaaaatagcttacaacacaaggattcaggctcttcagctgcttgtccttctttaatgcctttgctacaactctcctactctgatgagcaacagttgtgacagtggcaccaaaggtcatttgtggttgtttttgtttgtttgtttcttaaatcctactatctcctggcctggacctcagaaggagctttttgcttatctataatttttcactgccaatttttgatatcctctctcctagagttactgttaaaaggttggttcgtaaagtccacaccccgatgctcagaagtgtcttgccagcaacattcctgctagcatacaggagtgatttcctaaaccagtttcattctagtctgaatagggacaaacaaatcttgaggaagcccaagtgcgtacctttatttttgcccccaccaccctctttctgtacttcaatttttgtttgttttttgtttttttgtccctgtcataaaatattttggtgcttcaaaacttgtaccttcattgtacatccttttcttttctccccttgggtcttattataaaagaagacaatgtacgttgtaattaccaaaaagaatagggaaaaacaagaatttcatgactctacctgtggtctatctttaatttcatttcttttgttaaaaataaaacaatgagtatgtttgg

SEQ ID NO: 10740 - DNA, 4701 bp, Homo sapiens
  source 1..4701: mol_type = unassigned DNA
cggccatactatttttatcttgctttttcgttctgtcgcagtactgtttaatatgagtccagcgacggctctgtgactgttttcctctggtaaaatcgctcttgcgtcctcagcgtttatctcaggtgcggaaggtctcacaggtttggaaatagcgccggaaaaatcgatccgcggagtgagacggctcgtaccacactgcagggcccggaggtcaagatggtggctgtaaaactaggatccctgacgattgcttagcattaaggcccgacatggaaccggggtgtgacgagttcctgccgccaccggagtgcccggtttttgagcctagctgggctgaattccaagacccgcttggctacattgcgaaaataaggcccatagcagagaagtctggcatctgcaaaatccgcccacccgcggattggcagcctccttttgcagtagaagttgacaatttcagatttactcctcgcgtccaaaggctaaatgaactggagattgtgattgaggaaggtggctatgaagccatctgcaaggatcgtcggtgggctcgagttgcccagcgtctccactacccaccaggcaaaaacattggctccctgctacgatcacattacgaacgcattatttacccctatgaaatgtttcagtctggagccaaccatgtgcaatgtaacacacacccgtttgacaatgaggtaaaagataaggaatacaagccccacagcatcccccttagacagtctgtgcagccttcaaagttcagcagctacagtcgacgggcaaaaaggctacagcctgatccagagcctacagaggaggacattgagaagcatccagagctaaagaagttacagatatatgggccaggtcccaaaatgatgggcttgggccttatggctaaggataaggataagactgtgcataagaaagtcacatgccccccaactgttacggtgaaggatgagcaaagtggaggtgggaacgtgtcatcaacattgctcaagcagcacttgagcctagagccctgcactaagacaaccatgcaacttcgaaagaatcacagcagtgcccagtttattgactcatatatttgccaagtatgctcccgtggggatgaagatgataagcttcttttctgtgatggctgtgatgacaattaccacatcttctgcttgttaccaccccttcctgaaatccccagaggcatctggaggtgcccaaaatgtatcttggcggagtgtaaacagcctcctgaagcttttggatttgaacaggctacccaggagtacagtttgcagagttttggtgaaatggctgattccttcaagtccgactacttcaacatgcctgtacatatggtgcctacagaacttgtagagaaggaattctggaggctggtgagcagcattgaggaagacgtgacagttgaatatggagctgatattcattccaaagaatttggcagtggctttcctgtcagcaatagcaaacaaaacttatctcctgaggagaaggagtatgcgaccagtggttggaacctgaatgtgatgccagtgctagatcagtctgttctctgtcacatcaatgcagacatctcaggcatgaaggtgccctggctgtacgtgggcatggttttctcagcattttgttggcatattgaggatcactggagttactctattaactatctgcattggggtgagccgaagacctggtatggtgtaccctccctggcagcagagcatttggaggaggtgatgaagatgctgacacctgagctgtttgatagccagcctgatctcctacaccagcttgtcactctcatgaatcccaacactttgatgtcccatggtgtgccagttgtccgcacaaaccagtgtgcaggggagtttgtcatcacttttcctcgtgcttaccacagtggttttaaccaaggctacaattttgctgaagctgtcaacttttgtactgctgactggctacctgctggacgccagtgcattgaacactaccgccggctccggcgctattgtgtcttctcccacgaggagctcatctgcaagatggctgccttcccagagacgttggatctcaatctagcagtagctgtgcacaaggagatgttcattatggttcaggaggagcgacgtctacgaaaggcccttttggagaagggcgtcacggaggctgagcgagaggcttttgagctgctcccagatgatgaacgccagtgcatcaagtgcaagaccacgtgcttcttgtcagccctggcctgctacgactgcccagatggccttgtatgcctttcccacatcaatgacctctgcaagtgctctagtagccgacagtacctccggtatcggtacaccttggatgagctccccaccatgctgcataaactgaagattcgggctgagtcttttgacacctgggccaacaaagtgcgagtggccttggaggtggaggatggccgtaaacgcagctttgaagagctaagggcactggagtctgaggctcgtgagaggaggtttcctaatagtgagctgcttcagcgactgaagaactgcctgagtgaggtggaggcttgtattgctcaagtcctggggctggtcagtggtcaggtggccaggatggacactccacagctgaccttgactgaactccgggtccttcttgagcagatgggcagcctgccctgtgccatgcatcagattggggatgtcaaggatgtcctggaacaggtggaggcctatcaagctgaggctcgtgaggctctggccacactgccctctagtccagggctattgcggtccctgttggagagggggcagcagctgggtgtagaggtgcctgaagcccatcagcttcagcagcaggtggagcaggcgcaatggctagatgaagtgaagcaggccctggccccttctgctcacaggggctctctggtcatcatgcaggggcttttggttatgggtgccaagatagcctccagcccttctgtggacaaggcccgggctgagctgcaagaactactgaccattgcagagcgctgggaagaaaaggctcatttctgcctggaggccaggcagaagcatccaccagccacattggaagccataattcgtgagacagaaaacatccctgttcacctgcctaacatccaggctctcaaagaagctctgactaaggcacaagcttggattgctgatgtggatgagatccaaaatggtgaccactacccctgtctagatgacttggagggcctggtggctgtgggccgggacctgcctgtggggctggaagagctgagacagctagagctgcaggtattgacagcacattcctggagagagaaggcctccaagacctttctcaagaagaattcttgctacacactgcttgaggtgctttgcccgtgtgcagacgctggctcagacagcaccaagcgtagccggtggatggagaaggcgctggggttgtaccagtgtgacacagagctgctggggctgtctgcacaggacctcagagacccaggctctgtgattgtggccttcaaggaaggggaacagaaggagaaggagggtatcctgcagctgcgtcgcaccaactcagccaagcccagtccactggcaccatccctcatggcctcttctccgacttctatctgtgtgtgtgggcaggtgccagctggggtgggagttctgcagtgtgacctgtgtcaggactggttccatgggcagtgtgtgtcagtgccccatctcctcacctctccaaagcccagtctcacttcatctccactgctagcctggtgggaatgggacacaaaattcctgtgtccactgtgtatgcgctcacgacggccacgcctagagacaatcctagccttgctggttgccctgcagaggctgcccgtgcggctgcctgagggtgaggcccttcagtgtctcacagagagggccattggctggcaagaccgtgccagaaaggctctggcctctgaagatgtgactgctctgttgcgacagctggctgagcttcgccaacagctacaggccaaacccagaccagaggaggcctcagtctacacttcagccactgcctgtgaccctatcagagaaggcagtggcaacaatatttctaaggtccaagggctgctggagaatggagacagtgtgaccagtcctgagaacatggctccaggaaagggctctgacctggagctactgtcctcactgttgccgcagttgactggccctgtgttggagctgcctgaggcaatccgggctcccctggaggagctcatgatggaaggggacctgcttgaggtgaccctggatgagaaccacagcatctggcagctgctgcaggctggacagcctccagacctggacagaattcgcacacttctggagctggaaaaatttgaacatcaagggagtcggacaaggagccgggctctggagaggcgacggcggcggcagaaggtggatcagggtagaaacgttgagaatcttgttcaacaggagcttcagtcaaaaagggctcggagctcagggattatgtctcaggtgggccgagaagaagaacattatcaggagaaagcagaccgtgaaaatatgttcctgacaccttccacagaccacagccctttcttgaaaggaaaccaaaatagcttacaacacaaggattcaggct

SEQ ID NO: 10741 - DNA, 880 bp, Homo sapiens
  source 1..880: mol_type = unassigned DNA
ctgcctaacatccaggctctcaaagaagctctgactaaggcacaagcttggattgctgatgtggatgagatccaaaatggtgaccactacccctgtctagatgacttggagggcctggtggctgtgggccgggacctgcctgtggggctggaagagctgagacagctagagctgcaggtgctttgcccgtgtgcagacgctggctcagacagcaccaagcgtagccggtggatggagaaggcgctggggttgtaccagtgtgacacagagctgctggggctgtctgcacaggacctcagagacccaggctctgtgattgtggccttcaaggaaggggaacagaaggagaaggagggtatcctgcagctgcgtcgcaccaactcagccaagcccagtccactggcaccatccctcatggcctcttctccgacttctatctgtgtgtgtgggcaggtgccagctggggtgggagttctgcagtgtgacctgtgtcaggactggttccatgggcagtgtgtgtcagtgccccatctcctcacctctccaaagcccagtctcacttcatctccactgctagcctggtgggaatgggacacaaaattcctgtgtccactgtgtatgcgctcacgacggccacgcctagagacaatcctagccttgctggttgccctgcagaggctgcccgtgcggctgcctgagggtgaggcccttcagtgtctcacagagagggccattggctggcaagaccgtgccagaaaggctctggcctctgaagatgtgactgctctgttgcgacagctggctgagcttcgccaacagctacaggccaaacccagaccagaggaggcctcagtctacacttcagccactgcctgtgacc

SEQ ID NO: 10742 - DNA, 792 bp, Homo sapiens
  source 1..792: mol_type = unassigned DNA
aacttgtcagtatcgctgaacttagaaaaaaacctttgtgggtattactgaaatatgaaagggaaggaagtatattaaaagtctcaaattgtttgaaatgtgacattacgaggtgttccttctggctcctataggatggacactccacagctgaccttgactgaactccgggtccttcttgagcagatgggcagcctgccctgtgccatgcatcagattggggatgtcaaggttctttcctggaagtggcggagatatgtgttcccataccatctctgtgtgtacagcatgcaaggaaatatccttccagactgaaataattaaaaactctaaactgggcctacataagacactggctcttgggaatggggtggagaggactgattggttggttggttgatttccctccagacaccagagtcttagaaagcttactagatggataagattgtattaaagtgggtttggaaaaagaaatttaggtaattaaaggagaaaaatgtcattctaggtaaacagagggcctttgttattatcagatagatcatgttttaggatgtggttgagaataagtattaagcaataggaaatgcctataagagaagatgagaagtggagcaaatctaggtggttgagtatttatgtggctaaagaatctgcattttatcctatgtccttgcaggatgtcctggaacaggtggaggcctatcaagctgaggctcgtgaggctctggccacactgccctctagtccagggctattgcggtccctgttggagagggggcagcagct

SEQ ID NO: 10743 - DNA, 856 bp, Homo sapiens
  source 1..856: mol_type = unassigned DNA
agctgtgcacaaggagatgttcattatggttcaggaggagcgacgtctacgaaaggcccttttggagaagggcgtcacggaggctgagcgagaggcttttgagctgctcccagatgatgaacgccagtgcatcaagtgcaagaccacgtgcttcttgtcagccctggcctgctacgactgcccagatggccttgtatgcctttcccacatcaatgacctctgcaagtgctctagtagccgacagtacctccggtatcggtacaccttggatgagctccccaccatgctgcataaactgaagattcgggctgagtcttttgacacctgggccaacaaagtgcgagtggccttggaggtggaggatggccgtaaacgcagtgagtgacaggaaatggaaggaacccttgtgtaagccttatttctttcttttgggtattctcaaccttccttttctgctaacactgcctacctgttgcaacttacactctccaggctttgaagagctaagggcactggagtctgaggctcgtgagaggaggtttcctaatagtgagctgcttcagcgactgaagaactgcctgagtgaggtggaggcttgtattgctcaagtcctggggctggtcagtggtcaggtggccaggtacgtgagaggagaaggcaaagaagggtgtcagtgtgtgaaaatgaataacaaaaatggatagactataaacacacaatcctgtttgaggctgaggcaggagaattgtttgaacccaggagacagaggttgcagtgagccgagatggcatcattgcactccagcctgggcagcaagagcaaaactccatctcaaaacaacagcaaaaaaaaagaa

SEQ ID NO: 10744 - DNA, 1336 bp, Homo sapiens
  source 1..1336: mol_type = unassigned DNA
ggtcaagatggtggctgtaaaactaggatccctgacgattgcttagcattaaggcccgacatggaaccggggtgtgacgagttcctgccgccaccggagtgcccggtttttgagcctagctgggctgaattccaagacccgcttggctacattgcgaaaataaggcccatagcagagaagtctggcatctgcaaaatccgcccacccgcggattggcagcctccttttgcagtagaagttgacaatttcagatttactcctcgcgtccaaaggctaaatgaactggaggcccaaactagagtgaaattgaactatttggatcagattgcaaaattctgggaaattcaaggctcctctttaaagattcccaatgtggagcggaagatcttggacctctacagccttagtaagattgtgattgaggaaggtggctatgaagccatctgcaaggatcgtcggtgggctcgagttgcccagcgtctccactacccaccaggcaaaaacattggctccctgctacgatcacattacgaacgcattatttacccctatgaaatgtttcagtctggagccaaccatgtgccagagcctacagaggaggacattgagaagcatccagagctaaagaagttacagatatatgggccaggtcccaaaatgatgggcttgggccttatggctaaggataaggataagactgtgcataagaaagtcacatgccccccaactgttacggtgaaggatgagcaaagtggaggtgggaacgtgtcatcaacattgctcaagcagcacttgagcctagagccctgcactaagacaaccatgcaacttcgaaagaatcacagcagtgcccagtttattgactcatatatttgccaagtatgctcccgtggggatgaagatgataagcttcttttctgtgatggctgtgatgacaattaccacatcttctgcttgttaccaccccttcctgaaatccccagaggcatctggaggtgcccaaaatgtatcttggcggagtgtaaacagcctcctgaagcttttggatttgaacaggctacccaggagtacagtttgcagagttttggtgaaatggctgattccttcaagtccgactacttcaacatgcctgtacatatggtgcctacagaacttgtagagaaggaattctggaggctggtgagcagcattgaggaagacgtgacagttgaatatggagctgatattcattccaaagaatttggcagtggctttcctgtcagcaatagcaaacaaaacttatctcctgaggagaaggagtatgcgaccagtggttggaacctgaatgtgatgccag

SEQ ID NO: 10745 - DNA, 5579 bp, Homo sapiens
  source 1..5579: mol_type = unassigned DNA
cattttaaaaaagatccggccatactatttttatcttgctttttcgttctgtcgcagtactgtttaatatgagtccagcgacggctctgtgactgttttcctctggtaaaatcgctcttgcgtcctcagcgtttatctcaggtgcggaaggtctcacaggtttggaaatagcgccggaaaaatcgatccgcggagtgagacggctcgtaccacactgcagggcccggaggtcaagatggtggctgtaaaactaggatccctgacgattgcttagcattaaggcccgacatggaaccggggtgtgacgagttcctgccgccaccggagtgcccggtttttgagcctagctgggctgaattccaagacccgcttggctacattgcgaaaataaggcccatagcagagaagtctggcatctgcaaaatccgcccacccgcggattggcagcctccttttgcagtagaagttgacaatttcagatttactcctcgcgtccaaaggctaaatgaactggaggcccaaactagagtgaaattgaactatttggatcagattgcaaaattctgggaaattcaaggctcctctttaaagattcccaatgtggagcggaagatcttggacctctacagccttagtaagattgtgattgaggaaggtggctatgaagccatctgcaaggatcgtcggtgggctcgagttgcccagcgtctccactacccaccaggcaaaaacattggctccctgctacgatcacattacgaacgcattatttacccctatgaaatgtttcagtctggagccaaccatgtgcaatgtaacacacacccgtttgacaatgaggtaaaagataaggaatacaagccccacagcatcccccttagacagtctgtgcagccttcaaagttcagcagctacagtcgacgggcaaaaaggctacagcctgatccagagcctacagaggaggacattgagaagcatccagagctaaagaagttacagatatatgggccaggtcccaaaatgatgggcttgggccttatggctaaggataaggataagactgtgcataagaaagtcacatgccccccaactgttacggtgaaggatgagcaaagtggaggtgggaacgtgtcatcaacattgctcaagcagcacttgagcctagagccctgcactaagacaaccatgcaacttcgaaagaatcacagcagtgcccagtttattgactcatatatttgccaagtatgctcccgtggggatgaagatgataagcttcttttctgtgatggctgtgatgacaattaccacatcttctgcttgttaccaccccttcctgaaatccccagaggcatctggaggtgcccaaaatgtatcttggcggagtgtaaacagcctcctgaagcttttggatttgaacaggctacccaggagtacagtttgcagagttttggtgaaatggctgattccttcaagtccgactacttcaacatgcctgtacatatggtgcctacagaacttgtagagaaggaattctggaggctggtgagcagcattgaggaagacgtgacagttgaatatggagctgatattcattccaaagaatttggcagtggctttcctgtcagcaatagcaaacaaaacttatctcctgaggagaagagacaaagtctcactgtgttgaccaggctgatctcaagcttctgggctcaagcagtcctcccaccttggcctcccaaagtgttgggattacaggagtatgcgaccagtggttggaacctgaatgtgatgccagtgctagatcagtctgttctctgtcacatcaatgcagacatctcaggcatgaaggtgccctggctgtacgtgggcatggttttctcagcattttgttggcatattgaggatcactggagttactctattaactatctgcattggggtgagccgaagacctggtatggtgtaccctccctggcagcagagcatttggaggaggtgatgaagatgctgacacctgagctgtttgatagccagcctgatctcctacaccagcttgtcactctcatgaatcccaacactttgatgtcccatggtgtgccagttgtccgcacaaaccagtgtgcaggggagtttgtcatcacttttcctcgtgcttaccacagtggttttaaccaaggctacaattttgctgaagctgtcaacttttgtactgctgactggctacctgctggacgccagtgcattgaacactaccgccggctccggcgctattgtgtcttctcccacgaggagctcatctgcaagatggctgccttcccagagacgttggatctcaatctagcagtagctgtgcacaaggagatgttcattatggttcaggaggagcgacgtctacgaaaggcccttttggagaagggcgtcacggaggctgagcgagaggcttttgagctgctcccagatgatgaacgccagtgcatcaagtgcaagaccacgtgcttcttgtcagccctggcctgctacgactgcccagatggccttgtatgcctttcccacatcaatgacctctgcaagtgctctagtagccgacagtacctccggtatcggtacaccttggatgagctccccaccatgctgcataaactgaagattcgggctgagtcttttgacacctgggccaacaaagtgcgagtggccttggaggtggaggatggccgtaaacgcagctttgaagagctaagggcactggagtctgaggctcgtgagaggaggtttcctaatagtgagctgcttcagcgactgaagaactgcctgagtgaggtggaggcttgtattgctcaagtcctggggctggtcagtggtcaggtggccaggatggacactccacagctgaccttgactgaactccgggtccttcttgagcagatgggcagcctgccctgtgccatgcatcagattggggatgtcaaggatgtcctggaacaggtggaggcctatcaagctgaggctcgtgaggctctggccacactgccctctagtccagggctattgcggtccctgttggagagggggcagcagctgggtgtagaggtgcctgaagcccatcagcttcagcagcaggtggagcaggcgcaatggctagatgaagtgaagcaggccctggccccttctgctcacaggggctctctggtcatcatgcaggggcttttggttatgggtgccaagatagcctccagcccttctgtggacaaggcccgggctgagctgcaagaactactgaccattgcagagcgctgggaagaaaaggctcatttctgcctggaggccaggcagaagcatccaccagccacattggaagccataattcgtgagacagaaaacatccctgttcacctgcctaacatccaggctctcaaagaagctctgactaaggcacaagcttggattgctgatgtggatgagatccaaaatggtgaccactacccctgtctagatgacttggagggcctggtggctgtgggccgggacctgcctgtggggctggaagagctgagacagctagagctgcaggtattgacagcacattcctggagagagaaggcctccaagacctttctcaagaagaattcttgctacacactgcttgaggtgctttgcccgtgtgcagacgctggctcagacagcaccaagcgtagccggtggatggagaaggcgctggggttgtaccagtgtgacacagagctgctggggctgtctgcacaggacctcagagacccaggctctgtgattgtggccttcaaggaaggggaacagaaggagaaggagggtatcctgcagctgcgtcgcaccaactcagccaagcccagtccactggcaccatccctcatggcctcttctccgacttctatctgtgtgtgtgggcaggtgccagctggggtgggagttctgcagtgtgacctgtgtcaggactggttccatgggcagtgtgtgtcagtgccccatctcctcacctctccaaagcccagtctcacttcatctccactgctagcctggtgggaatgggacacaaaattcctgtgtccactgtgtatgcgctcacgacggccacgcctagagacaatcctagccttgctggttgccctgcagaggctgcccgtgcggctgcctgagggtgaggcccttcagtgtctcacagagagggccattggctggcaagaccgtgccagaaaggctctggcctctgaagatgtgactgctctgttgcgacagctggctgagcttcgccaacagctacaggccaaacccagaccagaggaggcctcagtctacacttcagccactgcctgtgaccctatcagagaaggcagtggcaacaatatttctaaggtccaagggctgctggagaatggagacagtgtgaccagtcctgagaacatggctccaggaaagggctctgacctggagctactgtcctcactgttgccgcagttgactggccctgtgttggagctgcctgaggcaatccgggctcccctggaggagctcatgatggaaggggacctgcttgaggtgaccctggatgagaaccacagcatctggcagctgctgcaggctggacagcctccagacctggacagaattcgcacacttctggagctggaaaaatttgaacatcaagggagtcggacaaggagccgggctctggagaggcgacggcggcggcagaaggtggatcagggtagaaacgttgagaatcttgttcaacaggagcttcagtcaaaaagggctcggagctcagggattatgtctcaggtgggccgagaagaagaacattatcaggagaaagcagaccgtgaaaatatgttcctgacaccttccacagaccacagccctttcttgaaaggaaaccaaaatagcttacaacacaaggattcaggctcttcagctgcttgtccttctttaatgcctttgctacaactctcctactctgatgagcaacagttgtgacagtggcaccaaaggtcatttgtggttgtttttgtttgtttgtttcttaaatcctactatctcctggcctggacctcagaaggagctttttgcttatctataatttttcactgccaatttttgatatcctctctcctagagttactgttaaaaggttggttcgtaaagtccacaccccgatgctcagaagtgtcttgccagcaacattcctgctagcatacaggagtgatttcctaaaccagtttcattctagtctgaatagggacaaacaaatcttgaggaagcccaagtgcgtacctttatttttgcccccaccaccctctttctgtacttcaatttttgtttgttttttgtttttttgtccctgtcataaaatattttggtgcttcaaaacttgtaccttcattgtacatccttttcttttctccccttgggtcttattataaaagaagacaatgtacgttgtaattaccaaaaagaatagggaaaaacaagaatttcatgactctacctgtggtctatctttaatttcatttcttttgttaaaaataaaacaatgagtatgtttggatactatg

SEQ ID NO: 10746 - DNA, 2812 bp, Homo sapiens
  source 1..2812: mol_type = unassigned DNA
attttgtcatcgcaacactaaacctttgtcggtctggtgctccccaattcatgaattgcttcttacttaaataaactctttaaaattttactgtgcctcatattttttttaatacagaagaaatgagagaaggaagaatattttagaaataaaggaacttcatgggcagagtcacagtgcaagacaaaaggagcagaccaagggcaagattgcttggggagtgaagactccctccctcttctcccctgagaagctgagataaagggggaggagaagcctgggtgccccccactgataagcaggctccacccagaggccagtcctgtgtgtctggggacaaggcgaaagagcagcagaagtgccccttctccaggatcaaggaactggggcggggggtgtttcctggaccccagtcctccgaatcagctcctagagtggaaccaggaaggattctggagccacagaagatagacagatggaaggtggggaccaaagtgaggaagagccgagggaacgcagccaggcaggtggaatgggaactctctggagccaagagagcactccagaagagaggctgcccgtggaagggagcaggccatgggcagtggccaggcgggtgctgacagctatcctgattttgggcctgctcctttgtttttctgtgcttttgttctacaacttccagaactgtggccctcgcccctgtgagacatctgtgtgtttggatctccgggatcattacctggcctctgggaacacaagtgtggccccctgcaccgacttcttcagctttgcctgtggaagggccaaagagaccaataattcttttcaggagcttgccacaaagaacaaaaaccgacttcggagaatactggaggtccagaattcctggcacccaggctctggggaggagaaagccttccagttctacaactcctgcatggatacacttgccattgaagctgcagggactggtcccctcagacaagttattgaggagcttggaggctggcgcatctctggtaaatggacttccttaaactttaaccgaacgctgagacttctgatgagtcagtatggccatttccctttcttcagagcctacctaggacctcatcctgcctctccacacacaccagtcatccagatagaccagccagagtttgatgttcccctcaagcaagatcaagaacagaagatctatgcccagatctttcgggaatacctgacttacctgaatcagctgggaaccttgctgggaggagacccaagcaaggtgcaagaacactcttccttgtcaatctccatcacttcacggctgttccagtttctgaggcccctggagcagcggcgggcacagggcaagctcttccagatggtcactatcgaccagctcaaggaaatggcccccgccatcgactggttgtcctgcttgcaagcgacattcacaccgatgtccctgagcccttctcagtccctcgtggtccatgacgtggaatatttgaaaaacatgtcacaactggtggaggagatgctgctaaagcagagggactttctgcagagccacatgatcttagggctggtggtgaccctttctccagccctggacagtcaattccaggaggcacgcagaaagctcagccagaaactgcgggaactgacagagcaaccacccatgcctgcccgcccacgatggatgaagtgcgtggaggagacaggcacgttcttcgagcccacgctggcggctttgtttgttcgtgaggcctttggcccgagcacccgaagtgctgccatgaaattattcactgcgatccgggatgccctcatcactcgcctcagaaaccttccctggatgaatgaggagacccagaacatggcccaggacaaggttgctcaactgcaggtggagatgggggcttcagaatgggccctgaagccagagctggcccgacaagaatacaacgatatacagcttggatcgagcttcctgcagtctgtcctgagctgtgtccggtccctccgagctagaattgtccagagcttcttgcagcctcacccccaacacaggtggaaggtgtccccttgggacgtcaatgcttactattcggtatctgaccatgtggtagtctttccagctggactcctccaacccccattcttccaccctggctatcccagagccgtgaactttggcgctgctggcagcatcatggcccacgagctgttgcacatcttctaccagctcttactgcctgggggctgcctcgcctgtgacaaccatgccctccaggaagctcacctgtgcctgaagcgccattatgctgcctttccattacctagcagaacctccttcaatgactccctcacattcttagagaatgctgcagacgttggggggctagccatcgcgctgcaggcatacagcaagaggctgttacggcaccatggggagactgtcctgcccagcctggacctcagcccccagcagatcttctttcgaagctatgcccaggtgatgtgtaggaagcccagcccccaggactctcacgacactcacagccctccacacctccgagtccacgggcccctcagcagcaccccagcctttgccaggtatttccgctgtgcacgtggtgctctcttgaacccctccagccgctgccagctctggtaacttggttaccaaagatgccacagcacagaaatatcgaccaacacctccctggtcacatccatggaatcagagcaagatttcctttctgcttctgttccaaaaataaaagctggcacttggcttccgcttgtctcttaa

SEQ ID NO: 10747 - DNA, 705 bp, Homo sapiens
  source 1..705: mol_type = unassigned DNA
ccggtccctccgagctagaattgtccagagcttcttgcagcctcacccccaacacaggtggaaggtgtccccttgggacgtcaatgcttactattcggtatctgaccatgtggtagtctttccagctggactcctccaacccccattcttccaccctggctatcccagaacctccttcaatgactccctcacattcttagagaatgctgcagacgttggggggctagccatcgcgctgcaggcatacagcaagaggctgttacggcaccatggggagactgtcctgcccagcctggacctcagcccccagcagatcttctttcgaagctatgcccaggtaggcagcggccacctcccgccacagcttgctttatgtcagttgaacgccttattactgaagctcatggaagtcccctcttcagacactccgtcaaataccccaaaccctcttctgcagatgtcctcactgttatcttttctcttccctccctaccccttggaatcacccctcagatgactacaggttcttctacctagttcagcacccccacaactcaaaaggtagaaaaaactctattcccaagttcctccaggagaggaggagaccaacttttttttcctctcatacccccaaaatacagatgccttaaaaatgagcctgtggttgggcacagtggctcacacctgtaatcctggcactctagg

SEQ ID NO: 10748 - DNA, 351 bp, Homo sapiens
  source 1..351: mol_type = unassigned DNA
tgccatgctcctgggagctgattcagtctgtggtaccacccacatcctcacctaggcagcaccaaccctatgttctcttgctgtatgttctcttgtcccattttcaacagtactgcctgggggctgcctcgcctgtgacaaccatgccctccaggaagctcacctgtgcctgaagcgccattatgctgcctttccattacctagcagaacctccttcaatgactccctcacattcttagagaatgctgcagacgttggggggctagccatcgcgctgcaggcatacagcaagaggctgttacggcaccatggggagactgtcctgcccagcctggacctcagcccccagca

SEQ ID NO: 10749 - DNA, 501 bp, Homo sapiens
  source 1..501: mol_type = unassigned DNA
ttcctttctccacagatcctttagttgctttagttgagctgctcctctagcagcagctccagcccaggcagctccttggggccaagcccttttccaagggtcagaagctgtgggcagggccaggctgaggcctctcctgatcctgtccccctgtccctggacctcactcccacaggccatgaaattattcactgcgatccgggatgccctcatcactcgcctcagaaaccttccctggatgaatgaggagacccagaacatggcccaggacaaggttgctcaactgcaggtggagatgggggcttcagaatgggccctgaagccagagctggcccgacaagaatacaacgatatacagcttggatcgagcttcctgcagtctgtcctgagctgtgtccggtccctccgagctagaattgtccagagcttcttgcagcctcacccccaacacaggtggaaggtgtccccttgggacgtcaatgcttactattcggtatctga

SEQ ID NO: 10750 - DNA, 1856 bp, Homo sapiens
  source 1..1856: mol_type = unassigned DNA
agtgccccttctccaggatcaaggaactggggcggggggtgtttcctggaccccagtcctccgaatcagctcctagagtggaaccaggaaggattctggagccacagaagatagacagatggaaggtggggaccaaagtgaggaagagccgagggaacgcagccaggcaggtggaatgggaactctctggagccaagagagcactccagaagagaggctgcccgtggaagggagcaggccatgggcagtggccaggcgggtgctgacagctatcctgattttgggcctgctcctttgtttttctgtgcttttgttctacaacttccagaactgtggccctcgcccctgtgagacatctgtgtgtttggatctccgggatcattacctggcctctgggaacacaagtgtggccccctgcaccgacttcttcagctttgcctgtggaagggccaaagagaccaataattcttttcaggagcttgccacaaagaacaaaaaccgacttcggagaatactggaggtccagaattcctggcacccaggctctggggaggagaaagccttccagttctacaactcctgcatggatacacttgccattgaagctgcagggactggtcccctcagacaagttattgaggagcttggaggctggcgcatctctggtaaatggacttccttaaactttaaccgaacgctgagacttctgatgagtcagtatggccatttccctttcttcagagcctacctaggacctcatcctgcctctccacacacaccagtcatccagatagaccagccagagtttgatgttcccctcaagcaagatcaagaacagaagatctatgcccagatctttcgggaatacctgacttacctgaatcagctgggaaccttgctgggaggagacccaagcaaggtgcaagaacactcttccttgtcaatctccatcacttcacggctgttccagtttctgaggcccctggagcagcggcgggcacagggcaagctcttccagatggtcactatcgaccagctcaaggaaatggcccccgccatcgactggttgtcctgcttgcaagcgacattcacaccgatgtccctgagcccttctcagtccctcgtggtccatgacgtggaatatttgaaaaacatgtcacaactggtggaggagatgctgctaaagcagagggactttctgcagagccacatgatcttagggctggtggtgaccctttctccagccctggacagtcaattccaggaggcacgcagaaagctcagccagaaactgcgggaactgacagagcaaccacccatggaggcttttgaaaccccaggatgatgcctcctagaggccttgctgtcaaattcaataggcaataacatgaaggatttactcagccaggctcatgagaccagctctgaggaagctgtgcttttcttgtactgatcggtgatgtgcatcaccctaagggatagtaaacagatgaaacccagaaagtccagtcaaaagagcaccctctgggaatgaagatctagtgaagactggggagacagatgaggaaagagtcctgaacaggagccactcattccagctttgtctccatagcctgcccgcccacgatggatgaagtgcgtggaggagacaggcacgttcttcgagcccacgctggcggctttgtttgttcgtgaggcctttggcccgagcacccgaagtgctgtatgtgagagctcttcccagcccacatccctccaccccttcctacccaaagcagccttccctcttctattaactttgactttctcagtggtgtgtgtgattggggaattgggcagtcagagaagggccactg

SEQ ID NO: 10751 - DNA, 417 bp, Homo sapiens
  source 1..417: mol_type = unassigned DNA
ggtccagaattcctggcacccaggctctggggaggagaaagccttccagttctacaactcctgcatggatacacttgccattgaagctgcagggactggtcccctcagacaagttattgaggagcttggaggctggcgcatctctggtaaatggacttccttaaactttaaccgaacgctgagacttctgatgagtcagtatggccatttccctttcttcagagcctacctaggacctcatcctgcctctccacacacaccagtcatccagaccagccagagtttgatgttcccctcaagcaagatcaagaacagaagatctatgcccagatctttcgggaatacctgacttacctgaatcagctgggaaccttgctgggaggagacccaagcaaggtgcaagaacactcttccttg

SEQ ID NO: 10752 - DNA, 649 bp, Homo sapiens
  source 1..649: mol_type = unassigned DNA
gaactggggcggggggtgtttcctggaccccagtcctccgaatcagctcctagagtggaaccaggaaggattctggagccacagaagatagacagatggaaggtggggaccaaagtgaggaagagccgagggaacgcagccaggcaggtggaatgggaactctctggagccaagagagcactccagaagagaggctgcccgtggaagggagcaggccatgggcagtggccaggcgggtgctgacagctatcctgattttgggcctgctcctttgtttttctgtgcttttgttctacaacttccagaactgtggccctcgcccctgtgagacatctgtgtgtttggatctccgggatcattacctggcctctgggaacacaagtgtggccccctgcaccgacttcttcagctttgcctgtggaagggccaaagagaccaataattcttttcaggagcttgccacaaagaacaaaaaccgacttcggagaatactggaggtccagaattcctggcacccaggctctggggaggagaaagccttccagttctacaactcctgcatggatacacttgccattgaagctgcagggactggtcccctcagacaagttattgaggagatctttcgggaatacctgacttacctgaa

SEQ ID NO: 10753 - DNA, 786 bp, Homo sapiens
  source 1..786: mol_type = unassigned DNA
agaagtgccccttctccaggatcaaggaactggggcggggggtgtttcctggaccccagtcctccgaatcagctcctagagtggaaccaggaaggattctggagccacagaagatagacagatggtggggaccaaagtgaggaagagccgagggaacgcagccaggcaggtggaatgggaactctctggagccaagagagcactccagaagagaggctgcccgtggaagggagcaggccatgggcagtggccaggcgggtgctgacagctatcctgattttgggcctgctcctttgtttttctgtgcttttgttctacaacttccagaactgtggccctcgcccctgtgagacatctgtgtgtttggatctccgggatcattacctggcctctgggaacacaagtgtggccccctgcaccgacttcttcagctttgcctgtggaagggccaaagagaccaataattcttttcaggagcttgccacaaagaacaaaaaccgacttcggagaatactggaggtccagaattcctggcacccaggctctggggaggagaaagccttccagttctacaactcctgcatggatacacttgccattgaagctgcagggactggtcccctcagacaagttattgaggagcttggaggctggcgcatctctggtaaatggacttccttaaactttaaccgaacgctgagacttctgatgagtcagtatggccatttccctttcttcagagcctacctaggacctcatcctgcctctccacacacaccagtcatc

SEQ ID NO: 10754 - DNA, 556 bp, Homo sapiens
  source 1..556: mol_type = unassigned DNA
gcaaaagtcctgcccccactggaggggagggaatgaaggtggggaccaaagtgaggaagagccgagggaacgcagccaggcaggtggaatgggaactctctggagccaagagagcactccagaagagaggctgcccgtggaagggagcaggccatgggcagtggccaggcgggtgctgacagctatcctgattttgggcctgctcctttgtttttctgtgcttttgttctacaacttccagaactgtggccctcgcccctgtgagacatctgtgtgtttggatctccgggatcattacctggcctctgggaacacaagtgtggccccctgcaccgacttcttcagctttgcctgtggaagggccaaagagaccaataattcttttcaggagcttgccacaaagaacaaaaaccgacttcggagaatactggaggtccagaattcctggcacccaggctctggggaggagaaagccttccagttctacaactcctgcatggatacacttgccattgaagctgcagggactggtcccctcagacaagttattgaggag

SEQ ID NO: 10755 - DNA, 2812 bp, Homo sapiens; identical to SEQ ID NO: 10746
  source 1..2812: mol_type = unassigned DNA

SEQ ID NO: 10756 - DNA, 705 bp, Homo sapiens; identical to SEQ ID NO: 10747
  source 1..705: mol_type = unassigned DNA

SEQ ID NO: 10757 - DNA, 351 bp, Homo sapiens; identical to SEQ ID NO: 10748
  source 1..351: mol_type = unassigned DNA

SEQ ID NO: 10758 - DNA, 501 bp, Homo sapiens; identical to SEQ ID NO: 10749
  source 1..501: mol_type = unassigned DNA

SEQ ID NO: 10759 - DNA, 1856 bp, Homo sapiens; identical to SEQ ID NO: 10750
  source 1..1856: mol_type = unassigned DNA

SEQ ID NO: 10760 - DNA, 417 bp, Homo sapiens; identical to SEQ ID NO: 10751
  source 1..417: mol_type = unassigned DNA

SEQ ID NO: 10761 - DNA, 649 bp, Homo sapiens; identical to SEQ ID NO: 10752
  source 1..649: mol_type = unassigned DNA

SEQ ID NO: 10762 - DNA, 786 bp, Homo sapiens; identical to SEQ ID NO: 10753
  source 1..786: mol_type = unassigned DNA

SEQ ID NO: 10763 - DNA, 556 bp, Homo sapiens; identical to SEQ ID NO: 10754
  source 1..556: mol_type = unassigned DNA

SEQ ID NO: 10764 - DNA, 734 bp, Homo sapiens
  source 1..734: mol_type = unassigned DNA
tgtacaacttattttaaaaatggtataaaattaaatgtaccattatatactcaccatagatttaaatgctgtttaaagagtccaaatggtatcgagctgcttgagtggcacgttaaactacgcaaaaccaaatcttgtttaaaaactggttttaaaataactactggattttctgaaaaagatgtgatcagttttcatcttgttgagcgttttttcactagtgcaactttggattttttatgagaattttggtaccttaatgaacacctcgctccatgctggaagcactaagcacaaagcttttaaagactttctggcttgactaattgaggtcgcactcgccaaggctgaggatgtgtaacccttaaacggtcttcattttcaaaggaaatgtcagccatcttggaatgtcacaggaactggttgaacacctgaagcaaacaaaggaactttccttctatttatgcactgcttaagaaccgtcaactcaccaacgtgcctagtcagcaaatgaatccacttgggaacttgaaaaacatcttaattaatttttgtttgcataattttgtgttctgtgacatgtttttattatatggtatgcttttaatttggagaacctacttttttaaaaaacggaaagaaaatctatcttattttgttgactcccaataacaaaaagagaatgatttgtatagtagttaataaaggctgcctattgaaatctcttctacttt

SEQ ID NO: 10765 - DNA, 793 bp, Homo sapiens
  source 1..793: mol_type = unassigned DNA
ataacagctatagcaccccagcccaaagtggtgctgattactatgattacggacatggactcagtgaggagacttatgattcctacgggcaagaagagtggactaactcaagacacaaggcaccttcagcgaggacagcaaagggcgtctacagagaccagccatatggcagatactgattgtactgtctgatgttgtgaaatagccaatctccaccagtcctgtatactgttcaaagaaatgtcagccatcttggaatgtcacaggaactggttgaacacctgaagcaaacaaaggaactttccttctatttatgcactgcttaagaaccgtcaactcaccaacgtgcctagtcagcaaatgaatccacttgggaacttgaaaaacatcttaattaatttttgtttgcataattttgtgttctgtgacatgtttttattatatggtatgcttttaatttggagaacctacttttttaaaaaacggaaagaaaatctatcttattttgttgactcccaataacaaaaagagaatgatttgtatagtagttaataaaggctgcctattgaaatctcttctactttaaacctagaaaaacaaagtcttgttatttcagcacagctctaaattgtatacacttgaaaaccatgtacagctgcaactcactgcaagaagtcaagattctacacatattccacatttgaaaatgatttatccatctcagttatggactaataaatatgaaagtattatgcaaaaagtattctgtcacataaaaggttaattataaagg

SEQ ID NO: 10766 - DNA, 197 bp, Homo sapiens
  source 1..197: mol_type = unassigned DNA
actatgatgatggatatggcactgcttatgatgaacagagttatgattcctatgataacagctatagcaccccagcccaaagtaatttttttctatgaacaatccctttttaaataaatcagaatgcttaaaatctgaatggatggaacttaaaactactttgttgaaacatcaacctgggcagaaaaaaaaaaaaa

SEQ ID NO: 10767 - DNA, 396 bp, Homo sapiens
  source 1..396: mol_type = unassigned DNA
gtcaatctgttatttggatccacaagtatacatcttatttaaggtacttatcttagagtaatgactatgatgatggatatggcactgcttatgatgaacagagttatgattcctatgataacagctatagcaccccagcccaaagtggtgctgattactatgattacggacatggactcagtgaggagacttatgattcctacgggcaagaagagtggactaactcaagacacaaggcaccttcagcgaggacagcaaagggcgtctacagagaccagccatatggcagatactgattgtactgtctgatgttgtgaaatagccaatctccaccagtcctgtatactgttcaaagtaatttttttctatgaacaatccctttttaaataaatcaga

SEQ ID NO: 10768 - DNA, 712 bp, Homo sapiens
  source 1..712: mol_type = unassigned DNA
tgatgagatcaggcaagcacagctccaggagttaacatatttgaatggtggttcagaaaatgcagatgttccagtggttcgagggaaacccaccttgcgtacaagaggtgtaccagccccagcaataaccaggggaaggggaggagttacagcccggccagttggagttgtagtaccacgagggacgccaactcccagaggagtcctgtccacccgagggccagtgagtcggggaagaggacttctcactcccagagcaagaggagtccccccaactgggtacagacctccaccgccacccccgacacaagagacttatggagaatatgactatgatgatggatatggcactgcttatgatgaacagagttatgattcctatgataacagctatagcaccccagcccaaaggaaatgtcagccatcttggaatgtcacaggaactggttgaacacctgaagcaaacaaaggaactttccttctatttatgcactgcttaagaaccgtcaactcaccaacgtgcctagtcagcaaatgaatccacttgggaacttgaaaaacatcttaattaatttttgtttgcataattttgtgttctgtgacatgtttttattatatggtatgcttttaatttggagaacctacttttttaaaaaacggaaagaaaatctatcttattttgttgactcccaataacaaaaagagaatgatt

SEQ ID NO: 10769 - DNA, 585 bp, Homo sapiens
  source 1..585: mol_type = unassigned DNA
gtttacaagaagaaaccttgacaaaaatgtccatccttgggaaaggttccatgagagacaaggccaaggaagaagagttgaggaaaagtggagaagcgaagtacttccatctcaatgatgatctccatgttctcattgaagtgtttgccccacctgcagaagcttatgccaggatgggacatgctttggaagaaatcaaaaagttcctcatccctgattataatgatgagatcaggcaagcacagctccaggagttaacatatttgaatggtggttcagaaaatgcagatgttccagtggttcgagggaaacccaccttgcgtacaagaggtgtaccagccccagcaataaccaggggaaggggaggagttacagcccggccagttggagttgtagtaccacgagggacgccaactcccagaggagtcctgtccacccgagggccagtgagtcggggaagaggacttctcactcccagagcaagaggagtccccccaactgggtacagacctccaccgccacccccgacacaagagacttatggagaatatggcaagaagagtggactaactcaagacacaaggc

SEQ ID NO: 10770 - DNA, 1066 bp, Homo sapiens
  source 1..1066: mol_type = unassigned DNA
tttgggtccacgtggcaattctctgaagcgtttacaagaagaaaccttgacaaaaatgtccatccttgggaaaggttccatgagagacaaggccaaggaagaagagttgaggaaaagtggagaagcgaagtacttccatctcaatgatgatctccatgttctcattgaagtgtttgccccacctgcagaagcttatgccaggatgggacatgctttggaagaaatcaaaaagttcctcatccctgattataatgatgagatcaggcaagcacagctccaggagttaacatatttgaatggtggttcagaaaatgcagatgttccagtggttcgagggaaacccaccttgcgtacaagaggtgtaccagccccagcaataaccaggggaaggggaggagttacagcccggccagttggagttgtagtaccacgagggacgccaactcccagaggagtcctgtccacccgagggccagtgagtcggggaagaggacttctcactcccagagcaagaggagtccccccaactgggtacagacctccaccgccacccccgacacaagagacttatggagaatattggtgctgattactatgattacggacatggactcagtgaggagacttatgattcctacgggcaagaagagtggactaactcaagacacaaggcaccttcagcgaggacagcaaagggcgtctacagagaccagccatatggcagatactgattgtactgtctgatgttgtgaaatagccaatctccaccagtcctgtatactgttcaaagtaatttttttctatgaacaatccctttttaaataaatcagaatgcttaaaatctgaatggatggaacttaaaactactttgttgaaacatcaacctgggcagaaaaaaaaaaaaaaagacatgtaaaattttgttatttccagtctgtatatgaaaaaataggtcatcaaaaggaaaaaaaataactttgattaactagtgttaaacaaaaaataggtttactaaatatgttaatctattcttttaacataagcctcacctttcattttaaaggtt

SEQ ID NO: 10771 - DNA, 5466 bp, Homo sapiens
  source 1..5466: mol_type = unassigned DNA
cagggctgctcaggtaaaattcaacattgtcaccgtgcttaacactttatctgatattttattcttcataatgaccctgaaatgtaatgacttttataagccacacctggtaaatgtgaaactgaaaactagaaatgctgagaaacctctgtgttcacattgctgataagatgagggcactgtatgatgacaccccttcagaacccatagcaagtgggacatcaggaggtgttatgggactaatggcaaagaagacaactatgccgctttcgttgtttattatttatatcatccagaaagtccaaaatacatactcagtccatctattagttaggccttttcttgttgcgaataccgactatgactagcttgaaggattttttctttaaaaaaaggaaaacaacaaaaaacaacaacaaaaaaaacctaccttagggtgtcctatagaatgcatggaggaattgaacttgcaaactgaaaagacagtaataagagctttaagcctaagaaattgtctctggcttttccctctagcagtattttttacctgggccacaattgacattttaaacaggacactttggtgaagggcaggaccatctgtttctgatgcctgacataggcctttgcccctgagtcccagtagtgaccctagtcattgtgacaaccaaataaacatgctaaatatttccaagtgtcccacagggaggtgatgcaacatctgcagtttgagaacctgccggagcagccaagcacattaccattattgtgactcagctctcaggacattcagtatccacataatcagttctaaatttcagaatctcttgatttccagtcaaaggccaattcctcggccgatctgggtggcctgggccaggtcatgccattttcagtgtggtggctcccttggtagccttctcccacttgccataggttctgaaggggatgcagttccacagtaggtgggtcttgttcagataaaattgtatatatccacaacagttaaattcatctatttattacttactaatttggcatcaagtatacgcaatctgctggctgctctcttaggtgattttcgtatactttcttacttaattcatgcgacctgcacccacagtaggtaatatggtctgtgttttgtggatgaaaagtctgagactcaggagggttaatttgactcaggagatagaagtaacttgactagggagatacatggttgaacagagttgagaggaaaaagaagggaaaataaaagtgtttctggttgtcacagtattcatttatgtactttttgtgaacaaaacactaacagaagttaagtggaaaaaagaaacccctaaaggtatataaaagtcaataaaatgctttttctttttacctggaatgctgtcaagtgacctttaatcaatcatgtctttctatggacttcagattcttctgtataaaattagatgtttggattggatgatttctaaagcctcttaatttttatcacttgggaactatttgacctaacttaagatgcaagataaatatgactatttgactatcaaaatttatttttgctccatttttgaaacctattaaaataaatataaatgaaataaaaaggcataaatttatgaagatcacaagaatgggagagtgggacaacaataggcaaatgatgtctgtaaaattttggtgcttgcaaaataaatagataaatggtaacggagaccagagaaagcagaaccctgagctggcaggcagggaagaattcaaccagaaacatgttcattactgtgggaaaactcgagagcgctcaggaattgtaggtagcaattactgtaaaggtggatttatggattagaactgacaagagtagacttggttgaaaggtataaggagtagttagatcacaagatgttctcatcttataaaaccaggcatctgcccctccacactctagcaaaagaccagaggtttcctgaagaggttgaattggacaactgtgaggctccaagatacagacagatacaactgaggatgagggtgagatatcacactgaaaatgagggaattgtttcctttaaataaaagtgtgcgtgcttagtgatgggattcccagtattctggcagctgggcttacacctcctcttaagagattgaggagtttctcttcagggaagtgcctcgcccaagtgaaacgaaatacagatactgatatttcagtagctcttgataaaataactcagctgccatatttgcaatgaagactgctgttgccaagtcccatgtatgaaaacagaacttccagtcagcaatccggaatttttaagaacagatagtagaggattaccagacatctgaggaaatcccataaaagagaaagagaccagctcacaaaatggggaaggggagactcttggaagaagcagatactttaaactccaaggcggggacaggctgctgtcatcaatatcttcagaaaggatgagaaatttaattgtttccacaaagtgtaacaaaacaccataaagaagaaacagctgtaagacagtcgtattcgtaaatatttgatagcaaaaatgaaggaatcagtaggtatataggaaatgtatttaaattctccagaaagtaaaacagagagacacaaacaataaaagagaaatttagagatagcagtccatctcaggatgtccaatgtccaaataataggattttcagaaagataataaaagtaaatggggagctagaatcaggtgggattgtatgggtcagtacccagtcccattcttgctccccatttactccactttttcactctgtagtagtattagactttgtaaactctgcaagtataacttttatgtttaaaaatattttactgaaaatggcattttaacaagcaaaaaataattacatgcaaagattaaaaatatatatttgagttttggttgaagaccaataaaattaaaagttggaaggaaaaaataccacttagattttttaaagtgctaagtacttatttcaggaaaattacttcaattgccatagttaggtaaattgaggaacaattttctctcagaaacagcagcacagcagtggcatggatcacggaagaagtggctgctatgtgagtttgtaatcaagcatcttgccaaggcgaacagcttcctccctgctgattttctatttggtagcaagaagtagtcatgatttaccttaattatagcaaggcttttaaaaattgtgtgaaattcctgatttttttttgtattcaagatgtatgtattgagtgtctgttatctggcaagcattgttttaaacagtttatttatattgacttatttaatccttagaacagccctatgaaggtaggtcttgttgtcattcctattttacagatgaagaaactgaggtatagacaggttaggtaacttgcccaggtttactcagctggcaaacagaaaaggctaggttttaaatcatggtagtctggttacagaaggcatacccttaattaattcattactattctgcttgttaaggaaccacagacatctaagtttaaataaattgcccacattcccatagctagttattttagaagcaatgaattttattgtaaagcttccatcagccaccgaatgcttaagaactcatctaagccagtcctctcattgattgaataactagatccaagggctgaccgggtagaagaaccaggtattccacagtgaccagtctagtgcatgttagagacacctggtgtcattttttctcacctacattctcatcctagaagtgttcattcatggtgatatttaacgtgtgctgaaactgttaggatagcaaccgaggaattctgggaaattagcttcattcacagttgtggaatatagccatcactgaaataaatataaagaaatatatcagggttttttattttacgtttagccccgttttatgtggtgtgtgggaaacatcatattttaatgcatgtagcaggagcttaaatatttgccattaatcaatgatgtgtagcacactacagtgtttcttaacattcaagattaagaaattgctttcacatataaatgctacaaatttggttgtttatttttcctagttcaactttgtggggaaacttttgggtccacgtggcaattctctgaagcgtttacaagaagaaaccttgacaaaaatgtccatccttgggaaaggttccatgagagacaaggccaaggaagaagagttgaggaaaagtggagaagcgaagtacttccatctcaatgatgatctccatgttctcattgaagtgtttgccccacctgcagaagcttatgccaggatgggacatgctttggaagaaatcaaaaagttcctcatccctgttagtaccatttttcttgatagttaacttgtactttaaagtctttgctttaatccttgatacttcttgtctgtaactgttatttgcatagctccttttctgctgtaaagctgtatggacatcacctcaagtagaccttacattgtccttgtaaattactgggcattattccttatgtatatatgaggtgttagaatttcaggaagatttaataatatggccaaggttacatggctaaaaaacttgcatagcacaatcactagttcaggttttgaaacgcttttcctacgattttatgtgacactgtacaacttttttgttctccaacacaaaaccattagtgcctctgtgtgccatgcacagtgcttggtgttggcatgcagacttgaataaaagcagtccctgccctcatttagtataatataatacgtaatttagaggaaaagagaaacatcaacagatgatttcagtacaacatgataaatataacagacataaccataatgagcccagaggggatgggctatttagctagcttctgccaagtattttggatgttttgttaaaaattgactgtctgttttaaccctttcagacaccttcacattgctaaggatgtgacaatttaaagggaatacatctctacctctgttacgaaagttgatttaagtcttttgtgtgatttgtatgctcttgataaaaggacttattatgtcatttgcatgctcttgataaaaagaatcgtaaagcatcaacactttggctctgcagacaatttattttagagaagctgacacatctgccaagtagttctctggataagactgtctttggttatcccaggttagtttggtggattgacttacatactacagcacatgtactgtgattatattatctgtgaggaaaacaattattatatttatagggaaaggatatttaaatcacttttgcctttaaaaagccaggacatagaattgcattaagtatgtaataacctgggaactgaaatggctagtattttctttagttcccatgagcaaatatgacaatctatttcttcttttagtttaaaaacaaaa

SEQ ID NO: 10772 - DNA, 679 bp, Homo sapiens
  source 1..679: mol_type = unassigned DNA
attggtggctggcttgaggttcggaatagtggtgaagggagtccttgccattttcacacgactccagccagctcagggtgtgaaagatcctaggaagtactgcgggtcagggatacagagatttctggaggcacgcctacccgggacagtgttcccctggctttttcctcctgtggcttcctgaatcatctgctggcatgcacgaaatagaaaagtttcaaaaaggagaaggcaaggatgaagaaaagtacatcgatgtggtgattaataagaacatgaagctgggacagaaagtgttaattcccgtaaaacagttccctaagttcaactttgtggggaaacttttgggtccacgtggcaattctctgaagcgtttacaagaagaaaccttgacaaaaatgtccatccttgggaaaggttccatgagagacaaggccaaggaagaagagttgaggaaaagtggagaagcgaagtacttccatctcaatgatgatctccatgttctcattgaagtgtttgccccacctgcagaagcttatgccaggatgggacatgctttggaagaaatcaaaaagttcctcatccctgattataatgatgagatcaggcaagcacagctccaggagttaacatatttgaatggtggttcagaaaatgcagatgttccagtggttcgagg

SEQ ID NO: 10773 - DNA, 1243 bp, Homo sapiens
  source 1..1243: mol_type = unassigned DNA
cctgtgtccaggctccaacagccctggcggggcagtcagccctcccaggggatgggcagcccatgccaagccttgcaggctggcccttggagaagtcagtaggggagaagaggccggcaaaagagcaccgttccggagggcgttgggttgggtgaccctcattggtggctggcttgaggttcggaatagtggtgaagggagtccttgccattttcacacgactccagccagctcagggtgtgaaagatcctaggaagtactgcgggtcagggatacagagatttctggaggcacgcctacccgggacagtgttcccctggctttttcctcctgtggcttcctgaatcatctgctggcatgcacgaaatagaaaagtttcaaaaaggagaaggcaaggatgaagaaaagtacatcgatgtggtgattaataagaacatgaagctgggacagaaagtgttaattcccgtaaaacagttccctaaggactatgatgatggatatggcactgcttatgatgaacagagttatgattcctatgataacagctatagcaccccagcccaaagtggtgctgattactatgattacggacatggactcagtgaggagacttatgattcctacgggcaagaagagtggactaactcaagacacaaggcaccttcagcgaggacagcaaagggcgtctacagagaccagccatatggcagatactgattgtactgtctgatgttgtgaaatagccaatctccaccagtcctgtatactgttcaaagtaatttttttctatgaacaatccctttttaaataaatcagaatgcttaaaatctgaatggatggaacttaaaactactttgttgaaacatcaacctgggcagaaaaaaaaaaaaaaagacatgtaaaattttgttatttccagtctgtatatgaaaaaataggtcatcaaaaggaaaaaaaataactttgattaactagtgttaaacaaaaaataggtttactaaatatgttaatctattcttttaacataagcctcacctttcattttaaaggtttccatagaatttagttattttatctttcagccatatgctagtttttttttctcttgccaacatgcgtaaaaagggaagccaattacaagtgcaaataatgtggtattcttttgtaactcaagtcttgaaatgttctgtagtgttaagcaaagtctcctcttgcttgatactaaataaacttttgaaagaaa

SEQ ID NO: 10774 - DNA, 889 bp, Homo sapiens
  source 1..889: mol_type = unassigned DNA
ggtcgtttgcacggggacctgggaggctgtgggacacctaggggaagaccctgatgtgaattttggggacttggaaggagaaggctggggcgcatggaaatagaaaagtttcaaaaaggagaaggcaaggatgaagaaaagtacatcgatgtggtgattaataagaacatgaagctgggacagaaagtgttaattcccgtaaaacagttccctaagttcaactttgtggggaaacttttgggtccacgtggcaattctctgaagcgtttacaagaagaaaccttgacaaaaatgtccatccttgggaaaggttccatgagagacaaggccaaggaagaagagttgaggaaaagtggagaagcgaagtacttccatctcaatgatgatctccatgttctcattgaagtgtttgccccacctgcagaagcttatgccaggatgggacatgctttggaagaaatcaaaaagttcctcatccctgattataatgatgagatcaggcaagcacagctccaggagttaacatatttgaatggtggttcagaaaatgcagatgttccagtggttcgagggaaacccaccttgcgtacaagaggtgtaccagccccagcaataaccaggggaaggggaggagttacagcccggccagttggagttgtagtaccacgagggacgccaactcccagaggagtcctgtccacccgagggccagtgagtcggggaagaggacttctcactcccagagcaagaggagtccccccaactgggtacagacctccaccgccacccccgacacaagagacttatggagaatatgactatgatgatggatatggcactgcttatgatgaacagagttatgattcctatgataacagctatagcaccc

SEQ ID NO: 10775 - DNA, 1977 bp, Homo sapiens
  source 1..1977: mol_type = unassigned DNA
gagtgcgcggggcggcgcgcggcgtgcaggtcgcagctgtggctcgggtgctggcaggtgctggcgggactggcggggatcgccgtggactgcctcaggggcgccgcagcccgctcggcccgagggcccgcctaaccgcgccgcccgcgcccgctcctcctcggcccgcgcccggagcgcgggggccgccggcgctgggtactcggcggccaccggggatcggggctgagcggtcggttcccgcccccgtgccgccgccgccgccttccggccgaccgcccggcttggccgctgctgccgcgtctggcccccgggtccccgccgctgggggcgcgggcggggtcgggggttgccgggcgccgccccccgtgcgcctggagtccacatcccgggcccggcggccggcgagcatggaggagaagtacctgcccgagctgatggcggagaaggactccctggacccctccttcacgcacgccctgcgcctggtgaaccaagaaatagaaaagtttcaaaaaggagaaggcaaggatgaagaaaagtacatcgatgtggtgattaataagaacatgaagctgggacagaaagtgttaattcccgtaaaacagttccctaagttcaactttgtggggaaacttttgggtccacgtggcaattctctgaagcgtttacaagaagaaaccttgacaaaaatgtccatccttgggaaaggttccatgagagacaaggccaaggaagaagagttgaggaaaagtggagaagcgaagtacttccatctcaatgatgatctccatgttctcattgaagtgtttgccccacctgcagaagcttatgccaggatgggacatgctttggaagaaatcaaaaagttcctcatccctgattataatgatgagatcaggcaagcacagctccaggagttaacatatttgaatggtggttcagaaaatgcagatgttccagtggttcgagggaaacccaccttgcgtacaagaggtgtaccagccccagcaataaccaggggaaggggaggagttacagcccggccagttggagttgtagtaccacgagggacgccaactcccagaggagtcctgtccacccgagggccagtgagtcggggaagaggacttctcactcccagagcaagaggagtccccccaactgggtacagacctccaccgccacccccgacacaagagacttatggagaatatgactatgatgatggatatggcactgcttatgatgaacagagttatgattcctatgataacagctatagcaccccagcccaaagtggtgctgattactatgattacggacatggactcagtgaggagacttatgattcctacgggcaagaagagtggactaactcaagacacaaggcaccttcagcgaggacagcaaagggcgtctacagagaccagccatatggcagatactgattgtactgtctgatgttgtgaaatagccaatctccaccagtcctgtatactgttcaaagtaatttttttctatgaacaatccctttttaaataaatcagaatgcttaaaatctgaatggatggaacttaaaactactttgttgaaacatcaacctgggcagaaaaaaaaaaaaaaagacatgtaaaattttgttatttccagtctgtatatgaaaaaataggtcatcaaaaggaaaaaaaataactttgattaactagtgttaaacaaaaaataggtttactaaatatgttaatctattcttttaacataagcctcacctttcattttaaaggtttccatagaatttagttattttatctttcagccatatgctagtttttttttctcttgccaacatgcgtaaaaagggaagccaattacaagtgcaaataatgtggtattcttttgtaactcaagtcttgaaatgttctgtagtgttaagcaaagtctcctcttgcttgatactaaataaacttttgaaagaaa

SEQ ID NO: 10776 - DNA, 4153 bp, Homo sapiens
  source 1..4153: mol_type = unassigned DNA
tcgcccagaggttgacagaggaaggtgggtgggggcctagagcggtgggtcatggctggctgcacccgcaaactcactcacctccgtaaacggatccatcgccccaggcgtcggactacgagacgatggaaacggtggttcaaattcaggaagagaaaaggagagaaaaggccaagacctaatcataaggcagtggcaagaagagctaaactcaagttctctacctcagaaaagcttcactggcctgagcaagaacttgctaagaagtctattctaaatgcagaagattcattgatcattgacaacaaaagaagcatttcacatttgtcctcgggagtgctaaaagacattttcacaactggaaccagtagttacaatgtcctactacagagcaaggaggaaaaaaagtatcattcacaaaaacagtcttcctccacctactccaaaagatgtagaaaacccagcaaatctcctaacacttctcgtagcaaagatcctcgcaggatgaaagccctggtgcctgtgacaagcagtggtacttggtactgcctggagaggcggcctgctgtttttgtcactagttcagtgtcaagtcctgtaaagtttacacatgatatctctgttacagggaatggcatagtactgccacctaaacccaaaagcaaggtcaagtggtgccatttctccactcttccaaagccaaagcctcagctgtctagaagctttgaaaagggagatgacttttctgggaagaaattttgtatattgactgctataaaacccaccaacttagagaaagaaaaactgagattcttcaaatctgactatacctacaatcctcagtttgagtatgccaatcctgctctgccaagcgtattagctaagcatagccacgcatctgaccgatttcttaagcagattgtagttcatctcactgaggacctgctttcccgagcgtcaatgacagtagtaaatggatgtccgactctgactatcaatgtgtccactgcacgtgagcattggctggagggaatgctgaggcatgaaataggtacacattattttcgaggtattaacaacctccagcagccatggaacagttggactggacgtaaaaaacatgagctaaagccaaataatcccacagaggaaggactagcaagcattcacagtgttctgtttagaaaagacccttttttatggagggctgccctcctctactacactgtttatcaagccagccaaatgtctttttgtgaactctttaaagatattggcaggtttgtcaaggaccccaatacaagatgggattattgtgtacgggccaagaggggatggactgatacttcccaaccagggtgttttagtaaagaccaggtatacttggatggaattcttcaaatcctccgatacagagataccatagacttccatctgctgactgctctcgggaaggtttcttatgaagatgtggatcgcttaaaaggattggcagttaccgaaaacatgagggtccctcatttcctgcaggaccatggccgatatatggaacacttagagaagatcatggaagtgaatgaactgactgacagggaactgaaagatcttatatagtaattagcgttctggcaaacatagctaagctatgcctccatgtatattaccagttaggtgcagttagcaccagaagatttataaaagaagaaagactacttgtgttttctgaagaagggtcttcagtattcagcggaatttttaggttaagtacagatcttaaactatttccctaaaatgtttctataggttgcagggggaagttattcctattttctgaatctcgacagagtcagatgaaaatactactgctgagcatttttgaagactcttggtcaaattgcatgataaatttctgcctgagcagtaagcactggcctagtgcttctgcctaaatatggaggtcagctccaactggagactggctgaattccattgctgttcagactccaaagttatattttatttgataaataatggtaattattctcctttgaaaaattagttttgtgttgctccaaaaagctagctatatatctcagctttcttatttcttttatatgttgagggattttaaagggagaggaaaagcaatttgaaaatttttcattaagtgttttattttaacattattgtttcaccttatcagcttataggaactaaattagagaatcacctctttttgtccggttatctcttaactatgttttcatttgctgaaacatattgtacccttttaaattttttacagagttttaacgtcttttccactgcatcctttataaaaataagtacaaattccagagaggttttcctacacaaatacaaaataattggggaagggctactcaccttttttatgaaacagaatatgtaacaagcagaggacaaatagactgacctggttaaacgtaggttctggatgttgatgggtagcacctgcagtaaacttgaccatgctctgaaaaaagaaatttctgggtattgatggtttataaagccagctttgtgctattggttcagtatattttatcaaatctttgacttcatcaacccagtaatgacatagtttaaattttaaaatgagagttctgttttgctgtatttctcctgctagcctagctttgtattttatcatcagcttcagtatatacttgtatatatatacctggattcaaatggttcttcatacaacttaatgatcagaaagaatgctgctgtaaacaccccactcaagattgctgctggaatttctacccaaagctgtctgagagtttatctttacctcagtgcaggcttaaataatggtgctaatactggtagatatatactgtgaagcctggttcacattcatgctagaaaatgattttgggaaatcttttataggagaggttacatgatttttctctttcacatatctagaaggacttgcctcaaagaagaatgttgcagcaaacaggatatactctagctggtgcccaaaggttcttgcaaaaccatgaatcttgcttttagcagtaaagggccagacactttggagcattgaaaggccttagcccctgctccccaactacgtgccatgctgggtagtgtgtatcctgtacatctgtgtgccaggctggggcagactgtgccaatgctcaccgaacactagaatctgctcttacacctctagcatgtatctcgttgtagcagagttgtgcactttctcagcattgtgtagtgttttctaattgcatctaaaaacttatcaaaagtgattgtgaaaacagtgtcttagaagtataaacagaaatggcaatatttatgtcctgtgattcaagcccaaaggttataaattcaactttcacagggaatagcactgctaatcttactttatgatttaaatataaaggaaaatcacagcagccttaatttcctgttggtcggatcatttgcagcagttctagttcctgacttttaaaatggatgaaattttctctttgtctgatttggaaaaggaactgcttttttgccttactgctttggtataaggatgaaaaacatgagcactctgcagacaaaatgaccttaaatcacattgattaagatattttaaaagttagcagtgaaccaaaagtagtttcagattagcagaaataaagagctttaagttttaaaagttgagattgaatatttaatgaaagtttattaattctttttccaggaatagcagtaaggtcagtttttttccctaaaataaaaagttttaataaacagaaaattatagcaacagtacttaggagaatagttgaagattgtattaattttaattataatagttatttgtcataggctattgatgattagaatttcattagttttgtccactataattttaaaaatagttgtgtcaaatacaaattctggtaaactgttaggttttaacaccagacagtattcaaaggaaattaatgtttgcaaacataaatccatagtcttcatttctttatattgtcacctttgtaaaagtgtttaaaatttgtattgtttgttttgtatatctttgggcatcttgtgtctagctataataaaaagaaacggtgccaaggttctcaga

SEQ ID NO: 10777 - DNA, 4132 bp, Homo sapiens
  source 1..4132: mol_type = unassigned DNA
gagtgccgggaagggctggccgcggcgggggtgcggggcggaccggggtcccgccgcccggggctcaggtaatggtagccaccggctgggcgcgccgctcgggactccaccctgcgccccgaccccttcggggcgcgcaggaggcgctcgcgaaaaacctgtggagggaagagagaaatcggccccttatcctttcgtcacttattatcaaaaagcttcactggcctgagcaagaacttgctaagaagtctattctaaatgcagaagattcattgatcattgacaacaaaagaagcatttcacatttgtcctcgggagtgctaaaagacattttcacaactggaaccagtagttacaatgtcctactacagagcaaggaggaaaaaaagtatcattcacaaaaacagtcttcctccacctactccaaaagatgtagaaaacccagcaaatctcctaacacttctcgtagcaaagatcctcgcaggatgaaagccctggtgcctgtgacaagcagtggtacttggtactgcctggagaggcggcctgctgtttttgtcactagttcagtgtcaagtcctgtaaagtttacacatgatatctctgttacagggaatggcatagtactgccacctaaacccaaaagcaaggtcaagtggtgccatttctccactcttccaaagccaaagcctcagctgtctagaagctttgaaaagggagatgacttttctgggaagaaattttgtatattgactgctataaaacccaccaacttagagaaagaaaaactgagattcttcaaatctgactatacctacaatcctcagtttgagtatgccaatcctgctctgccaagcgtattagctaagcatagccacgcatctgaccgatttcttaagcagattgtagttcatctcactgaggacctgctttcccgagcgtcaatgacagtagtaaatggatgtccgactctgactatcaatgtgtccactgcacgtgagcattggctggagggaatgctgaggcatgaaataggtacacattattttcgaggtattaacaacctccagcagccatggaacagttggactggacgtaaaaaacatgagctaaagccaaataatcccacagaggaaggactagcaagcattcacagtgttctgtttagaaaagacccttttttatggagggctgccctcctctactacactgtttatcaagccagccaaatgtctttttgtgaactctttaaagatattggcaggtttgtcaaggaccccaatacaagatgggattattgtgtacgggccaagaggggatggactgatacttcccaaccagggtgttttagtaaagaccaggtatacttggatggaattcttcaaatcctccgatacagagataccatagacttccatctgctgactgctctcgggaaggtttcttatgaagatgtggatcgcttaaaaggattggcagttaccgaaaacatgagggtccctcatttcctgcaggaccatggccgatatatggaacacttagagaagatcatggaagtgaatgaactgactgacagggaactgaaagatcttatatagtaattagcgttctggcaaacatagctaagctatgcctccatgtatattaccagttaggtgcagttagcaccagaagatttataaaagaagaaagactacttgtgttttctgaagaagggtcttcagtattcagcggaatttttaggttaagtacagatcttaaactatttccctaaaatgtttctataggttgcagggggaagttattcctattttctgaatctcgacagagtcagatgaaaatactactgctgagcatttttgaagactcttggtcaaattgcatgataaatttctgcctgagcagtaagcactggcctagtgcttctgcctaaatatggaggtcagctccaactggagactggctgaattccattgctgttcagactccaaagttatattttatttgataaataatggtaattattctcctttgaaaaattagttttgtgttgctccaaaaagctagctatatatctcagctttcttatttcttttatatgttgagggattttaaagggagaggaaaagcaatttgaaaatttttcattaagtgttttattttaacattattgtttcaccttatcagcttataggaactaaattagagaatcacctctttttgtccggttatctcttaactatgttttcatttgctgaaacatattgtacccttttaaattttttacagagttttaacgtcttttccactgcatcctttataaaaataagtacaaattccagagaggttttcctacacaaatacaaaataattggggaagggctactcaccttttttatgaaacagaatatgtaacaagcagaggacaaatagactgacctggttaaacgtaggttctggatgttgatgggtagcacctgcagtaaacttgaccatgctctgaaaaaagaaatttctgggtattgatggtttataaagccagctttgtgctattggttcagtatattttatcaaatctttgacttcatcaacccagtaatgacatagtttaaattttaaaatgagagttctgttttgctgtatttctcctgctagcctagctttgtattttatcatcagcttcagtatatacttgtatatatatacctggattcaaatggttcttcatacaacttaatgatcagaaagaatgctgctgtaaacaccccactcaagattgctgctggaatttctacccaaagctgtctgagagtttatctttacctcagtgcaggcttaaataatggtgctaatactggtagatatatactgtgaagcctggttcacattcatgctagaaaatgattttgggaaatcttttataggagaggttacatgatttttctctttcacatatctagaaggacttgcctcaaagaagaatgttgcagcaaacaggatatactctagctggtgcccaaaggttcttgcaaaaccatgaatcttgcttttagcagtaaagggccagacactttggagcattgaaaggccttagcccctgctccccaactacgtgccatgctgggtagtgtgtatcctgtacatctgtgtgccaggctggggcagactgtgccaatgctcaccgaacactagaatctgctcttacacctctagcatgtatctcgttgtagcagagttgtgcactttctcagcattgtgtagtgttttctaattgcatctaaaaacttatcaaaagtgattgtgaaaacagtgtcttagaagtataaacagaaatggcaatatttatgtcctgtgattcaagcccaaaggttataaattcaactttcacagggaatagcactgctaatcttactttatgatttaaatataaaggaaaatcacagcagccttaatttcctgttggtcggatcatttgcagcagttctagttcctgacttttaaaatggatgaaattttctctttgtctgatttggaaaaggaactgcttttttgccttactgctttggtataaggatgaaaaacatgagcactctgcagacaaaatgaccttaaatcacattgattaagatattttaaaagttagcagtgaaccaaaagtagtttcagattagcagaaataaagagctttaagttttaaaagttgagattgaatatttaatgaaagtttattaattctttttccaggaatagcagtaaggtcagtttttttccctaaaataaaaagttttaataaacagaaaattatagcaacagtacttaggagaatagttgaagattgtattaattttaattataatagttatttgtcataggctattgatgattagaatttcattagttttgtccactataattttaaaaatagttgtgtcaaatacaaattctggtaaactgttaggttttaacaccagacagtattcaaaggaaattaatgtttgcaaacataaatccatagtcttcatttctttatattgtcacctttgtaaaagtgtttaaaatttgtattgtttgttttgtatatctttgggcatcttgtgtctagctataataaaaagaaacggtgccaaggttctca

SEQ ID NO: 10778 - DNA, 4241 bp, Homo sapiens
  source 1..4241: mol_type = unassigned DNA
agtttcctagcaaccggcggagcggctacgtcacggtggcaggttctaagcgctgctgggcaccgtaaggccgccgtgtgtaccttccagtagctacgggctggtggaagcgctgctcacagtcagtgtcggtacgtcttcgtccgcccttaccctccttatcctgctccaggtagcggagagccgcctcccgccgcgcccccgccaccgaggcccgggtcagaggctagaggccgcccgcccctgcgcggccctttcccctgagcccgcggagcccgccgccccgggcctcggggcgacgatgctggagtccattcgcgtgacggaaaagcttcactggcctgagcaagaacttgctaagaagtctattctaaatgcagaagattcattgatcattgacaacaaaagaagcatttcacatttgtcctcgggagtgctaaaagacattttcacaactggaaccagtagttacaatgtcctactacagagcaaggaggaaaaaaagtatcattcacaaaaacagtcttcctccacctactccaaaagatgtagaaaacccagcaaatctcctaacacttctcgtagcaaagatcctcgcaggatgaaagccctggtgcctgtgacaagcagtggtacttggtactgcctggagaggcggcctgctgtttttgtcactagttcagtgtcaagtcctgtaaagtttacacatgatatctctgttacagggaatggcatagtactgccacctaaacccaaaagcaaggtcaagtggtgccatttctccactcttccaaagccaaagcctcagctgtctagaagctttgaaaagggagatgacttttctgggaagaaattttgtatattgactgctataaaacccaccaacttagagaaagaaaaactgagattcttcaaatctgactatacctacaatcctcagtttgagtatgccaatcctgctctgccaagcgtattagctaagcatagccacgcatctgaccgatttcttaagcagattgtagttcatctcactgaggacctgctttcccgagcgtcaatgacagtagtaaatggatgtccgactctgactatcaatgtgtccactgcacgtgagcattggctggagggaatgctgaggcatgaaataggtacacattattttcgaggtattaacaacctccagcagccatggaacagttggactggacgtaaaaaacatgagctaaagccaaataatcccacagaggaaggactagcaagcattcacagtgttctgtttagaaaagacccttttttatggagggctgccctcctctactacactgtttatcaagccagccaaatgtctttttgtgaactctttaaagatattggcaggtttgtcaaggaccccaatacaagatgggattattgtgtacgggccaagaggggatggactgatacttcccaaccagggtgttttagtaaagaccaggtatacttggatggaattcttcaaatcctccgatacagagataccatagacttccatctgctgactgctctcgggaaggtttcttatgaagatgtggatcgcttaaaaggattggcagttaccgaaaacatgagggtccctcatttcctgcaggaccatggccgatatatggaacacttagagaagatcatggaagtgaatgaactgactgacagggaactgaaagatcttatatagtaattagcgttctggcaaacatagctaagctatgcctccatgtatattaccagttaggtgcagttagcaccagaagatttataaaagaagaaagactacttgtgttttctgaagaagggtcttcagtattcagcggaatttttaggttaagtacagatcttaaactatttccctaaaatgtttctataggttgcagggggaagttattcctattttctgaatctcgacagagtcagatgaaaatactactgctgagcatttttgaagactcttggtcaaattgcatgataaatttctgcctgagcagtaagcactggcctagtgcttctgcctaaatatggaggtcagctccaactggagactggctgaattccattgctgttcagactccaaagttatattttatttgataaataatggtaattattctcctttgaaaaattagttttgtgttgctccaaaaagctagctatatatctcagctttcttatttcttttatatgttgagggattttaaagggagaggaaaagcaatttgaaaatttttcattaagtgttttattttaacattattgtttcaccttatcagcttataggaactaaattagagaatcacctctttttgtccggttatctcttaactatgttttcatttgctgaaacatattgtacccttttaaattttttacagagttttaacgtcttttccactgcatcctttataaaaataagtacaaattccagagaggttttcctacacaaatacaaaataattggggaagggctactcaccttttttatgaaacagaatatgtaacaagcagaggacaaatagactgacctggttaaacgtaggttctggatgttgatgggtagcacctgcagtaaacttgaccatgctctgaaaaaagaaatttctgggtattgatggtttataaagccagctttgtgctattggttcagtatattttatcaaatctttgacttcatcaacccagtaatgacatagtttaaattttaaaatgagagttctgttttgctgtatttctcctgctagcctagctttgtattttatcatcagcttcagtatatacttgtatatatatacctggattcaaatggttcttcatacaacttaatgatcagaaagaatgctgctgtaaacaccccactcaagattgctgctggaatttctacccaaagctgtctgagagtttatctttacctcagtgcaggcttaaataatggtgctaatactggtagatatatactgtgaagcctggttcacattcatgctagaaaatgattttgggaaatcttttataggagaggttacatgatttttctctttcacatatctagaaggacttgcctcaaagaagaatgttgcagcaaacaggatatactctagctggtgcccaaaggttcttgcaaaaccatgaatcttgcttttagcagtaaagggccagacactttggagcattgaaaggccttagcccctgctccccaactacgtgccatgctgggtagtgtgtatcctgtacatctgtgtgccaggctggggcagactgtgccaatgctcaccgaacactagaatctgctcttacacctctagcatgtatctcgttgtagcagagttgtgcactttctcagcattgtgtagtgttttctaattgcatctaaaaacttatcaaaagtgattgtgaaaacagtgtcttagaagtataaacagaaatggcaatatttatgtcctgtgattcaagcccaaaggttataaattcaactttcacagggaatagcactgctaatcttactttatgatttaaatataaaggaaaatcacagcagccttaatttcctgttggtcggatcatttgcagcagttctagttcctgacttttaaaatggatgaaattttctctttgtctgatttggaaaaggaactgcttttttgccttactgctttggtataaggatgaaaaacatgagcactctgcagacaaaatgaccttaaatcacattgattaagatattttaaaagttagcagtgaaccaaaagtagtttcagattagcagaaataaagagctttaagttttaaaagttgagattgaatatttaatgaaagtttattaattctttttccaggaatagcagtaaggtcagtttttttccctaaaataaaaagttttaataaacagaaaattatagcaacagtacttaggagaatagttgaagattgtattaattttaattataatagttatttgtcataggctattgatgattagaatttcattagttttgtccactataattttaaaaatagttgtgtcaaatacaaattctggtaaactgttaggttttaacaccagacagtattcaaaggaaattaatgtttgcaaacataaatccatagtcttcatttctttatattgtcacctttgtaaaagtgtttaaaatttgtattgtttgttttgtatatctttgggcatcttgtgtctagctataataaaaagaaacggtgccaag

SEQ ID NO: 10779 - DNA, 2441 bp, Homo sapiens
  source 1..2441: mol_type = unassigned DNA
aggttctaagcgctgctgggcaccgtaaggccgccgtgtgtaccttccagtagctacgggctggtggaagcgctgctcacagtcagtgtcggtacgtcttcgtccgcccttaccctccttatcctgctccaggtagcggagagccgcctcccgccgcgcccccgccaccgaggcccgggtcagaggctagaggccgcccgcccctgcgcggccctttcccctgagcccgcggagcccgccgccccgggcctcggggcgacgatgctggagtccattcgcgtgacggaaaagcttcactggcctgagcaagaacttgctaagaagtctattctaaatgcagaagattcattgatcattgacaacaaaagaagcatttcacatttgtcctcgggagtgctaaaagacattttcacaactggaaccagtagttacaatgtcctactacagagcaaggaggaaaaaaagtatcattcacaaaaacagtcttcctccacctactccaaaagatgtagaaaacccagcaaatctcctaacacttctcgtagcaaagatcctcgcaggatgaaagccctggtgcctgtgacaagcagtggtacttggtactgcctggagaggcggcctgctgtttttgtcactagttcagtgtcaagtcctgtaaagtttacacatgatatctctgttacagggaatggcatagtactgccacctaaacccaaaagcaaggtcaagtggtgccatttctccactcttccaaagccaaagcctcagctgtctagaagctttgaaaagggagatgacttttctgggaagaaattttgtatattgactgctataaaacccaccaacttagagaaagaaaaactgagattcttcaaatctgactatacctacaatcctcagtttgagtatgccaatcctgctctgccaagcgtattagctaagcatagccacgcatctgaccgatttcttaagcagtctatcaatattatggaactgactttacagaaatatggaagttatgaaaaatttgaacaagccactggtggtagcttgctctctaaaactcgaatctggagtcacgttaggaagtacatgatgaaggaaggctgcctaggggagattgtagttcatctcactgaggacctgctttcccgagcgtcaatgacagtagtaaatggatgtccgactctgactatcaatgtgtccactgcacgtgagcattggctggagggaatgctgaggcatgaaataggtacacattattttcgaggtattaacaacctccagcagccatggaacagttggactggacgtaaaaaacatgagctaaagccaaataatcccacagaggaaggactagcaagcattcacagtgttctgtttagaaaagacccttttttatggagggctgccctcctctactacactgtttatcaagccagccaaatgtctttttgtgaactctttaaagatattggcaggtttgtcaaggaccccaatacaagatgggattattgtgtacgggccaagaggggatggactgatacttcccaaccagggtgttttagtaaagaccaggtatacttggatggaattcttcaaatcctccgatacagagataccatagacttccatctgctgactgctctcgggaaggtttcttatgaagatgtggatcgcttaaaaggattggcagttaccgaaaacatgagggtccctcatttcctgcaggaccatggccgatatatggaacacttagagaagatcatggaagtgaatgaactgactgacagggaactgaaagatcttatatagtaattagcgttctggcaaacatagctaagctatgcctccatgtatattaccagttaggtgcagttagcaccagaagatttataaaagaagaaagactacttgtgttttctgaagaagggtcttcagtattcagcggaatttttaggttaagtacagatcttaaactatttccctaaaatgtttctataggttgcagggggaagttattcctattttctgaatctcgacagagtcagatgaaaatactactgctgagcatttttgaagactcttggtcaaattgcatgataaatttctgcctgagcagtaagcactggcctagtgcttctgcctaaatatggaggtcagctccaactggagactggctgaattccattgctgttcagactccaaagttatattttatttgataaataatggtaattattctcctttgaaaaattagttttgtgttgctccaaaaagctagctatatatctcagctttcttatttcttttatatgttgagggattttaaagggagaggaaaagcaatttgaaaatttttcattaagtgttttattttaacattattgtttcaccttatcagcttataggaactaaattagagaatcacctctttttgt

SEQ ID NO: 10780 - DNA, 1952 bp, Homo sapiens
  source 1..1952: mol_type = unassigned DNA
aagcgcagcgcgcgcggaccccgggggcagtttcctagcaaccggcggagcggctacgtcacggtggcaggttctaagcgctgctgggcaccgtaaggccgccgtgtgtaccttccagtagctacgggctggtggaagcgctgctcacagtcagtgtcgaaaagcttcactggcctgagcaagaacttgctaagaagtctattctaaatgcagaagattcattgatcattgacaacaaaagaagcatttcacatttgtcctcgggagtgctaaaagacattttcacaactggaaccagtagttacaatgtcctactacagagcaaggaggaaaaaaagtatcattcacaaaaacagtcttcctccacctactccaaaagatgtagaaaacccagcaaatctcctaacacttctcgtagcaaagatcctcgcaggatgaaagccctggtgcctgtgacaagcagtggtacttggtactgcctggagaggcggcctgctgtttttgtcactagttcagtgtcaagtcctgtaaagtttacacatgatatctctgttacagggaatggcatagtactgccacctaaacccaaaagcaaggtcaagtggtgccatttctccactcttccaaagccaaagcctcagctgtctagaagctttgaaaagggagatgacttttctgggaagaaattttgtatattgactgctataaaacccaccaacttagagaaagaaaaactgagattcttcaaatctgactatacctacaatcctcagtttgagtatgccaatcctgctctgccaagcgtattagctaagcatagccacgcatctgaccgatttcttaagcagtctatcaatattatggaactgactttacagaaatatggaagttatgaaaaatttgaacaagccactggtggtagcttgctctctaaaactcgaatctggagtcacgttaggaagtacatgatgaaggaaggctgcctaggggagattgtagttcatctcactgaggacctgctttcccgagcgtcaatgacagtagtaaatggatgtccgactctgactatcaatgtgtccactgcacgtgagcattggctggagggaatgctgaggcatgaaataggtacacattattttcgaggtattaacaacctccagcagccatggaacagttggactggacgtaaaaaacatgagctaaagccaaataatcccacagaggaaggactagcaagcattcacagtgttctgtttagaaaagacccttttttatggagggctgccctcctctactacactgtttatcaagccagccaaatgtctttttgtgaactctttaaagatattggcaggtttgtcaaggaccccaatacaagatgggattattgtgtacgggccaagaggggatggactgatacttcccaaccagggtgttttagtaaagaccaggtatacttggatggaattcttcaaatcctccgatacagagataccatagacttccatctgctgactgctctcgggaaggtttcttatgaagatgtggatcgcttaaaaggattggcagttaccgaaaacatgagggtccctcatttcctgcaggaccatggccgatatatggaacacttagagaagatcatggaagtgaatgaactgactgacagggaactgaaagatcttatatagtaattagcgttctggcaaacatagctaagctatgcctccatgtatattaccagttaggtgcagttagcaccagaagatttataaaagaagaaagactacttgtgttttctgaagaagggtcttcagtattcagcggaatttttaggttaagtacagatcttaaactatttccctaaaatgtttctataggttgcagggggaagttattcctattttctgaatctcgacagagtcagatgaaaatactactgctgagcatttttg

SEQ ID NO: 10781 - DNA, 956 bp, Homo sapiens
  source 1..956: mol_type = unassigned DNA
ccgccgtgtgtaccttccagtagctacgggctggtggaagcgctgctcacagtcagtgtcgtctatcaatattatggaactgactttacagaaatatggaagttatgaaaaatttgaacaagccactggtggtagcttgctctctaaaactcgaatctggagtcacgttaggaagtacatgatgaaggaaggctgcctaggggagattgtagttcatctcactgaggacctgctttcccgagcgtcaatgacagtagtaaatggatgtccgactctgactatcaatgtgtccactgcacgtgagcattggctggagggaatgctgaggcatgaaataggtacacattattttcgaggtattaacaacctccagcagccatggaacagttggactggacgtaaaaaacatgagctaaagccaaataatcccacagaggaaggactagcaagcattcacagtgttctgtttagaaaagacccttttttatggagggctgccctcctctactacactgtttatcaagccagccaaatgtctttttgtgaactctttaaagatattggcaggtttgtcaaggaccccaatacaagatgggattattgtgtacgggccaagaggggatggactgatacttcccaaccagggtgttttagtaaagaccaggtatacttggatggaattcttcaaatcctccgatacagagataccatagacttccatctgctgactgctctcgggaaggtttcttatgaagatgtggatcgcttaaaaggattggcagttaccgaaaacatgagggtccctcatttcctgcaggaccatggccgatatatggaacacttagagaagatcatggaagtgaatgaactgactgacagggaactgaaagatcttatatagtaattagcgttctggcaaacatagctaagctatgcctccatgtatattaccagtt

SEQ ID NO: 10782 - DNA, 560 bp, Homo sapiens
  source 1..560: mol_type = unassigned DNA
aaccggcggagcggctacgtcacggtggcaggttctaagcgctgctgggcaccgtaaggccgccgtgtgtaccttccagtagctacgggctggtggaagcgctgctcacagtcagtgtcgattgtagttcatctcactgaggacctgctttcccgagcgtcaatgacagtagtaaatggatgtccgactctgactatcaatgtgtccactgcacgtgagcattggctggagggaatgctgaggcatgaaataggtacacattattttcgaggtattaacaacctccagcagccatggaacagttggactggacgtaaaaaacatgagctaaagccaaataatcccacagaggaaggactagcaagcattcacagtgttctgtttagaaaagacccttttttatggagggctgccctcctctactacactgtttatcaagccagccaaatgtctttttgtgaactctttaaagatattggcaggtttgtcaaggaccccaatacaagatgggattattgtgtacgggccaagaggggatggactgatacttcccaaccagg

SEQ ID NO: 10783 - DNA, 741 bp, Homo sapiens
  source 1..741: mol_type = unassigned DNA
attctcagggtgtgacggtcctgatattcaactttcttttgttcctgagtttgaaaacacaccccaattatttccatgtcttagccttgaggatgaagagaaaatttaactgtctgaagactgacagttgccagcactatctcagctcctcctaaacttctatcaatattatggaactgactttacagaaatatggaagttatgaaaaatttgaacaagccactggtggtagcttgctctctaaaactcgaatctggagtcacgttaggaagtacatgatgaaggaaggctgcctaggggagattgtagttcatctcactgaggacctgctttcccgagcgtcaatgacagtagtaaatggatgtccgactctgactatcaatgtgtccactgcacgtgagcattggctggagggaatgctgaggcatgaaataggtacacattattttcgaggtattaacaacctccagcagccatggaacagttggactggacgtaaaaaacatgagctaaagccaaataatcccacagaggaaggactagcaagcattcacagtgttctgtttagaaaagacccttttttatggagggctgccctcctctactacactgtttatcaagccagccaaatgtctttttgtgaactctttaaagatattggcaggtttgtcaaggaccccaatacaagatgggattattgtgtacgggccaagaggggatggactgatacttcccaaccag

SEQ ID NO: 10784 - DNA, 578 bp, Homo sapiens
  source 1..578: mol_type = unassigned DNA
agtttcctagcaaccggcggagcggctacgtcacggtggcaggttctaagcgctgctgggcaccgtaaggccgccgtgtgtaccttccagtagctacgggctggtggaagcgctgctcacagtcagtgtcggtacgtcttcgtccgcccttaccctccttatcctgctccaggtagcggagagccgcctcccgccgcgcccccgccaccgaggcccgggtcagaggctagaggccgcccgcccctgcgcggccctttcccctgagcccgcggagcccgccgccccgggcctcggggcgacgatgctggagtccattcgcgtgacggattgtagttcatctcactgaggacctgctttcccgagcgtcaatgacagtagtaaatggatgtccgactctgactatcaatgtgtccactgcacgtgagcattggctggagggaatgctgaggcatgaaataggtacacattattttcgaggtattaacaacctccagcagccatggaacagttggactggacgtaaaaaacatgagctaaagccaaataatcccacagaggaaggactagcaagcattcac

SEQ ID NO: 10785 - DNA, 603 bp, Homo sapiens
  source 1..603: mol_type = unassigned DNA
acgtcacggtggcaggttctaagcgctgctgggcaccgtaaggccgccgtgtgtaccttccagtagctacgggctggtggaagcgctgctcacagtcagtgtcggtacgtcttcgtccgcccttaccctccttatcctgctccaggtagcggagagccgcctcccgccgcgcccccgccaccgaggcccgggtcagaggctagaggccgcccgcccctgcgcggccctttcccctgagcccgcggagcccgccgccccgggcctcggggcgacgatgctggagtccattcgcgtgacggtctatcaatattatggaactgactttacagaaatatggaagttatgaaaaatttgaacaagccactggtggtagcttgctctctaaaactcgaatctggagtcacgttaggaagtacatgatgaaggaaggctgcctaggggagattgtagttcatctcactgaggacctgctttcccgagcgtcaatgacagtagtaaatggatgtccgactctgactatcaatgtgtccactgcacgtgagcattggctggagggaatgctgaggcatgaaataggtacacattattttcgaggtattaaca

SEQ ID NO: 10786 - DNA, 2865 bp, Homo sapiens
  source 1..2865: mol_type = unassigned DNA
ggccgccgtgtgtaccttccagtagctacgggctggtggaagcgctgctcacagtcagtgtcggtacgtcttcgtccgcccttaccctccttatcctgctccaggtagcggagagccgcctcccgccgcgcccccgccaccgaggcccgggtcagaggctagaggccgcccgcccctgcgcggccctttcccctgagcccgcggagcccgccgccccgggcctcggggcgacgatgctggagtccattcgcgtgacgggtgagtgccgggaagggctggccgcggcgggggtgcggggcggaccggggtcccgccgcccggggctcaggtaatggtagccaccggctgggcgcgccgctcgggactccaccctgcgccccgaccccttcggggcgcgcaggaggcgctcgcgaaaaacctgtggagggaagagagaaatcggccccttatcctttcgtcacttattatcaaaaagcttcactggcctgagcaagaacttgctaagaagtctattctaaatgcagaagattcattgatcattgacaacaaaagaagcatttcacatttgtcctcgggagtgctaaaagacattttcacaactggaaccagtagttacaatgtcctactacagagcaaggaggaaaaaaagtatcattcacaaaaacagtcttcctccacctactccaaaagatgtagaaaacccagcaaatctcctaacacttctcgtagcaaagatcctcgcaggatgaaagccctggtgcctgtgacaagcagtggtacttggtactgcctggagaggcggcctgctgtttttgtcactagttcagtgtcaagtcctgtaaagtttacacatgatatctctgttacagggaatggcatagtactgccacctaaacccaaaagcaaggtcaagtggtgccatttctccactcttccaaagccaaagcctcagctgtctagaagctttgaaaagggagatgacttttctgggaagaaattttgtatattgactgctataaaacccaccaacttagagaaagaaaaactgagattcttcaaatctgactatacctacaatcctcagtttgagtatgccaatcctgctctgccaagcgtattagctaagcatagccacgcatctgaccgatttcttaagcaggtaaaatgccatttcaatagtggtagttcatttttatgtactaaaacaattatctgtgatcttataagcaaaaacaaagacatttaaaaatattcaaattatttctatgttatggttaattcccactcaggacatgtaaatgtgcgacaagacgagtattacctgtatataaactccattgcattcatcaaaatttataatctgttatataggctctttgtgacaggaagcaattatattaggaagacagcttcagattctggttctaagctttcatgtgggagttacaaacttgtggccaatttagccgcctacagacaagtgttgggtagcccacactacgtttttgttttctaattgatttctttgttgttttttgtttttttctgagacagattcttgctctttgcccaggttggagtgtagtggcacgatcttggctcactgcaacctctgccttctgggttcaagtgattcttgtgtctcagcctcccgagtagctgggactacaggcacccgccaccatacccagctaatttttgtaattttagtgaagatggggtttcaccattttggccaggctggtcttgaactcctgatctccagtgatttgcccgccttggcctcccaaagtgttgaggttgcaggtgtgagccaccatgcctggcctctaattgattttttaatgtcttagatggagcatgcaatccctggttcttcctattgtgttaaattcctggcttgcttaggctccggtaagtagtttgggaaccgaagcttgattcttgtccatgaacttgttaatgcttcactgaaattgttaatcatcatcaaataaatatttaagcacttattcaaagataaaaataatgggattttcaaaattatcttcaagtttagcaaattatgatgtgaacgttatgaataatacttttaaattgctcactttaagcccttagcagttttgtgttttacagggctataatacatttcagaacctcatttaagcatttgagaagaaattagctaatgtttatctgcagggcatagttttgagatcataaaggccgacaatatttggtcaaattaactttgttcaggtttttataatatattagcttcaacttggcattgtcagtgactgaaaatctgtttgtaggataggtaaaactgcatggttctctcgcctgtggtgcatgtcctattttagcatttttgctgataatagttatttggtcttgcggccagcagatattttgctgtttattatagataacatggaatctggccagtcttttgaagccattatgtaaaacttaattatgtaaagccattatgtaaagattaaaataattttaatcatggtatttactttcctttgttagggtctctttgcttctgcttctgtattctttaatgggtatttgctttttaaaaaatgtgctgagattgtgctaaaaattgtgattcaaattgataacttactaatataaagtggcacttctggatgggagaaggcagcattaacatagtgattacataatccactcttaggctgtactacttccacattgtaaaatggagtaaagaaaatacctactttaggagattattttgataattaaatgagagaatgcttagtgcatatattgcagttatcatcgtgcttggcacctacaaagcactaataaagaggttagctgtta

SEQ ID NO: 10787 - DNA, 1509 bp, Homo sapiens
  source 1..1509: mol_type = unassigned DNA
aggttctaagcgctgctgggcaccgtaaggccgccgtgtgtaccttccagtagctacgggctggtggaagcgctgctcacagtcagtgtcggtacgtcttcgtccgcccttaccctccttatcctgctccaggtagcggagagccgcctcccgccgcgcccccgccaccgaggcccgggtcagaggctagaggccgcccgcccctgcgcggccctttcccctgagcccgcggagcccgccgccccgggcctcggggcgacgatgctggagtccattcgcgtgacggaaaagcttcactggcctgagcaagaacttgctaagaagtctattctaaatgcagaagattcattgatcattgacaacaaaagaagcatttcacatttgtcctcgggagtgctaaaagacattttcacaactggaaccagtagttacaatgtcctactacagagcaaggaggaaaaaaagtatcattcacaaaaacagtcttcctccacctactccaaaagatgtagaaaacccagcaaatctcctaacacttctcgtagcaaagatcctcgcaggatgaaagccctggtgcctgtgacaagcagtggtacttggtactgcctggagaggcggcctgctgtttttgtcactagttcagtgtcaagtcctgtaaagtttacacatgatatctctgttacagggaatggcatagtactgccacctaaacccaaaagcaaggtcaagtggtgccatttctccactcttccaaagccaaagcctcagctgtctagaagctttgaaaagggagatgacttttctgggaagaaattttgtatattgactgctataaaacccaccaacttagagaaagaaaaactgagattcttcaaatctgactatacctacaatcctcagtttgagtatgccaatcctgctctgccaagcgtattagctaagcatagccacgcatctgaccgatttcttaagcaggtaaaatgccatttcaatagtggtagttcatttttatgtactaaaacaattatctgtgatcttataagcaaaaacaaagacatttaaaaatattcaaattatttctatgttatggttaattcccactcaggacatgtaaatgtgcgacaagacgagtattacctgtatataaactccattgcattcatcaaaatttataatctgttatataggctctttgtgacaggaagcaattatattaggaagacagcttcagattctggttctaagctttcatgtgggagttacaaacttgtggccaatttagccgcctacagacaagtgttgggtagcccacactacgtttttgttttctaattgatttctttgttgttttttgtttttttctgagacagattcttgctctttgcccaggttggagtgtagtggcacgatcttggctcactgcaacctctgccttctgggttcaagtgattcttgtgtctcagcctcccgagtagctgggactacaggcacccgccaccatacccagct

SEQ ID NO: 10788 - DNA, 437 bp, Homo sapiens
  source 1..437: mol_type = unassigned DNA
gagcggtgggtcatggctggctgcacccgcaaactcactcacctccgtaaacggatccatcgccccaggcgtcggactacgagacgatggaaacggtggttcaaattcaggaagagaaaaggagagaaaaggccaagacctaatcataaggcagtggcaagaagagctaaactcaagttctctacctcagggaatggcatagtactgccacctaaacccaaaagcaaggtcaagtggtgccatttctccactcttccaaagccaaagcctcagctgtctagaagctttgaaaagggagatgacttttctgggaagaaattttgtatattgactgctataaaacccaccaacttagagaaagaaaaactgagattcttcaaatctgactatacctacaatcctcagtttgagtatgccaatcctgctctgccaagcgt

SEQ ID NO: 10789 - DNA, 512 bp, Homo sapiens
  source 1..512: mol_type = unassigned DNA
agtactccagtctctcccttcccttacctggccccttggtgctccttcagcatttgtgctgtctacctctcactgggtcctggtgggggtcgggctcccttctcctggggtgattgatggcctgagcctggggtcctggtagtagagacccagctggcctggggtctgctttccgacattttgcctctctcactggtcatgtatttattccatatttatatggtctacttcctgtggctgggagcagcagctcctgaaggttccgtgggggtgcagaggtggttgctgcttccagtttcccttcagacttagctgtgtgaaccccactcctatcctttggccttagttttcccatctgtaaaactcagaaacgcagttggaaagtccttattcatttagtaagcgaatatattataatatgtatagagcgccttttgtgtaagtcactggtcagaatcctcactgagctcccagtccagagagaagccagacaattaaaacagtaatgacaa

SEQ ID NO: 10790 - DNA, 2824 bp, Homo sapiens
  source 1..2824: mol_type = unassigned DNA
agctgagtgaggacctgctgtcccaggcagtgatgatggtggagaacagccggcccacattggcgatcaacctgaccggagcccgccagtactggttggagggcatgctgcggcatgagataggtcagggtgtgggtatccgggcagatgggtaggcatgaaaggggcctgggagctgggaggggtgggaaggaggggccccaataactcccctttttgtttctcccccttccctcctgaggtcggggctttcccttcctgagcagccacctcccgccctctgcttacagaggtaggccagaacatgcctgcccatgctctgggctcgctctcatctcttggtcctttcgggtatatttttctctctccacttcctctccgacttctcccaacagtgcgggcaaggctggtcaggccctgaccggccagagaaagaaccctcagggtcccaccaggccagccaccacgctggccctccagggtggatggaaggccaggtcctgggaatggacttgacttgaggacacatggcacctggtttaggaggggactggccagtttgggcaggggggtgcagggcactaaccactattcctatctgtctgtccctcttcctcgagaatcctgttgctctgggcaagagtgatttttaccgggggcatcagcatgactgttcaagatgatatgggcacccaggatgttgggcagggtggtatatgtattcttgtgcccaggagggctgggggcaatgtcagtttgggagagttcgtgcacgtgtgtgggtgcgtgggtgtagggtggggggcggatgggtgggagaggattcatgtatgtgagcctctgtggatccttgggtgcgagtccacaggaggaggagcttcacgctgcctggggctgggagagcctgtgtgcgagcctgagttcaggagcatgaggatggaagtgtcgcggccagagccccggccagatggaacagggccagggctgggctcgcaggcgggtccccgaacgccccgcccagcgccgcctcccctcgccttccccgcaggcacccactacctgcggggcgtgaacaacgcgcgccagccgtggcacaacgcggagggccggctgcggtacgggctgcggccggcgaaccccacggaggagggcctggccagcctgcacagcgtgctgttccgcaagcagccgttcctgtggcgcgctgcactgctctactacaccatccaccgcgccgcgcgcatgtccttccgtcagctcttccaggacctggagcgctacgtgcaggacgccgatgtgcgctgggagtactgcgtgcgcgccaagcgcggccagaccgacacctcgctgccaggttgtttcagcaaggaccaggtgtacctggacggcatcgtgcgcattctgcgacatcgccagaccatcgatttcccgttgctgacctcactgggcaaggtgtcctatgaggatgtggaccacctgcggccccatggggtgctggataatacccgggtgccccacttcatgcaggacttggcacgctaccggcagcagctggagcacatcatggccaccaaccggctggatgaggcggagctgggtcgcctgctacccgactgatgtccgttgagggctgcagtcagaggccctggacagaagctccagataggcccctagaacatgaagcagtttgctctgtgcgtccacggcctaggtgtttcttgggggtgttgggagggcaggagcattccttgaggaggagtggcaacatcaaagtgtttgtgtcccttgccagcctccctggggtctggggacctgcagcagcatgtctggcaaactgagtcgccctcctgcctccagctctctgttgagcagagggaaggcatgggggcaggaagagagctgagcattgatggggatgggggtggtttgggaatagaaacttgttcttgcatgagatggctttggttgtcccagtactccagtctctcccttcccttacctggccccttggtgctccttcagcatttgtgctgtctacctctcactgggtcctggtgggggtcgggctcccttctcctggggtgattgatggcctgagcctggggtcctggtagtagagacccagctggcctggggtctgctttccgacattttgcctctctcactggtcatgtatttattccatatttatatggtctacttcctgtggctgggagcagcagctcctgaaggttccgtgggggtgcggggggttggacaggacactccttcttggaaggcaccaattttcccagccccactcccattacacacacacacacacacacacacacacacacacacacacacacacacacacacacacacacacactgattcaggccttgagagtcaagcccaagagctcccttggccctgttccccactccctccactggcctctgctgttcctgtctttgctcacaccctcacagctgctctctggcagaggttggcatagcctaggagcagctgcaattgcacctgagggacaggccctagagtttggtggcccaagtcctgaacccctcttagaccaggtgaggtgcagaggtggttgctgcttccagtttcccttcagacttagctgtgtgaaccccactcctatcctttggccttagttttcccatctgtaaaactcagaaacgcagttggaaagtccttattcatttagtaagcgaatatattataatatgtatagagcgccttttgtgtaagtcactggtcagaatcctcactgagctcccagtccagagagaagccagacaattaaaacagtaatgac

SEQ ID NO: 10791 - DNA, 1977 bp, Homo sapiens
  source 1..1977: mol_type = unassigned DNA
ctctggacagttcatccatcaggcagttggcatcattgaggctgttctggagaagtttggaacctatgaacactttgaggctgccactggggggcagctgctcaccaagtgccagatatggtcgattgtgcgcaaatacatgcagaaggagggctgcgctggggaggttgtggtgcagctgagtgaggacctgctgtcccaggcagtgatgatggtggagaacagccggcccacattggcgatcaacctgaccggagcccgccagtactggttggagggcatgctgcggcatgagataggcacccactacctgcggggcgtgaacaacgcgcgccagccgtggcacaacgcggagggccggctgcggtacgggctgcggccggcgaaccccacggaggagggcctggccagcctgcacagcgtgctgttccgcaagcagccgttcctgtggcgcgctgcactgctctactacaccatccaccgcgccgcgcgcatgtccttccgtcagctcttccaggacctggagcgctacgtgcaggacgccgatgtgcgctgggagtactgcgtgcgcgccaagcgcggccagaccgacacctcgctgccaggtgtcctatgaggatgtggaccacctgcggccccatggggtgctggataatacccgggtgccccacttcatgcaggacttggcacgctaccggcagcagctggagcacatcatggccaccaaccggctggatgaggcggagctgggtcgcctgctacccgactgatgtccgttgagggctgcagtcagaggccctggacagaagctccagataggcccctagaacatgaagcagtttgctctgtgcgtccacggcctaggtgtttcttgggggtgttgggagggcaggagcattccttgaggaggagtggcaacatcaaagtgtttgtgtcccttgccagcctccctggggtctggggacctgcagcagcatgtctggcaaactgagtcgccctcctgcctccagctctctgttgagcagagggaaggcatgggggcaggaagagagctgagcattgatggggatgggggtggtttgggaatagaaacttgttcttgcatgagatggctttggttgtcccagtactccagtctctcccttcccttacctggccccttggtgctccttcagcatttgtgctgtctacctctcactgggtcctggtgggggtcgggctcccttctcctggggtgattgatggcctgagcctggggtcctggtagtagagacccagctggcctggggtctgctttccgacattttgcctctctcactggtcatgtatttattccatatttatatggtctacttcctgtggctgggagcagcagctcctgaaggttccgtgggggtgcggggggttggacaggacactccttcttggaaggcaccaattttcccagccccactcccattacacacacacacacacacacacacacacacacacacacacacacacacacacacacacacacacactgattcaggccttgagagtcaagcccaagagctcccttggccctgttccccactccctccactggcctctgctgttcctgtctttgctcacaccctcacagctgctctctggcagaggttggcatagcctaggagcagctgcaattgcacctgagggacaggccctagagtttggtggcccaagtcctgaacccctcttagaccaggtgaggtgcagaggtggttgctgcttccagtttcccttcagacttagctgtgtgaaccccactcctatcctttggccttagttttcccatctgtaaaactcagaaacgcagttggaaagtccttattcatttagtaagcgaatatattataatatgtatagagcgccttttgtgtaagtcactggtcagaatcctcactgagctcccagtccagagagaagccagacaattaaaacagtaatgac

SEQ ID NO: 10792 - DNA, 3500 bp, Homo sapiens
  source 1..3500: mol_type = unassigned DNA
gcgacggctcccgccggctgggcgtccggtggccggtgtagcagagcgggagcggcgggcggcgagcagaggagctaacaggtgggggcacggcacgcggacggacccccccaaaggccgggaggaggcgcgcgacgcgacctttcctgatctcccggagaagcctccactccattgtctcctggccccaccctccattgggcacgcccttcaccttatcccccaccacttattggctgcaggtcacgcccctcctctatttctggttccccattggctcttcaccttgtcctctccggggcttctctccgcacaggccacaccctctcatttgtcactagaccccgccttaatagtggggggctcctcccccatccatccttcattcattatgcacccagtgctgggtgcttggtacacgggggtgaatcagaccccattcctgccttcggggagttcaggggattgtgggaggacacggacctagactccaacagtgacagctctgagtaaagaagtcgccgaagcagtgggacactagacgcggggaaggcttcctggaggaagtgaggcctaaactgagccttgaagaatggttaagagtttgctccaggaatatattgcaaaggcattcttggcggaaggacccgagacgtgaaaaaaacaggcgtattctggtaatttcgaggagatggagaagtaacagcatgtgtttatcctgatggaaagagtccagtagagaggaagagattgatgatgtaggagagaggagaaatgctggaagtgagtcactgagcaggcaagggagctcagcagctggagcctctccagaggtcgacagtgtggggagttggagtgacccggctggatgtgacccccaggacagaatggtgctggactcaggggctcaggcgtatgatcaggcaccccccagcccgcctaccagtcccccatccctgcgccataggctgaagccctcagaccgagatgggccaccactgtacccctggtctcagtccctggccttgcccctggctctggcagtccccccagcgctgcagccccagcctgagcagcagccgttctcacagatgctcctgggccaccgtggccacatgcgtcgcagtgagagcacctactctgtaaatagtactggccggcgggggcgtggcaccctgggacggcctccacctggacggggacggaacccaggtgggggcaccctgcggcctgcagcctccctgcctcacattgctaagactcaaagggatgcaggccatattgccagcaagagcccctgcatgttggtggccctgcggccaaccaacatggaccgtgagcgagacaagttcttccagtcccattacacctacaatccacagtttgagtaccaggagcccatgcccacggctgtgctggaaaagtactgcgaggcctctggacagttcatccatcaggcagttggcatcattgaggctgttctggagaagtttggaacctatgaacactttgaggctgccactggggggcagctgctcaccaagtgccagatatggtcgattgtgcgcaaatacatgcagaaggagggctgcgctggggaggttgtggtgcagctgagtgaggacctgctgtcccaggcagtgatgatggtggagaacagccggcccacattggcgatcaacctgaccggagcccgccagtactggttggagggcatgctgcggcatgagataggcacccactacctgcggggcgtgaacaacgcgcgccagccgtggcacaacgcggagggccggctgcggtacgggctgcggccggcgaaccccacggaggagggcctggccagcctgcacagcgtgctgttccgcaagcagccgttcctgtggcgcgctgcactgctctactacaccatccaccgcgccgcgcgcatgtccttccgtcagctcttccaggacctggagcgctacgtgcaggacgccgatgtgcgctgggagtactgcgtgcgcgccaagcgcggccagaccgacacctcgctgccagcaaggaccaggtgtacctggacggcatcgtgcgcattctgcgacatcgccagaccatcgatttcccgttgctgacctcactgggcaaggtgtcctatgaggatgtggaccacctgcggccccatggggtgctggataatacccgggtgccccacttcatgcaggacttggcacgctaccggcagcagctggagcacatcatggccaccaaccggctggatgaggcggagctgggtcgcctgctacccgactgatgtccgttgagggctgcagtcagaggccctggacagaagctccagataggcccctagaacatgaagcagtttgctctgtgcgtccacggcctaggtgtttcttgggggtgttgggagggcaggagcattccttgaggaggagtggcaacatcaaagtgtttgtgtcccttgccagcctccctggggtctggggacctgcagcagcatgtctggcaaactgagtcgccctcctgcctccagctctctgttgagcagagggaaggcatgggggcaggaagagagctgagcattgatggggatgggggtggtttgggaatagaaacttgttcttgcatgagatggctttggttgtcccagtactccagtctctcccttcccttacctggccccttggtgctccttcagcatttgtgctgtctacctctcactgggtcctggtgggggtcgggctcccttctcctggggtgattgatggcctgagcctggggtcctggtagtagagacccagctggcctggggtctgctttccgacattttgcctctctcactggtcatgtatttattccatatttatatggtctacttcctgtggctgggagcagcagctcctgaaggttccgtgggggtgcggggggttggacaggacactccttcttggaaggcaccaattttcccagccccactcccattacacacacacacacacacacacacacacacacacacacacacacacacacacacacacacacacactgattcaggccttgagagtcaagcccaagagctcccttggccctgttccccactccctccactggcctctgctgttcctgtctttgctcacaccctcacagctgctctctggcagaggttggcatagcctaggagcagctgcaattgcacctgagggacaggccctagagtttggtggcccaagtcctgaacccctcttagaccaggtgaggtgcagaggtggttgctgcttccagtttcccttcagacttagctgtgtgaaccccactcctatcctttggccttagttttcccatctgtaaaactcagaaacgcagttggaaagtccttattcatttagtaagcgaatatattataatatgtatagagcgccttttgtgtaagtcactggtcagaatcctcactgagctcccagtccagagagaagccagacaattaaaacagtaatgac

SEQ ID NO: 10793 - DNA, 3550 bp, Homo sapiens
  source 1..3550: mol_type = unassigned DNA
tggcctcgggggcgcgccgccgcggagactgacgcgaagccccacgctttcgtaagagcgtgcgcgcgcccgaggacgtacgtcatcggcgacggctcccgccggctgggcgtccggtggccggtgtagcagagcgggagcggcgggcggcgagcagaggagctaacaggtgggggcacggcacgcggacggacccccccaaaggccgggaggaggcgcgcgacgcgacctttcctgatctcccggagaagcctccactccattgtctcctggccccaccctccattgggcacgcccttcaccttatcccccaccacttattggctgcaggtcacgcccctcctctatttctggttccccattggctcttcaccttgtcctctccggggcttctctccgcacaggccacaccctctcatttgtcactagaccccgccttaatagtggggggctcctcccccatccatccttcattcattatgcacccagtgctgggtgcttggtacacgggggtgaatcagaccccattcctgccttcggggagttcaggggattgtgggaggacacggacctagactccaacagtgacagctctgagtaaagaagtcgccgaagcagtgggacactagacgcggggaaggcttcctggaggaagtgaggcctaaactgagccttgaagaatggttaagagtttgctccaggaatatattgcaaaggcattcttggcggaaggacccgagacgtgaaaaaaacaggcgtattctggtaatttcgaggagatggagaagtaacagcatgtgtttatcctgatggaaagagtccagtagagaggaagagattgatgatgtaggagagaggagaaatgctggaaaggtcgacagtgtggggagttggagtgacccggctggatgtgacccccaggacagaatggtgctggactcaggggctcaggcgtatgatcaggcaccccccagcccgcctaccagtcccccatccctgcgccataggctgaagccctcagaccgagatgggccaccactgtacccctggtctcagtccctggccttgcccctggctctggcagtccccccagcgctgcagccccagcctgagcagcagccgttctcacagatgctcctgggccaccgtggccacatgcgtcgcagtgagagcacctactctgtaaatagtactggccggcgggggcgtggcaccctgggacggcctccacctggacggggacggaacccaggtgggggcaccctgcggcctgcagcctccctgcctcacattgctaagactcaaagggatgcaggccatattgccagcaagagcccctgcatgttggtggccctgcggccaaccaacatggaccgtgagcgagacaagttcttccagtcccattacacctacaatccacagtttgagtaccaggagcccatgcccacggctgtgctggaaaagtactgcgaggcctctggacagttcatccatcaggcagttggcatcattgaggctgttctggagaagtttggaacctatgaacactttgaggctgccactggggggcagctgctcaccaagtgccagatatggtcgattgtgcgcaaatacatgcagaaggagggctgcgctggggaggttgtggtgcagctgagtgaggacctgctgtcccaggcagtgatgatggtggagaacagccggcccacattggcgatcaacctgaccggagcccgccagtactggttggagggcatgctgcggcatgagataggcacccactacctgcggggcgtgaacaacgcgcgccagccgtggcacaacgcggagggccggctgcggtacgggctgcggccggcgaaccccacggaggagggcctggccagcctgcacagcgtgctgttccgcaagcagccgttcctgtggcgcgctgcactgctctactacaccatccaccgcgccgcgcgcatgtccttccgtcagctcttccaggacctggagcgctacgtgcaggacgccgatgtgcgctgggagtactgcgtgcgcgccaagcgcggccagaccgacacctcgctgccaggttgtttcagcaaggaccaggtgtacctggacggcatcgtgcgcattctgcgacatcgccagaccatcgatttcccgttgctgacctcactgggcaaggtgtcctatgaggatgtggaccacctgcggccccatggggtgctggataatacccgggtgccccacttcatgcaggacttggcacgctaccggcagcagctggagcacatcatggccaccaaccggctggatgaggcggagctgggtcgcctgctacccgactgatgtccgttgagggctgcagtcagaggccctggacagaagctccagataggcccctagaacatgaagcagtttgctctgtgcgtccacggcctaggtgtttcttgggggtgttgggagggcaggagcattccttgaggaggagtggcaacatcaaagtgtttgtgtcccttgccagcctccctggggtctggggacctgcagcagcatgtctggcaaactgagtcgccctcctgcctccagctctctgttgagcagagggaaggcatgggggcaggaagagagctgagcattgatggggatgggggtggtttgggaatagaaacttgttcttgcatgagatggctttggttgtcccagtactccagtctctcccttcccttacctggccccttggtgctccttcagcatttgtgctgtctacctctcactgggtcctggtgggggtcgggctcccttctcctggggtgattgatggcctgagcctggggtcctggtagtagagacccagctggcctggggtctgctttccgacattttgcctctctcactggtcatgtatttattccatatttatatggtctacttcctgtggctgggagcagcagctcctgaaggttccgtgggggtgcggggggttggacaggacactccttcttggaaggcaccaattttcccagccccactcccattacacacacacacacacacacacacacacacacacacacacacacacacacacacacacacacacactgattcaggccttgagagtcaagcccaagagctcccttggccctgttccccactccctccactggcctctgctgttcctgtctttgctcacaccctcacagctgctctctggcagaggttggcatagcctaggagcagctgcaattgcacctgagggacaggccctagagtttggtggcccaagtcctgaacccctcttagaccaggtgaggtgcagaggtggttgctgcttccagtttcccttcagacttagctgtgtgaaccccactcctatcctttggccttagttttcccatctgtaaaactcagaaacgcagttggaaagtccttattcatttagtaagcgaatatattataatatgtatagagcgccttttgtgtaagtcactggtcagaatcctcactgagctcccagtccagagagaagccagacaattaaaacagtaatgac

SEQ ID NO: 10794 - DNA, 798 bp, Homo sapiens
  source 1..798: mol_type = unassigned DNA
cccccttccctcctgaggtcggggctttcccttcctgagcagccacctcccgccctctgcttacagaggcacccactacctgcggggcgtgaacaacgcgcgccagccgtggcacaacgcggagggccggctgcggtacgggctgcggccggcgaaccccacggaggagggcctggccagcctgcacagcgtgctgttccgcaagcagccgttcctgtggcgcgctgcactgctctactacaccatccaccgcgccgcgcgcatgtccttccgtcagctcttccaggacctggagcgctacgtgcaggacgccgatgtgcgctgggagtactgcgtgcgcgccaagcgcggccagaccgacacctcgctgccaggttgtttcagcaaggaccaggtgtacctggacggcatcgtgcgcattctgcgacatcgccagaccatcgatttcccgttgctgacctcactgggcaaggtgtcctatgaggatgtggaccacctgcggccccatggggtgctggataatacccgggtgccccacttcatgcaggacttggcacgctaccggcagcagctggagcacatcatggccaccaaccggctggatgaggcggagctgggtcgcctgctacccgactgatgtccgttgagggctgcagtcagaggccctggacagaagctccagataggcccctagaacatgaagcagtttgctctgtgcgtccacggcctaggtgtttcttgggggtgttgggagggcaggagcattccttgaggaggagtggcaacatcaaagtgttt

SEQ ID NO: 10795 - DNA, 2233 bp, Homo sapiens
  source 1..2233: mol_type = unassigned DNA
cgccggctgggcgtccggtggccggtgtagcagagcgggagcggcgggcggcgagcagaggagctaacaggtgggggcacggcacgcggacggacccccccaaaggccgggaggaggcgcgcgacgcgacctttcctgatctcccggagaagcctccactccattgtctcctggccccaccctccattgggcacgcccttcaccttatcccccaccacttattggctgcaggtcacgcccctcctctatttctggttccccattggctcttcaccttgtcctctccggggcttctctccgcacaggccacaccctctcatttgtcactagaccccgccttaatagtggggggctcctcccccatccatccttcattcattatgcacccagtgctgggtgcttggtacacgggggtgaatcagaccccattcctgccttcggggagttcaggggattgtgggaggacacggacctagactccaacagtgacagctctgagtaaagaagtcgccgaagcagtgggacactagacgcggggaaggcttcctggaggaagtgaggcctaaactgagccttgaagaatggttaagagtttgctccaggaatatattgcaaaggcattcttggcggaaggacccgagacgtgaaaaaaacaggcgtattctggtaatttcgaggagaggtcgacagtgtggggagttggagtgacccggctggatgtgacccccaggacagaatggtgctggactcaggggctcaggcgtatgatcaggcaccccccagcccgcctaccagtcccccatccctgcgccataggctgaagccctcagaccgagatgggccaccactgtacccctggtctcagtccctggccttgcccctggctctggcagtccccccagcgctgcagccccagcctgagcagcagccgttctcacagatgctcctgggccaccgtggccacatgcgtcgcagtgagagcacctactctgtaaatagtactggccggcgggggcgtggcaccctgggacggcctccacctggacggggacggaacccaggtgggggcaccctgcggcctgcagcctccctgcctcacattgctaagactcaaagggatgcaggccatattgccagcaagagcccctgcatgttggtggccctgcggccaaccaacatggaccgtgagcgagacaagttcttccagtcccattacacctacaatccacagtttgagtaccaggagcccatgcccacggctgtgctggaaaagtactgcgaggcctctggacagttcatccatcaggcagttggcatcattgaggctgttctggagaagtttggaacctatgaacactttgaggctgccactggggggcagctgctcaccaagtgccagatatggtcgattgtgcgcaaatacatgcagaaggagggctgcgctggggaggttgtggtgcagctgagtgaggacctgctgtcccaggcagtgatgatggtggagaacagccggcccacattggcgatcaacctgaccggagcccgccagtactggttggagggcatgctgcggcatgagataggcacccactacctgcggggcgtgaacaacgcgcgccagccgtggcacaacgcggagggccggctgcggtacgggctgcggccggcgaaccccacggaggagggcctggccagcctgcacagcgtgctgttccgcaagcagccgttcctgtggcgcgctgcactgctctactacaccatccaccgcgccgcgcgcatgtccttccgtcagctcttccaggacctggagcgctacgtgcaggacgccgatgtgcgctgggagtactgcgtgcgcgccaagcgcggccagaccgacacctcgctgccaggttgtttcagcaaggaccaggtgtacctggacggcatcgtgcgcattctgcgacatcgccagaccatcgatttcccgttgctgacctcactgggcaaggtgtcctatgaggatgtggaccacctgcggccccatggggtgctggataatacccgggtgccccacttcatgcaggacttggcacgctaccggcagcagctggagcacatcatggccaccaaccggctggatgaggcggagctgggtcgcctgctacccgactgatgtccgttgagggctgcagtcagaggccctggacagaagctccagataggcccctagaacatgaagcagtttgctctgtgc

SEQ ID NO: 10796 - DNA, 836 bp, Homo sapiens
  source 1..836: mol_type = unassigned DNA
ctcccccatccatccttcattcattatgcacccagtgctgggtgcttggtacacgggggtgaatcagaccccattcctgccttcggggagttcaggggattgtgggaggacacggacctagactccaacagtgacagctctgagtaaagaagtcgccgaagcagtgggacactagacgcggggaaggcttcctggaggaagtgaggcctaaactgagccttgaagaatggttaagagtttgctccaggaatatattgcaaaggcattcttggcggaaggacccgagacgtgaaaaaaacaggcgtattctggtaatttcgaggaggcacccactacctgcggggcgtgaacaacgcgcgccagccgtggcacaacgcggagggccggctgcggtacgggctgcggccggcgaaccccacggaggagggcctggccagcctgcacagcgtgctgttccgcaagcagccgttcctgtggcgcgctgcactgctctactacaccatccaccgcgccgcgcgcatgtccttccgtcagctcttccaggacctggagcgctacgtgcaggacgccgatgtgcgctgggagtactgcgtgcgcgccaagcgcggccagaccgacacctcgctgccaggtgtcctatgaggatgtggaccacctgcggccccatggggtgctggataatacccgggtgccccacttcatgcaggacttggcacgctaccggcagcagctggagcacatcatggccaccaaccggctggatgaggcggagctgggtcgcctgctacccgactgatgtccgttgagggctgcagtcagaggccctggacagaagc

SEQ ID NO: 10797 - DNA, 680 bp, Homo sapiens
  source 1..680: mol_type = unassigned DNA
gtaaatagtactggccggcgggggcgtggcaccctgggacggcctccacctggacggggacggaacccaggtgggggcaccctgcggcctgcagcctccctgcctcacattgctaagactcaaagggatgcaggccatattgccagcaagagcccctgcatgttggtggccctgcggccaaccaacatggaccgtgagcgagacaagttcttccagtcccattacacctacaatccacagtttgagtaccaggagcccatgcccacggctgtgctggaaaagtactgcgaggcctctggacagttcatccatcaggcagttggcatcattgaggctgttctggagaagtttggaacctatgaacactttgaggctgccactggggggcagctgctcaccaagtgccagatatggtcgattgtgcgcaaatacatgcagaaggagggctgcgctggggaggttgtggtgcagctgagtgaggacctgctgtcccaggcagtgatgatggtggagaacagccggcccacattggcgatcaacctgaccggagcccgccagtactggttggagggcatgctgcggcatgagataggtcagggtgtgggtatccgggcagatgggcacccactacctgcggggcgtgaacaacgcgcgccagccgtggcacaacgcggagggcc

SEQ ID NO: 10798 - DNA, 592 bp, Homo sapiens
  source 1..592: mol_type = unassigned DNA
caggcagttggcatcattgaggctgttctggagaagtttggaacctatgaacactttgaggctgccactggggggcagctgctcaccaagtgccagatatggtcgattgtgcgcaaatacatgcagaaggagggctgcgctggggaggttgtggtgcagctgagtgaggacctgctgtcccaggcagtgatgatggtggagaacagccggcccacattggcgatcaacctgaccggagcccgccagtactggttggagggcatgctgcggcatgagataggtcagggtgtgggtatccgggcagatgggtaggcatgaaaggggcctgggagctgggaggggtgggaaggaggggccccaataactcccctttttgtttctcccccttccctcctgaggtcggggctttcccttcctgagcagccacctcccgccctctgcttacagaggtaggccagaacatgcctgcccatgctctgggctcgctctcatctcttggtcctttcgggtatatttttctctctccacttcctctccgacttctcccaacagtgcgggcaaggctggtcaggccctgaccggccagagaaag

SEQ ID NO: 10799 - DNA, 439 bp, Homo sapiens
  source 1..439: mol_type = unassigned DNA
tacgtcatcggcgacggctcccgccggctgggcgtccggtggccggtgtagcagagcgggagcggcgggcggcgagcagaggagctaacagtttgagtaccaggagcccatgcccacggctgtgctggaaaagtactgcgaggcctctggacagttcatccatcagttggcatcattgaggctgttctggagaagtttggaacctatgaacactttgaggctgccactggggggcagctgctcaccaagtgccagatatggtcgattgtgcgcaaatacatgcagaaggagggctgcgctggggaggttgtggtgcagctgagtgaggacctgctgtcccaggcagtgatgatggtggagaacagccggcccacattggcgatcaacctgaccggagcccgccagtactggttggagggcatgctgcggcatgagatag

SEQ ID NO: 10800 - DNA, 527 bp, Homo sapiens
  source 1..527: mol_type = unassigned DNA
ggctgtgctggaaaagtactgcgaggcctctggacagttcatccatcaggcagttggcatcattgaggctgttctggagaagtttggaacctatgaacactttgaggctgccactggggggcagctgctcaccaagtgccagatatggtcgattgtgcgcaaatacatgcagaaggagggctgcgctggggaggtgagcttgcctgcagagcccttcctctacatgccccaaatcagggtgtcttgtgggcggtcccaggtccagctccacacctgacccacccctgcccctgccccagtgaggtgggagctggttctgagcagaggtgatgaagggtgggtgccctggccaattgtctggcctcgctgccctgtggcatcattgggtccacctgcaccctggccccaggctggtggccatggctcagagcactgccacctgcaggttgtggtgcagctgagtgaggacctgctgtcccaggcagtgatgatggtggagaacagccggcccacattggcgatcaacc

SEQ ID NO: 10801 - DNA, 983 bp, Homo sapiens
  source 1..983: mol_type = unassigned DNA
agtatttgagggaacatccgggctctggactagactttcaggatctaaggctgaatcctacacagtcctccctctgggaaagtgatgaaacctgtgagctctcctagcaactctgcagtcttccttcaagggcctgtgcttccttcagagactcacacaagaggtttatcatgagaaggaccgcactatttcatttcactcctacaagttttcatttacgttacacattgagaaagttatgagaagcaactgtcactctctggaggtggagactgccgtgattcacaaagacaagaggtaattttcctgtaatcacaggatgactcaggatggatcatgaagccgcccagctggagaagcagcatgtgcacaatgtgtacgagagcacagccccttacttcagcgacctgcagagcaaagcctggcctcgtgtccgccagttcctgcaagagcagaagccaggcagcctcatcgctgacataggttgtgggactggaaaatatcttaaagtgaacagccaggtacataccgtgggctgtgactactgtgggccactggtagagattgcccggaatagaggatgtgaagccatgggacttgagcatccatggatttggtatccgagggcgtcctggaaccaaccccccacggatattgagggaccacagtatttttatcctccatgtcaccccatccctgacctccagaaacaaacaatcatttgccattttaaaggacctacactaaatgagcaacagaagagctctcccacccaccaccgactccatgcctgttttcagcattgtagggaggaagagtcccggccctggctgatggctctcagctcctgggatcaggtggcaatggagggtcatgtctcggcttcattgacttcttgcatcgtaaggctcctcttatgagacaacctttcctctcaggcccttaggtccaagtcccctctctcagctttctctgagacctca

SEQ ID NO: 10802 - DNA, 553 bp, Homo sapiens
  source 1..553: mol_type = unassigned DNA
ttcagtattgtgtagtacagaaaagatcacacatgtatatgtcagaagtagatgcacatgttcttttggctttttttctttgttttattcttttttcattttttgtgttttttgttagtttgttttgaattttttttcttgatgcatatgttccttcaacttattcagtacttccatgtgcagggctctggactagactttcaggatctaaggctgaatcctacacagtcctccctctgggaaagtgatgaaacctgtgagctctcctagcaactctgcagtcttccttcaagttggtcagattggtccgtgtggaactcagaaacagaaggccaaccatgcataacgaggcagaacttttggagatccttggtgacctcactgttgctgaataaactttagcccctcacctggtgataacaccaataccacctggttttcttccagggcctgtgcttccttcagagactcacacaagaggtttatcatgagaaggaccgcactatttcatttcactcctacaagttttcatttacgttacacattgagaaag

SEQ ID NO: 10803 - DNA, 9587 bp, Homo sapiens
  source 1..9587: mol_type = unassigned DNA
agtattgtgtagtacagaaaagatcacacatgtatatgtcagaagtagatgcacatgttcttttggctttttttctttgttttattcttttttcattttttgtgttttttgttagtttgttttgaattttttttcttgatgcatatgttccttcaacttattcagtacttccatgtgcagggctctggactagactttcaggatctaaggctgaatcctacacagtcctccctctgggaaagtgatgaaacctgtgagctctcctagcaactctgcagtcttccttcaagggcctgtgcttccttcagagactcacacaagaggtttatcatgagaaggaccgcactatttcatttcactcctacaagttttcatttacgttacacattgagaaagttatgagaagcaactgtcactctctggaggtggagactgccgtgattcacaaagacaagaggtaattttcctgtaatcacaggatgactcaggatggatcatgaagccgcccagctggagaagcagcatgtgcacaatgtgtacgagagcacagccccttacttcagcgacctgcagagcaaagcctggcctcgtgtccgccagttcctgcaagagcagaagccaggcagcctcatcgctgacataggttgtgggactggaaaatatcttaaagtgaacagccaggtacataccgtgggctgtgactactgtgggccactggtagagattgcccggaatagaggatgtgaagccatggtatgtgacaaccttaatctcccctttagggatgagggcttcgatgccatcatctccataggagtcatacatcatttttctacaaaacaaagaagaatcagagcaataaaagaaatggccagggtcttagttcccggaggccaactgatgatttacgtttgggcaatggaacaaaagaaccgtcactttgagaagcaagacgtgcttgttccatggaacagggctctgtgttcccagctcttctcagagtccagccagtctgggaggaagaggcagtgtggatacccagaaagaggccatccctaccatcctccttgctctgagtgtagctgttctgtttgttttaaagagcagtgtggttcaaaacggtcccacagcgtgggctatgaacctgctatggcaagaacctgttttgcaaatatttctaaggaaggcgaggaagaatatggattttacagcacattaggaaaatcgtttcgttcctggtttttctccagatctttggatgaatcgactctgaggaagcaaattgaaagagtaagacccttgaaaaacacagaagtttgggccagtagcactgtaacagtccagccttccagacactctagtttagactttgatcaccaagagccattttcaacaaaagggcaaagtttagatgaggaagtgtttgtggaatcttcttctggaaaacacttggagtggctgagagcaccaggcactctgaaacatttaaatggagaccatcaaggggaaatgaggagaaatggagggggaaattttctggatagcactaatactggtgtgaattgtgtggatgcaggcaacatagaagatgataatccttctgctagtaaaatattgagaaggatttctgcagttgattccacagatttcaacccagatgatacaatgtctgtcgaagatccacagactgatgttttggactccacagcctttatgcgctactaccatgtgtttcgagaaggggagctctgcagtctgctcaaggagaatgtgtcagagctccgtatcctgagttctgggaatgatcatggtaactggtgtatcattgcagagaaaaagagaggttgtgattgattggatccttttagacaactcctccaaaagatgaaccacattctttcctcttggtttgatatggttacctgaatttgcattcagtgttatttgttaatccatttacgctttggtctgcagagactattaattatttggttgttttgttttcatttttgaataagcacagattctggcattgaaagcacttgacaaagggtatttgtgcttaaatgttaatatacaagatctgaagaagcaacagaaagtacccttcagtacacctcagacttttttttaaccccagagagataaaatacatgtatagtgtttttcagtattacacattgatttaaaaagattatgctgttaaataatcttttaaaacggtatttttataaagtgaggggataatttctggttctcaggttataactgagagcagtgtgcaagataataggtaaatttgatccattgcacagatatactttgaaccatgtgatgagttatcttgttgccaaggccttgcttctacttaaagttttcagaaaactgagtgacagtggagagaaacaagaagttttacaaggactttactaaattataagcaaacttgcttcaaaataagttgacatgtgataataaggttttcaatgtagcccaggaggtttttaaaggcactgttaggctgagcatggtggctcatgcctgtaatcccagcactttgggaggccaaggcagaaggatcacttgaacccaggagttcaagaatagcctgggcaacatagcaagaccccatctctataaaaattagcaagatgtggtggtgcatgcctgtcatccaagctactcaagagactgaggcaggaggatcacgtgagcccaggaattcaaggctgcagtgaactatgattgcatcactgcactgcagcctgggcaacatagcaagactctgtctcaaaataataataataataataataaaggcgttgttagcttgtaaggagtggagtatgtaggtagtaggagttatatgcaagtacccaagtggtattcttccaatcttattagaagcatgaatattcaagattgatattactattgcttattagcaagattgttatcaatcatgcttattagaaggatgaatatccaagaccaagattgactaatgatgagtctgcatcaagaactaggcatttcttctgagttgacggactctttaggaaaggagaatctaagtgaagcactgattttagctctgagaacaaacaaattaaggtacagcatagttagccttggtagaggtatgacttggatttgctgtatcctttaaaatagtatctgggcatttattttattgaaggtgactacattttattagttatattaggaatttaggtagaatcaacttctactgattacaggttgaatttctgtcactttgtagagaaacgaatagactggacactgtgtggtcactgtttagatttgcccatgggtctctttaaatctatgtcatggatcctgagacacaaatataattaagacaggtctagagacaggagaagcagaaataagttgacccaggagtacagtctcaagtagttcattaatgagaaaattgacatctgacaagagtctttttactttatgctggatgaaaatccaaatcttgttttattttttccactaaaagtgactaaaataataacgaatttcatttgttcttgggttcttttttcctttaatgattgtgctataacttaaaataatgatgttacttttgaacaaacttaaagaaatatttttaaagcgtatctgaaaacgattgatgtttataactctcttttggcttcaaaataagattgtgttatcaccattttggtagatgaggttgtctggtgaaaatgatgcatatgagttgtactgttcagtgtacatcctgcagtagtggatgattgaaaacatatataagtggagtataaattaaaaattaatttggtttcttctatttcttttttttttttttttttttgagacagagtctcgctctgtcgcccaggctggagtgcactggcgcgatctcggctcactgtaagctccgcctcccgggttcacgccatcctcctgcctcagcctcccaagtagctgggactactggcacccaccacgacgcccggctgtttttttgtatttttaggagagacggggtttcaccgtgttagccaggatggtctcgatctcctgacgtcgtgatccacccgcctcggccccccacagtgctgggattacaggcgtgagccaccgcgcccggcctgttccttttatttcttaattcaggacactaaaccatgactgcaagggatttccttggtaaaaagaaaagattctcagagtcaaaatggtcttacaactcgggcttgacggcctttgaattatgaatggattgttcctctctctgaagcctattgtcacatgggtttttaatcctggccttgctgctagaaatctgtgcttgaagtcctctctttctgctgctagcctaccagttaaaagtcaagacttggtggaactcagtttaccagactctttagcctttgagctaaactgtctgagcaacctcttagatgtgcacacaccactttgtatgaaagggttctctagaacggttctttggagagaaatattttcatgtacgtttgacaggggtgtaaataaagcatgctgactaataagtcttttactcttcatctaatgaacataagaatctatgcatccagatattattttgtatacaaatatttaatttggtgattgataatctctctttggggtagtcacatggaaagctcttttaaatttaacttccgcctttggattttttttaaaaagccattgaagagcaaaactaatgtaaacgtcttgatcatttaaaaagcttgcttgtcctcgaaaggaaacacaggtcatcagtgagtataaacgtagacagttgatttgtgaatgctgtcggcctcaacttgcttgatgatagattctactgacctagctggagtaatctgatcacttacttccttattaatactagatcacacagtgtctttcttattccttcttctttacttactggcatcagcacagagtcccactatctgaaatagaagggagagtttgggggtttattggaggagtcttaaaaacttggttggcagctgggtacgatgactcacacctgtactcccagcacttcaggaagctgaggtgggtggatcagctgaggtcaggagtttgagaccagcctgaccaacatggtgaaaccccgtctttattaaatacaaaaaattagccaggttggtggcgcatgcctgtaatcccagctacttgggaggctgaggcaggagaatcgcttgaacctgggaggcggaggttgcagtgagccgagattgtgccattgcactccaacctgggcaacaagagtgaaactccatctccaacaaaacaaaactttgctggcttcctgatgcctcactgtctatttgaggaattccacagaatcttcaaaggatttgggggaaagcgcattaacatggacaaaggatggaatcaaaataatgttatagtgagaatcattcaagcacctatttaaattttttccaattgccagtatagtgatgatatgacaccagcatatcaaagtaactaacaaactagctacacaaacgtcttggagtttggtttcgttctcttttctcatcatagatctccgtgcagaatagtgctaattcttatttctcgtttgcctttctatttccttccaaattctacatgccagtaattcctctgtcttttaagtgaccatcaattcaataggcaaaaatttggagtaatccagagaaaaaaccatccaaatataaaccagctaggaacatgaatgcccctgattattaatggccaaaaaaaaagcactggtggattttaaattaaattaatacatatatacgagtttggaggagaacagaagttctaactcagtacttgaacttggtgggggagggcacaggttaaatatgagctgtgagcccccagttttggaggaaggaggaaatgggaaccaaccaccagacaagcagctgcagtctaagaaaaacaaattagggcaggcctcagcatctctttcctattacatagaaaatctgaaatgagaatagctgtgaacttttctaaatatgcaacattcaactatcgcaaggacaaaaaaccaaacaccgcatgttctcactcataggtgggaattgaacaatgagaacacatggacacagtaaggggaacatcacacactgggacctgttgtgaccccgctgagggagttcctcttgccctctacccccggggcttgtatatagattataaatatataagggggaaaggggtgggggggaggggttgtgcggctggggcctcacttcccctccttccccttctcctggtcccctgtcccaggggctgtttgttaaaaaagagtaataaaggatttttgtttttaaaaaaagcaacgttcattaatttatatgcagtcctcaccacagccctccaagataactatacttattgttcccattttgcagatgaggaaaactgaggcagaaagaaattaaattgcttaaggttacacacatagtaggtatcacacatttagttagaggcagagctgggattcaaacccaggtctggctcctagtctctgctcttaaccacaacaccatatactcccacccctgggcccagctcatgtgcttggcggagtattagagcctttcaaggtaagtgtgattatcccctttccaaatgagctttggaaaagtttaagcaaagattacacagctagacaataattcaatagtagtctcttacatattttcccttttatctttttttcatttgtaaatctgtttcgatttgatttgaattaaaaaatagttcttggttgcaaaatattctgggaccacttttctccaactcttcaacctttcaacaattatattattgttttcccattttataagtaaggcaactgaggactattcagatatttcattcactccatttgtttactaagccctgctgtgtgctggatacacagtctgctgtgtgctggatacatatgatacaaggtaatgactatctggcatcttgaaggtacccagaatattagaattaactgacccacaggtgccaagctgaaacattcttcgtattccctgtgtgcctattaccaagttatattgtttagtttgaggaaaacaacaaacaaccctcccttagagaatcatgatgcatattagcatatttaaggagtaccctaaagcttggacttaatctagcttaccctagacgtattaacatcctatagcgcacgtgttctgtgggatatatttcagaaaataatatgtcttacagaataaatgcagactcctttggatggcattcaggcccttcataaagtaactctgaattatttttcagtctcatttcctgcagttgcacccgattttttctgttctgcaatctgctattttagacaaagctttcataagaaattacataatgacaagtaattcccacattccctagatatatacttggatttcaaatgccataattgtaatctttctccaaagaaaaatgcacgatacaggcttcattctatcaagaggcatatgaggtaagcgttattatacacccgtccagcagatgggaaaaccacggaagtgggagggaatcaagaagcattaacagaccctccaccaaccgtaatgcttaactcctcttgttccaatcttaactcaaaattatgattattttgattatttaatgattgttttgatagtataaactccatatctgcaacctcagttatctacaacactgaggtgcaaacatttaaaaagatctctcaccaaacaaggattgaaattgtattgcaaatgaaagagctcagcatgagagcacaatcagaaactgaagagagttgatcaaagagaagattctagctgaattgttctatttttaattccccagggatcctacggtctatgacacattaacaggggtgtgaatcatttcagttacatcacatactctgtcctcttgtggtgcgggtcttccccagttgattatacacagataatcaatgactttatttgggagggattggagctatagaataatctatcttaccaatctgatggaccatttgtaagagctgtttgtcaaattggatcttcatttgacaaataaatactagagctgcagaaagtaaagtttactccaacccaattaatcattaatacatccacaggaaaaatacattttctccacatggaatattgatttttctatgaatattacctccacattgaaaaacgagtgagtcactgcagttaagccagtgtaccttgatgttgaattccctgaagaaggtacaattatatttacattcccttagcaagaatttggctaagtgataagcacttttctcttttcttttctttttttttttttttttttgagacagtgtctcactctgtcacccaggctggagggcagtagtgcagtctcagctcattgcaacctctgcctcccaggtttaagcaattctcgtgcctcagcctcctgaatagctgggattacaggaacatgccaccactcctggctaatttttgtatttttttttaagtaaagacaaactttcaccatgttggccaggctggtcttgaactcctgacctcttacgagctaatcataccacttctaactagattttctattaatgtacaaggagggactccactactaaagtttgttttacttctctggttatttacacaaaacgctggcaatacattaaggctcactaatgtggacctaagtgagtatctgagaggctttgaatatgtatgtgcaaactgtcctattttctttatatgctctcttaaatatgtatgtctgtaaatatatatataacacacatatatatatattcctagacatctagtgtttgctgtcattagtgaccaagaaaaagtagttcttttgtgcacgcgtgaatacatcaaattagcaattaccatagaaatgtatttcattgaataaatagcttttgtttgtttgtttgtttgtttcagggaaatttagaacaattattagatgttatagtgcctcttctcgtgttgatacgtgtatttgggtcaaaagtgcaaaaacttttttctacaatgtacagttattttgacttttcccaggggaagctagcaatagttttaaaagcacaaagtgatgtaaaatattttgacttttataataatgcgaagtagttttatttgcattaatcaataatgttcaggatctttttgtagtaagtatattttaaatggtgtaatttgtgtgtttatgatatgtattcaattatttaagttaagtatcagtgtatttttaaaaagtgttcccaggtgaacaaaagtttgcttttcttcaccattctgtacaggacaagcattattcagttcacatagtcagctctcactacacttcaacagaacggggcaagttcgtatttgaattctgttatatttatctaagggaagcaaaattaaccttttaataatagattatctttaatggttattaaaagaatgttattgaccaaaaagacatattttgagattaataaagatgtattagattatccaaaa

SEQ ID NO: 10804 - DNA, 579 bp, Homo sapiens
  source 1..579: mol_type = unassigned DNA
aaaaaattaagtgagaagagccgcgctaaagccaagcgtcgtcgtcacccaaggtcaaggggtggaagttacacctggtgcagccctcggctctgatgcaaaagcagcttttgcccctggctgcgggacagcgctgtgactactcgcaacgggagagctgctgccagtcgccacaccgtgcggaaagcgccggcgaccggagcactgacaatggtctgcataggggagcggagagaagcttctgttgcgccctagatccgctgcctcggcgcccgcccgcagggaggagggggcgcgacaggtcgtctagcgcgtgccccggagcccgcgcccgggtctggccgcctggggcctgtgcttccttcagagactcacacaagaggtttatcatgagaaggaccgcactatttcatttcactcctacaagttttcatttacgttacacattgagaaagttatgagaagcaactgtcactctctggaggtggagactgccgtgattcacaaagacaagaggtaattttcctgtaatcacaggatgactcaggatggatcatgaagccgcccagctggagaagc

SEQ ID NO: 10805 - DNA, 1982 bp, Homo sapiens
  source 1..1982: mol_type = unassigned DNA
aaattaagtgagaagagccgcgctaaagccaagcgtcgtcgtcacccaaggtcaaggggtggaagttacacctggtgcagccctcggctctgatgcaaaagcagcttttgcccctggctgcgggacagcgctgtgactactcgcaacgggagagctgctgccagtcgccacaccgtgcggaaagcgccggcgaccggagcactgacaatggtctgcataggggagcggagagaagcttctgttgcgccctagatccgctgcctcggcgcccgcccgcagggaggagggggcgcgacaggtcgtctagcgcgtgccccggagcccgcgcccgggtctggccgcctggggcctgtgcttccttcagagactcacacaagaggtttatcatgagaaggaccgcactatttcatttcactcctacaagttttcatttacgttacacattgagaaagttatgagaagcaactgtcactctctggaggtggagactgccgtgattcacaaagacaagaggatggatcatgaagccgcccagctggagaagcagcatgtgcacaatgtgtacgagagcacagccccttacttcagcgacctgcagagcaaagcctggcctcgtgtccgccagttcctgcaagagcagaagccaggcagcctcatcgctgacataggtaaccaggcagcctcatcgctgacataggtaaccaggcagcctcatcgctgacataggtaaccaggcagcctcatcgctgacataggtaaccaggcagcctcattgctgtcataggtaacccagcactgggccgtgtagcatgaaataccttccattgagcctttgcttttcacattgatttttcatttttgttctaataggaatcctgaaattgcacccttggcatgccagtacctagaatattcattttacagcagaaactcgagacagtcaagtcagcagcaagtaaaaaactttctcaaacttttattttatttttattcttttgagatggagtttcactcttgtcaaccagattggagtgcagtggtgcaatctcagcttgctgcaaactccgcctcccaggttcaactgattctcctgcctcagactcccaaatagctatgattacaggcacccgccaccacgcccagctaatttttgtatttttagtagaaacggggttttgccatgttggccagactggtctcaaactcctgacctcagatgatccatctgtctcggcttcccaaagtgctgggattacaggcttgagccaccgtgcctggcctcaaactttacctttagacagtggctcttcagggcctttgtgtacatcctccaccaaaacggacctgacattgattgactaaatcaggatggaaatgatggcttgtgaaactaaccgttgtaaatttaaagatattcacatttgccaaatgtgttctcctctggtggctcactttgagtggctcacatgccttctatagaattgtgggattatggaagaggtccagtaatatcttatgaatctcatgggtcctttcctttaattattctataggtgtttcattataggagcgcatctttaattagacagtattttaataataacttatttgtctggaggacgttggttcagtatcttcgtaaatcaagaactggtaaaccacagcttagtagatctaggactaagacttaaaatgtggttggaatctcactcaaggcctacccacctaaaactgcgttctagcaattgcatgctgactgcacctatgagtcgtaagtctgtagttgcaaagtgtgtctagtttgatattctttctaaatactggtaagagaaacagacataccagaacttgtggcttgctgaagatggtatgagtaatgtggaatctggggaaggggtgcatgtcacatggaaattgggagtctttgaaaaatatctctatcctgtaaattaaaaaataataaatctagtttcggagtgtgc

SEQ ID NO: 10806 - DNA, 2392 bp, Homo sapiens
  source 1..2392: mol_type = unassigned DNA
aggcgccgcaggcctgggttcccggacagctgagcccgagcgccgcctcccgaaaggtgaaggcggcccggggaggcggggacggtgacgggggcgggggccgcgggcggtctcccgacggctgtcgcggggccagcccaaagcccccgatccccggtagctgcgcttcccgcgcggggcgccggagtagggcgggccaagctggcctgcggccgcggcgggaagaagggctagcgaagcacccccgaccgggcccaggcgccggacgccggggggcgcctcgctgcaacttctctttggaagccccgacacgagccccggcccgcgcgcgcgctcccccacggccacgcgcgcaccctgccgcccgcacccccgcgcgccctccgtctattttttcctcttcctttcatcctcacactctaaaataggtcaaggggtggaagttacacctggtgcagccctcggctctgatgcaaaagcagcttttgcccctggctgcgggacagcgctgtgactactcgcaacgggagagctgctgccagtcgccacaccgtgcggaaagcgccggcgaccggagcactgacaatggtctgcataggggagcggagagaagcttctgttgcgccctagatccgctgcctcggcgcccgcccgcagggaggagggggcgcgacaggtcgtctagcgcgtgccccggagcccgcgcccgggtctggccgcctggggcctgtgcttccttcagagactcacacaagaggtttatcatgagaaggaccgcactatttcatttcactcctacaagttttcatttacgttacacattgagaaagttatgagaagcaactgtcactctctggaggtggagactgccgtgattcacaaagacaagaggtaattttcctgtaatcacaggatgactcaggatggatcatgaagccgcccagctggagaagcagcatgtgcacaatgtgtacgagagcacagccccttacttcagcgacctgcagagcaaagcctggcctcgtgtccgccagttcctgcaagagcagaagccaggcagcctcatcgctgacataggtaaccaggcagcctcatcgctgacataggtaaccaggcagcctcatcgctgacataggtaaccaggcagcctcatcgctgacataggtaaccaggcagcctcattgctgtcataggtaacccagcactgggccgtgtagcatgaaataccttccattgagcctttgcttttcacattgatttttcatttttgttctaataggaatcctgaaattgcacccttggcatgccagtacctagaatattcattttacagcagaaactcgagacagtcaagtcagcagcaagtaaaaaactttctcaaacttttattttatttttattcttttgagatggagtttcactcttgtcaaccagattggagtgcagtggtgcaatctcagcttgctgcaaactccgcctcccaggttcaactgattctcctgcctcagactcccaaatagctatgattacaggcacccgccaccacgcccagctaatttttgtatttttagtagaaacggggttttgccatgttggccagactggtctcaaactcctgacctcagatgatccatctgtctcggcttcccaaagtgctgggattacaggcttgagccaccgtgcctggcctcaaactttacctttagacagtggctcttcagggcctttgtgtacatcctccaccaaaacggacctgacattgattgactaaatcaggatggaaatgatggcttgtgaaactaaccgttgtaaatttaaagatattcacatttgccaaatgtgttctcctctggtggctcactttgagtggctcacatgccttctatagaattgtgggattatggaagaggtccagtaatatcttatgaatctcatgggtcctttcctttaattattctataggtgtttcattataggagcgcatctttaattagacagtattttaataataacttatttgtctggaggacgttggttcagtatcttcgtaaatcaagaactggtaaaccacagcttagtagatctaggactaagacttaaaatgtggttggaatctcactcaaggcctacccacctaaaactgcgttctagcaattgcatgctgactgcacctatgagtcgtaagtctgtagttgcaaagtgtgtctagtttgatattctttctaaatactggtaagagaaacagacataccagaacttgtggcttgctgaagatggtatgagtaatgtggaatctggggaaggggtgcatgtcacatggaaattgggagtctttgaaaaatatctctatcctgtaaattaaaaaataataaatctagtttcggagtgtgca

SEQ ID NO: 10807 - DNA, 668 bp, Homo sapiens
  source 1..668: mol_type = unassigned DNA
ctattttttcctcttcctttcatcctcacactctaaaataggtcaaggggtggaagttacacctggtgcagccctcggctctgatgcaaaagcagcttttgcccctggctgcgggacagcgctgtgactactcgcaacgggagagctgctgccagtcgccacaccgtgcggaaagcgccggcgaccggagcactgacaatggtctgcataggggagcggagagaagcttctgttgcgccctagatccgctgcctcggcgcccgcccgcagggaggagggggcgcgacaggtcgtctagcgcgtgccccggagcccgcgcccgggtctggccgcctggggcctgtgcttccttcagagactcacacaagaggtttatcatgagaaggaccgcactatttcatttcactcctacaagttttcatttacgttacacattgagaaagttatgagaagcaactgtcactctctggaggtggagactgccgtgattcacaaagacaagaggatggatcatgaagccgcccagctggagaagcagcatgtgcacaatgtgtacgagagcacagccccttacttcagcgacctgcagagcaaagcctggcctcgtgtccgccagttcctgcaagagcagaagccaggcagcctcatcgctgacataggttgtggga

SEQ ID NO: 10808 - DNA, 2758 bp, Homo sapiens
  source 1..2758: mol_type = unassigned DNA
tttaaactattcaataaatagggtcatattttcattgcaaaatgaaagatgcattttaatgaaattgaagttaaagaagaaagaaatgaaaaagaaagaagttcaaagggatgaggagaagaaaagacagatggtaatatgactgtcctctaaaggaaatggtttctgttgctaggtttttccacttagctaaagtcatcagctgtttgatgaatagacaatagtttggattaaaaaatatttaaaattcttttattgttcacattcaagatttaaacatgaaggccattagaaatgaataggggcaaatcaagagttctagggcactggaagcatgtcaggagaaaagacctctgtttccttcttattacaaaatgctctctgaacaggccctcctcattctaaagatgtatgagtctgattttattaatatcattgaagtaactttccctttcatttctcctaaagtatccctcgagccaatgaaaaagcaaatgaattgcaaggttatttttcttaaaataggaccatcgtcttttgaaatacacaggattttaattttaaaatactttgtgaattatattttccccatgattgccttcaaacagagggtactttttctcataatcattattgggaacagtgtggctacgagatcaaagaaataatatcatagaaataatatggtcacatttacgtagaaataataatcctggaattgttttctttttcttttttgagacaaaatctaactctgtcatcacctaggctggagtgaggtgatgctaccccagctcactgcaacctccacctcctgaatttaagtgatttttttctgcctcagcctcctgagtaactgggattacaggtacctgccaccacacccagctaatttttgtatttttagtagagaggggtttcatcatgttggccagactggtctcgaactcctgccctcaagtgatccgcccaccacagcctcccaaagtgctaggattataggcatgagccaccgcgccagaccccaaattttattttttattcatatattctccactgtctcagctggcattaatgaatcttaagtttgcttttactgtatcataattttgaaagtgcctagtaaggaggggttattagtgtcctgatgtatttcagaagcagcaaactaatcatctttgaatagtggtagatatcttttcaggtagaaaaatttcatcagtaatgccaataagtacaaatataggctctaatgatttcttttaatatttctggaaagtaattagattatatatctgtgatagaatataatactaagtattagactgtagaaggctttgtttcaaggtggtttattcattcatgttactacctacctcaatcataacatcagtaagacctcaatgatctaaatatttgggctttgtaaatcctgaattacttaggtctctgctactggaaagtgaatatcaaaaattgtctatttaagaaaaaaagtagtttttataatctgagttgtatactggacccatagagatcattttaaatgtagcaatgaatagagattggataaaaacaatgttaaaaattcttttctaattcaagttcaaattttaaaaatttgaaaggcatgttttagtgtataaataatagaaaagttgttgacagttgtttgttttgcagtcagcaagtggtaagaatctttggagagacaacaggagaataaaagccgaaacatgcgtatatacaaaatgaaatatgaatgtgagcttagaggctacacgtggtctctcggatactagaactatctttcttgccttggaccagctaacgtgccttggttgcgccagtgtactgagccctgtggacatcacctcattaaatattcaataaatgttatttttttcctattgcctttctctcttctatatgagaatctgtaagtattcgccgaaggcttttcttttgcttttgtgaataccttcacaccatgttgtattctgtcttggttagttaaaaaaaaaaaaaaagttggccaggcacagtggcttgcacctgtaatcccagcactttgggaggccgaggcaggcggatcacctgaggttgggagttcgagaccaacctgaccaacatggagaaacccgtctctactaaaaatacaaaattatccggtcatggtggcacgcgcctatgatcccacctactcgggaggctaaggcaagagaattgcttgaacccgtgaggcagaggttgcagtgaaccgagattgcgccactgcactccagcctgggtgactgagggagactctgtctcaaaataaataaataaataaaaggttaattatatttcttgttatgagacaaatgaagtatttcacattttccattgaggatagcatgtaacgcaggtttttctcttataggttgtgggactggaaaatatcttaaagtgaacagccaggtacataccgtgggctgtgactactgtgggccactggtagagattgcccggaatagaggatgtgaagccatgtcatacatcatttttctacaaaacaaagaagaatcagagcaataaaagaaatggccagggtcttagttcccggaggccaactgatgatttacgtttgggcaatggaacaaaagaaccgtcactttgagaagcaagacgtgcttgttccatggaacagggctctgtgttcccagctcttctcagagtccagccagtctgggaggaagaggcagtgtggatacccaga

SEQ ID NO: 10809 - DNA, 6003 bp, Homo sapiens
  source 1..6003: mol_type = unassigned DNA
atgaaatatgaatgtgagcttagaggctacacgtggtctctcggatactagaactatctttcttgccttggaccagctaacgtgccttggttgcgccagtgtactgagccctgtggacatcacctcattaaatattcaataaatgttatttttttcctattgcctttctctcttctatatgagaatctgtaagtattcgccgaaggcttttcttttgcttttgtgaataccttcacaccatgttgtattctgtcttggttagttaaaaaaaaaaaaaaagttggccaggcacagtggcttgcacctgtaatcccagcactttgggaggccgaggcaggcggatcacctgaggttgggagttcgagaccaacctgaccaacatggagaaacccgtctctactaaaaatacaaaattatccggtcatggtggcacgcgcctatgatcccacctactcgggaggctaaggcaagagaattgcttgaacccgtgaggcagaggttgcagtgaaccgagattgcgccactgcactccagcctgggtgactgagggagactctgtctcaaaataaataaataaataaaaggttaattatatttcttgttatgagacaaatgaagtatttcacattttccattgaggatagcatgtaacgcaggtttttctcttataggttgtgggactggaaaatatcttaaagtgaacagccaggtacataccgtgggctgtgactactgtgggccactggtagagattgcccggaatagaggatgtgaagccatggtatgtgacaaccttaatctcccctttagggatgagggcttcgatgccatcatctccataggagtcatacatcatttttctacaaaacaaagaagaatcagagcaataaaagaaatggccagggtcttagttcccggaggccaactgatgatttacgtttgggcaatggaacaaaagaaccgtcactttgagaagcaagacgtgcttgttccatggaacagggctctgtgttcccagctcttctcagagtccagccagtctgggaggaagaggcagtgtggatacccagaaagaggccatccctaccatcctccttgctctgagtgtagctgttctgtttgttttaaagagcagtgtggttcaaaacggtcccacagcgtgggctatgaacctgctatggcaagaacctgttttgcaaatatttctaaggaaggcgaggaagaatatggattttacagcacattaggaaaatcgtttcgttcctggtttttctccagatctttggatgaatcgactctgaggaagcaaattgaaagagtaagacccttgaaaaacacagaagtttgggccagtagcactgtaacagtccagccttccagacactctagtttagactttgatcaccaagagccattttcaacaaaagggcaaagtttagatgaggaagtgtttgtggaatcttcttctggaaaacacttggagtggctgagagcaccaggcactctgaaacatttaaatggagaccatcaaggggaaatgaggagaaatggagggggaaattttctggatagcactaatactggtgtgaattgtgtggatgcaggcaacatagaagatgataatccttctgctagtaaaatattgagaaggatttctgcagttgattccacagatttcaacccagatgatacaatgtctgtcgaagatccacagactgatgttttggactccacagcctttatgcgctactaccatgtgtttcgagaaggggagctctgcagtctgctcaaggagaatgtgtcagagctccgtatcctgagttctgggaatgatcatggtaactggtgtatcattgcagagaaaaagagaggttgtgattgattggatccttttagacaactcctccaaaagatgaaccacattctttcctcttggtttgatatggttacctgaatttgcattcagtgttatttgttaatccatttacgctttggtctgcagagactattaattatttggttgttttgttttcatttttgaataagcacagattctggcattgaaagcacttgacaaagggtatttgtgcttaaatgttaatatacaagatctgaagaagcaacagaaagtacccttcagtacacctcagacttttttttaaccccagagagataaaatacatgtatagtgtttttcagtattacacattgatttaaaaagattatgctgttaaataatcttttaaaacggtatttttataaagtgaggggataatttctggttctcaggttataactgagagcagtgtgcaagataataggtaaatttgatccattgcacagatatactttgaaccatgtgatgagttatcttgttgccaaggccttgcttctacttaaagttttcagaaaactgagtgacagtggagagaaacaagaagttttacaaggactttactaaattataagcaaacttgcttcaaaataagttgacatgtgataataaggttttcaatgtagcccaggaggtttttaaaggcactgttaggctgagcatggtggctcatgcctgtaatcccagcactttgggaggccaaggcagaaggatcacttgaacccaggagttcaagaatagcctgggcaacatagcaagaccccatctctataaaaattagcaagatgtggtggtgcatgcctgtcatccaagctactcaagagactgaggcaggaggatcacgtgagcccaggaattcaaggctgcagtgaactatgattgcatcactgcactgcagcctgggcaacatagcaagactctgtctcaaaataataataataataataataaaggcgttgttagcttgtaaggagtggagtatgtaggtagtaggagttatatgcaagtacccaagtggtattcttccaatcttattagaagcatgaatattcaagattgatattactattgcttattagcaagattgttatcaatcatgcttattagaaggatgaatatccaagaccaagattgactaatgatgagtctgcatcaagaactaggcatttcttctgagttgacggactctttaggaaaggagaatctaagtgaagcactgattttagctctgagaacaaacaaattaaggtacagcatagttagccttggtagaggtatgacttggatttgctgtatcctttaaaatagtatctgggcatttattttattgaaggtgactacattttattagttatattaggaatttaggtagaatcaacttctactgattacaggttgaatttctgtcactttgtagagaaacgaatagactggacactgtgtggtcactgtttagatttgcccatgggtctctttaaatctatgtcatggatcctgagacacaaatataattaagacaggtctagagacaggagaagcagaaataagttgacccaggagtacagtctcaagtagttcattaatgagaaaattgacatctgacaagagtctttttactttatgctggatgaaaatccaaatcttgttttattttttccactaaaagtgactaaaataataacgaatttcatttgttcttgggttcttttttcctttaatgattgtgctataacttaaaataatgatgttacttttgaacaaacttaaagaaatatttttaaagcgtatctgaaaacgattgatgtttataactctcttttggcttcaaaataagattgtgttatcaccattttggtagatgaggttgtctggtgaaaatgatgcatatgagttgtactgttcagtgtacatcctgcagtagtggatgattgaaaacatatataagtggagtataaattaaaaattaatttggtttcttctatttcttttttttttttttttttttgagacagagtctcgctctgtcgcccaggctggagtgcactggcgcgatctcggctcactgtaagctccgcctcccgggttcacgccatcctcctgcctcagcctcccaagtagctgggactactggcacccaccacgacgcccggctgtttttttgtatttttaggagagacggggtttcaccgtgttagccaggatggtctcgatctcctgacgtcgtgatccacccgcctcggccccccacagtgctgggattacaggcgtgagccaccgcgcccggcctgttccttttatttcttaattcaggacactaaaccatgactgcaagggatttccttggtaaaaagaaaagattctcagagtcaaaatggtcttacaactcgggcttgacggcctttgaattatgaatggattgttcctctctctgaagcctattgtcacatgggtttttaatcctggccttgctgctagaaatctgtgcttgaagtcctctctttctgctgctagcctaccagttaaaagtcaagacttggtggaactcagtttaccagactctttagcctttgagctaaactgtctgagcaacctcttagatgtgcacacaccactttgtatgaaagggttctctagaacggttctttggagagaaatattttcatgtacgtttgacaggggtgtaaataaagcatgctgactaataagtcttttactcttcatctaatgaacataagaatctatgcatccagatattattttgtatacaaatatttaatttggtgattgataatctctctttggggtagtcacatggaaagctcttttaaatttaacttccgcctttggattttttttaaaaagccattgaagagcaaaactaatgtaaacgtcttgatcatttaaaaagcttgcttgtcctcgaaaggaaacacaggtcatcagtgagtataaacgtagacagttgatttgtgaatgctgtcggcctcaacttgcttgatgatagattctactgacctagctggagtaatctgatcacttacttccttattaatactagatcacacagtgtctttcttattccttcttctttacttactggcatcagcacagagtcccactatctgaaatagaagggagagtttgggggtttattggaggagtcttaaaaacttggttggcagctgggtacgatgactcacacctgtactcccagcacttcaggaagctgaggtgggtggatcagctgaggtcaggagtttgagaccagcctgaccaacatggtgaaaccccgtctttattaaatacaaaaaattagccaggttggtggcgcatgcctgtaatcccagctacttgggaggctgaggcaggagaatcgcttgaacctgggaggcggaggttgcagtgagccgagattgtgccattgcactccaacctgggcaacaagagtgaaactccatctccaacaaaacaaaactttgctggcttcctgatgcctcactgtctatttgaggaattccacagaatcttcaaaggatttgggggaaagcgcattaacatggacaaaggatggaatcaaaataatgttatagtgagaatcattcaagcacctatttaaattttttccaattgccagtatagtgatgatatgacaccagcatatcaaagtaactaacaaactagctacacaaacgtcttggagtttggtttcgttctcttttctcatcatagatctccgtgcagaatagtgctaattcttatttctcgtttgcctttctatttccttccaaattctacatgccagtaattcctctgtcttttaagtgaccatcaattcaataggcaaaaatttggagtaatccagagaaaaaaccatccaaatataaaccagctaggaacatgaatgcccctgattattaatggccaaaaaaaaagcactggtggattttaaattaaattaatacatatatacgagtttggaggagaacagaagttctaactcagtacttgaacttggtgggggagggcacaggttaaatatgagctgtgagcccccagttttggaggaaggaggaaatgggaaccaaccaccagacaagcagctgcagtct

SEQ ID NO: 10810 - DNA, 6751 bp, Homo sapiens
  source 1..6751: mol_type = unassigned DNA
aaggttggtggcaaccaggagccggggaagaggccagcagctgcagggagaccgcagccagcggagggggcttctgatccctcagtcacagggctcggcaggcagctctggacggatcaatgcaagccagacgatgaccagttgtggccagcagtccttgaacgtgctcgccgtcctcttctcattgctgttttctgcagtcttgtctgcacatttccgggtctgtgaaccatacacagaccacaaaggccgctaccactttggcttccactgcccccggctctcggacaacaagaccttcatcctctgttgtcaccataacaacacggtcttcaaatactgctgcaacgagacggagttccaggcggtgatgcaggcgaacctcacggccagctccgagggttacatgcacaacaattacaccgccttgttgggagtgtggatctatggatttttcgtgttgatgctgctggttctggaccttttgtattactcggcaatgaactacgacatctgcaaggtctacctggcacggtggggcatccaaggacgatggatgaaacaggacccccggcggtgggggaaccccgctcgggcccctcggccgggtcagcgggccccacagccgcagcctcccccaggcccgctgccacaagccccacaggccgtgcacacattgcggggagatgctcacagcccaccgctgatgaccttccagagttcgtctgcctgaaaacgcttttgctgtgcctcaggatgggggagatgagatctgaagcacccggtgcagcctccgagaagaacaacttctacagagatgccagggacagccgaggtagcggcggtggcacaggaggaaatgctgcctgtgcccaaagcccccttccgcggacttctaagattaggagcaaactcaggggtaggggctgggggtgcaggggaggggattctgagccacctgtccgcaagcaatagtcctattttgggctggtggcttctgagaggtgactcattgtggactcaggatgaccaagacaaagcaactctggctgattccagccaggaggattgaggcctgtgagttatacctgtggttgaaaaccgaagcttcccttgcccctgctccctccagtagtggccccttggggctatttgtgtcagaatattgaatgtgcgtgtgtgtgtgcgtgtgtgtgatttggggtgttctttttgtttgcttggttggttggtttttattggggcttcccccctcaagttctctgatgggcatgagtcaccctccggctgggggttctcatccgtgtcaatgtccgagccgcaagcttattgctaagcacagggtacggcccctctgtgtctcggggagcactggggatttgaaaatgccagtcagggttgtttcttacagaattcgttcctgtaacaatagtaatactaagggctgcatctcaggctgaccacagggcaggtgccaagttaagtgttttcatgcactccctctctcaccacctgggaggcaggtatgattaaccccctgcagaaaaactcacagtggggaagcggtgccggaacccaaagtccaggctccaactccctggacgtgacatgctcgccagccggggtacaccctgcacaatgctgggagcatctccttgatgcctccaccatcaccgcctggagcgctgatccactcagcacattctggctaagcatctgctgtgtgccaggccccgtgctgggcagtgatgggaatgaaagatgagttagatctcatctctgcccccggggagcctcccatctggtgggagacacagacacgtggatctttgctggaaagggtaacaaggccatggaaacccaggcaggagcgttctagaaatccatccactttcaagtaggacttccatgcccgtaacatccacccaccgagctaatcacccccactcctgccccgctgccctgggacacctatgagatggcatcacctaaatcatcacaaacatctccaaaggccatgctgccagtgtagacacactcattccatgggtgttagtgataccaaatctcccccagctcttagctcgggaggccctgcttgatcaatgtgtgtgtcctctgacgcagtttcctcatttcatcagacctagtgttctcacactgaccacccatccattcaccagacacgacagtgagcaaggcaggtccctgctcactgtgctagctttctagctggggcaggaagacagtgaagaaggaaggtggcgaaggcagtgagtgctctgccgggaactcagtgccaggaactcagttcgagggacacgtgagtgagacccttgtggacctggggtggtctgggaaggccgccttgagcagatgattgaagcccagatttgaatgacacacaggagccagtaatgggcgttaaagataggaaaagagcattccaggcagaaggaacggctagtgcaaagatcctgcggcagccacaggcttggtggtttcaaggaagcacaagaaagccaggtggcacaagaaagccaggtggctggggacccagagggaaggcagaaggagatgagggtgatagtgcccagctctgggctctgctgtgagtcaagctgtgcaaacacaatgtcctgcctttggaaaagcagaacaaacttgctagggtataaagcatcctccattctgcctggctgtccatcctctcaacagccccatgaagaaggggctctccccattttatggacaagaagacagactcagctgggtcaagtggcttgcccaggatcacacaggtcagctgtggaagacccaggcccctggcttcagtctttgggtccagctgtctcctccaggcagtgctgccagtgtccaggcatatggcttggcaaagtgggagaacctctgcttggggtctcgattggagaaaggaatggcttcctctcccctgatgtgagccgtcccagggccatgttgccgtaagggggtgcacagcctgtccactagcccagctgcggaagccacagctgtgtcccacgtgcagtgcctcagaaggcagaggaagccttgaggtgggggcccaagacccagattctgacatcagctctgccactgagaacagcgtgacctcaggcaaggtctgttacctcagtttccccatcggtaagaggaaggagtcagatgggtatttaaggagtttgcaaccctcgtgtcctgctgtcctggacaatgctctgtaggtgcttcctctgccaaaaaggaactggtggccttgcctccctctcctggacacctggggtcaaaggtcactgccaaatagacagctagaactggggttcacctaagcatcccttgagatgtacaaccttctaggaggacattcctcctgcctgcccccctccccgcaagaggtcttttcaggaataactgaaaaacccatggggtttgtggtcctgctgctctgccaagtccctcttgggcagctgggctgaggactggaacattctgtggcaagcaggaggcctcagcagagatcaccaagacccagcacacctggtgcagacagccacggcatcctccttcctgcaggtcacccccacgagccacttaacctctcagagcctctgcttctcacctgtcaagtgtgtgaggtagggtaccagttagtcacggtacttgctgtctcacagaggagccgacaggtgagaacagtgtgcatgtgggtgtgaacactcagtgtggaaagcaggtgtgtgtgtattcaatcccccaatggtgtcaagggctcctcaaaatgccatgggtccccaggtcattgtgataaacactgtccccatcctgctgtggttgtggctggaaggtccctcaaggagtagactgtccctgagaacaagatggatgcagggtagtgacgagttcaagcatagctagagttactgttttttagcaactcaacctgattttttaagctgcctacttttactttttactgtgagcttctgtccatcaccatgtaatttgtaataataataatacaaaaagaaaaacgagagagagaagaggacaagatgtccacagaggaatctgcattcgaggctgtttgcagaactaccgcgtttgtaaggactgtttcccactgggaactgtgtgtaattaatgagcagttttatgctttccctctcgtctgtgtacggtgtgattgttgtgtgtttcagaatctctattcagaaccaatagctggtaatgcctgctggctcgctgccctcaagttagcctctgaacgtgccctgcacctagagaagcagccttctcacccgcctcacctggctgctccagcggccaggccagccacctgaccatgaccattgctgatgtgcaacaggccttaattgaaaaaacacacaagtacatacatgcacatgcgcgcacacacacaggtgatttcacaggtagatctggtccctcttgctgtctccaatgctctagaaagcagcaagtaggcagctgacagtgttcccagggtgagtggcatctcccctcatcatcagaaagattcagtcaaattttggcccagagctgaagaggaggacttgggaatgtcagggaaaacatgacagggctaggggttaacaggcttctttggccaggagatggtttccagttcaccgtcaacccaaaagctctcttcaggtcatggcaaacagaccagggctgtgggtgtggctgtgcttggcactgactcccccacaggccgctgtccaggttggctcaggattccagctgccatccccaggcaggcccctccgctggctcggctgctttcacaatcaccatgtctgtctattagagactgtgccattcaaggagacggggtccccgggggtgcagacttgtaaaattttttaatttttcaacttggctgaactggtccccatcaacaggaaaagccttcggaagtgaatttacagatttctcccatgtttgaaattaacataacatgaacccagaaggcagagcttgcagtgagctgagatcgcaccagtgcactccagcctgggcaacagagtgagactctgtctaggtaggtaggtaagaaggaaggaaggaagaacagacctggatggagttattgggaacatgtcttatcaatgttgaagggccccctatcactgtagggagacatccacgtgggttgttttcgtctgctgtgaaaatctagggttggaatcatggaagcaaactgcaggaattcttaatcatcctgctcacgtggtgggcatcagagggtgtctgcttggcccccacagcactgggacagtcagagaggccatgagtggatgacgccctgatcactgccctttgcagtccaggaatacctcactgggctggggccataccctgtgccctctggaagacaagcctgcgcacttactatgtgccagatgccatgcacagtgccctagttccttgctgtagcaccaacacgtcccacgctggtgcttaaatgcacgcaaacaactttggtggttgtggcccgaaaagctcaaatgttaaagttaagcagtcaggcaagctagaagaggtgaggagcctcctagaaaactcattcgatgacacgcgcttccctcacctattcagatacttgccgagtgcctgccacttgcctggccctgtacccagggcccatctgggagccattcctgctatagctgggaccacttgtgaaacggctagttgtgcctaacagacatgctcagattcacaaaatgaattcagaacacttacctgtcccacccgtgaaagtgaccttggaggtgtcattgccccccaccaccccagtttctagtccaagccaacagctggtgctagatagatgcttgatgaatgagcagatttgactgttagttactctgtacctaaaactcctatctttacatcaaagccctgacagatttgcccttgacagactgaaatccggggctgctgcagggttcacctccaggaggcaccattcacgacactgtcccataaatggtaatgggctcccagggatactgtttacatagactgcactgagaacggtgacccttaggtttgtacaatgaggtaccctgttgaatgaccctaaaccagcctccaaaatgtgcaggatcccacattggtcagcgccaaccctgagcacaggatctaaaactatagatgatatggccaccctggccacagctggaaccaagctggtggcccaagagagagcctcttcttggaattgcatgtcagtttctcatacgcagtttcttcctatttttcccatttcccgttttaaagctagtggcatacctcacagtcaaataaccaagtggtcagtgtctcgacaatgtgcagtaacgaggtgggggctgcaagggtgaggggctcagtcaccttaacaaggcaggagacctcccacaaaaggctgatgtgtcgtccccagggccagctggacaagggcatgcagcgcaggggtagggggatggaaatattttctctcccgtaaactctgacttcatgtgagcaggcatggggtctccctgagagctgataaccgggaaaaccaaaaccaataatattcctaataataatactagaatgtaagaataatcatgtgtttttcactgaccgctgttgctctgcttttgtctttatatacagtagtttttataacaatgtccctaggttttaataaaggagtgtcatgtcaactgttccc

SEQ ID NO: 10811 - DNA, 6751 bp, Homo sapiens; identical to SEQ ID NO: 10810
  source 1..6751: mol_type = unassigned DNA

SEQ ID NO: 10812 - DNA, 6924 bp, Homo sapiens
  source 1..6924: mol_type = unassigned DNA
atgtcggataccaaggtaaaagttgccgtccgggtccggcccatgaaccgacgagaactggaactgaacaccaagtgcgtggtggagatggaagggaatcaaacggtcctgcaccctcctccttctaacaccaaacagggagaaaggaaacctcccaaggtatttgcctttgattattgcttttggtccatggatgaatctaacactacaaaatacgctggtcaagaagtggttttcaagtgccttggggaaggaattcttgaaaaagcctttcaggggtataatgcgtgtatttttgcatatggacagacaggttcgggaaaatccttttccatgatgggccatgctgagcagctgggccttattccaaggctctgctgtgctttatttaaaaggatctctttggagcaaaatgagtcacagacctttaaagttgaagtgtcctatatggaaatttataatgagaaagttcgggatcttttagaccccaaagggagtagacagtctcttaaagttcgagaacataaagttttgggaccatatgtagatggtttatctcaactagctgtcactagttttgaggatattgagtcattgatgtctgagggaaataagtctcgaacggtagctgctaccaacatgaacgaagaaagcagccgctcccatgctgtgttcaacatcataatcacacagacactttatgacctgcagtctgggaattccggggagaaagtcagtaaggtcagcttggtagacctggcgggtagcgaaagagtatctaaaacaggagctgcaggagagcgactgaaagaaggcagcaacattaacaaatcgcttacaaccttggggttggttatatcatcactggctgaccaggcagctggcaagggtaaaagcaaatttgtgccttatcgagattcagtcctcacttggctgcttaaggacaacttggggggcaacagccaaacctctatgatagccacaatcagcccagccgcagacaactatgaagagaccctctccacattaagatatgcagaccgagccaaaaggattgtgaaccatgctgttgtgaatgaggaccccaacgcaaaagtgatccgagaactgcgggaggaagtcgagaaactgagagagcagctctctcaggcagaggccatgaaggcccctgaactgaaggagaagctcgaagagtctgaaaagctgataaaagaactaacagtgacttgggaagagaagctgagaaaaacagaagagatagcacaggaaagacaacgacaacttgaaagcatggggatttccctggagatgtccggtatcaaggtgggggatgacaaatgctacttagtcaatctgaatgcagaccctgctcttaacgaacttctggtttattatttaaaggatcacaccagggtgggtgcagatacctctcaagatatccagctttttggcataggaattcagcctcagcactgtgagattgacattgcatctgatggagacgtcactctcactccaaaagaaaatgcaaggtcctgtgtgaacggcacccttgtgtgcagtaccacccagctgtggcatggtgaccgaatcctatggggaaataatcacttttttagaataaacttacctaagaggaaacgtcgagattggttgaaagactttgaaaaagaaacgggcccgccagagcatgacctggatgcagccagtgaggcttcctctgaaccagactataactatgaatttgcacagatggaagttatcatgaaaaccctgaatagtaatgacccagttcaaaatgtggttcaggtcctggagaaacaatacctagaagaaaagagaagtgccctagaggagcagcggctcatgtatgagcgggaactggagcaactccgccagcagctctcccccgacaggcagccacagagtagcggccctgaccgcctggcctacagcagccagacagcgcagcagaaggtgacccagtgggcagaagagagggatgaactcttccgacaaagcctggcaaaactgcgagagcagctggttaaagctaataccttggtgagggaagcaaacttcctggctgaggaaatgagcaaactcaccgattaccaagtgactcttcagatccctgctgcaaacctcagtgccaataggaagagaggtgcaatagtgagtgaaccagctatccaagtgaggaggaaaggaaagagcacccaagtgtggaccattgagaagctggagaataaattaattgacatgagagacctttaccaagaatggaaggaaaaagttcctgaggcaaagagactctacggaaaacgaggtgaccctttctatgaagcccaagaaaatcacaacctcatcggggtggcgaatgtattcttggaatgcctcttctgtgatgtgaaacttcagtatgcagtccctatcatcagccagcagggggaggttgcagggcgtctccacgtggaagtgatgcgtgttacaggagctgttccagagcgtgtggtggaggatgactcttcggagaattccagtgaaagtgggagccttgaagtcgtagacagcagcggggaaatcattcaccgagtcaaaaagctgacatgtcgggtaaaaattaaagaagcaacggggctgcccttaaacctctcaaattttgtcttctgtcaatacacattctgggaccagtgtgagtctacggtggctgccccggtggtggaccccgaggtgccttcaccacagtccaaggatgcccagtacacagtgaccttctcccactgtaaggactatgtggtgaatgtaacagaagaatttctggagttcatttcagatggagcactggccattgaagtatggggccaccggtgtgctggaaatggcagctccatctgggaggtcgattctcttcatgctaagacaagaacactgcatgacaggtggaatgaagtaacgcgaagaatagaaatgtggatctccatattagaattgaatgagttaggagagtatgctgcagtggaacttcatcaggcaaaagatgtcaacacaggaggcatctttcaacttagacagggtcattcccgtagagtacaagtcacggtgaaacctgtgcagcattcagggacactgccacttatggttgaagccatcctgtcagtatccatcggctgtgtaactgccaggtccaccaaactccaaagagggctggacagttaccaggaagaagacttaaactgcgtaagggagaggtggtcagatgcactcattaaacgacgagaatacctggatgaacagataaaaaaagtcagcaataaaacagagaaaacagaggacgatgtggagcgggaagcccagcttgtggagcagtgggtagggctgactgaggaaaggaatgctgtgctggtgccagccccaggcagtgggattcctggggcacctgccgactggatcccacctcctggaatggaaacccacataccagttctcttcctcgatttgaatgcggatgacctcagtgccaatgagcagcttgttggcccccatgcatccggcgtgaactccatcctgcccaaggagcatggcagccagtttttctacctgcccatcataaagcacagtgatgatgaggtttcagccacagcctcttgggattcctcggtgcatgattctgttcacttgaatagggtcacaccacagaatgaaaggatttacctaattgtgaaaaccacagttcaactcagccaccctgctgctatggagttagtattacgaaaacgaattgcagccaatatttacaacaaacagagtttcacgcagagtttgaagaggagaatatccctgaaaaatatattttattcctgtggtgtaacctatgaaatagtatccaatataccaaaggcaactgaggagatagaggaccgggaaacgctggctctcctggcagcaaggagtgaaaacgaaggcacatcagatggggagacgtacattgagaagtacactcgaggcgtgctgcaggtggaaaacattctgagtcttgaacggctccggcaggccgtcacagtcaaagaagcactttccaccaaagcccggcacattcggaggagcctcagtacaccaaatgttcataatgtctcttccagccgaccggacctttctggctttgatgaagatgacaagggttggccagagaaccagttggacatgtctgactatagctccagttaccaagatgtagcatgttatggaactttacccagggattctcctcgaaggaataaagaaggttgtacatcagagactcctcatgccttaaccgtcagcccttttaaagcattctctcctcagccaccaaagtttttcaagcccctaatgcctgtaaaagaggagcataagaaaaggatagccctggaagcaaggcctcttctaagccaggaggactctgaggaggaagaaaatgagctggaagctattaacaggaagctaataagttcacagccttatgtacctgtggagtttgctgacttcagtgtttacaatgccagcttggagaacagggaatggttttcctctaaagtagatctgtcaaactcacgggtcttggagaaagaagtgtcccgtagccctaccaccagcagtattaccagtggctacttttcccacagtgcctccaatgccaccctgtctgacatggtggtcccttctagtgacagctcagaccagctggccattcagacgaaggatgcagactccaccgagcactccacaccatcgcttgtgcatgatttcaggccgtcctcaaacaaagagttgacagaagtcgaaaaaggcttggtaaaggacaagataattgtggtgccactcaaggaaaacagtgccttagccaaagggagcccatcatcccagagcatccctgagaaaaactccaaatcactgtgcaggactggctcatgttcagaactagatgcctgccccagcaaaattagccagccagccaggggattctgccccagggaggtgacggtagaacacaccaccaacatccttgaagaccattctttcacagaatttatgggagtgtcagagggaaaagattttgatggtttgacagattcttctgctggagagctttccagtaggaggagtctaccaaataaaacaggcggcaagactgtctccgatgggctccaccaccccagccagctgcattccaagttagagaatgaccagggaggcacaacctcacggtgagagcagcaagcacccctcctcaggccacagcttggcgtctttgttcgcctggtcaccttgggcaagcaccagccccatctctaaaacatgctgccgcctggctggacctcagaccagaagctggagaatccacaccgtgcacttcctgggccacctcctttcccctccccagtgggagaagcggcactttgtcacttgggtgaatcaacagcctctgctttttccagaaagcaagagaactgaaaatcctggattaactaagtgacagtatttttttttgcacttactacacacctccactgtatagaaacctctacagattccaacagactttattcttgtacaattttaatcagttcttactgtagaatctggagtcaatgctctaatctgttttttataaataatatatattatgtatatgaaatgtgtatctatagtatgtctggagacagacaaggctgcacactaaaatgcagataaaggtgatttgtagaaaatcataaggtactggacttcgttacaaagcaacttgggcgatctcttatacatgagcagatgaaaaatattttattgcctaagaatgagcttgcaaatccctctttgcagaaaaggttatagaatgctgttctttataaccaaagaacttacataagacaacatttttgctgtccactcttttgtgtgaacatgtatgtttgactgcaagtttggtgccataattcccttggctaccaagccacgtgctgccattctctgtcctttgtttcataagcacactgagaaatctcacagctatattctttggtcttccacctgcccctccacctgctgacttgacattgtattataactgttgacaatgactggggtcctgactccacagttgcctggaccgtggctcagcccagctgggcaggtggaatgaagagagccgtattactgtaagaaaacacaaggacagccaggagtagtggtggggtgggtggggtgggaggtgttgatttttgtgtgtttctgtgtgtgtggttttgttttggattggtaggtttcactgtggcgtggttttgctgttgttattttgcttgattctggaaaatgctgaggagatggactgagctatgaagttcaatggttcaccctttaccatgtttgcaggagatgatcgaatacagatgaccctgctgtcgtgtcttcatttgtaaaattctcctacaaatggagacattgaaggattatgtgtatggaaatttttacaaaattcctttctgtacctattctgtagatgcctgtataatcggtctggatgtacagctataaatgtgttgtgagagcaagagagagagaatgggtagagcctgctgtaccttttttcttttaaattcttcgagttggtaaatgagtaagatattggaaaccttaatgaaaagctgctgttcatgatttgtgtgtatagtgagctgactgtagtattttactattgtctgttaaaaaaagaaaaactgtaatttatatcccctttgaactttattgtgtttaattggtacacatttctgtgtgtgtgtgtgtgtatgtgttttagaatacaaactgtgtaattcagattttaaaacactaatcatttgtctttaataaccctgcctttagtttcaaatctaacttaccatatttcta

SEQ ID NO: 10813 - DNA, 4009 bp, Homo sapiens
  source 1..4009: mol_type = unassigned DNA
gaagtaacgcgaagaatagaaatgtggatctccatattagaattgaatgagttaggagagtatgctgcagtggaacttcatcaggcaaaagatgtcaacacaggaggcatctttcaacttagacagggtcattcccgtagagtacaagtcacggtgaaacctgtgcagcattcagggacactgccacttatggttgaagccatcctgtcagtatccatcggctgtgtaactgccaggtccaccaaactccaaagagggctggacagttaccaggaagaagacttaaactgcgtaagggagaggtggtcagatgcactcattaaacgacgagaatacctggatgaacagataaaaaaagtcagcaataaaacagagaaaacagaggacgatgtggagcgggaagcccagcttgtggagcagtgggtagggctgactgaggaaaggaatgctgtgctggtgccagccccaggcagtgggattcctggggcacctgccgactggatcccacctcctggaatggaaacccacataccagttctcttcctcgatttgaatgcggatgacctcagtgccaatgagcagcttgttggcccccatgcatccggcgtgaactccatcctgcccaaggagcatggcagccagtttttctacctgcccatcataaagcacagtgatgatgaggtttcagccacagcctcttgggattcctcggtgcatgattctgttcacttgaatagggtcacaccacagaatgaaaggatttacctaattgtgaaaaccacagttcaactcagccaccctgctgctatggagttagtattacgaaaacgaattgcagccaatatttacaacaaacagagtttcacgcagagtttgaagaggagaatatccctgaaaaatatattttattcctgtggtgtaacctatgaaatagtatccaatataccaaaggcaactgaggagatagaggaccgggaaacgctggctctcctggcagcaaggagtgaaaacgaaggcacatcagatggggagacgtacattgagaagtacactcgaggcgtgctgcaggtggaaaacattctgagtcttgaacggctccggcaggccgtcacagtcaaagaagcactttccaccaaagcccggcacattcggaggagcctcagtacaccaaatgttcataatgtctcttccagccgaccggacctttctggctttgatgaagatgacaagggttggccagagaaccagttggacatgtctgactatagctccagttaccaagatgtagcatgttatggaactttacccagggattctcctcgaaggaataaagaaggttgtacatcagagactcctcatgccttaaccgtcagcccttttaaagcattctctcctcagccaccaaagtttttcaagcccctaatgcctgtaaaagaggagcataagaaaaggatagccctggaagcaaggcctcttctaagccaggagagcatgcctccacctcaggcacataaccctggctgcattgtaccctcaggaagcaatggcagcagcatgccagtagaacacaatagcaaacgtgagaagaagattgactctgaggaggaagaaaatgagctggaagctattaacaggaagctaataagttcacagccttatgtacctgtggagtttgctgacttcagtgtttacaatgccagcttggagaacagggaatggttttcctctaaagtagatctgtcaaactcacgggtcttggagaaagaagtgtcccgtagccctaccaccagcagtattaccagtggctacttttcccacagtgcctccaatgccaccctgtctgacatggtggtcccttctagtgacagctcagaccagctggccattcagacgaaggatgcagactccaccgagcactccacaccatcgcttgtgcatgatttcaggccgtcctcaaacaaagagttgacagaagtcgaaaaaggcttggtaaaggacaagataattgtggtgccactcaaggaaaacagtgccttagccaaagggagcccatcatcccagagcatccctgagaaaaactccaaatcactgtgcaggactggctcatgttcagaactagatgcctgccccagcaaaattagccagccagccaggggattctgccccagggaggtgacggtagaacacaccaccaacatccttgaagaccattctttcacagaatttatgggagtgtcagagggaaaagattttgatggtttgacagattcttctgctggagagctttccagtaggaggagtctaccaaataaaacaggcggcaagactgtctccgatgggctccaccaccccagccagctgcattccaagttagagaatgaccagggaggcacaacctcacggtgagagcagcaagcacccctcctcaggccacagcttggcgtctttgttcgcctggtcaccttgggcaagcaccagccccatctctaaaacatgctgccgcctggctggacctcagaccagaagctggagaatccacaccgtgcacttcctgggccacctcctttcccctccccagtgggagaagcggcactttgtcacttgggtgaatcaacagcctctgctttttccagaaagcaagagaactgaaaatcctggattaactaagtgacagtatttttttttgcacttactacacacctccactgtatagaaacctctacagattccaacagactttattcttgtacaattttaatcagttcttactgtagaatctggagtcaatgctctaatctgttttttataaataatatatattatgtatatgaaatgtgtatctatagtatgtctggagacagacaaggctgcacactaaaatgcagataaaggtgatttgtagaaaatcataaggtactggacttcgttacaaagcaacttgggcgatctcttatacatgagcagatgaaaaatattttattgcctaagaatgagcttgcaaatccctctttgcagaaaaggttatagaatgctgttctttataaccaaagaacttacataagacaacatttttgctgtccactcttttgtgtgaacatgtatgtttgactgcaagtttggtgccataattcccttggctaccaagccacgtgctgccattctctgtcctttgtttcataagcacactgagaaatctcacagctatattctttggtcttccacctgcccctccacctgctgacttgacattgtattataactgttgacaatgactggggtcctgactccacagttgcctggaccgtggctcagcccagctgggcaggtggaatgaagagagccgtattactgtaagaaaacacaaggacagccaggagtagtggtggggtgggtggggtgggaggtgttgatttttgtgtgtttctgtgtgtgtggttttgttttggattggtaggtttcactgtggcgtggttttgctgttgttattttgcttgattctggaaaatgctgaggagatggactgagctatgaagttcaatggttcaccctttaccatgtttgcaggagatgatcgaatacagatgaccctgctgtcgtgtcttcatttgtaaaattctcctacaaatggagacattgaaggattatgtgtatggaaatttttacaaaattcctttctgtacctattctgtagatgcctgtataatcggtctggatgtacagctataaatgtgttgtgagagcaagagagagagaatgggtagagcctgctgtaccttttttcttttaaattcttcgagttggtaaatgagtaagatattggaaaccttaatgaaaagctgctgttcatgatttgtgtgtatagtgagctgactgtagtattttactattgtctgttaaaaaaagaaaaactgtaatttatatcccctttgaactttattgtgtttaattggtacacatttctgtgtgtgtgtgtgtgtatgtgttttagaatacaaactgtgtaattcag

SEQ ID NO: 10814 - DNA, 5941 bp, Homo sapiens
  source 1..5941: mol_type = unassigned DNA
gcggccgcgctcgaggggcgcgcggctgcagcggcggcggcgccgcgcgtgaggggccgcctaaggccgagcgggcgcggcgagcggccgggcgagcgcagccaacatgtcggataccaaggtaaaagttgccgtccgggtccggcccatgaaccgacgagaactggaactgaacaccaagtgcgtggtggagatggaagggaatcaaacggtcctgcaccctcctccttctaacaccaaacagggagaaaggaaacctcccaaggtatttgcctttgattattgcttttggtccatggatgaatctaacactacaaaatacgctggtcaagaagtggttttcaagtgccttggggaaggaattcttgaaaaagcctttcaggggtataatgcgtgtatttttgcatatggacagacaggttcgggaaaatccttttccatgatgggccatgctgagcagctgggccttattccaaggctctgctgtgctttatttaaaaggatctctttggagcaaaatgagtcacagacctttaaagttgaagtgtcctatatggaaatttataatgagaaagttcgggatcttttagaccccaaagggagtagacagtctcttaaagttcgagaacataaagttttgggaccatatgtagatggtttatctcaactagctgtcactagttttgaggatattgagtcattgatgtctgagggaaataagtctcgaacggtagctgctaccaacatgaacgaagaaagcagccgctcccatgctgtgttcaacatcataatcacacagacactttatgacctgcagtctgggaattccggggagaaagtcagtaaggtcagcttggtagacctggcgggtagcgaaagagtatctaaaacaggagctgcaggagagcgactgaaagaaggcagcaacattaacaaatcgcttacaaccttggggttggttatatcatcactggctgaccaggcagctggcaagggtaaaagcaaatttgtgccttatcgagattcagtcctcacttggctgcttaaggacaacttggggggcaacagccaaacctctatgatagccacaatcagcccagccgcagacaactatgaagagaccctctccacattaagatatgcagaccgagccaaaaggattgtgaaccatgctgttgtgaatgaggaccccaacgcaaaagtgatccgagaactgcgggaggaagtcgagaaactgagagagcagctctctcaggcagaggccatgaaggcccctgaactgaaggagaagctcgaagagtctgaaaagctgataaaagaactaacagtgacttgggaagagaagctgagaaaaacagaagagatagcacaggaaagacaacgacaacttgaaagcatggggatttccctggagatgtccggtatcaaggtgggggatgacaaatgctacttagtcaatctgaatgcagaccctgctcttaacgaacttctggtttattatttaaaggatcacaccagggtgggtgcagatacctctcaagatatccagctttttggcataggaattcagcctcagcactgtgagattgacattgcatctgatggagacgtcactctcactccaaaagaaaatgcaaggtcctgtgtgaacggcacccttgtgtgcagtaccacccagctgtggcatggtgaccgaatcctatggggaaataatcacttttttagaataaacttacctaagaggaaacgtcgagattggttgaaagactttgaaaaagaaacgggcccgccagagcatgacctggatgcagccagtgaggcttcctctgaaccagactataactatgaatttgcacagatggaagttatcatgaaaaccctgaatagtaatgacccagttcaaaatgtggttcaggtcctggagaaacaatacctagaagaaaagagaagtgccctagaggagcagcggctcatgtatgagcgggaactggagcaactccgccagcagctctcccccgacaggcagccacagagtagcggccctgaccgcctggcctacagcagccagacagcgcagcagaaggtgacccagtgggcagaagagagggatgaactcttccgacaaagcctggcaaaactgcgagagcagctggttaaagctaataccttggtgagggaagcaaacttcctggctgaggaaatgagcaaactcaccgattaccaagtgactcttcagatccctgctgcaaacctcagtgccaataggaagagaggtgcaatagtgagtgaaccagctatccaagtgaggaggaaaggaaagagcacccaagtgtggaccattgagaagctggagaataaattaattgacatgagagacctttaccaagaatggaaggaaaaagttcctgaggcaaagagactctacggaaaacgaggtgaccctttctatgaagcccaagaaaatcacaacctcatcggggtggcgaatgtattcttggaatgcctcttctgtgatgtgaaacttcagtatgcagtccctatcatcagccagcagggggaggttgcagggcgtctccacgtggaagtgatgcgtgttacaggagctgttccagagcgtgtggtggaggatgactcttcggagaattccagtgaaagtgggagccttgaagtcgtagacagcagcggggaaatcattcaccgagtcaaaaagctgacatgtcgggtaaaaattaaagaagcaacggggctgcccttaaacctctcaaattttgtcttctgtcaatacacattctgggaccagtgtgagtctacggtggctgccccggtggtggaccccgaggtgccttcaccacagtccaaggatgcccagtacacagtgaccttctcccactgtaaggactatgtggtgaatgtaacagaagaatttctggagttcatttcagatggagcactggccattgaagtatggggccaccggtgtgctggaaatggcagctccatctgggaggtcgattctcttcatgctaagacaagaacactgcatgacaggtggaatgaagtaacgcgaagaatagaaatgtggatctccatattagaattgaatgagttaggagagtatgctgcagtggaacttcatcaggcaaaagatgtcaacacaggaggcatctttcaacttagacagggtcattcccgtagagtacaagtcacggtgaaacctgtgcagcattcagggacactgccacttatggttgaagccatcctgtcagtatccatcggctgtgtaactgccaggtccaccaaactccaaagagggctggacagttaccagagagatgatgaggatggtgatgatatggatagttatcaggaagaagacttaaactgcgtaagggagaggtggtcagatgcactcattaaacgacgagaatacctggatgaacagataaaaaaagtcagcaataaaacagagaaaacagaggacgatgtggagcgggaagcccagcttgtggagcagtgggtagggctgactgaggaaaggaatgctgtgctggtgccagccccaggcagtgggattcctggggcacctgccgactggatcccacctcctggaatggaaacccacataccagttctcttcctcgatttgaatgcggatgacctcagtgccaatgagcagcttgttggcccccatgcatccggcgtgaactccatcctgcccaaggagcatggcagccagtttttctacctgcccatcataaagcacagtgatgatgaggtttcagccacagcctcttgggattcctcggtgcatgattctgttcacttgaatagggtcacaccacagaatgaaaggatttacctaattgtgaaaaccacagttcaactcagccaccctgctgctatggagttagtattacgaaaacgaattgcagccaatatttacaacaaacagagtttcacgcagagtttgaagaggagaatatccctgaaaaatatattttattcctgtggtgtaacctatgaaatagtatccaatataccaaaggcaactgaggagatagaggaccgggaaacgctggctctcctggcagcaaggagtgaaaacgaaggcacatcagatggggagacgtacattgagaagtacactcgaggcgtgctgcaggtggaaaacattctgagtcttgaacggctccggcaggccgtcacagtcaaagaagcactttccaccaaagcccggcacattcggaggagcctcagtacaccaaatgttcataatgtctcttccagccgaccggacctttctggctttgatgaagatgacaagggttggccagagaaccagttggacatgtctgactatagctccagttaccaagatgtagcatgttatggaactttacccagggattctcctcgaaggaataaagaaggttgtacatcagagactcctcatgccttaaccgtcagcccttttaaagcattctctcctcagccaccaaagtttttcaagcccctaatgcctgtaaaagaggagcataagaaaaggatagccctggaagcaaggcctcttctaagccaggagagcatgcctccacctcaggcacataaccctggctgcattgtaccctcaggaagcaatggcagcagcatgccagtagaacacaatagcaaacgtgagaagaagattgactctgaggaggaagaaaatgagctggaagctattaacaggaagctaataagttcacagccttatgtacctgtggagtttgctgacttcagtgtttacaatgccagcttggagaacagggaatggttttcctctaaagtagatctgtcaaactcacgggtcttggagaaagaagtgtcccgtagccctaccaccagcagtattaccagtggctacttttcccacagtgcctccaatgccaccctgtctgacatggtggtcccttctagtgacagctcagaccagctggccattcagacgaaggatgcagactccaccgagcactccacaccatcgcttgtgcatgatttcaggccgtcctcaaacaaagagttgacagaagtcgaaaaaggcttggtaaaggacaagataattgtggtgccactcaaggaaaacagtgccttagccaaagggagcccatcatcccagagcatccctgagaaaaactccaaatcactgtgcaggactggctcatgttcagaactagatgcctgccccagcaaaattagccagccagccaggggattctgccccagggaggtgacggtagaacacaccaccaacatccttgaagaccattctttcacagaatttatgggagtgtcagagggaaaagattttgatggtttgacagattcttctgctggagagctttccagtaggaggagtctaccaaataaaacaggcggcaagactgtctccgatgggctccaccaccccagccagctgcattccaagttagagaatgaccaggtaataattccagaggcagccttttgggttctgtgctgtcaatgagtatgtctaactgtatgtcaaccccagaggcccttcaccgcaacaacttggtaggaaagattcatccagttgtttgtgacagcaaagatgagcccacagagaagcaggctcacttcctgcacagctgtctctgtcggagagcaagtctgttttgggaactagaacgcaattgtgaaattataagaccagtggatttttttacctggcacatgggttggtgttgaatgaagtgttcagatggataaggatcaatctcatattcattccctgggatgtttagttaccagttttcccaaagtgttctggtagcatctaccatatttcatcaaatctgtgattcctttgattattatatgaaccattattttatgtatcattaagaaaaaatactgccaattaaactctgtcatatcaaca

SEQ ID NO: 10815 - DNA, 5707 bp, Homo sapiens
  source 1..5707: mol_type = unassigned DNA
cgggcgagcgcagccaacatgtcggataccaaggtaaaagttgccgtccgggtccggcccatgaaccgacgagaactggaactgaacaccaagtgcgtggtggagatggaagggaatcaaacggtcctgcaccctcctccttctaacaccaaacagggagaaaggaaacctcccaaggtatttgcctttgattattgcttttggtccatggatgaatctaacactacaaaatacgctggtcaagaagtggttttcaagtgccttggggaaggaattcttgaaaaagcctttcaggggtataatgcgtgtatttttgcatatggacagacaggttcgggaaaatccttttccatgatgggccatgctgagcagctgggccttattccaaggctctgctgtgctttatttaaaaggatctctttggagcaaaatgagtcacagacctttaaagttgaagtgtcctatatggaaatttataatgagaaagttcgggatcttttagaccccaaagggagtagacagtctcttaaagttcgagaacataaagttttgggaccatatgtagatggtttatctcaactagctgtcactagttttgaggatattgagtcattgatgtctgagggaaataagtctcgaacggtagctgctaccaacatgaacgaagaaagcagccgctcccatgctgtgttcaacatcataatcacacagacactttatgacctgcagtctgggaattccggggagaaagtcagtaaggtcagcttggtagacctggcgggtagcgaaagagtatctaaaacaggagctgcaggagagcgactgaaagaaggcagcaacattaacaaatcgcttacaaccttggggttggttatatcatcactggctgaccaggcagctggcaagggtaaaagcaaatttgtgccttatcgagattcagtcctcacttggctgcttaaggacaacttggggggcaacagccaaacctctatgatagccacaatcagcccagccgcagacaactatgaagagaccctctccacattaagatatgcagaccgagccaaaaggattgtgaaccatgctgttgtgaatgaggaccccaacgcaaaagtgatccgagaactgcgggaggaagtcgagaaactgagagagcagctctctcaggcagaggccatgaaggcccctgaactgaaggagaagctcgaagagtctgaaaagctgataaaagaactaacagtgacttgggaagagaagctgagaaaaacagaagagatagcacaggaaagacaacgacaacttgaaagcatggggatttccctggagatgtccggtatcaaggtgggggatgacaaatgctacttagtcaatctgaatgcagaccctgctcttaacgaacttctggtttattatttaaaggatcacaccagggtgggtgcagatacctctcaagatatccagctttttggcataggaattcagcctcagcactgtgagattgacattgcatctgatggagacgtcactctcactccaaaagaaaatgcaaggtcctgtgtgaacggcacccttgtgtgcagtaccacccagctgtggcatggtgaccgaatcctatggggaaataatcacttttttagaataaacttacctaagaggaaacgtcgagattggttgaaagactttgaaaaagaaacgggcccgccagagcatgacctggatgcagccagtgaggcttcctctgaaccagactataactatgaatttgcacagatggaagttatcatgaaaaccctgaatagtaatgacccagttcaaaatgtggttcaggtcctggagaaacaatacctagaagaaaagagaagtgccctagaggagcagcggctcatgtatgagcgggaactggagcaactccgccagcagctctcccccgacaggcagccacagagtagcggccctgaccgcctggcctacagcagccagacagcgcagcagaaggtgacccagtgggcagaagagagggatgaactcttccgacaaagcctggcaaaactgcgagagcagctggttaaagctaataccttggtgagggaagcaaacttcctggctgaggaaatgagcaaactcaccgattaccaagtgactcttcagatccctgctgcaaacctcagtgccaataggaagagaggtgcaatagtgagtgaaccagctatccaagtgaggaggaaaggaaagagcacccaagtgtggaccattgagaagctggagaataaattaattgacatgagagacctttaccaagaatggaaggaaaaagttcctgaggcaaagagactctacggaaaacgaggtgaccctttctatgaagcccaagaaaatcacaacctcatcggggtggcgaatgtattcttggaatgcctcttctgtgatgtgaaacttcagtatgcagtccctatcatcagccagcagggggaggttgcagggcgtctccacgtggaagtgatgcgtgttacaggagctgttccagagcgtgtggtggaggatgactcttcggagaattccagtgaaagtgggagccttgaagtcgtagacagcagcggggaaatcattcaccgagtcaaaaagctgacatgtcgggtaaaaattaaagaagcaacggggctgcccttaaacctctcaaattttgtcttctgtcaatacacattctgggaccagtgtgagtctacggtggctgccccggtggtggaccccgaggtgccttcaccacagtccaaggatgcccagtacacagtgaccttctcccactgtaaggactatgtggtgaatgtaacagaagaatttctggagttcatttcagatggagcactggccattgaagtatggggccaccggtgtgctggaaatggcagctccatctgggaggtcgattctcttcatgctaagacaagaacactgcatgacaggtggaatgaagtaacgcgaagaatagaaatgtggatctccatattagaattgaatgagttaggagagtatgctgcagtggaacttcatcaggcaaaagatgtcaacacaggaggcatctttcaacttagacagggtcattcccgtagagtacaagtcacggtgaaacctgtgcagcattcagggacactgccacttatggttgaagccatcctgtcagtatccatcggctgtgtaactgccaggtccaccaaactccaaagagggctggacagttaccaggaagaagacttaaactgcgtaagggagaggtggtcagatgcactcattaaacgacgagaatacctggatgaacagataaaaaaagtcagcaataaaacagagaaaacagaggacgatgtggagcgggaagcccagcttgtggagcagtgggtagggctgactgaggaaaggaatgctgtgctggtgccagccccaggcagtgggattcctggggcacctgccgactggatcccacctcctggaatggaaacccacataccagttctcttcctcgatttgaatgcggatgacctcagtgccaatgagcagcttgttggcccccatgcatccggcgtgaactccatcctgcccaaggagcatggcagccagtttttctacctgcccatcataaagcacagtgatgatgaggtttcagccacagcctcttgggattcctcggtgcatgattctgttcacttgaatagggtcacaccacagaatgaaaggatttacctaattgtgaaaaccacagttcaactcagccaccctgctgctatggagttagtattacgaaaacgaattgcagccaatatttacaacaaacagagtttcacgcagagtttgaagaggagaatatccctgaaaaatatattttattcctgtggtgtaacctatgaaatagtatccaatataccaaaggcaactgaggagatagaggaccgggaaacgctggctctcctggcagcaaggagtgaaaacgaaggcacatcagatggggagacgtacattgagaagtacactcgaggcgtgctgcaggtggaaaacattctgagtcttgaacggctccggcaggccgtcacagtcaaagaagcactttccaccaaagcccggcacattcggaggagcctcagtacaccaaatgttcataatgtctcttccagccgaccggacctttctggctttgatgaagatgacaagggttggccagagaaccagttggacatgtctgactatagctccagttaccaagatgtagcatgttatggaactttacccagggattctcctcgaaggaataaagaaggttgtacatcagagactcctcatgccttaaccgtcagcccttttaaagcattctctcctcagccaccaaagtttttcaagcccctaatgcctgtaaaagaggagcataagaaaaggatagccctggaagcaaggcctcttctaagccaggaggactctgaggaggaagaaaatgagctggaagctattaacaggaagctaataagttcacagccttatgtacctgtggagtttgctgacttcagtgtttacaatgccagcttggagaacagggaatggttttcctctaaagtagatctgtcaaactcacgggtcttggagaaagaagtgtcccgtagccctaccaccagcagtattaccagtggctacttttcccacagtgcctccaatgccaccctgtctgacatggtggtcccttctagtgacagctcagaccagctggccattcagacgaaggatgcagactccaccgagcactccacaccatcgcttgtgcatgatttcaggccgtcctcaaacaaagagttgacagaagtcgaaaaaggcttggtaaaggacaagataattgtggtgccactcaaggaaaacagtgccttagccaaagggagcccatcatcccagagcatccctgagaaaaactccaaatcactgtgcaggactggctcatgttcagaactagatgcctgccccagcaaaattagccagccagccaggggattctgccccagggaggtgacggtagaacacaccaccaacatccttgaagaccattctttcacagaatttatgggagtgtcagagggaaaagattttgatggtttgacagattcttctgctggagagctttccagtaggaggagtctaccaaataaaacaggcggcaagactgtctccgatgggctccaccaccccagccagctgcattccaagttagagaatgaccaggtaataattccagaggcagccttttgggttctgtgctgtcaatgagtatgtctaactgtatgtcaaccccagaggcccttcaccgcaacaacttggtaggaaagattcatccagttgtttgtgacagcaaagatgagcccacagagaagcaggctcacttcctgcacagctgtctctgtcggagagcaagtctgttttgggaactagaacgcaattgtgaaattataagaccagtggatttttttacctggcacatgggttggtgttgaatgaagtgttcagatggataaggatcaatctcatattcattccctgggatgtttagttaccagttttcccaaagtgttctggtagcatctaccatatttcatcaaatctgtgattcctttgattattatatgaaccattattttatgtatcattaagaaaaaatactgccaattaaactctgtcatatcaa

SEQ ID NO: 10816 - DNA, 5747 bp, Homo sapiens
  source 1..5747: mol_type = unassigned DNA
ccgggcgagcgcagccaacatgtcggataccaaggtaaaagttgccgtccgggtccggcccatgaaccgacgagaactggaactgaacaccaagtgcgtggtggagatggaagggaatcaaacggtcctgcaccctcctccttctaacaccaaacagggagaaaggaaacctcccaaggtatttgcctttgattattgcttttggtccatggatgaatctaacactacaaaatacgctggtcaagaagtggttttcaagtgccttggggaaggaattcttgaaaaagcctttcaggggtataatgcgtgtatttttgcatatggacagacaggttcgggaaaatccttttccatgatgggccatgctgagcagctgggccttattccaaggctctgctgtgctttatttaaaaggatctctttggagcaaaatgagtcacagacctttaaagttgaagtgtcctatatggaaatttataatgagaaagttcgggatcttttagaccccaaagggagtagacagtctcttaaagttcgagaacataaagttttgggaccatatgtagatggtttatctcaactagctgtcactagttttgaggatattgagtcattgatgtctgagggaaataagtctcgaacggtagctgctaccaacatgaacgaagaaagcagccgctcccatgctgtgttcaacatcataatcacacagacactttatgacctgcagtctgggaattccggggagaaagtcagtaaggtcagcttggtagacctggcgggtagcgaaagagtatctaaaacaggagctgcaggagagcgactgaaagaaggcagcaacattaacaaatcgcttacaaccttggggttggttatatcatcactggctgaccaggcagctggcaagggtaaaagcaaatttgtgccttatcgagattcagtcctcacttggctgcttaaggacaacttggggggcaacagccaaacctctatgatagccacaatcagcccagccgcagacaactatgaagagaccctctccacattaagatatgcagaccgagccaaaaggattgtgaaccatgctgttgtgaatgaggaccccaacgcaaaagtgatccgagaactgcgggaggaagtcgagaaactgagagagcagctctctcaggcagaggccatgaaggcccctgaactgaaggagaagctcgaagagtctgaaaagctgataaaagaactaacagtgacttgggaagagaagctgagaaaaacagaagagatagcacaggaaagacaacgacaacttgaaagcatggggatttccctggagatgtccggtatcaaggtgggggatgacaaatgctacttagtcaatctgaatgcagaccctgctcttaacgaacttctggtttattatttaaaggatcacaccagggtgggtgcagatacctctcaagatatccagctttttggcataggaattcagcctcagcactgtgagattgacattgcatctgatggagacgtcactctcactccaaaagaaaatgcaaggtcctgtgtgaacggcacccttgtgtgcagtaccacccagctgtggcatggtgaccgaatcctatggggaaataatcacttttttagaataaacttacctaagaggaaacgtcgagattggttgaaagactttgaaaaagaaacgggcccgccagagcatgacctggatgcagccagtgaggcttcctctgaaccagactataactatgaatttgcacagatggaagttatcatgaaaaccctgaatagtaatgacccagttcaaaatgtggttcaggtcctggagaaacaatacctagaagaaaagagaagtgccctagaggagcagcggctcatgtatgagcgggaactggagcaactccgccagcagctctcccccgacaggcagccacagagtagcggccctgaccgcctggcctacagcagccagacagcgcagcagaaggtgacccagtgggcagaagagagggatgaactcttccgacaaagcctggcaaaactgcgagagcagctggttaaagctaataccttggtgagggaagcaaacttcctggctgaggaaatgagcaaactcaccgattaccaagtgactcttcagatccctgctgcaaacctcagtgccaataggaagagaggtgcaatagtgagtgaaccagctatccaagtgaggaggaaaggaaagagcacccaagtgtggaccattgagaagctggagaataaattaattgacatgagagacctttaccaagaatggaaggaaaaagttcctgaggcaaagagactctacggaaaacgaggtgaccctttctatgaagcccaagaaaatcacaacctcatcggggtggcgaatgtattcttggaatgcctcttctgtgatgtgaaacttcagtatgcagtccctatcatcagccagcagggggaggttgcagggcgtctccacgtggaagtgatgcgtgttacaggagctgttccagagcgtgtggtggaggatgactcttcggagaattccagtgaaagtgggagccttgaagtcgtagacagcagcggggaaatcattcaccgagtcaaaaagctgacatgtcgggtaaaaattaaagaagcaacggggctgcccttaaacctctcaaattttgtcttctgtcaatacacattctgggaccagtgtgagtctacggtggctgccccggtggtggaccccgaggtgccttcaccacagtccaaggatgcccagtacacagtgaccttctcccactgtaaggactatgtggtgaatgtaacagaagaatttctggagttcatttcagatggagcactggccattgaagtatggggccaccggtgtgctggaaatggcagctccatctgggaggtcgattctcttcatgctaagacaagaacactgcatgacaggtggaatgaagtaacgcgaagaatagaaatgtggatctccatattagaattgaatgagttaggagagtatgctgcagtggaacttcatcaggcaaaagatgtcaacacaggaggcatctttcaacttagacagggtcattcccgtagagtacaagtcacggtgaaacctgtgcagcattcagggacactgccacttatggttgaagccatcctgtcagtatccatcggctgtgtaactgccaggtccaccaaactccaaagagggctggacagttaccagagagatgatgaggatggtgatgatatggatagttatcaggaagaagacttaaactgcgtaagggagaggtggtcagatgcactcattaaacgacgagaatacctggatgaacagataaaaaaagtcagcaataaaacagagaaaacagaggacgatgtggagcgggaagcccagcttgtggagcagtgggtagggctgactgaggaaaggaatgctgtgctggtgccagccccaggcagtgggattcctggggcacctgccgactggatcccacctcctggaatggaaacccacataccagttctcttcctcgatttgaatgcggatgacctcagtgccaatgagcagcttgttggcccccatgcatccggcgtgaactccatcctgcccaaggagcatggcagccagtttttctacctgcccatcataaagcacagtgatgatgaggtttcagccacagcctcttgggattcctcggtgcatgattctgttcacttgaatagggtcacaccacagaatgaaaggatttacctaattgtgaaaaccacagttcaactcagccaccctgctgctatggagttagtattacgaaaacgaattgcagccaatatttacaacaaacagagtttcacgcagagtttgaagaggagaatatccctgaaaaatatattttattcctgtggtgtaacctatgaaatagtatccaatataccaaaggcaactgaggagatagaggaccgggaaacgctggctctcctggcagcaaggagtgaaaacgaaggcacatcagatggggagacgtacattgagaagtacactcgaggcgtgctgcaggtggaaaacattctgagtcttgaacggctccggcaggccgtcacagtcaaagaagcactttccaccaaagcccggcacattcggaggagcctcagtacaccaaatgttcataatgtctcttccagccgaccggacctttctggctttgatgaagatgacaagggttggccagagaaccagttggacatgtctgactatagctccagttaccaagatgtagcatgttatggaactttacccagggattctcctcgaaggaataaagaaggttgtacatcagagactcctcatgccttaaccgtcagcccttttaaagcattctctcctcagccaccaaagtttttcaagcccctaatgcctgtaaaagaggagcataagaaaaggatagccctggaagcaaggcctcttctaagccaggaggactctgaggaggaagaaaatgagctggaagctattaacaggaagctaataagttcacagccttatgtacctgtggagtttgctgacttcagtgtttacaatgccagcttggagaacagggaatggttttcctctaaagtagatctgtcaaactcacgggtcttggagaaagaagtgtcccgtagccctaccaccagcagtattaccagtggctacttttcccacagtgcctccaatgccaccctgtctgacatggtggtcccttctagtgacagctcagaccagctggccattcagacgaaggatgcagactccaccgagcactccacaccatcgcttgtgcatgatttcaggccgtcctcaaacaaagagttgacagaagtcgaaaaaggcttggtaaaggacaagataattgtggtgccactcaaggaaaacagtgccttagccaaagggagcccatcatcccagagcatccctgagaaaaactccaaatcactgtgcaggactggctcatgttcagaactagatgcctgccccagcaaaattagccagccagccaggggattctgccccagggaggtgacggtagaacacaccaccaacatccttgaagaccattctttcacagaatttatgggagtgtcagagggaaaagattttgatggtttgacagattcttctgctggagagctttccagtaggaggagtctaccaaataaaacaggcggcaagactgtctccgatgggctccaccaccccagccagctgcattccaagttagagaatgaccaggtaataattccagaggcagccttttgggttctgtgctgtcaatgagtatgtctaactgtatgtcaaccccagaggcccttcaccgcaacaacttggtaggaaagattcatccagttgtttgtgacagcaaagatgagcccacagagaagcaggctcacttcctgcacagctgtctctgtcggagagcaagtctgttttgggaactagaacgcaattgtgaaattataagaccagtggatttttttacctggcacatgggttggtgttgaatgaagtgttcagatggataaggatcaatctcatattcattccctgggatgtttagttaccagttttcccaaagtgttctggtagcatctaccatatttcatcaaatctgtgattcctttgattattatatgaaccattattttatgtatcattaagaaaaaatactgccaattaaactctgtcatatcaa

SEQ ID NO: 10817 - DNA, 5538 bp, Homo sapiens
  source 1..5538: mol_type = unassigned DNA
atgtcggataccaaggtaaaagttgccgtccgggtccggcccatgaaccgacgagaactggaactgaacaccaagtgcgtggtggagatggaagggaatcaaacggtcctgcaccctcctccttctaacaccaaacagggagaaaggaaacctcccaaggtatttgcctttgattattgcttttggtccatggatgaatctaacactacaaaatacgctggtcaagaagtggttttcaagtgccttggggaaggaattcttgaaaaagcctttcaggggtataatgcgtgtatttttgcatatggacagacaggttcgggaaaatccttttccatgatgggccatgctgagcagctgggccttattccaaggctctgctgtgctttatttaaaaggatctctttggagcaaaatgagtcacagacctttaaagttgaagtgtcctatatggaaatttataatgagaaagttcgggatcttttagaccccaaagggagtagacagtctcttaaagttcgagaacataaagttttgggaccatatgtagatggtttatctcaactagctgtcactagttttgaggatattgagtcattgatgtctgagggaaataagtctcgaacggtagctgctaccaacatgaacgaagaaagcagccgctcccatgctgtgttcaacatcataatcacacagacactttatgacctgcagtctgggaattccggggagaaagtcagtaaggtcagcttggtagacctggcgggtagcgaaagagtatctaaaacaggagctgcaggagagcgactgaaagaaggcagcaacattaacaaatcgcttacaaccttggggttggttatatcatcactggctgaccaggcagctggcaagggtaaaagcaaatttgtgccttatcgagattcagtcctcacttggctgcttaaggacaacttggggggcaacagccaaacctctatgatagccacaatcagcccagccgcagacaactatgaagagaccctctccacattaagatatgcagaccgagccaaaaggattgtgaaccatgctgttgtgaatgaggaccccaacgcaaaagtgatccgagaactgcgggaggaagtcgagaaactgagagagcagctctctcaggcagaggccatgaaggcccctgaactgaaggagaagctcgaagagtctgaaaagctgataaaagaactaacagtgacttgggaagagaagctgagaaaaacagaagagatagcacaggaaagacaacgacaacttgaaagcatggggatttccctggagatgtccggtatcaaggtgggggatgacaaatgctacttagtcaatctgaatgcagaccctgctcttaacgaacttctggtttattatttaaaggatcacaccagggtgggtgcagatacctctcaagatatccagctttttggcataggaattcagcctcagcactgtgagattgacattgcatctgatggagacgtcactctcactccaaaagaaaatgcaaggtcctgtgtgaacggcacccttgtgtgcagtaccacccagctgtggcatggtgaccgaatcctatggggaaataatcacttttttagaataaacttacctaagaggaaacgtcgagattggttgaaagactttgaaaaagaaacgggcccgccagagcatgacctggatgcagccagtgaggcttcctctgaaccagactataactatgaatttgcacagatggaagttatcatgaaaaccctgaatagtaatggtggcttcccgataataagcctgtctgcctggtggtcatccccttggtggtcttatttgaagatcctctttcctctcatgtggtttcagacgaagctcctccacaaacactgggataaagacccagttcaaaatgtggttcaggtcctggagaaacaatacctagaagaaaagagaagtgccctagaggagcagcggctcatgtatgagcgggaactggagcaactccgccagcagctctcccccgacaggcagccacagagtagcggccctgaccgcctggcctacagcagccagacagcgcagcagaaggtgacccagtgggcagaagagagggatgaactcttccgacaaagcctggcaaaactgcgagagcagctggttaaagctaataccttggtgagggaagcaaacttcctggctgaggaaatgagcaaactcaccgattaccaagtgactcttcagatccctgctgcaaacctcagtgccaataggaagagaggtgcaatagtgagtgaaccagctatccaagtgaggaggaaaggaaagagcacccaagtgtggaccattgagaagctggagaataaattaattgacatgagagacctttaccaagaatggaaggaaaaagttcctgaggcaaagagactctacggaaaacgaggtgaccctttctatgaagcccaagaaaatcacaacctcatcggggtggcgaatgtattcttggaatgcctcttctgtgatgtgaaacttcagtatgcagtccctatcatcagccagcagggggaggttgcagggcgtctccacgtggaagtgatgcgtgttacaggagctgttccagagcgtgtggtggaggatgactcttcggagaattccagtgaaagtgggagccttgaagtcgtagacagcagcggggaaatcattcaccgagtcaaaaagctgacatgtcgggtaaaaattaaagaagcaacggggctgcccttaaacctctcaaattttgtcttctgtcaatacacattctgggaccagtgtgagtctacggtggctgccccggtggtggaccccgaggtgccttcaccacagtccaaggatgcccagtacacagtgaccttctcccactgtaaggactatgtggtgaatgtaacagaagaatttctggagttcatttcagatggagcactggccattgaagtatggggccaccggtgtgctggaaatggcagctccatctgggaggtcgattctcttcatgctaagacaagaacactgcatgacaggtggaatgaagtaacgcgaagaatagaaatgtggatctccatattagaattgaatgagttaggagagtatgctgcagtggaacttcatcaggcaaaagatgtcaacacaggaggcatctttcaacttagacagggtcattcccgtagagtacaagtcacggtgaaacctgtgcagcattcagggacactgccacttatggttgaagccatcctgtcagtatccatcggctgtgtaactgccaggtccaccaaactccaaagagggctggacagttaccagagagatgatgaggatggtgatgatatggatagttatcaggaagaagacttaaactgcgtaagggagaggtggtcagatgcactcattaaacgacgagaatacctggatgaacagataaaaaaagtcagcaataaaacagagaaaacagaggacgatgtggagcgggaagcccagcttgtggagcagtgggtagggctgactgaggaaaggaatgctgtgctggtgccagccccaggcagtgggattcctggggcacctgccgactggatcccacctcctggaatggaaacccacataccagttctcttcctcgatttgaatgcggatgacctcagtgccaatgagcagcttgttggcccccatgcatccggcgtgaactccatcctgcccaaggagcatggcagccagtttttctacctgcccatcataaagcacagtgatgatgaggtttcagccacagcctcttgggattcctcggtgcatgattctgttcacttgaatagggtcacaccacagaatgaaaggatttacctaattgtgaaaaccacagttcaactcagccaccctgctgctatggagttagtattacgaaaacgaattgcagccaatatttacaacaaacagagtttcacgcagagtttgaagaggagaatatccctgaaaaatatattttattcctgtggtgtaacctatgaaatagtatccaatataccaaaggcaactgaggagatagaggaccgggaaacgctggctctcctggcagcaaggagtgaaaacgaaggcacatcagatggggagacgtacattgagaagtacactcgaggcgtgctgcaggtggaaaacattctgagtcttgaacggctccggcaggccgtcacagtcaaagaagcactttccaccaaagcccggcacattcggaggagcctcagtacaccaaatgttcataatgtctcttccagccgaccggacctttctggctttgatgaagatgacaagggttggccagagaaccagttggacatgtctgactatagctccagttaccaagatgtagcatgttatggaactttacccagggattctcctcgaaggaataaagaaggttgtacatcagagactcctcatgccttaaccgtcagcccttttaaagcattctctcctcagccaccaaagtttttcaagcccctaatgcctgtaaaagaggagcataagaaaaggatagccctggaagcaaggcctcttctaagccaggagagcatgcctccacctcaggcacataaccctggctgcattgtaccctcaggaagcaatggcagcagcatgccagtagaacacaatagcaaacgtgagaagaagattgactctgaggaggaagaaaatgagctggaagctattaacaggaagctaataagttcacagccttatgtacctgtggagtttgctgacttcagtgtttacaatgccagcttggagaacagggaatggttttcctctaaagtagatctgtcaaactcacgggtcttggagaaagaagtgtcccgtagccctaccaccagcagtattaccagtggctacttttcccacagtgcctccaatgccaccctgtctgacatggtggtcccttctagtgacagctcagaccagctggccattcagacgaaggatgcagactccaccgagcactccacaccatcgcttgtgcatgatttcaggccgtcctcaaacaaagagttgacagaagtcgaaaaaggcttggtaaaggacaagataattgtggtgccactcaaggaaaacagtgccttagccaaagggagcccatcatcccagagcatccctgagaaaaactccaaatcactgtgcaggactggctcatgttcagaactagatgcctgccccagcaaaattagccagccagccaggggattctgccccagggaggtgacggtagaacacaccaccaacatccttgaagaccattctttcacagaatttatgggagtgtcagagggaaaagattttgatggtttgacagattcttctgctggagagctttccagtaggaggagtctaccaaataaaacaggcggcaagactgtctccgatgggctccaccaccccagccagctgcattccaagttagagaatgaccaggtaataattccagaggcagccttttgggttctgtgctgtcaatga

SEQ ID NO: 10818 - DNA, 4200 bp, Homo sapiens
  source 1..4200: mol_type = unassigned DNA
aacaatacctagaagaaaagagaagtgccctagaggagcagcggctcatgtatgagcgggaactggagcaactccgccagcagctctcccccgacaggcagccacagagtagcggccctgaccgcctggcctacagcagccagacagcgcagcagaaggtgacccagtgggcagaagagagggatgaactcttccgacaaagcctggcaaaactgcgagagcagctggttaaagctaataccttggtgagggaagcaaacttcctggctgaggaaatgagcaaactcaccgattaccaagtgactcttcagatccctgctgcaaacctcagtgccaataggaagagaggtgcaatagtgagtgaaccagctatccaagtgaggaggaaaggaaagagcacccaagtgtggaccattgagaagctggagaataaattaattgacatgagagacctttaccaagaatggaaggaaaaagttcctgaggcaaagagactctacggaaaacgaggtgaccctttctatgaagcccaagaaaatcacaacctcatcggggtggcgaatgtattcttggaatgcctcttctgtgatgtgaaacttcagtatgcagtccctatcatcagccagcagggggaggttgcagggcgtctccacgtggaagtgatgcgtgttacaggagctgttccagagcgtgtggtggaggatgactcttcggagaattccagtgaaagtgggagccttgaagtcgtagacagcagcggggaaatcattcaccgagtcaaaaagctgacatgtcgggtaaaaattaaagaagcaacggggctgcccttaaacctctcaaattttgtcttctgtcaatacacattctgggaccagtgtgagtctacggtggctgccccggtggtggaccccgaggtgccttcaccacagtccaaggatgcccagtacacagtgaccttctcccactgtaaggactatgtggtgaatgtaacagaagaatttctggagttcatttcagatggagcactggccattgaagtatggggccaccggtgtgctggaaatggcagctccatctgggaggtcgattctcttcatgctaagacaagaacactgcatgacaggtggaatgaagtaacgcgaagaatagaaatgtggatctccatattagaattgaatgagttaggagagtatgctgcagtggaacttcatcaggcaaaagatgtcaacacaggaggcatctttcaacttagacagggtcattcccgtagagtacaagtcacggtgaaacctgtgcagcattcagggacactgccacttatggttgaagccatcctgtcagtatccatcggctgtgtaactgccaggtccaccaaactccaaagagggctggacagttaccagagagatgatgaggatggtgatgatatggatagttatcaggaagaagacttaaactgcgtaagggagaggtggtcagatgcactcattaaacgacgagaatacctggatgaacagataaaaaaagtcagcaataaaacagagaaaacagaggacgatgtggagcgggaagcccagcttgtggagcagtgggtagggctgactgaggaaaggaatgctgtgctggtgccagccccaggcagtgggattcctggggcacctgccgactggatcccacctcctggaatggaaacccacataccagttctcttcctcgatttgaatgcggatgacctcagtgccaatgagcagcttgttggcccccatgcatccggcgtgaactccatcctgcccaaggagcatggcagccagtttttctacctgcccatcataaagcacagtgatgatgaggtttcagccacagcctcttgggattcctcggtgcatgattctgttcacttgaatagggtcacaccacagaatgaaaggatttacctaattgtgaaaaccacagttcaactcagccaccctgctgctatggagttagtattacgaaaacgaattgcagccaatatttacaacaaacagagtttcacgcagagtttgaagaggagaatatccctgaaaaatatattttattcctgtggtgtaacctatgaaatagtatccaatataccaaaggcaactgaggagatagaggaccgggaaacgctggctctcctggcagcaaggagtgaaaacgaaggcacatcagatggggagacgtacattgagaagtacactcgaggcgtgctgcaggtggaaaacattctgagtcttgaacggctccggcaggccgtcacagtcaaagaagcactttccaccaaagcccggcacattcggaggagcctcagtacaccaaatgttcataatgtctcttccagccgaccggacctttctggctttgatgaagatgacaagggttggccagagaaccagttggacatgtctgactatagctccagttaccaagatgtagcatgttatggaactttacccagggattctcctcgaaggaataaagaaggttgtacatcagagactcctcatgccttaaccgtcagcccttttaaagcattctctcctcagccaccaaagtttttcaagcccctaatgcctgtaaaagaggagcataagaaaaggatagccctggaagcaaggcctcttctaagccaggaggtaaatgcttgacttgtctgtactatgcagaatagagcagagttgtgtcacctgtgaagcagcagtgtgcattaacaagctgagtgctgcatgtggacatgcacggtcatcactccatggttcccgttctcgaattcctctttctcaagcatgcagagtcatggtagaatctcttgtttgttgttgctgctgtggttttatttctttgtgtttatggcttttcaaagtatttttttatgtttcaagtgagaaagatgttttctaggtgttttgaaaagattaaaggccttttttaaaattatttttcttttttgtctttttggggatttctgattttgttttttatagagatagggtcttgctgtgttgcccaggctggtctgaaactcctggcctcaagtgattcttttgccccagcctcccaaggcactgggattgcaggcatgagccgttgtacctggtcaaaaggctgttttttaaataagactaattatgctttttgccacagaatctgtttattcctgtcatatctctccagtagtttaactctggcctgcagaattggctgctgcattactcacatgtaataagagtgttagcattgcttttctaacttgcatgtacttaatatgtattttggccgttgtcgtctttgtgtgtgatgcatctgtgtgtcttaacctttgcagagcatgcctccacctcaggcacataaccctggctgcattgtaccctcaggaagcaatggcagcagcatgccagtagaacacaatagcaaacgtgagaagaagattgtaagttccggaaccatttctgtcatattgcctggtggtgggtttaaggccctttcacagacaatcatccaaatgctagaagaaattaagacatgtattgggtctttgtcttaaagaaaataaaaatgtgaccattggtaatgatattttgcatggatgtggccatgacctacaattttatcttatttatttatttattttttgcttaagtttgcttagaaaaagggagaaaggcacttttattgcttctggcctttataaaaagtgtaacaaagagatctttttaataccaaaatctttctaatgtgcctatacatattgcctagattctgaagttaatctacctagaggaagtgcacttacttggagtaagtaatcatgcatttaatgcatttagctgtggatatgtttggaagcttttttatgttgcctgatgctattgccaagataattctgtagttagagctgcactacaatctatcataatcacccttcatcgtctcactgtctagggtagcctttgttaattagctggcaaaatatattccaataccttggtgccagccttgcattcaggatggcttatatatattttgccacaggtaggctgaaactctacccacaaaacctcattccttagcacttggttttaaaattattaatttgagatacagttttaaaaacactgcataccaggcaccttaggttataaattatacctcaatttacaaaaaaaaaaaaaaaaaaaa

SEQ ID NO: 10819 - DNA, 810 bp, Homo sapiens
  source 1..810: mol_type = unassigned DNA
ctggagttcatttcagatggagcactggccattgaagtatggggccaccggtgtgctggaaatggcagctccatctgggaggtcgattctcttcatgctaagacaagaacactgcatgacaggtggaatgaagtaacgcgaagaatagaaatgtggatctccatattagaattgaatgagttaggagagtatgctgcagtggaacttcatcaggcaaaagatgtcaacacaggaggcatctttcaacttagacaggaagaagacttaaactgcgtaagggagaggtggtcagatgcactcattaaacgacgagaatacctggatgaacagataaaaaaagtcagcaataaaacagagaaaacagaggacgatgtggagcgggaagcccagcttgtggagcagtgggtagggctgactgaggaaaggaatgctgtgctggtgccagccccaggcagtgggattcctggggcacctgccgactggatcccacctcctggaatggaaacccacataccagttctcttcctcgatttgaatgcggatgacctcagtgccaatgagcagcttgttggcccccatgcatccggcgtgaactccatcctgcccaaggagcatggcagccagtttttctacctgcccatcataaagcacagtgatgatgaggtttcagccacagcctcttgggattcctcggtgcatgattctgttcacttgaatagggtcacaccacagaatgaaaggatttacctaattgtgaaaaccacagttcaactcagccaccctgctgctatggagttagtattacgaaaa

SEQ ID NO: 10820 - DNA, 602 bp, Homo sapiens
  source 1..602: mol_type = unassigned DNA
agttgctacgggaatgtggggattgaatgggaatgcatatgagcaaactttctgaggtgatagggcaggttacactcatatgtgcatttctcaaaactcatcgagctctatactcaagatgtggacatttcagtctacctcagtaaaataaataaaaagaaacaatatgacaggtggaatgaagtaacgcgaagaatagaaatgtggatctccatattagaattgaatgagttaggagagtatgctgcagtggaacttcatcaggcaaaagatgtcaacacaggaggcatctttcaacttagacagggtcattcccgtagagtacaagtcacggtgaaacctgtgcagcattcagggacactgccacttatggttgaagccatcctgtcagtatccatcggctgtgtaactgccaggtccaccaaactccaaagagggctggacagttaccaggaagaagacttaaactgcgtaagggagaggtggtcagatgcactcattaaacgacgagaatacctggatgaacagataaaaaaagtcagcaataaaacagagaaaacagaggacgatgtggagcgggaagcccagcttgtggagcagtg

SEQ ID NO: 10821 - DNA, 738 bp, Homo sapiens
  source 1..738: mol_type = unassigned DNA
agaagaaaagagaagtgccctagaggagcagcggctcatgtatgagcgggaactggagcaactccgccagcagctctcccccgacaggcagccacagagtagcggccctgaccgcctggcctacagcagccagacagcgcagcagaaggtgacccagtgggcagaagagaggaaagacatggaatcaacctaaatgtccaacgatagactggataaagaaaacgtggtacatgtacaccatggaatactatgcagccatgaaaaacaacaagatcgtgtcctttgcaggaacatggatggaactggcggccatcattcttagaaaacgaatgcaggaacagaacaccagataccgcgtgttctcactaataagtgagagctaaatcatgggaaccgatggacagaaaggggaacaacagacactggggcctgtgggaggaggagggagaggctcaggaaaaaaaaacaaaaacctgccaagtactatgcttactacccgggtaatgaaataatccatacatcaaaccccttagtcatgagttgacctgtataacaaacctgtgcatgtacccctgaacctaaaataagtcaaaatatttaaattttaaaaaacaaaagtatctgataaagaaggtggtttgcttttaaccatagtgtttttcagttaaatagttaaaaatatttttttgatttcccttaattccagattgattttctttggggcttaaattcttaaaa

SEQ ID NO: 10822 - DNA, 529 bp, Homo sapiens
  source 1..529: mol_type = unassigned DNA
cgcgcggctgcagcggcggcggcgccgcgcgtgaggggccgcctaaggccgagcgggcgcggcgagcggccgggcgagcgcagccaacatgtcggataccaaggtaaaagttgccgtccgggtccggcccatgaaccgacgagaactggaactgaacaccaagtgcgtggtggagatggaagggaatcaaacggtcctgcaccctcctccttctaacaccaaacagggagaaaggtatttgcctttgattattgcttttggtccatggatgaatctaacactacaaaatacgctggtcaagaagtggttttcaagtgccttggggaaggaattcttgaaaaagcctttcaggggtataatgcgtgtatttttgcatatggacagacaggttcgggaaaatccttttccatgatgggccatgctgagcagctgggccttattccaaggctctgctgtgctttatttaaaaggatctctttggagcaaaatgagtcacagacctttaaagttgaagtgtcctatatggaaa

SEQ ID NO: 10823 - DNA, 212 bp, Homo sapiens
  source 1..212: mol_type = unassigned DNA
ttctaacaccaaacagggagaaaggaaacctcccaaggtatttgcctttgattattgcttttggtccatggatgaatctaacactacaaaatacgctggtaagttttctccctctacacctgacagttgggcttctggcctcttcttccattgagtttattttctttaattcctctggagttttactttccctgtgtaattcacacctgttc

SEQ ID NO: 10824 - DNA, 1330 bp, Homo sapiens
  source 1..1330: mol_type = unassigned DNA
cgggatggcccgcgcgcctcggcgctgcctctcggagctcacggcggagcggcggcggccgcgctcgaggggcgcgcggctgcagcggcggcggcgccgcgcgtgaggggccgcctaaggccgagcgggcgcggcgagcggccgggcgagcgcagccaacatgtcggataccaaggtaaaagttgccgtccgggtccggcccatgaaccgacgagaactggaactgaacaccaagtgcgtggtggagatggaagggaatcaaacggtcctgcaccctcctccttctaacaccaaacagggagaaaggctggtcacagtggctcacatctctaattccagcactttgggaggccaaggcaagaggatcacttgagccgaggatttcaagaccagcctttgcaacatggcaaaaccccatctctacaaaaaatttgtttaaaattagctggacgtggtggcgcatacctgtggtcccagctactcaggagactgaggcaggaggctccagtgagctgtttgagccactgcacgccagcctgggtgacagagccagaccctgtcttcaaaaaaataaaaaattaaagtggcgtgaggtgaattgcatcagaccccacatatgaataaatggatggttggcaaagtgttatatataataagtacaattccttaggtgtccttaggtgtactactaaagtgggtttgtgatagcccatatatttagtcatttatgttcaatagtgttatattcatttgagaaattattttaagaaatttaaaattaagaaagttttaaaagtcctttagtaattagagatttctctgggtgggtggatacggttgtttctaattatcccacacatttaatcatttatgttcaatagtgttgtattttttgagaaattattttaagaaatgcaaaattaagaaagatttaaaagtcctttagtaattagagatttttctagttgggtggataagggttatttctaagtatcttttgagtattttttgtcatatatttcgttttttaggcatgattaaaagtgtatttgaggactcttagacacataaagttgaattcctcagattgagagatagttattgctttttaattttgttaagatgctcagctgttggataaataatgcttttgttaaaatcctgtggggcattcatccaacaaatggggtataagaaaggaatgtgtgtttgtgtacatgttcttctatctgttggtcctaaagagtgtaagaaggtaaatttgaccagtgaaattcataattacagagttttatttggtaatccattaataaatcattttctgaaagca

SEQ ID NO: 10825 - DNA, 8745 bp, Homo sapiens
  source 1..8745: mol_type = unassigned DNA
ggcagacggaagccgaacgagttcctcggcggctgcaggatgggggactccaaagtgaaagtggcggtgcggatacgacccatgaaccggcgagagactgacttgcataccaaatgtgtggtggatgtggatgcaaacaaggttattcttaatcctgtaaatacgaatctttccaaaggagatgcccggggccagccgaaggtgtttgcttatgatcattgtttctggtctatggatgaatctgtcaaagaaaagtatgcaggtcaagatattgttttcaagtgccttggagagaatatcctgcagaatgcttttgatggctacaatgcatgtatctttgcctatggacagactggctctggaaaatcttataccatgatgggcacagctgaccaacctggattaatcccaagactttgcagtggactctttgaacgaactcagaaagaggaaaatgaagaacagagttttaaagtagaagtgtcctacatggaaatttataatgaaaaagttcgagaccttcttgatcccaaaggaagccgtcagacgttgaaagtcagagagcatagtgtgttgggaccttatgtcgacggactttctaaactggctgtcacaagctacaaggatattgagtcgttgatgtctgagggtaacaaatctcgcacagttgctgcaaccaacatgaacgaggagagtagccgatcccatgcagttttcaaaatcaccctcacacatactctctacgatgtgaagtctgggacatctggagagaaagtgggcaaactcagcctggtggatttagctggcagtgaacgagcaacgaagacaggcgctgcaggggacaggctgaaggaagggagcaacattaacaagtccctcacaaccctcggtctggttatctcagctcttgcagatcagagtgctggcaaaaacaagaataaatttgttccatatcgtgactcagttctcacttggctgctcaaagacagcctcgggggtaacagcaagaccgccatggtggctactgtgagtcctgcagctgataactatgatgaaaccctctcaactctgcggtatgcagatcgagccaagcacattgtaaaccacgctgtggtgaatgaggaccctaatgcccgaattatccgggatctccgggaagaagttgagaaactccgggagcagctgaccaaagcagaggcaatgaaatctccagagctaaaggaccggctggaagaatctgagaagctaatccaggaaatgactgtgacctgggaggagaaattaaggaaaacggaggagattgcacaggaacgacagaaacagcttgagagtcttggaatatctcttcagtcttcgggaatcaaagttggggatgataaatgcttccttgtgaatctgaatgctgacccagctctgaatgagcttctggtgtactatttaaaggaacatacattgatagggtcagcaaattcccaagatatccaactgtgcggcatgggaattcttcctgaacactgtattatagacatcacgtcagaaggccaggttatgctgactcctcagaagaacaccagaacatttgtaaatgggtcatctgtctccagtccaatacagctacaccatggggacaggatattatggggaaacaatcatttcttcagactcaatttgcctaaaaagaaaaagaaagcagaacgagaggatgaggaccaggatccctccatgaagaacgagaatagttctgagcagctggatgtagacggagactcctccagcgaggtgtccagtgaagttaactttaattacgaatacgcacagatggaggtcaccatgaaggccctgggcagcaatgatccgatgcagtccatattaaacagcttagaacaacagcatgaagaagaaaaacgatctgcactggagcgccagaggcttatgtatgagcacgaattggagcagctccggagaaggctgtctcctgagaagcagaactgccggagcatggacaggttttctttccactcgcccagcgctcagcaacgcttaagacagtgggctgaggagagagaagcaacgttgaataacagcctgatgaggctgagggaacaaattgttaaggccaatctattggtgagagaagctaattacattgctgaggagctggataaaagaacagaatacaaagttaccctacagattccagcctccagcctggatgccaacaggaagcgaggctctcttcttagtgagcctgcaatccaggtgagaagaaaaggaaaaggaaagcagatttggtctttggaaaaactggacaacaggctgttggatatgagagacctttatcaggagtggaaagagtgtgaagaagataacccagtaatacgatcatacttcaaacgtgctgatccattctatgatgagcaggaaaatcacagtctcattggggtggccaatgtcttcctcgagtcacttttctatgatgtgaagttacaatacgctgttcccatcatcaaccagaaaggagaggtggcaggtcggctgcacgtggaggtgatgcgactcagtggtgatgttggggagaggatcgcaggaggcgatgaggtggcagaggtctcctttgagaaggagacccaggagaacaaactggtgtgcatggttaaaatcctgcaagctactgggttgccacagcatctgtcccactttgtgttctgcaaatacagcttctgggatcaacaggagccggtgattgtcgctcctgaagtggacacctcctcctcttccgtcagcaaggagccgcactgcatggttgtctttgatcattgcaatgagttttctgttaacatcaccgaagactttatcgagcatctttccgaaggagcattggcaattgaagtatatggacataaaataaacgatccccggaaaaaccccgccctgtgggatttgggaatcatccaagcaaagacacgtagtcttcgggacagatggagtgaagtgaccaggaaattggaattctgggttcaaatcttggaacagaatgagaatggtgaatactgccctgtagaagtgatttctgcaaaggatgtcccaacaggaggaatcttccagctccggcaggggcagtcccggagagttcaagtcgaagtgaagtcagtgcaggaatctgggactttaccactgatggaagaatgtatactgtctgttggcattggatgtgtcaaagttagaccgctcagagcccccagaacacatgagaccttccatgaggaagaggaagacatggacagctaccaggatcgagatttagagagacttcgtagaaaatggctaaatgcattaacaaaacgtcaggagtacttggatcaacaattgcaaaagcttgtcagtaaacgtgataaaacagaggatgatgctgaccgtgaagcgcagcttctggagatgcggttgaccctaactgaggagaggaacgcggtgatggtcccctctgctggcagtggtattccaggggccccagcagaatggaccccagtacctgggatggagacacacattcctgttatattcctggacttaaatgctgatgatttcagctctcaggataatcttgatgacccagaagctggtggatgggatgcgaccttgactggggaagaagaagaggagttctttgaattgcagattgtgaagcagcatgatggggaggtgaaagcagaagcctcctgggactccgcggtgcatggctgccctcagctcagcaggggcacgcccgtggacgagcggttgttcctgatcgtgcgcgtgacggtccagctcagccaccctgctgacatgcaactggtgttacgcaagagaatctgtgtcaatgttcacggccgccagggttttgcacagagtctcctaaaaaagatgtctcatcgaagttctattcctggctgtggagtgacttttgaaattgtctccaatattccagaggatgcccagggagtggaagaacgggaagcattagcaagaatggcagccaatgttgaaaacccagcttctgctgactcggaggcttatattgaaaagtacctcaggagcgtgctggctgtagaaaacctcctgactttagatcgtctgcgccaggaagttgcagtgaaggaacagttaacaggaaaaggaaagttgagcaggaggagtatcagttctccaaatgtgaacagattgtctggaagccgacaagatctcattccatcatacagtctaggcagcaacaagggccggtgggaaagtcagcaggatgtatcccaaaccacagtttccagaggaatagctcctgcccccgccctctctgtttctccccaaaataaccattctccagatccaggactcagtaaccttgcagcatcctacttgaatcctgtcaaatccttcgtgccgcaaatgccaaagctcctcaagtctctctttcccgtccgcgatgagaagaggggcaagcggccgtctcccctcgcacaccagcccgtgccccgcatcatggtgcagtcagccagcccggacatcagggtgaccaggatggaggaggctcagccggagatgggccctgacgtgctggtgcagacgatgggggccccggccttgaagatctgcgacaaacctgccaaagtgccttccccaccgcctgtcatagctgtcacagcggtcaccccggctccggaggcacaggacgggccccccagccccctgagtgaagcctctagcgggtacttctcccacagcgtctccaccgcgaccctgtcggacgccctgggccccggcctggacgctgcggccccgccggggtccatgcccaccgcccctgaggccgagcccgaggcgcccatcagccaccccccaccgcccacggccgtccccgccgaggagccccctggcccccagcagctcgtgagccccggtcgggagcgccccgacctcgaggccccggcgcccggctccccgttccgcgtccggagggtgcgggcctcggagttgcgctccttctcgcgcatgctggctggggaccccggctgctccccgggggccgaggggaatgcgccggccccgggcgccgggggacaggccctggcctctgattccgaggaagctgacgaggtcccggagtggctccgagagggcgagttcgtcaccgtgggcgcccacaaaacgggcgtggtgagatacgtggggcctgccgacttccaagagggcacgtgggtcggcgtggagctcgacctgccctcaggtaagaatgacggttccatcggcgggaagcagtacttcaggtgtaaccctggctacgggctgctggtcaggcccagccgggtccgcagggccacgggccctgtgcggcggcgcagcacaggactccggctgggtgcccccgaggcccgccggagcgccaccctctcgggctccgccaccaacctggcctcgctgacagctgccctggccaaggccgacaggagccacaagaaccctgagaaccggaaatcctgggccagctgagccgctgccttagggcgaacttttctgggggtgcccggccccttttgagccctgccagtgacagccctgaggagccaggagcccggtggccccttccccaggggcagggcgatgaatgctttttgcacgacacagggctggtgacctccctgggcctctggaagctttgtttcttctgtacccgggtaaagtgggggcctcaactgtgcctcctcaggtggatggaaggttctgggtgcccgcaggggctgggggatgctaggactgagaccctgggtggtgcagcgcctggtgatcttgctgtgtgcctgtgcctggggccttatgttgctctttctatcatttccattctggtggccccactaatgtcttaacctaaaccataattgtaaccagtgcctttcctccccactggagggcaagcccccccacccacccaggatgtcctggctcactccgcaagccccccagcctcccaccctggtcccagtttcccgcaaagtgcctctgggggaccccccagcctcccaccctggtcccaggttccacaagtgcctctggagggccctgggctctggcagatggtcctggtgccccagacgggggccgagggcctgagcccccccatccctcctctgccagggtttcttagcggtttctctgtggatgttttggcatctttagacacctggaaagtctcttatgtttgccgtttattcccttcacagaaggcttggaatgtatttatttatatttattttttcaaaatccgaaatcatttgcgagccgcaatcgtcgtctgcctgtgtgggggggcccagggcctgccttgcacgttgcagcctctctggccattgcagagctgctggcctcctgcccaggtggagggtcctggggacggcagaggataaagccccctcctcacatccctctattgcggatccacagtggccttactcttaacttggatgagagcaaaaacctgggagaatgatgtgcttctgtagtcggtgacaaaggaagaggcattgctactttatttggtgcacttttggtttctaggaaggtctttgggtcattttaacttctcggcaactcccagactctcagagtgtggggctggggcctggcggctgggctggtgcagggagtgtgctggttagtctccagaccctcacagcagccacgcccccaggcccaccgtgcatggtgtgggcgggacagccggaagcttccggggtggcctccacctcctggctggggcacttatgctcccagagcctttggtgccaggtttgtgggatgggggttagcgtctatgtgtggaaggccaccaatctagggacaggagtcctgggtcaagattcacacagccacccttggagctggtttctagttctcacatttagtcaacatctagaaagcgctgcggaaggctctggttctctagggacttgaaggcgccaacagagtagtctccatggtgggcctgtcccagccctggctgcgaggacaggttgtctttctctccccagttggcgagggacacgaaggctgcggccgggctggcagagggcccggcccctggggggaggcactcctccagggctctccctgtccttagccgattttgagggaaccctgtggcacctgtccctggatgaagagctgtcacctctgccttgccctttaactcaacccgcttcccagcacagcggctttctttttaaaacctgtttcactgagaagtttgtttttgggtccgctggtgtcactatggcctgggtgagaggccagcactgctgctgccctgaggggaaacgcctgggccgtgtagtggggacgctctgggaatggtggcggacgggcagcgtgggtgggacctggcacttcgtggtggctgagccatccacccagcagcggcctcctgtagcaccatcttgggaaagtcctgggggacgtgtgtgtcgtgctttttaccatcggtttgacttacagtggagtagaacgagccagagttcctgacttgagcaggtggatttgggcccaggccctgttcactcttgcttctcggtgcggactaatgtcagcttgtggctgggaaagagggatgtgcagtgacgtggtcaccaaggcagtgagccccgctgaccccgggccagcacttggcaggcaggaggtgcggtctccagagtggtgggccagggcgggctggcctccgtcttctatcttcttttcttgcctccctgaccagcagactcacctcccaagaacgcctgcccgcccacccgccttaggactcccgatgcgctcctggaaggccccaggagtggcaccttagtgtgggtcggcccgcagatggcacccaaggccgggaagggcagtaactgcacacgcggcgctgtcagagatgggggtgggggatgcttctgggggccctgcctccccattgtgtgcccagaacatccctggccccaccccgccacttccctcgggcccttatgaaggactgaggctccagggtgagaaggctcacttctgccccgggcactgcgtccagcagcagaggggacagggggcaggtgtgtgactgggttcctgggtacccaggcctgaccagagggagcgggagggcagaggtgaggagggggaagatgtttctgggcctaccaaggttcaacaagagaacggagctgggaatgtgactgctggagcctgagaggtggaggagttctgatcccccgttacttcctagcattttctcctcttgccttaaaagttccctgtatgtgaaacgggaagtcctgagagtgtgtgttggtggctgtgcgcacgcacacaagacgggagtcaccctgtgcttcctgcccaagatactgacccattgaacccccaaagcatctttctctccacaaagtccgtggtgccttcctggtgggctgcagacactaatggtgttggggggtcttggaacagcttctctatgtgtggattcgtgtaaatgcgaagagttcacatataaagaagtgactttgattctgtgattatattgatttggtacacagtaaatgggagtttaaaaaatccaaagactctaatgacttgtaaagactctaatgatttgtatcatgtaatgaactaaaccacctgtaattttgtaccgtatgtgtctttccatcaaatgaccaacagcttctcaataaaaccagaccatttctcacctgc

SEQ ID NO: 10826 - DNA, 1267 bp, Homo sapiens
  source 1..1267: mol_type = unassigned DNA
ttgtctggaagccgacaagatctcattccatcatacagtctaggcagcaacaagggccggtgggaaagtcagcaggatgtatcccaaaccacagtttccagaggaatagctcctgcccccgccctctctgtttctccccaaaataaccattctccagatccaggactcagtaaccttgcagcatcctacttgaatcctgtcaaatccttcgtgccgcaaatgccaaagctcctcaagtctctctttcccgtccgcgatgagaagaggggcaagcggccgtctcccctcgcacaccaggctcagccggagatgggccctgacgtgctggtgcagacgatgggggccccggccttgaagatctgcgacaaacctgccaaagtgccttccccaccgcctgtcatagctgtcacagcggtcaccccggctccggaggcacaggacgggccccccagccccctgagtgaagcctctagcgggtacttctcccacagcgtctccaccgcgaccctgtcggacgccctgggccccggcctggacgctgcggccccgccggggtccatgcccaccgcccctgaggccgagcccgaggcgcccatcagccaccccccaccgcccacggccgtccccgccgaggagccccctggcccccagcagctcgtgagccccggtcgggagcgccccgacctcgaggccccggcgcccggctccccgttccgcgtccggagggtgcgggcctcggagttgcgctccttctcgcgcatgctggctggggaccccggctgctccccgggggccgaggggaatgcgccggccccgggcgccgggggacaggccctggcctctgattccgaggaagctgacgaggtcccggagtggctccgagagggcgagttcgtcaccgtgggcgcccacaaaacgggcgtggtgagatacgtggggcctgccgacttccaagagggcacgtgggtcggcgtggagctcgacctgccctcaggtaagaatgacggttccatcggcgggaagcagtacttcaggtgtaaccctggctacgggctgctggtcaggcccagccgggtccgcagggccacgggccctgtgcggcggcgcagcacaggactccggctgggtgcccccgaggcccgccggagcgccaccctctcgggctccgccaccaacctggcctcgctgacagctgccctggccaaggccgacaggagccacaagaaccctgagaaccggaaatcctgggccagctgagccgctgcct

SEQ ID NO: 10827 - DNA, 2630 bp, Homo sapiens
  source 1..2630: mol_type = unassigned DNA
gcccccggccccctcccgccgggtcaaccccgaagagtcgccggtggccgcggcagacggaagccgaacgagttcctcggcggctgcaggatgggggactccaaagtgaaagtggcggtgcggatacgacccatgaaccggcgagagactgacttgcataccaaatgtgtggtggatgtggatgcaaacaaggttattcttaatcctgtaaatacgaatctttccaaaggagatgcccggctctggaaaatcttataccatgatgggcacagctgaccaacctggattaatcccaagactttgcagtggactctttgaacgaactcagaaagaggaaaatgaagaacagagttttaaagtagaagtgtcctacatggaaatttataatgaaaaagttcgagaccttcttgatcccaaaggaagccgtcagacgttgaaagtcagagagcatagtgtgttgggaccttatgtcgacggactttctaaactggctgtcacaagctacaaggatattgagtcgttgatgtctgagggtaacaaatctcgcacagttgctgcaaccaacatgaacgaggagagtagccgatcccatgcagttttcaaaatcaccctcacacatactctctacgatgtgaagtctgggacatctggagagaaagtgggcaaactcagcctggtggatttagctggcagtgaacgagcaacgaagacaggcgctgcaggggacaggctgaaggaagggagcaacattaacaagtccctcacaaccctcggtctggttatctcagctcttgcagatcagagtgctggcaaaaacaagaataaatttgttccatatcgtgactcagttctcacttggctgctcaaagacagcctcgggggtaacagcaagaccgccatggtggctactgtgagtcctgcagctgataactatgatgaaaccctctcaactctgcggtatgcagatcgagccaagcacattgtaaaccacgctgtggtgaatgaggaccctaatgcccgaattatccgggatctccgggaagaagttgagaaactccgggagcagctgaccaaagcagaggcaatgaaatctccagagctaaaggaccggctggaagaatctgagaagctaatccaggaaatgactgtgacctgggaggagaaattaaggaaaacggaggagattgcacaggaacgacagaaacagcttgagagtcttggaatatctcttcagtcttcgggaatcaaagttggggatgataaatgcttccttgtgaatctgaatgctgacccagctctgaatgagcttctggtgtactatttaaaggaacatacattgatagggtcagcaaattcccaagatatccaactgtgcggcatgggaattcttcctgaacactgtattatagacatcacgtcagaaggccaggttatgctgactcctcagaagaacaccagaacatttgtaaatgggtcatctgtctccagtccaatacagctacaccatggggacaggatattatggggaaacaatcatttcttcagactcaatttgcctaaaaagaaaaagaaagcagaacgagaggatgaggaccaggatccctccatgaagaacgagaatagttctgagcagctggatgtagacggagactcctccagcgaggtgtccagtgaagttaactttaattacgaatacgcacagatggaggtcaccatgaaggccctgggcagcaatgatccgatgcagtccatattaaacagcttagaacaacagcatgaagaagaaaaacgatctgcactggagcgccagaggcttatgtatgagcacgaattggagcagctccggagaaggctgtctcctgagaagcagaactgccggagcatggacaggttttctttccactcgcccagcgctcagcaacgcttaagacagtgggctgaggagagagaagcaacgttgaataacagcctgatgaggctgagggaacaaattgttaaggccaatctattggtgagagaagctaattacattgctgaggagctggataaaagaacagaatacaaagttaccctacagattccagcctccagcctggatgccaacaggaaggtgaggttgccgttccttgaaaaaaacaaagatctcattggataagatcgcctgatatttcctggtgttatttaagcttcagatccctgtctgtgcctgccccaagtccagatcctttgtcctccatgcttttgggtagaattgacttccttttccattctctacctttgagtgtatgtatattttatctgctaggggaatatactctgcatctcacctggccctgacagttcatttcactcaactttcttccttcaaatctgtttaaattctttcttagaagtcttttctgattaatcttccccgaatgtctttttttccttccttatgctaccactctacaaccccttctccacaagttaggtgttcattttgcttatgttattttctacttggaatagcttgctctgtaaaactgctcattagttgtgtcatggtgtcatgtatatattcaggatcatactttttttggtataataaatttaataaaatgtagggggaaagtcccatcacaatcttc

SEQ ID NO: 10828 - DNA, 2765 bp, Homo sapiens
  source 1..2765: mol_type = unassigned DNA
ccccgaagagtcgccggtggccgcggcagacggaagccgaacgagttcctcggcggctgcaggatgggggactccaaagtgaaagtggcggtgcggatacgacccatgaaccggcgagagactgacttgcataccaaatgtgtggtggatgtggatgcaaacaaggttattcttaatcctgtaaatacgaatctttccaaaggagatgcccggggccagccgaaggtgtttgcttatgatcattgtttctggtctatggatgaatctgtcaaagaaaagtatgcaggtcaagatattgttttcaagtgccttggagagaatatcctgcagaatgcttttgatggctacaatgcatgtatctttgcctatggacagactggctctggaaaatcttataccatgatgggcacagctgaccaacctggattaatcccaagactttgcagtggactctttgaacgaactcagaaagaggaaaatgaagaacagagttttaaagtagaagtgtcctacatggaaatttataatgaaaaagttcgagaccttcttgatcccaaaggaagccgtcagacgttgaaagtcagagagcatagtgtgttgggaccttatgtcgacggactttctaaactggctgtcacaagctacaaggatattgagtcgttgatgtctgagggtaacaaatctcgcacagttgctgcaaccaacatgaacgaggagagtagccgatcccatgcagttttcaaaatcaccctcacacatactctctacgatgtgaagtctgggacatctggagagaaagtgggcaaactcagcctggtggatttagctggcagtgaacgagcaacgaagacaggcgctgcaggggacaggctgaaggaagggagcaacattaacaagtccctcacaaccctcggtctggttatctcagctcttgcagatcagagtgctggcaaaaacaagaataaatttgttccatatcgtgactcagttctcacttggctgctcaaagacagcctcgggggtaacagcaagaccgccatggtggctactgtgagtcctgcagctgataactatgatgaaaccctctcaactctgcggtatgcagatcgagccaagcacattgtaaaccacgctgtggtgaatgaggaccctaatgcccgaattatccgggatctccgggaagaagttgagaaactccgggagcagctgaccaaagcagaggcaatgaaatctccagagctaaaggaccggctggaagaatctgagaagctaatccaggaaatgactgtgacctgggaggagaaattaaggaaaacggaggagattgcacaggaacgacagaaacagcttgagagtcttggaatatctcttcagtcttcgggaatcaaagttggggatgataaatgcttccttgtgaatctgaatgctgacccagctctgaatgagcttctggtgtactatttaaaggaacatacattgatagggtcagcaaattcccaagatatccaactgtgcggcatgggaattcttcctgaacactgtattatagacatcacgtcagaaggccaggttatgctgactcctcagaagaacaccagaacatttgtaaatgggtcatctgtctccagtccaatacagctacaccatggggacaggatattatggggaaacaatcatttcttcagactcaatttgcctaaaaagaaaaagaaagcagaacgagaggatgaggaccaggatccctccatgaagaacgagaatagttctgagcagctggatgtagacggagactcctccagcgaggtgtccagtgaagttaactttaattacgaatacgcacagatggaggtcaccatgaaggccctgggcagcaatgatccgatgcagtccatattaaacagcttagaacaacagcatgaagaagaaaaacgatctgcactggagcgccagaggcttatgtatgagcacgaattggagcagctccggagaaggctgtctcctgagaagcagaactgccggagcatggacaggttttctttccactcgcccagcgctcagcaacgcttaagacagtgggctgaggagagagaagcaacgttgaataacagcctgatgaggctgagggaacaaattgttaaggccaatctattggtgagagaagctaattacattgctgaggagctggataaaagaacagaatacaaagttaccctacagattccagcctccagcctggatgccaacaggaaggtgaggttgccgttccttgaaaaaaacaaagatctcattggataagatcgcctgatatttcctggtgttatttaagcttcagatccctgtctgtgcctgccccaagtccagatcctttgtcctccatgcttttgggtagaattgacttccttttccattctctacctttgagtgtatgtatattttatctgctaggggaatatactctgcatctcacctggccctgacagttcatttcactcaactttcttccttcaaatctgtttaaattctttcttagaagtcttttctgattaatcttccccgaatgtctttttttccttccttatgctaccactctacaaccccttctccacaagttaggtgttcattttgcttatgttattttctacttggaatagcttgctctgtaaaactgctcattagttgtgtcatggtgtcatgtatatattcaggatcatactttttttggtataataaatttaataaaatgtagggggaaagtcccatcacaa

SEQ ID NO: 10829 - DNA, 1750 bp, Homo sapiens
  source 1..1750: mol_type = unassigned DNA
gccgaacgagttcctcggcggctgcaggatgggggactccaaagtgaaagtggcggtgcggatacgacccatgaaccggcgagatttgactgtaaggagccagctgatacaatatggtcagattccattaagcagtggttttaagaaactctcatggacctctgggcctgaggaagtgaagagagactgacttgcataccaaatgtgtggtggatgtggatgcaaacaaggttattcttaatcctgtaaatacgaatctttccaaaggagatgcccggggccagccgaaggtgtttgcttatgatcattgtttctggtctatggatgaatctgtcaaagaaaagtatgcaggtcaagatattgttttcaagtgccttggagagaatatcctgcagaatgcttttgatggctacaatgcatgtatctttgcctatggacagactggctctggaaaatcttataccatgatgggcacagctgaccaacctggattaatcccaagactttgcagtggactctttgaacgaactcagaaagaggaaaatgaagaacagagttttaaagtagaagtgtcctacatggaaatttataatgaaaaagttcgagaccttcttgatcccaaaggaagccgtcagacgttgaaagtcagagagcatagtgtgttgggaccttatgtcgacggactttctaaactggctgtcacaagctacaaggatattgagtcgttgatgtctgagggtaacaaatctcgcacagttgctgcaaccaacatgaacgaggagagtagccgatcccatgcagttttcaaaatcaccctcacacatactctctacgatgtgaagtctgggacatctggagagaaagtgggcaaactcagcctggtggatttagctggcagtgaacgagcaacgaagacaggcgctgcaggggacaggctgaaggaagggagcaacattaacaagtccctcacaaccctcggtctggttatctcagctcttgcagatcagagtgctggcaaaaacaagaataaatttgttccatatcgtgactcagttctcacttggctgctcaaagacagcctcgggggtaacagcaagaccgccatggtggctactgtgagtcctgcagctgataactatgatgaaaccctctcaactctgcggtatgcagatcgagccaagcacattgtaaaccacgctgtggtgaatgaggaccctaatgcccgaattatccgggatctccgggaagaagttgagaaactccgggagcagctgaccaaagcagaggcaatgaaatctccagagctaaaggaccggctggaagaatctgagaagctaatccaggaaatgactgtgacctgggaggagaaattaaggaaaacggaggagattgcacaggaacgacagaaacagcttgagagtcttggaatatctcttcagtcttcgggaatcaaagttggggatgataaatgcttccttgtgaatctgaatgctgacccagctctgaatgagcttctggtgtactatttaaaggaacatacattgatagggtcagcaaattcccaagatatccaactgtgcggcatgggaattcttcctgaacactgtattatagacatcacgtcagaaggccaggttatgctgactcctcagaagaacaccagaacatttgtaaatgggtcatctgtctccagtccaatacagctacaccatggggacaggatattatggggaaacaatcatttcttcag

SEQ ID NO: 10830 - DNA, 1965 bp, Homo sapiens
  source 1..1965: mol_type = unassigned DNA
gaagagtcgccggtggccgcggcagacggaagccgaacgagttcctcggcggctgcaggatgggggactccaaagtgaaagtggcggtgcggatacgacccatgaaccggcgagagactgacttgcataccaaatgtgtggtggatgtggatgcaaacaaggttattcttaatcctgtaaatacgaatctttccaaaggagatgcccggtgtttgcttatgatcattgtttctggtctatggatgaatctgtcaaagaaaagtatgcaggtaatagaatccagcatcctgtcaactactgatggtgtagaagaggggttcagtattttttcccttacacgattgcttggcaaaccccccaaactgtgtgtttcctctgctgtcacaccacaataacagtcatcaacacagaagatgacttaatgtgaccaaatgttgggggagttttccctgcaccccaagcggcagacactggctgggtgtcctctaactcagttccgatgctctctacctggggacagcgtcagatccacagactgagggctcagtcccacaagaccgctccctccttcccaccagcgcaggtccaggcctctagaacttctgacctactggcttccaattagggttcccacaacctcctctttgggtttgattaatttcctagagcggctcacagaactcagggaaacacttgtgtttaggggtttattacgagggattttctttaaaggagacaggtaaacagccagatgaagagatacagagggtgagatctggaagggtcccaagcgcaggagcttctgtcctcatggaggtggcgcggcgccctcccggcgtgtggatgagttcttaccttcctattgggccctgtgtgtttagcaatccagaagctctctgaacccagtccttttaggtttttatggaggcttccttatataggcatgattgtcaaccgattagaaatgtgatttgacaaaaagtgcatgactgaacacagcacgtcctgtctgttcagacttttcttggccattctgtgtagcattccttcctttaggatatgaggcaagaccttgtggaatgagaagctcttgacccacaatcagatgagagtcttgcctccggcaggtaaaaggagggcaggagatcagatagtttcctgaggctaaaatgccccaacatgtaaaagactgcaacaagggttaatgagccaggaactgcggatggtaacctacatctctataattaccataggatatatatgagtaccataggattcttttgcataactgtagaaagtacagacaacaccctcccgtgtttgctattagagtttttaatgttgattggaaaatgggagattcactgtgtgccattcttggtatacgttgatgaaattacatcactagtacacacagtggctattccacattcacacgccccagctcttacatgaggccgggagcacaaggtcgccccttagattgccctggaggcctgagactgggctggagagacaggatggcatagtgaaagaaggggagcaccggccaaggagaaaaggaaccctaggctgcaggcccagccctgcttcttaccgcccctgcgcctttcagtaaatcacctcacctgtcagagcttcagttttctctttttgatggaaaggaatatgccatattctctctaaattttcttttggctctggaagtctgttactctattattcttctaaatgatgactgtctcaagccccatctcaccacaagtttaggactgcagtgacagcctttgattgcctttattccttactgcttttgtcgcctgtttttaaacaatctcttttaaatattaagcatcatattgttttggcttctgttatgagaaagatgaatattatggctgttttgaagttaagattcatttggtctaggtggcccaatatcagaagtataagttaactggtatt

SEQ ID NO: 10831 - DNA, 1980 bp, Homo sapiens
  source 1..1980: mol_type = unassigned DNA
gcgcgttgttggtttcgggttgtcaggcagcgcgcgaggcggcgggcagctagcagctggcggacgcgacccggaggcggtgggggtgcggctgagccatgcccggtggcgcggcctgagcccctccacctgctgcaatcatgaaggacagcggggactccaaggaccagcaactcatggtggcgcttcgggtccggcccatcagcgtggcagagctggaggaaggagctaccctcatcgcccataaagtggatgagcagatggtggttctcatggacccaatggaggatcccgacgacatcctgcgggcgcatcgctcccgggagaagtcctacctgttcgacgtggcctttgacttcaccgccacccaggagatggtgtatcaggccaccaccaagagcctcatcgagggcgtcatctcaggctacaatgccactgtctttgcctatggccccacaggctgtgggaaaacctacaccatgctgggcacagaccaggagcctggcatctatgttcagaccctcaacgacctcttccgtgccatcgaggagaccagcaatgacatggagtatgaggtctccatgtcctacctggagatcatgcagctgctgatgaaggggaaccggcagaggacccaggagcccacggccgccaaccagacgtcctcccgctcccacgcggtactgcaggtgaccgtgcgccagcgcagccgggtcaagaacatcttgcaggaggtgcggcagggccgcctgttcatgatcgacctggctggctcagagcgcgcctcgcagacacagaatcgtgggcagcgtatgaaggagggggcccacatcaaccgctcactgctggcactgggcaactgcatcaacgccctgagcgacaagggtagcaacaagtacatcaactatcgcgacagcaagctcacccggctcctgaaggactctctgggaggaaacagccgcacagtgatgatcgctcacatcagtcctgcgagcagtgccttcgaggagtcccggaacaccctgacctacgccggccgggccaagaacattaagactagggtgaagcagaacctcctgaacgtctcctaccacatcgcccagtacaccagcatcatcgctgacctgcggggcgagatccagcgactcaagcgcaagattgatgagcagactgggcggggccaggcccggggccggcaggatcggggtgacatccgccacatccaagctgaggtccagctgcacagcgggcagggtgagaaggctggcatgggacagcttcgggagcagctcgccagcgccttccaggagcagatggatgtgcggaggcgcctgctggagctggagaaccgcgccatggaggtccagattgacacctcccgacacctgctcaccatcgccggctggaagcatgagaagtcccgccgggccctcaaatggcgggaggagcagcgaaaggagtgctacgctaaggacgacagcgagaaggactcagacacaggtgatgaccaaccagacatcctggagccacccgaggtggccgcagcccgggagagcattgcagccctggtggacgagcagaagcaactgcgcaagcagaagctggcgctggagcagcgctgccgggagctgcgcgcgcggggccggcgcctggaggagacgctgccgcggcgcatcggctccgaggagcagcgcgaggtgctcagcctgctgtgccgcgtgcacgagctcgaggtggagaacaccgagatgcagtcgcacgcgctgctccgcgacggtgcgctccgccaccgccacgaggccgtgcgccgcctggagcagcaccgcagtctctgcgacgagattatccagggccagcggcagatcatcgacgactacaacctggccgtcccgcagcgcctggaagagctctacgaagtgtacctgcgggagctggaggagggcagcctggagcaggccaccatcatggaccaagtggcct

SEQ ID NO: 10832 - DNA, 3643 bp, Homo sapiens
  source 1..3643: mol_type = unassigned DNA
gcgttgttggtttcgggttgtcaggcagcgcgcgaggcggcgggcagctagcagctggcggacgcgacccggaggcggtgggggtgcggctgagccatgcccggtggcgcggcctgagcccctccacctgctgcaatcatgaaggacagcggggactccaaggaccagcaactcatggtggcgcttcgggtccggcccatcagcgtggcagagctggaggaaggagctaccctcatcgcccataaagtggatgagcagatggtggttctcatggacccaatggaggatcccgacgacatcctgcgggcgcatcgctcccgggagaagtcctacctgttcgacgtggcctttgacttcaccgccacccaggagatggtgtatcaggccaccaccaagagcctcatcgagggcgtcatctcaggctacaatgccactgtctttgcctatggccccacaggctgtgggaaaacctacaccatgctgggcacagaccaggagcctggcatctatgttcagaccctcaacgacctcttccgtgccatcgaggagaccagcaatgacatggagtatgaggtctccatgtcctacctggagatctacaatgagatgatccgggacctgctgaacccctccctgggctacctggagctgcgggaggactctaagggggtgatccaggtggccggcatcaccgaagtctccaccatcaatgccaaggagatcatgcagctgctgatgaaggggaaccggcagaggacccaggagcccacggccgccaaccagacgtcctcccgctcccacgcggtactgcaggtgaccgtgcgccagcgcagccgggtcaagaacatcttgcaggaggtgcggcagggccgcctgttcatgatcgacctggctggctcagagcgcgcctcgcagacacagaatcgtgggcagcgtatgaaggagggggcccacatcaaccgctcactgctggcactgggcaactgcatcaacgccctgagcgacaagggtagcaacaagtacatcaactatcgcgacagcaagctcacccggctcctgaaggactctctgggaggaaacagccgcacagtgatgatcgctcacatcagtcctgcgagcagtgccttcgaggagtcccggaacaccctgacctacgccggccgggccaagaacattaagactagggtgaagcagaacctcctgaacgtctcctaccacatcgcccagtacaccagcatcatcgctgacctgcggggcgagatccagcgactcaagcgcaagattgatgagcagactgggcggggccaggcccggggccggcaggatcggggtgacatccgccacatccaagctgaggtccagctgcacagcgggcagggtgagaaggctggcatgggacagcttcgggagcagctcgccagcgccttccaggagcagatggatgtgcggaggcgcctgctggagctggagaaccgcgccatggaggtccagattgacacctcccgacacctgctcaccatcgccggctggaagcatgagaagtcccgccgggccctcaaatggcgggaggagcagcgaaaggagtgctacgctaaggacgacagcgagaaggactcagacacaggtgatgaccaaccagacatcctggagccacccgaggtggccgcagcccgggagagcattgcagccctggtggacgagcagaagcaactgcgcaagcagaagctggcgctggagcagcgctgccgggagctgcgcgcgcggggccggcgcctggaggagacgctgccgcggcgcatcggctccgaggagcagcgcgaggtgctcagcctgctgtgccgcgtgcacgagctcgaggtggagaacaccgagatgcagtcgcacgcgctgctccgcgacggtgcgctccgccaccgccacgaggccgtgcgccgcctggagcagcaccgcagtctctgcgacgagattatccagggccagcggcagatcatcgacgactacaacctggccgtcccgcagcgcctggaagagctctacgaagtgtacctgcgggagctggaggagggcagcctggagcaggccaccatcatggaccaagtggcctccagggccctgcaggacagctccttgcccaaaattaccccagcaggaacctcactgaccccagattctgacctggagagtgtgaagacattgagctctgatgcccagcacctgcagaacagcgccctccctcccctcagcacagagagtgaaggccaccacgtgttcaaggctggtactggggcctggcaggcaaaaagctcctctgtgcccaccccacctcccatccagctcggcagcctggtgacgcaggaggccccggctcaggacagcctgggcagctggatcaactcttcccctgacagcagtgagaacctgtcggagatccccttgtcccacaaagagaggaaggagatcctgactggcaccaagtgcatctgggtgaaggccgcccggcggcgctcgcgggccctgggaaccgaggggcgacacctgctggcacccgcgacagagcgcagcagcctgtccctgcactcactgagcgagggcgacgatgcgcggccaccaggcccactggcctgcaagcggccgcccagccccacactacagcatgctgccagtgaggacaacctgtccagcagcacgggcgaggccccgtcccgggcagtcggacatcatggggacggccccaggccctggctgcgtggccagaagaaaagcctgggcaagaaaagggaggagtcgctggaggcaaagagaaggaagcggaggtcccgatccttcgaggtcaccgggcaagggctctcccaccccaagacacacctcctggggccccatcaggcggagcgcatctcggaccacaggatgccagtgtgcaggcacccagcccctggtatccggcatctgggaaaggtcacgctacctttggccaaagtcaaactccctccaagccagaacacgggcccgggggactcctcacccctggctgttccccccaacccaggtggtggttctcgacgggctacccgtgggccccgcctgccccacggcacaagcacccatggcaaagatggatgctcccggcataactgaggggccctgcctggaactggctctctcacctcccaagactgaatggggtctagcagggcatgggaggtggaggctgggcagatggagatgaccaggaagtaagctcaggatctcagcaggccagggctcctgagacccaggaactggggtctctgcccaaccctcccatgctttcagtgccactggggaaaagaggtgaggccaggggacatggccaggacggctgggctccctggcttcccagccctggacagaatgctgttgccaaaacctgcacagccctgaggccagcctcggccttggtaacggaggaaagcagctgacagtgagacggggctcctggcccacgtgtggggcacgggcatcctggatggttggggaggcgccgacaggcacttcacgtattacaattggggatgtgggtgagggagggaatctggttttgttacttggcagtggttttttctcacccttcctttttaacaataaaatcccatttgggtcttga

SEQ ID NO: 10833 - DNA, 1205 bp, Homo sapiens
  source 1..1205: mol_type = unassigned DNA
gggttgtcaggcagcgcgcgaggcggcgggcagctagcagctggcggacgcgacccggaggcggtgggggtgcggctgagccatgcccggtggcgcggcctgagcccctccacctgctgcaatcatgaaggacagcggggactccaaggaccagcaactcatggtggcgcttcgggtccggcccatcagcgtggcagagctggaggaaggagctaccctcatcgcccataaagtggatgagcaggtatgcagggctctgcagcaggagctgcagggcagaggtctgctcagatggctcagctcacctggtgagggcagaaagggcccctgtggcttgcagcaccctccttcctctactcactgaactcttggctgtgctgttgatgacatcaccaaggaagctgggggctcttcttccaggaagccttcctagattgatccaaggacaactgggagcttccctagcctgggtgggccctgatcctttacctttcacatgctcattgcttgactttcccaccctaatatgcctgctgcccacagagcacatatatatatggttgagagctaaagctcgcctctagggtgtaacgtgtggcaaaatcctcgctctctgtttgcaatcttggtcctcatgtcaccaggatgaggaaggcagggcacacgaggcaataagtgtgtatcaagtaccagcagcatgctgggtactgttctagaaactgggaaactgtggtgaacagaaaaggccctgtcctctctccattaccttaagtctagtgtgaagagatgaggcattcatcaaagaattgcatcacaaacaaacgagtttgcagctaacaagggcttcaaagaaatgcttagtggcatgagagtaggtaagaaggggataagacctaaacctggaggtcagcgagggcttccttaagaaactgtgcttgacactttgggaggccgaggaggccagatcacgaggtcaagagatcaagaccatcctggccaacatggtgaaacccagtctctactgaaaatacaaaaatttagctgggcgtggtggcacgtgcctgtagtcgcagctactcaggaagctgaggcaggataatcgcttaaacccaggaagtggaggttgcagtgagccgacatcacgccattgcactccagcctgggtgacagagtgggactctgtctcaaaaaaaaagagaaaaaga

SEQ ID NO: 10834 - DNA, 2020 bp, Homo sapiens
  source 1..2020: mol_type = unassigned DNA
gtcaggcagcgcgcgaggcggcgggcagctagcagctggcggacgcgacccggaggcggtgggggtgcggctgagccatgcccggtggcgcggcctgagcccctccacctgctgcaatcatgaaggacagcggggactccaaggaccagcaactcatggtggcgcttcgggtccggcccatcagcgtggcagagctggaggaaggagctaccctcatcgcccataaagtggatgagcagatggtggttctcatggacccaatggaggatcccgacgacatcctgcgggcgcatcgctcccgggagaagtcctacctgttcgacgtggcctttgacttcaccgccacccaggagatggtgtatcaggccaccaccaagagcctcatcgagggcgtcatctcaggctacaatgccactgtctttgcctatggccccacaggctgtgggaaaacctacaccatgctgggcacagaccaggagcctggcatctatgttcagaccctcaacgacctcttccgtgccatcgaggagaccagcaatgacatggagtatgaggtctccatgtcctacctggagatcatgcagctgctgatgaaggggaaccggcagaggacccaggagcccacggccgccaaccagacgtcctcccgctcccacgcggtactgcaggtgaccgtgcgccagcgcagccgggtcaagaacatcttgcaggaggtgcggcagggccgcctgttcatgatcgacctggctggctcagagcgcgcctcgcagacacagaatcgtgggcagcgtatgaaggagggggcccacatcaaccgctcactgctggcactgggcaactgcatcaacgccctgagcgacaagggtagcaacaagtacatcaactatcgcgacagcaagctcacccggctcctgaaggactctctgggaggaaacagccgcacagtgatgatcgctcacatcagtcctgcgagcagtgccttcgaggagtcccggaacaccctgacctacgccggccgggccaagaacattaagactagggtgaagcagaacctcctgaacgtctcctaccacatcgcccagtacaccagcatcatcgctgacctgcggggcgagatccagcgactcaagcgcaagattgatgagcagactgggcggggccaggcccggggccggcaggatcggggtgacatccgccacatccaagctgaggtccagctgcacagcgggcagggtgagaaggctggcatgggacagcttcgggagcagctcgccagcgccttccaggagcagatggatgtgcggaggcgcctgctggagctggagaaccgcgccatggaggtccagattgacacctcccgacacctgctcaccatcgccggctggaagcatgagaagtcccgccgggccctcaaatggcgggaggagcagcgaaaggagtgctacgctaaggacgacagcgagaaggactcagacacaggtgatgaccaaccagacatcctggagccacccgaggtggccgcagcccgggagagcattgcagccctggtggacgagcagaagcaactgcgcaagcagaaggtgtccagggtttggggggacaaggagagtgggtttaggggacagggtgagcaggtttgagaggcaaggcggaggggccagggtgggggtagccgtgagacttgggaactcaggccacaaatcctgtgtgactttgctaagctctttaacttctctatgcgtcacattccccacctgtaaaatgggagcagtccatggtgcagccctcatggggttgctgggaagattacataaatgcctggcacataccaaggactcaaaaaatggtaactaatgttataattagggtttttcaggctgggcacagtgactcacacctgtaatctcagcacgttgggaagttgaggtaggcagatcacttgaggccaggagttcgagaccagcctggccaacatggcgaaatcccgtctttactaaaaatacaaaaaaaaaaaaaaaaa

SEQ ID NO: 10835 - DNA, 2094 bp, Homo sapiens
  source 1..2094: mol_type = unassigned DNA
agctagcagctggcggacgcgacccggaggcggtgggggtgcggctgagccatgcccggtggcgcggcctgagcccctccacctgctgcaatcatgaaggacagcggggactccaaggaccagcaactcatggtggcgcttcgggtccggcccatcagcgtggcagagctggaggaaggagctaccctcatcgcccataaagtggatgagcagatggtggttctcatggacccaatggaggatcccgacgacatcctgcgggcgcatcgctcccgggagaagtcctacctgttcgacgtggcctttgacttcaccgccacccaggagatggtgtatcaggccaccaccaagagcctcatcgagggcgtcatctcaggctacaatgccactgtctttgcctatggccccacaggctgtgggaaaacctacaccatgctgggcacagaccaggagcctggcatctatgttcagaccctcaacgacctcttccgtgccatcgaggagaccagcaatgacatggagtatgaggtctccatgtcctacctggagatctacaatgagatgatccgggacctgctgaacccctccctgggctacctggagctgcgggaggactctaagggggtgatccaggtggccggcatcaccgaagtctccaccatcaatgccaaggagatcatgcagctgctgatgaaggggaaccggcagaggacccaggagcccacggccgccaaccagacgtcctcccgctcccacgcggtactgcaggtgaccgtgcgccagcgcagccgggtcaagaacatcttgcaggaggtgcggcagggccgcctgttcatgatcgacctggctggctcagagcgcgcctcgcagacacagaatcgtgggcagcgtatgaaggagggggcccacatcaaccgctcactgctggcactgggcaactgcatcaacgccctgagcgacaagggtagcaacaagtacatcaactatcgcgacagcaagctcacccggctcctgaaggactctctgggaggaaacagccgcacagtgatgatcgctcacatcagtcctgcgagcagtgccttcgaggagtcccggaacaccctgacctacgccggccgggccaagaacattaagactagggtgaagcagaacctcctgaacgtctcctaccacatcgcccagtacaccagcatcatcgctgacctgcggggcgagatccagcgactcaagcgcaagattgatgagcagactgggcggggccaggcccggggccggcaggatcggggtgacatccgccacatccaagctgaggtccagctgcacagcgggcagggtgagaaggctggcatgggacagcttcgggagcagctcgccagcgccttccaggagcagatggatgtgcggaggcgcctgctggagctggagaaccgcgccatggaggtccagattgacacctcccgacacctgctcaccatcgccggctggaagcatgagaagtcccgccgggccctcaaatggcgggaggagcagcgaaaggagtgctacgctaaggacgacagcgagaaggactcagacacaggtgatgaccaaccagacatcctggagccacccgaggtggccgcagcccgggagagcattgcagccctggtggacgagcagaagcaactgcgcaagcagaaggtgtccagggtttggggggacaaggagagtgggtttaggggacagggtgagcaggtttgagaggcaaggcggaggggccagggtgggggtagccgtgagacttgggaactcaggccacaaatcctgtgtgactttgctaagctctttaacttctctatgcgtcacattccccacctgtaaaatgggagcagtccatggtgcagccctcatggggttgctgggaagattacataaatgcctggcacataccaaggactcaaaaaatggtaactaatgttataattagggtttttcaggctgggcacagtgactcacacctgtaatctcagcacgttgggaagttgaggtaggcagatcacttgaggccaggagttcgagaccagcctggccaacatggcgaaatcccgtctttac

SEQ ID NO: 10836 - DNA, 841 bp, Homo sapiens
  source 1..841: mol_type = unassigned DNA
ttttattccaacccctcaatgggggacgggagacacattcttgaaacagctcattgatggttcagaatattcctaatagcaggtaaatgatgccaatggtaggtgctggggcaagacaggaacaggaggtgggggtggcctggtggggtccagtggaactctctggagactgtgagtgggaccctgaaggctgggaggacattccagaaaggtgggagcagggagagcacaggttccaaaggcaggaaggggatggcgtctgtggtgggtatggggagagcaggacaggtcttcaactggagtgggatgttcatgcaggagcggtgagcccagagaaaatcagagagatgggggtggcccttcaacaacgggtggaggaatgaggacgttccccgcaggcattaggaagccactgaaggttgatgagatctagcagtgagtgtgacaggaggttgtggaagtggaggaaaggaggccattactgtcacccagaaagactgggggaggcagggggaagaaaggccctgcaggcaggcctcggtgagtgcacctggggtgactgcatcccctccgctccatacgtgttccctgcaggtgaagcagaacctcctgaacgtctcctaccacatcgcccagtacaccagcatcatcgctgacctgcggggcgagatccagcgactcaagcgcaagattgatgagcagactgggcggggccaggcccggggccggcaggatcggggtgacatccgccacatccaagctgaggtccagctgcacagcgggcagggtgagaaggctggcatgggacagcttcgggagcagctcgccagcgccttccagg

SEQ ID NO: 10837 - DNA, 1980 bp, Homo sapiens; identical to SEQ ID NO: 10831
  source 1..1980: mol_type = unassigned DNA

SEQ ID NO: 10838 - DNA, 3643 bp, Homo sapiens; identical to SEQ ID NO: 10832
  source 1..3643: mol_type = unassigned DNA

SEQ ID NO: 10839 - DNA, 1205 bp, Homo sapiens; identical to SEQ ID NO: 10833
  source 1..1205: mol_type = unassigned DNA

SEQ ID NO: 10840 - DNA, 2020 bp, Homo sapiens; identical to SEQ ID NO: 10834
  source 1..2020: mol_type = unassigned DNA

SEQ ID NO: 10841 - DNA, 2094 bp, Homo sapiens; identical to SEQ ID NO: 10835
  source 1..2094: mol_type = unassigned DNA

SEQ ID NO: 10842 - DNA, 841 bp, Homo sapiens; identical to SEQ ID NO: 10836
  source 1..841: mol_type = unassigned DNA

SEQ ID NO: 10843 - DNA, 9897 bp, Homo sapiens
  source 1..9897: mol_type = unassigned DNA
gggaggtggctgccgggtgggaggtgtgtgcgcgtgtgccgcgccgtagggagcggcgggtcgcgccgccggctgtcagctagctccgcgccgccgcccgatggcgcgaggaggcgcgcgggcccagccccggggggccggccgcgggtgagcccctcggcctgccgcccgcgagcatgtcacctccagccgccgccgccgcagcctccgccagccgcgcccgcgcccccgcctcccgcagccgcagccgctgcctcgggcattggcccccagacccccgcctctgatccacgcccagaccctagctccagagggccatggccggccagggggactgctgcgtcaaggtggccgtcaggatccggccccagctgtcgaaggagaagattgagggctgtcacatctgtacctctgttaccccgggagagccccaggtcctgctggggaaggacaaggccttcacctatgactttgtcttcgacctggacacctggcaagaacagatctattccacctgtgtgagcaagctcatcgagggctgcttcgagggctataatgccacggtgctggcctatgggcagacgggggccgggaagacgtacaccatgggcactggctttgacatggcaacgtcggaggaggagcagggcatcatcccgagggccatcgcacacctctttgggggcattgccgagcgcaagcgccgggcacaggagcagggcgtggctggacctgagttcaaagtcagcgcccagtttctggagctctacaacgaggagatccttgacctgtttgacagcacccgtgaccctgacacccgccaccgcaggtccaacatcaagatccacgaggacgcaaacggtggcatctacaccactggcgtcacttctcgcctcatccactcccaggaggagctgatccagtgcctgaagcagggggccctgtcccgcaccacagccagcacccagatgaacgtgcagagctcacgctcccacgccatcttcaccatccacctgtgccagatgcgcatgtgcacccagcccgacctggtgaatgaggcggtgactgggcttcctgatggtacacctccctcgagtgagtatgagacactcactgctaagtttcactttgtggacctggccggctcagagcggctgaagcggacaggggctactggcgagcgggccaaggagggcatctccatcaactgtggcctgctggccttgggcaatgtgatcagcgccttaggggaccagagcaagaaggtggtgcacgttccctacagggactccaagctcactcggctcctccaggattcgctggggggcaacagccagaccatcatgatcgcctgtgtgagcccctcagaccgagatttcatggagaccctcaacacactcaaatatgccaatcgggcccgcaacatcaagaacaaggtggtagtgaaccaggacaagaccagccagcaaatcagtgcactgcgggctgagattgctcggctgcagatggagctgatggagtataaggcgggcaagcgagtgataggagaggatggcgctgagggctatagtgatctgttccgagagaatgccatgctacagaaggagaatggggccctgcggctgcgggtgaaagccatgcaggaggccatcgatgccatcaacaaccgcgtcacccagctcatgagccaggaggccaacctgctgctagccaaggccggcgatggcaatgaggccattggtgcgctgatccagaactacatccgggagatcgaggagctacggactaagcttctagagagtgaagccatgaacgagtccctgcgccgcagcctctcacgggcctcggctaggagcccctactccctgggtgcttctccagccgccccggccttcgggggcagccctgccagctccatggaggatgcctcggaggtgatccgcagggccaagcaggacctggagcggctaaagaagaaggaggtcaggcagcggaggaagagccccgagaaggaagccttcaaaaagagggcaaaactccaacaggagaacagcgaggagacggatgagaacgaggcggaggaggaggaggaagagcgagacgagagtggctgtgaggaggaggaagggcgcgaggatgaagatgaggactcgggcagtgaagagagcctggtggactcagactcagaccccgaggagaaggaggtgaacttccaggcggacctggccgacctgacttgtgagatcgaaatcaagcagaagctgatcgacgagctggagaacagccagcggcggttgcagacgctcaagcaccagtatgaggaaaagctgattctgctgcagaacaagatccgagacacacagctggagcgcgaccgtgtgctgcagaacctcagcaccatggagtgctatactgaggagaaggccaacaagatcaaggcagactatgagaagaggctgcgggagatgaaccgggacctgcagaagctgcaggccgcccagaaagagcacgcccggctgcttaagaaccagtcgcgctacgagagggagctgaagaagctacaggccgaggtggctgagatgaagaaggccaaggtggccctgatgaagcagatgcgtgaggagcaacagcggcggcggctagtggagaccaagaggaaccgggagatcgcacagctcaagaaggagcagcggcgacaggagtttcagatccgagctctggagtcccagaagcggcagcaggagatggtcctgaggaggaagacccaggaggtttctgcactgaggcgcctggccaagcccatgtctgagcgggtggcagggcgtgcaggactaaagccacccatgctggactctggggctgaggtgtcggccagcactacctcatctgaggctgaatcaggggcccgctctgtctccagcatcgtgcgccagtggaaccgcaaaatcaaccacttcttgggggaccatcctgcgcccactgtcaatggcacccgtcctgcccgaaagaagttccagaagaagggggccagccagagcttcagtaaggcggcaaggctcaagtggcagtccctggagcgacggatcattgacatcgtcatgcagagaatgaccattgtcaacctggaggctgacatggagcggctcatcaagaaaagggaggagctgttcctcctgcaggaggcactgcggaggaagcgggagcggctgcaggctgagagccccgaggaagagaaggggctgcaggagctggctgaggagatcgaggtgctggcagccaacattgactacatcaatgacggcatcaccgactgccaggccaccatcgtgcagctggaggagaccaaggaggagctggactccacagacacatccgtggtcatcagctcctgctccctggctgaagcccgcctcctgctagacaacttcctcaaggcatccattgacaaggggctgcaagtggcacaaaaggaagcccagatccggctgttggagggccgactgaggcagacggatatggcaggctcctcccagaaccatctgctcctggacgccctgcgtgagaaggctgaagctcaccccgagctgcaggccctcatctacaatgtgcagcaggagaatggctacgccagcacagatgaggagatctcagagttctctgagggcagcttctcccagtcattcaccatgaaaggctccaccagccatgacgatttcaagttcaagagcgagcccaaactgtctgcccaaatgaaagctgtgtcggctgagtgcctgggccccccactggatatctccaccaagaacatcaccaagtccctggcctccctcgttgagatcaaagaggacggagtgggcttctctgtccgagacccctattaccgggacagggtctcgcgcaccgtcagtctgcctacccggggcagcactttccctaggcaatctcgagccacagagacgtccccgctgacgagaaggaagtcctacgaccgagggcagcccattaggtccacagatgtgggattcacacccccatcatcccctcccactcggccccgcaatgaccgcaatgtcttctctcgtctcaccagtaatcagagccaggggtcagcgctggacaagggcatcatctccccggttggaggagccaagggtgcacggacggccccactgcagtgtgtctccatggccgaaggccacaccaagcccatcctctgcctggatgccacagatgagttgctattcacagggtccaaagaccgaagctgcaagatgtggaacttggttacgggacaggagatcgcagctctaaagggccaccccaacaacgtggtctccatcaagtactgcagccactcggggcttgtgttctccgtgtccacctcctacatcaaggtgtgggacatccgggactcagccaagtgcattcggactctcacgtcctcgggccaggtgatctcaggggatgcctgtgccgccacatccacccgtgccatcaccagtgctcagggcgagcatcagatcaaccagatcgccctcagcccttcgggcaccatgctgtacgccgcctcgggcaatgccgtccgcatctgggagcttagcaggttccagcctgtcggcaagctgactggccacatcggccctgtgatgtgcctgacggtcacccagacggccagccagcatgacctcgtggtgactggctccaaggaccactacgttaagatgttcgagctgggcgagtgtgtgacgggcaccatcggccccactcacaacttcgagcccccgcactacgatggcatcgagtgtctcgccatccagggagacatcctgttcagtggctcccgagataacggcatcaagaagtgggacctagaccagcaggagctcatccagcaaatccccaatgcgcacaaggactgggtgtgcgccctggccttcatcccgggccgccccatgctgctcagcgcctgccgtgcgggtgtcatcaaggtctggaacgtggacaacttcacacccatcggtgagatcaagggccacgacagtcccatcaatgccatctgcaccaatgccaagcatatcttcacagcctccagtgactgccgggtaaagttgtggaattacgtccctggactcaccccctgccttcctcgccgagtcctggccataaagggccgcgccaccaccctgccctgaccctccccaactctccctgtctcctctttcattcttcccctctttccttttccctctctttccccacttcgatctgagctgcttcttaacggtatgagattattttactccttcttcttcctttcccttcctgtcctgcctggcctagagaggtgccctgcctgtccctcctgcacccaccgtccttttccaagcatgaacagtgggacaggccccaggagatgggtgccagggagcagaagggggagccttcaggcctggacaaaacgaaacacccccccaaaaaaagaaaacccatgacaaagctcccctgggggcctctgagtgcacaggcctctccatctgcccagcaccccaccacctgcagtccacctccccgtaagccatgcttgcctcccagccccaaccacatttggggagtttggggaatccagttcatcctctacttttgggggcagccagccaagcccactgcaagagctgaccggcacccctccactttgtcctccaccccagtgacctgacggtgaagttctggagtgtccggcggttaccccacagcggcccaccctaggagtgaggtcagagggatgcccccggaccctcgaccccagcagcctggacaccatggaagggaagctgtgacccggccgatggggccagctgctctggggacagagggcgtggccccctctcctgccctcctccctctcccttggccttcccacaggacactgttccctcatccctcccctgcctctcaggagcctctgggtgagagagaggctggggaggaaattaagctgtgaagccaaagggcattatcccttcttgttcccctcctggcagtcgtggccacattgtctcctgctgaaccggctctgcccctttctcaggcctttggcccagtggtggagccctgtggggaggtgcagcagcctggccccatcccacccttccgaggagctggcctccccgcttctcccagcccagcctctagagccactgcacctgcctctgagcccaaaaagataagtcctcaggtagctaaggaaaccaggtgtgggcggctgggccttgcagctaacccttaaccctctggcaacccgcagatagccccaactggccccaacagttccctggggtcccttttggatggggccaaggtggagctgctagaaagattcctttggggagatggtcagaaatacttcagttatttattattttgttatttttattttttgctgttgcctcctggaaacggacttgaagtttcttcccctatattctttccctcagctcttgggggccagaaatcccaaagggagtccgctgccccggccctccagggccgcctcctctgtttgctttgcagaggagggaactgctccttcgactctgcagctcaggcctgtccccgacacagcccccagggagtcttctagctacccctggcctctaggccgcctgacgctcagtgccttcctccgttccggggcctggcacccgtgccgggcagccttacaccagccatgcccgcggcaccacatgtgtcttctcactcgcgaggtcttgtgcccagcgcccccgggaaggcgggggcgctcaccccacagcccaggccccggggttctgccccacagtcctgcgtgggccacgtaggaagcagcatgggggctgtgtctgctgggaggtggcttggatggggaggacagcccggcaccctgacccccgcccctccccagccctgcagtcccccactgggccggggagtctctccagcttctctctctctggttattcaggagacacattttcggccttaaaactggcatggagcgcaggccctcccttgcagaaaattatcaaggaagagggagttggcagagtttctctgccccggggctggggacgcggagctccggggaaattgttaaatcagtgttctggcgccccctgttgggggaactctggaattacaggagtgggccttgggggggactgagctccatccctctcccccgccccacccccacccaaagttgcccaccctgtttttccgttgcatcgctggtcttgtgcttcccgcttcagtctgggagccaagagccagccccacctcccttcagaggacgcagtgacttttggactttccagaggtggttctgtgtttctgcccttggctcctctccgtcttgggctggggcacttggagccctctccatgtggcgcccagtgttggggggaggcaggctccagtggaggctgagtgaggcctggtcccttccccgtgccctcctcggagctgccacagaggctaagacggctgtcctgctggtgctggccctgctggatgtggtattgaagtctggggcagctgatagcaggaaggagacccccttggatgctggtctcctgggacctgaacagtctgtcagcaatggctggaaatccttcttcctctggccaccccgggggtgccgggcaacccccttagctctaagatgtggccacaaatctcttcccactcctccccgccaacctgaacagaaagttttgaccttgcaacctgtaagaaagaatccgtccgcatgactgtttacaagcgatagaaacacgtaagactctgtccccttgagctcccacccccgggccggggatgccccacctggggtgactgcactgtagctgcaaggcgtgttcttgcacgaagtgtgatcttatggccctgcgagaggtgctcatcatcatgcccattttctgctgtttctgatgggtcagctacctcacggcggggccagctctgctgtcctggcaagtgtcattgactctctaaacttgaagtccttcaggagccctgagcccaacatccatgagacaccccgagttgtgcttcatgagagttggattctctgcccactctttcagggatgtccaaggtccatgttagggggcaggcccccagctccactcactgcacaagcaccctaaatgttggaagcacaaaatggttgtgatttgagcacaatggcagggtcccgcaggcagacttgacaggcccaggcccgggaggatccccccacgttggctctgtccaaagtgagattgggggtgcctgtgtctgggacagggggctgcccttgctcagaccaggccttggctcatggcttgtcctaattctgggactcgtcatcttacttcttgcccttctgtgcccatcttaagactggaggctgagccttgtcaggcccagccacatctttacgccatgggaccaggagtaaagcgctctctaaaccccgcaccccaaatctctaaacgcctgagttcaggctgagtcctagccctagtgagcctgaagagcttggactgattcccagtctcctgggtcaagccccactttgtgctttcgaagcttatgagcgggttccctggatagaaggagtcttccatccccactgcccttgggcctcttcagcatagtcctgtgccagggccctgtcctcactatcagtcagttcagtatttgctttcacgtgagtggcggactcttctgaagcagccagaactctcaaaggcagcgcatggagttgccttgcgagatttccaaggaaggaggaaagattaacaggcggagcctggcacacccaagcctttgaggtggtcagagtgccaccttcagccccttgggaagggacagcggtgggtctgggagtggcctcaccctggattcagcctaggaatctcttcaccctcagctgtccagccctgctgcctgtctggggatgtgtggcctgggcagagggcagtttaaagcacaaaaccacatggggaaaacacaaggttgcggggactttctcatgtgcctgatgtggtggagggagacaccagcaggtggctgcagtgacgttagggaacataacacttctttgccctgctagctctcagctctggggggcatcccccgatgtggtctgggctgggagcaggcatatcccctggttgttgcctgtgcctggtctgttcaccatcgtgtttgtgtgggcagagcctgccctgcaggagcagtgactttcttcccactgtgtgtcccggacctgtggtatgtgtccctttgccatcccaaacaggcaactgcttgctgctctccttgcttggcatagcctcctggtcagtggccaatgccccacaggccttcctgggcctggccctcctctcctgactcccagatccttccctgccctcttgtgtgcaaggacagattttgcagggaaagttctgtttcttctttgatacctttgttctgtcccctgccccatccccagcactcatgatcttgaagcccctatcacactctagttcagtcctgtgaaccatgtcctgagggccttgcagggaagtaggaaatagaaactcctccacaaagagccgaggatcagagaagacccctgagatgaatcagggccctgccctgcccaccaactcttttctagcaatcatgtcctgcccaggctgcaggcttcattaggctcctgctgtcctccatgatgtgactagcacaaggtgtatatatgttttgtacctctgccgatggctgtacatagtgtatgaaagttatttaagccccatgttgtacatttctgttcctagattggatgtgtgtgttctaagaagttgtcataaataaaacctgaatgaccaa

SEQ ID NO: 10844 - DNA, 5428 bp, Homo sapiens
  source 1..5428: mol_type = unassigned DNA
gcccagaccctagctccagagggccatggccggccagggggactgctgcgtcaaggtggccgtcaggatccggccccagctgtcgaaggagaagattgagggctgtcacatctgtacctctgttaccccgggagagccccaggtcctgctggggaaggacaaggccttcacctatgactttgtcttcgacctggacacctggcaagaacagatctattccacctgtgtgagcaagctcatcgagggctgcttcgagggctataatgccacggtgctggcctatgggcagacgggggccgggaagacgtacaccatgggcactggctttgacatggcaacgtcggaggaggagcagggcatcatcccgagggccatcgcacacctctttgggggcattgccgagcgcaagcgccgggcacaggagcagggcgtggctggacctgagttcaaagtcagcgcccagtttctggagctctacaacgaggagatccttgacctgtttgacagcacccgtgaccctgacacccgccaccgcaggtccaacatcaagatccacgaggacgcaaacggtggcatctacaccactggcgtcacttctcgcctcatccactcccaggaggagctgatccagtgcctgaagcagggggccctgtcccgcaccacagccagcacccagatgaacgtgcagagctcacgctcccacgccatcttcaccatccacctgtgccagatgcgcatgtgcacccagcccgacctggtgaatgaggcggtgactgggcttcctgatggtacacctccctcgagtgagtatgagacactcactgctaagtttcactttgtggacctggccggctcagagcggctgaagcggacaggggctactggcgagcgggccaaggagggcatctccatcaactgtggcctgctggccttgggcaatgtgatcagcgccttaggggaccagagcaagaaggtggtgcacgttccctacagggactccaagctcactcggctcctccaggattcgctggggggcaacagccagaccatcatgatcgcctgtgtgagcccctcagaccgagatttcatggagaccctcaacacactcaaatatgccaatcgggcccgcaacatcaagaacaaggtggtagtgaaccaggacaagaccagccagcaaatcagtgcactgcgggctgagattgctcggctgcagatggagctgatggagtataaggcgggcaagcgagtgataggagaggatggcgctgagggctatagtgatctgttccgagagaatgccatgctacagaaggagaatggggccctgcggctgcgggtgaaagccatgcaggaggccatcgatgccatcaacaaccgcgtcacccagctcatgagccaggaggccaacctgctgctagccaaggccggcgatggcaatgaggccattggtgcgctgatccagaactacatccgggagatcgaggagctacggactaagcttctagagagtgaagccatgaacgagtccctgcgccgcagcctctcacgggcctcggctaggagcccctactccctgggtgcttctccagccgccccggccttcgggggcagccctgccagctccatggaggatgcctcggaggtgatccgcagggccaagcaggacctggagcggctaaagaagaaggaggtcaggcagcggaggaagagccccgagaaggaagccttcaaaaagagggcaaaactccaacaggagaacagcgaggagacggatgagaacgaggcggaggaggaggaggaagagcgagacgagagtggctgtgaggaggaggaagggcgcgaggatgaagatgaggactcgggcagtgaagagagcctggtggactcagactcagaccccgaggagaaggaggtgaacttccaggcggacctggccgacctgacttgtgagatcgaaatcaagcagaagctgatcgacgagctggagaacagccagcggcggttgcagacgctcaagcaccagtatgaggaaaagctgattctgctgcagaacaagatccgagacacacagctggagcgcgaccgtgtgctgcagaacctcagcaccatggagtgctatactgaggagaaggccaacaagatcaaggcagactatgagaagaggctgcgggagatgaaccgggacctgcagaagctgcaggccgcccagaaagagcacgcccggctgcttaagaaccagtcgcgctacgagagggagctgaagaagctacaggccgaggtggctgagatgaagaaggccaaggtggccctgatgaagcagatgcgtgaggagcaacagcggcggcggctagtggagaccaagaggaaccgggagatcgcacagctcaagaaggagcagcggcgacaggagtttcagatccgagctctggagtcccagaagcggcagcaggagatggtcctgaggaggaagacccaggaggtttctgcactgaggcgcctggccaagcccatgtctgagcgggtggcagggcgtgcaggactaaagccacccatgctggactctggggctgaggtgtcggccagcactacctcatctgaggctgaatcaggggcccgctctgtctccagcatcgtgcgccagtggaaccgcaaaatcaaccacttcttgggggaccatcctgcgcccactgtcaatggcacccgtcctgcccgaaagaagttccagaagaagggggccagccagagcttcagtaaggcggcaaggctcaagtggcagtccctggagcgacggatcattgacatcgtcatgcagagaatgaccattgtcaacctggaggctgacatggagcggctcatcaagaaaagggaggagctgttcctcctgcaggaggcactgcggaggaagcgggagcggctgcaggctgagagccccgaggaagagaaggggctgcaggagctggctgaggagatcgaggtgctggcagccaacattgactacatcaatgacggcatcaccgactgccaggccaccatcgtgcagctggaggagaccaaggaggagctggactccacagacacatccgtggtcatcagctcctgctccctggctgaagcccgcctcctgctagacaacttcctcaaggcatccattgacaaggggctgcaagtggcacaaaaggaagcccagatccggctgttggagggccgactgaggcagacggatatggcaggctcctcccagaaccatctgctcctggacgccctgcgtgagaaggctgaagctcaccccgagctgcaggccctcatctacaatgtgcagcaggagaatggctacgccagcacagatgaggagatctcagagttctctgagggcagcttctcccagtcattcaccatgaaaggctccaccagccatgacgatttcaagttcaagagcgagcccaaactgtctgcccaaatgaaagctgtgtcggctgagtgcctgggccccccactggatatctccaccaagaacatcaccaagtccctggcctccctcgttgagatcaaagaggacggagtgggcttctctgtccgagacccctattaccgggacagggtctcgcgcaccgtcagtctgcctacccggggcagcactttccctaggcaatctcgagccacagagacgtccccgctgacgagaaggaagtcctacgaccgagggcagcccattaggtccacagatgtgggattcacacccccatcatcccctcccactcggccccgcaatgaccgcaatgtcttctctcgtctcaccagtaatcagagccaggggtcagcgctggacaagtctgatgacagcgactcctctttgtcggaggtcctgaggggcatcatctccccggttggaggagccaagggtgcacggacggccccactgcagtgtgtctccatggccgaaggccacaccaagcccatcctctgcctggatgccacagatgagttgctattcacagggtccaaagaccgaagctgcaagatgtggaacttggttacgggacaggagatcgcagctctaaagggccaccccaacaacgtggtctccatcaagtactgcagccactcggggcttgtgttctccgtgtccacctcctacatcaaggtgtgggacatccgggactcagccaagtgcattcggactctcacgtcctcgggccaggtgatctcaggggatgcctgtgccgccacatccacccgtgccatcaccagtgctcagggcgagcatcagatcaaccagatcgccctcagcccttcgggcaccatgctgtacgccgcctcgggcaatgccgtccgcatctgggagcttagcaggttccagcctgtcggcaagctgactggccacatcggccctgtgatgtgcctgacggtcacccagacggccagccagcatgacctcgtggtgactggctccaaggaccactacgttaagatgttcgagctgggcgagtgtgtgacgggcaccatcggccccactcacaacttcgagcccccgcactacgatggcatcgagtgtctcgccatccagggagacatcctgttcagtggctcccgagataacggcatcaagaagtgggacctagaccagcaggagctcatccagcaaatccccaatgcgcacaaggactgggtgtgcgccctggccttcatcccgggccgccccatgctgctcagcgcctgccgtgcgggtgtcatcaaggtctggaacgtggacaacttcacacccatcggtgagatcaagggccacgacagtcccatcaatgccatctgcaccaatgccaagcatatcttcacagcctccagtgacctgacggtgaagttctggagtgtccggcggttaccccacagcggcccaccctaggagtgaggtcagagggatgcccccggaccctcgaccccagcagcctggacaccatggaagggaagctgtgacccggccgatggggccagctgctctggggacagagggcgtggccccctctcctgccctcctccctctcccttggccttcccacaggacactgttccctcatccctcccctgcctctcaggagcctctgggtgagagagaggctggggaggaaattaagctgtgaagccaaagggcattatcccttcttgttcccctcctggcagtcgtggccacattgtctcctgctgaaccggctctgcccctttctcaggcctttggcccagtggtggagccctgtggggaggtgcagcagcctggccccatcccacccttccgaggagctggcctccccgcttctcccagcccagcctctagagccactgcacctgcctctgagcccaaaaagataagtcctcaggtagctaaggaaaccaggtgtgggcggctgggccttgcagctaacccttaaccctctggcaa

SEQ ID NO: 10845 - DNA, 5389 bp, Homo sapiens
  source 1..5389: mol_type = unassigned DNA
gcccagaccctagctccagagggccatggccggccagggggactgctgcgtcaaggtggccgtcaggatccggccccagctgtcgaaggagaagattgagggctgtcacatctgtacctctgttaccccgggagagccccaggtcctgctggggaaggacaaggccttcacctatgactttgtcttcgacctggacacctggcaagaacagatctattccacctgtgtgagcaagctcatcgagggctgcttcgagggctataatgccacggtgctggcctatgggcagacgggggccgggaagacgtacaccatgggcactggctttgacatggcaacgtcggaggaggagcagggcatcatcccgagggccatcgcacacctctttgggggcattgccgagcgcaagcgccgggcacaggagcagggcgtggctggacctgagttcaaagtcagcgcccagtttctggagctctacaacgaggagatccttgacctgtttgacagcacccgtgaccctgacacccgccaccgcaggtccaacatcaagatccacgaggacgcaaacggtggcatctacaccactggcgtcacttctcgcctcatccactcccaggaggagctgatccagtgcctgaagcagggggccctgtcccgcaccacagccagcacccagatgaacgtgcagagctcacgctcccacgccatcttcaccatccacctgtgccagatgcgcatgtgcacccagcccgacctggtgaatgaggcggtgactgggcttcctgatggtacacctccctcgagtgagtatgagacactcactgctaagtttcactttgtggacctggccggctcagagcggctgaagcggacaggggctactggcgagcgggccaaggagggcatctccatcaactgtggcctgctggccttgggcaatgtgatcagcgccttaggggaccagagcaagaaggtggtgcacgttccctacagggactccaagctcactcggctcctccaggattcgctggggggcaacagccagaccatcatgatcgcctgtgtgagcccctcagaccgagatttcatggagaccctcaacacactcaaatatgccaatcgggcccgcaacatcaagaacaaggtggtagtgaaccaggacaagaccagccagcaaatcagtgcactgcgggctgagattgctcggctgcagatggagctgatggagtataaggcgggcaagcgagtgataggagaggatggcgctgagggctatagtgatctgttccgagagaatgccatgctacagaaggagaatggggccctgcggctgcgggtgaaagccatgcaggaggccatcgatgccatcaacaaccgcgtcacccagctcatgagccaggaggccaacctgctgctagccaaggccggcgatggcaatgaggccattggtgcgctgatccagaactacatccgggagatcgaggagctacggactaagcttctagagagtgaagccatgaacgagtccctgcgccgcagcctctcacgggcctcggctaggagcccctactccctgggtgcttctccagccgccccggccttcgggggcagccctgccagctccatggaggatgcctcggaggtgatccgcagggccaagcaggacctggagcggctaaagaagaaggaggtcaggcagcggaggaagagccccgagaaggaagccttcaaaaagagggcaaaactccaacaggagaacagcgaggagacggatgagaacgaggcggaggaggaggaggaagagcgagacgagagtggctgtgaggaggaggaagggcgcgaggatgaagatgaggactcgggcagtgaagagagcctggtggactcagactcagaccccgaggagaaggaggtgaacttccaggcggacctggccgacctgacttgtgagatcgaaatcaagcagaagctgatcgacgagctggagaacagccagcggcggttgcagacgctcaagcaccagtatgaggaaaagctgattctgctgcagaacaagatccgagacacacagctggagcgcgaccgtgtgctgcagaacctcagcaccatggagtgctatactgaggagaaggccaacaagatcaaggcagactatgagaagaggctgcgggagatgaaccgggacctgcagaagctgcaggccgcccagaaagagcacgcccggctgcttaagaaccagtcgcgctacgagagggagctgaagaagctacaggccgaggtggctgagatgaagaaggccaaggtggccctgatgaagcagatgcgtgaggagcaacagcggcggcggctagtggagaccaagaggaaccgggagatcgcacagctcaagaaggagcagcggcgacaggagtttcagatccgagctctggagtcccagaagcggcagcaggagatggtcctgaggaggaagacccaggaggtttctgcactgaggcgcctggccaagcccatgtctgagcgggtggcagggcgtgcaggactaaagccacccatgctggactctggggctgaggtgtcggccagcactacctcatctgaggctgaatcaggggcccgctctgtctccagcatcgtgcgccagtggaaccgcaaaatcaaccacttcttgggggaccatcctgcgcccactgtcaatggcacccgtcctgcccgaaagaagttccagaagaagggggccagccagagcttcagtaaggcggcaaggctcaagtggcagtccctggagcgacggatcattgacatcgtcatgcagagaatgaccattgtcaacctggaggctgacatggagcggctcatcaagaaaagggaggagctgttcctcctgcaggaggcactgcggaggaagcgggagcggctgcaggctgagagccccgaggaagagaaggggctgcaggagctggctgaggagatcgaggtgctggcagccaacattgactacatcaatgacggcatcaccgactgccaggccaccatcgtgcagctggaggagaccaaggaggagctggactccacagacacatccgtggtcatcagctcctgctccctggctgaagcccgcctcctgctagacaacttcctcaaggcatccattgacaaggggctgcaagtggcacaaaaggaagcccagatccggctgttggagggccgactgaggcagacggatatggcaggctcctcccagaaccatctgctcctggacgccctgcgtgagaaggctgaagctcaccccgagctgcaggccctcatctacaatgtgcagcaggagaatggctacgccagcacagatgaggagatctcagagttctctgagggcagcttctcccagtcattcaccatgaaaggctccaccagccatgacgatttcaagttcaagagcgagcccaaactgtctgcccaaatgaaagctgtgtcggctgagtgcctgggccccccactggatatctccaccaagaacatcaccaagtccctggcctccctcgttgagatcaaagaggacggagtgggcttctctgtccgagacccctattaccgggacagggtctcgcgcaccgtcagtctgcctacccggggcagcactttccctaggcaatctcgagccacagagacgtccccgctgacgagaaggaagtcctacgaccgagggcagcccattaggtccacagatgtgggattcacacccccatcatcccctcccactcggccccgcaatgaccgcaatgtcttctctcgtctcaccagtaatcagagccaggggtcagcgctggacaagggcatcatctccccggttggaggagccaagggtgcacggacggccccactgcagtgtgtctccatggccgaaggccacaccaagcccatcctctgcctggatgccacagatgagttgctattcacagggtccaaagaccgaagctgcaagatgtggaacttggttacgggacaggagatcgcagctctaaagggccaccccaacaacgtggtctccatcaagtactgcagccactcggggcttgtgttctccgtgtccacctcctacatcaaggtgtgggacatccgggactcagccaagtgcattcggactctcacgtcctcgggccaggtgatctcaggggatgcctgtgccgccacatccacccgtgccatcaccagtgctcagggcgagcatcagatcaaccagatcgccctcagcccttcgggcaccatgctgtacgccgcctcgggcaatgccgtccgcatctgggagcttagcaggttccagcctgtcggcaagctgactggccacatcggccctgtgatgtgcctgacggtcacccagacggccagccagcatgacctcgtggtgactggctccaaggaccactacgttaagatgttcgagctgggcgagtgtgtgacgggcaccatcggccccactcacaacttcgagcccccgcactacgatggcatcgagtgtctcgccatccagggagacatcctgttcagtggctcccgagataacggcatcaagaagtgggacctagaccagcaggagctcatccagcaaatccccaatgcgcacaaggactgggtgtgcgccctggccttcatcccgggccgccccatgctgctcagcgcctgccgtgcgggtgtcatcaaggtctggaacgtggacaacttcacacccatcggtgagatcaagggccacgacagtcccatcaatgccatctgcaccaatgccaagcatatcttcacagcctccagtgacctgacggtgaagttctggagtgtccggcggttaccccacagcggcccaccctaggagtgaggtcagagggatgcccccggaccctcgaccccagcagcctggacaccatggaagggaagctgtgacccggccgatggggccagctgctctggggacagagggcgtggccccctctcctgccctcctccctctcccttggccttcccacaggacactgttccctcatccctcccctgcctctcaggagcctctgggtgagagagaggctggggaggaaattaagctgtgaagccaaagggcattatcccttcttgttcccctcctggcagtcgtggccacattgtctcctgctgaaccggctctgcccctttctcaggcctttggcccagtggtggagccctgtggggaggtgcagcagcctggccccatcccacccttccgaggagctggcctccccgcttctcccagcccagcctctagagccactgcacctgcctctgagcccaaaaagataagtcctcaggtagctaaggaaaccaggtgtgggcggctgggccttgcagctaacccttaaccctctggcaa

SEQ ID NO: 10846 - DNA, 5519 bp, Homo sapiens
  source 1..5519: mol_type = unassigned DNA
gggaggtggctgccgggtgggaggtgtgtgcgcgtgtgccgcgccgtagggagcggcgggtcgcgccgccggctgtcagctagctccgcgccgccgcccgatggcgcgaggaggcgcgcgggcccagccccggggggccggccgcgggtgagcccctcggcctgccgcccgcgagcatgtcacctccagccgccgccgccgcagcctccgccagccgcgcccgcgcccccgcctcccgcagccgcagccgctgcctcgggcattggcccccagacccccgcctctgatccacgcccagaccctagctccagagggccatggccggccagggggactgctgcgtcaaggtggccgtcaggatccggccccagctgtcgaaggagaagattgagggctgtcacatctgtacctctgttaccccgggagagccccaggtcctgctggggaaggacaaggccttcacctatgactttgtcttcgacctggacacctggcaagaacagatctattccacctgtgtgagcaagctcatcgagggctgcttcgagggctataatgccacggtgctggcctatgggcagacgggggccgggaagacgtacaccatgggcactggctttgacatggcaacgtcggaggaggagcagggcatcatcccgagggccatcgcacacctctttgggggcattgccgagcgcaagcgccgggcacaggagcagggcgtggctggacctgagttcaaagtcagcgcccagtttctggagctctacaacgaggagatccttgacctgtttgacagcacccgtgaccctgacacccgccaccgcaggtccaacatcaagatccacgaggacgcaaacggtggcatctacaccactggcgtcacttctcgcctcatccactcccaggaggagctgatccagtgcctgaagcagggggccctgtcccgcaccacagccagcacccagatgaacgtgcagagctcacgctcccacgccatcttcaccatccacctgtgccagatgcgcatgtgcacccagcccgacctggtgaatgaggcggtgactgggcttcctgatggtacacctccctcgagtgagtatgagacactcactgctaagtttcactttgtggacctggccggctcagagcggctgaagcggacaggggctactggcgagcgggccaaggagggcatctccatcaactgtggcctgctggccttgggcaatgtgatcagcgccttaggggaccagagcaagaaggtggtgcacgttccctacagggactccaagctcactcggctcctccaggattcgctggggggcaacagccagaccatcatgatcgcctgtgtgagcccctcagaccgagatttcatggagaccctcaacacactcaaatatgccaatcgggcccgcaacatcaagaacaaggtggtagtgaaccaggacaagaccagccagcaaatcagtgcactgcgggctgagattgctcggctgcagatggagctgatggagtataaggcgggcaagcgagtgataggagaggatggcgctgagggctatagtgatctgttccgagagaatgccatgctacagaaggagaatggggccctgcggctgcgggtgaaagccatgcaggaggccatcgatgccatcaacaaccgcgtcacccagctcatgagccaggaggccaacctgctgctagccaaggccggcgatggcaatgaggccattggtgcgctgatccagaactacatccgggagatcgaggagctacggactaagcttctagagagtgaagccatgaacgagtccctgcgccgcagcctctcacgggcctcggctaggagcccctactccctgggtgcttctccagccgccccggccttcgggggcagccctgccagctccatggaggatgcctcggaggtgatccgcagggccaagcaggacctggagcggctaaagaagaaggaggtcaggcagcggaggaagagccccgagaaggaagccttcaaaaagagggcaaaactccaacaggagaacagcgaggagacggatgagaacgaggcggaggaggaggaggaagagcgagacgagagtggctgtgaggaggaggaagggcgcgaggatgaagatgaggactcgggcagtgaagagagcctggtggactcagactcagaccccgaggagaaggaggtgaacttccaggcggacctggccgacctgacttgtgagatcgaaatcaagcagaagctgatcgacgagctggagaacagccagcggcggttgcagacgctcaagcaccagtatgaggaaaagctgattctgctgcagaacaagatccgagacacacagctggagcgcgaccgtgtgctgcagaacctcagcaccatggagtgctatactgaggagaaggccaacaagatcaaggcagactatgagaagaggctgcgggagatgaaccgggacctgcagaagctgcaggccgcccagaaagagcacgcccggctgcttaagaaccagtcgcgctacgagagggagctgaagaagctacaggccgaggtggctgagatgaagaaggccaaggtggccctgatgaagcagatgcgtgaggagcaacagcggcggcggctagtggagaccaagaggaaccgggagatcgcacagctcaagaaggagcagcggcgacaggagtttcagatccgagctctggagtcccagaagcggcagcaggagatggtcctgaggaggaagacccaggaggtttctgcactgaggcgcctggccaagcccatgtctgagcgggtggcagggcgtgcaggactaaagccacccatgctggactctggggctgaggtgtcggccagcactacctcatctgaggctgaatcaggggcccgctctgtctccagcatcgtgcgccagtggaaccgcaaaatcaaccacttcttgggggaccatcctgcgcccactgtcaatggcacccgtcctgcccgaaagaagttccagaagaagggggccagccagagcttcagtaaggcggcaaggctcaagtggcagtccctggagcgacggatcattgacatcgtcatgcagagaatgaccattgtcaacctggaggctgacatggagcggctcatcaagaaaagggaggagctgttcctcctgcaggaggcactgcggaggaagcgggagcggctgcaggctgagagccccgaggaagagaaggggctgcaggagctggctgaggagatcgaggtgctggcagccaacattgactacatcaatgacggcatcaccgactgccaggccaccatcgtgcagctggaggagaccaaggaggagctggactccacagacacatccgtggtcatcagctcctgctccctggctgaagcccgcctcctgctagacaacttcctcaaggcatccattgacaaggggctgcaagtggcacaaaaggaagcccagatccggctgttggagggccgactgaggcagacggatatggcaggctcctcccagaaccatctgctcctggacgccctgcgtgagaaggctgaagctcaccccgagctgcaggccctcatctacaatgtgcagcaggagaatggctacgccagcacagatgaggagatctcagagttctctgagggcagcttctcccagtcattcaccatgaaaggctccaccagccatgacgatttcaagttcaagagcgagcccaaactgtctgcccaaatgaaagctgtgtcggctgagtgcctgggccccccactggatatctccaccaagaacatcaccaagtccctggcctccctcgttgagatcaaagaggacggagtgggcttctctgtccgagacccctattaccgggacagggtctcgcgcaccgtcagtctgcctacccggggcagcactttccctaggcaatctcgagccacagagacgtccccgctgacgagaaggaagtcctacgaccgagggcagcccattaggtccacagatgtgggattcacacccccatcatcccctcccactcggccccgcaatgaccgcaatgtcttctctcgtctcaccagtaatcagagccaggggtcagcgctggacaagtctgatgacagcgactcctctttgtcggaggtcctgaggggcatcatctccccggttggaggagccaagggtgcacggacggccccactgcagtgtgtctccatggccgaaggccacaccaagcccatcctctgcctggatgccacagatgagttgctattcacagggtccaaagaccgaagctgcaagatgtggaacttggttacgggacaggagatcgcagctctaaagggccaccccaacaacgtggtctccatcaagtactgcagccactcggggcttgtgttctccgtgtccacctcctacatcaaggtgtgggacatccgggactcagccaagtgcattcggactctcacgtcctcgggccaggtgatctcaggggatgcctgtgccgccacatccacccgtgccatcaccagtgctcagggcgagcatcagatcaaccagatcgccctcagcccttcgggcaccatgctgtacgccgcctcgggcaatgccgtccgcatctgggagcttagcaggttccagcctgtcggcaagctgactggccacatcggccctgtgatgtgcctgacggtcacccagacggccagccagcatgacctcgtggtgactggctccaaggaccactacgttaagatgttcgagctgggcgagtgtgtgacgggcaccatcggccccactcacaacttcgagcccccgcactacgatggcatcgagtgtctcgccatccagggagacatcctgttcagtggctcccgagataacggcatcaagaagtgggacctagaccagcaggagctcatccagcaaatccccaatgcgcacaaggactgggtgtgcgccctggccttcatcccgggccgccccatgctgctcagcgcctgccgtgcgggtgtcatcaaggtctggaacgtggacaacttcacacccatcggtgagatcaagggccacgacagtcccatcaatgccatctgcaccaatgccaagcatatcttcacagcctccagtgactgccgggtaaagttgtggaattacgtccctggactcaccccctgccttcctcgccgagtcctggccataaagggccgcgccaccaccctgccctgaccctccccaactctccctgtctcctctttcattcttcccctctttccttttccctctctttccccacttcgatctgagctgcttcttaacggtatgagattattttactccttcttcttcctttcccttcctgtcctgcctggcctagagaggtgccctgcctgtccctcctgcacccaccgtccttttccaagcatgaacagtgggacaggccccaggagatgggtgccagggagcagaagggggagccttcaggcctggacaaaacgaaacacccccccaaaaaaa

SEQ ID NO: 10847 - DNA, 3065 bp, Homo sapiens
  source 1..3065: mol_type = unassigned DNA
ctacaccactggcgtcacttctcgcctcatccactcccaggaggagctgatccagtgcctgaagcagggggccctgtcccgcaccacagccagcacccagatgaacgtgcagagctcacgctcccacgccatcttcaccatccacctgtgccagatgcgcatgtgcacccagcccgacctggtgaatgaggcggtgactgggcttcctgatggtacacctccctcgagtgagtatgagacactcactgctaagtttcactttgtggacctggccggctcagagcggctgaagcggacaggggctactggcgagcgggccaaggagggcatctccatcaactgtggcctggtaggcacatggtgggtcatcagccccagcacccacacagctcagtctcagacccctccaaggccctgcagtcctacacctgctgagtcctccttggacatcttgccaattagcccttcactctcaggcgtcacccctgtccccagcttccccatttcaccaacttatccatgtgcctataaacccacccaaggagcaagagggctgctggggccaaagaggcagctggccttgggcaatgtgatcagcgccttaggggaccagagcaagaaggtggtgcacgttccctacagggactccaagctcactcggctcctccaggattcgctggggggcaacagccagaccatcatgatcgcctgtgtgagcccctcagaccgagatttcatggagaccctcaacacactcaaatatgccaatcgggcccgcaacatcaagaacaaggtggtagtgaaccaggacaagaccagccagcaaatcagtgcactgcgggctgagattgctcggctgcagatggagctgatggagtataaggcggtgagcatgctcctgggcattgcccagcactccccttggagctagtgctccatatgcaccctctgccctgcagcctcaccctaacttcctcagcatccctcccacctccctattaccatcatccactttggacatgactcttgagcatcagttgtgtgccaggcatgctgcttactattagggactcacccatgtgaatcaagcatagtctgagccctcaagattttagaatactaagtccaagaaagaagggctccccagcttttgttgcatagatcttgtgcacagggcagacactctccagggtgttttcatatctgctgaatgtgttgtgttggaacaggtaagactgctagactggcacagaatcgttgatagaggggcccacaggagtatccagtgtgctgcagaggggcagaggagagagttggccttacttgcatggatggtcagagagggcctcatggaaaaaggggccttttatatggattttgaagaatgaatgaggtaacagcaaaatgagatgggacagccattctaggtaaagaacaagccatgcacaaaggaacagagtgggaaaaaatgggtcctttggggtaaatgtctaattctatgtgactaagacagaagtcaccaattggtagcccatggcccaaatctggcacatggatgagtttaggtttggcttgcacttgttttaaaagaatacaacgtagttgtcaacctttctgaaaatcagggagtttcagttttgctagaaaattttcaagatctaacaactcatggtaccaagttggctggagaggcataggggctgccccttctagactgagtctgggactctcttagttccagtctctaccactccctattgtcttacaaccagcctgactcatttatgccaactgcctggcagagagggttttgacccttggactagactttatggagatatgaaaatacactgtggaaagttaggtcaagtaagattgtgagaggccttcagtggctggttacaaaatttggactttttattgtcaaggagaactgtgtaaggtttttgatcactgggggccagtagctgtgttttaggaaacctggggcaggggagactggtgatgcgccatatccaggggaaggccagggcgctggcagagggaggggcatcatcagccccttacccccccaaccgcgagctctgctgcctgactgctcccctttgcccctgctcccagggcaagcgagtgataggagaggatggcgctgagggctatagtgatctgttccgagagaatgccatgctacagaaggagaatggggccctgcggctgcgggtgaaagccatgcaggaggccatcgatgccatcaacaaccgcgtcacccagctcatgagccaggaggccaacctgctgctagccaaggccggtgagttgggctgtgccaggccaggtcagagcaccaacgggctaggactccctcccccgacatccaccccagagtatcaggtggactaagccagccagtcaattcatagttcaactcatttatgcattttttttcacttgattttaaaacatttttgtatggcacaagtaatacatgaacacatccttcttgttcaacatgcaaacaatacatcactatatgaagtgaaagattaaaatcgcctctccctgaaccctccaccccaagccctctctacttctcagaaggaacctctatgagcagcttggtgtgtattttcccacacctttctcagtatttgtttcaagtatgaatatgtattcatatacattcttaaatgtgtgtatgatatagactactttttctatgtatgagattatatatattgctctaagacttccctttttcatttagcattatgttttataaatctttccatattaaacctacttctggttcacgcctgtaatcccagcactttgggaggccacggcaggagaatcacttgaacccaggagtttgagaccagcctgggcaacatagggacgcctagtctctacaaaaaatacaaaaattagccagatgtggtggcacatgcctgtagttcatgttacttgggaggctgagatggaaggattgcctgagcccgggaggctgaggctgcagtcagctgtgactctagcctgggcgacagagcaagaccttggctctaacc

SEQ ID NO: 10848 - DNA, 7287 bp, Homo sapiens
  source 1..7287: mol_type = unassigned DNA
agttaccaagctcggtgaaggagacaagttcccacagctgactcggctcggctctcccaccttcccggcagcggccgcgagccctgattgtatccctcgctttcctcgtgggggagcacggactgacttggctgaagaaaatgccagttctgtggatgtggccgtgacaagaggacgtgcggctggaagaggcagaaggggacgaggaaaagcatgctttgaagagaagaataaaccagcgaccccaaccctttctgcaaattggtgctattacttgtgggatccatttgctttcattccctcccaccccaccgctgaagaaaccttgccctgagggctgagagccagccccctgcagccgggggacgcttctgggttggaggaccttctggatgtagcgtcggtggaacctttagatactctcctctggaaaagccaccatgaattcggtagctgggaataaagagaggcttgcggtctccaccaggggcaagaaatacggggtgaatgaagtctgctcgcccaccaagcccgcagcgcccttctccccggaaagctggtaccggaaagcatacgaggagtcgcgcgccggcagccggcccactcctgagggcgcgggctcagcgctcggctcctcggggaccccgtctcccggctcgggcacctcgtccccgagctcgttcaccggctccccgggacccgcctcccccggcatcggcactagttcgccgggctccttgggcggctctccgggcttcggcacaggctccccgggctccggcagcggcggcggctcctcccccggctcggaccgcggcgtctggtgcgagaactgcaacgcccgcctggtggagctcaagaggcaggccctgaggttgctcctcccggggcccttcccgggcaaggaccctgctttctcggctgtgattcacgacaaactccaggtccccaacaccatccggaaggcatggaacgaccgggacaaccgctgtgacatttgcgccactcacctgaaccagttgaagcaggaggccatccagatggtgctgacgttggagcaggcagccggcagtgagcactacgacgcctcgccctgctccccgccaccgctctccaacatccccaccctggtggggtcccggcacgtgggtgggctccagcagcccagagactgggcctttgtgcccgccccctgtgccacctccaactacacaggcttcgccaacaagcacggcagcaaacccagcagccttggggtcagcaatggggcggaaaagaagagcgggtccccaacccaccaggccaaggtcagcctccagatggccaccagtccaagcaatgggaacatcctcaattcggtggccatccaggctcaccagtacctggatggcacctggtccctgtcgagaaccaacggggtcaccctgtacccataccagatctcccagctgatgacagagagtagccgggagggactaacagaagcagtgctgaaccgctacaatgcagacaagccttccgcctgcagtgtcccagcctcgcagggctcctgcgtggccagcgagacttccacaggcacatcggtggccgcctccttctttgcacgagctgcccagaagttaaatctgtcttctaaaaagaagaaacatcggccttccacttcttccgctgccgaaccaccgctctttgcaaccagcttcagtgggattctgcagacctcccctcccccagccccaccctgcctgctgagggctgtcaacaaggtgaaggacaccccggggctgggcaaggtgaaagtcatgcttcgcatctgttccaccttggctcgagatacttcagaatccagctctttcttaaaggtggacccacggaagaagcagatcaccttgtacgatcccctgacttgtggaggtcaaaatgccttccaaaagagaggcaaccaggttcctccaaagatgtttgccttcgatgcagtttttccacaagacgcttctcaggctgaagtgtgtgcaggcaccgtggcagaggtgatccagtctgtggtcaacggggcagatggctgcgtgttctgtttcggccacgccaaactgggaaaatcctacaccatgatcggaaaggatgattccatgcagaacctgggcatcattccctgtgccatctcttggctcttcaagctcataaacgaacgcaaggaaaagaccggcgcccgtttctcagtccgggtttccgccgtggaagtgtgggggaaggaggagaacctgcgggacctgctgtcggaggtggccacgggcagcctgcaggacggccagtccccgggcgtgtacctctgtgaggaccccatctgcggcacgcagctgcagaaccagagcgagctgcgggcccccaccgcagagaaggctgcctttttcctggatgccgccattgcctcccgcaggagccaccaacaggactgtgatgaggacgaccaccgcaactcacacgtgttcttcacactgcacatctaccagtaccggatggagaagagcgggaaagggggaatgtctggaggtcgcagccgcctgcatctcattgatctcggcagctgtgtgaaagctcttagcaaaaatcgagaaggaggctcagggctgtgtctctcgctgtctgctctgggcaatgtcatcctggctctcgtcaatggcagcaaacacattccatacaaagagagcaagctcgccatgttgctgcgggagtctctggggaacatgaactgccgtaccaccatgatcgcgcacatctcggccgcggtcgggagctacgcggagaccctgtccaccatccagattgcatcgagagtcttgaggatgaagaaaaagaagacgaagtacacatccagctcgtccggcggggagagctcctgcgaagaaggccgcatgcgcaggcccacccagctgagacccttccacaccagggccacggtggaccctgacttccccatcgctcacctgtccagcgaccccgactactcctccagcagcgagcagtcctgcgacaccgtcatctacatcgggcccaacggcacggccctctctgacaaggagctcaccgacaacgagggccccccagactttgtccctatcgtgccagccctgcagaagacccggggcgacagccggcccgcagaggcaggagaggctgcagccggcaagtcagaaagggactgcctgaagtgcaacacgtttgccgagctgcaggagaggctggactgcatcgacggcagcgaggagcccagcagctttcctttcgaagaactgcctgctcagtttgggccagagcaggcaagcagaggcccccggttaagccaagcagcgggggcaagcccactctctgagtctgataaggaagataatgggtccgaaggtcagctgaccaacagagaaggccctgaactcccagcctccaagatgcagaggagtcactcacctgtgcccgccgcggcacccgcccacagccccagcccggcctcacccaggagcgtcccgggcagcagtagccagcacagcgcctccccactcgtgcagagccccagcctccagagcagccgggagagcctcaactcctgcggcttcgtggaaggcaagcccaggcccatgggctccccccggctgggcatcgccagcctgtccaagacctcggagtacaagccacccagctctccttcccagagatgcaaagtctacacccagaagggggtcctgccgtctcccgccccactgcctccctcgagcaaggattccggcgtggcgtctagggagtccttgctgcagcccgaggtgcgtacgcccccggttggaatgagcccccaggttttgaaaaaatccatgtctgctgggagcgaagggttcccggaaactcctgtcgatgatgagcagcaggcagctactccttcagagtccaagaaggagatcctgagcaccacgatggtgacggtgcagcagccactggagctgaacggtgaggacgagctggtgttcacgctggtggaggagctgaccatcagcggggtcctggacagcggccgccccaccagcatcatcagcttcaacagcgactgctctgcacgggccctggcctcgggctcgcggcccgtcagcatcatcagcagcatcagcgaggacctggagtgctactccagcacggcccccgtctccgaggtcagcatcacacagttcttgcccctcccgaagatgagcctggatgagaaggcccaggacgcagggagcagacgctcttccatcagctcctggctgagcgagatgagcgcgggcagtgagggtgagcagtcgtgccacagtttcatagcccagacgtgttttgggcacggggaggcaatggcagaacctgtggcctcggagtttgtcagcagcctccagaacaccgctgtggtgtgcagagagaagcccaaggccagccccgacaacttgctcatcctgtctgagatgggagatgactctttcaacaaagcagcccccatcaaaggctgcaaaatatccacagtgagcaaggccatggtcaccatctccaacacggccaatctgagcagctgcgaggggtacatccccatgaagaccaatatcacagtttacccctgcattgccatgagcccccggaacatccaagagccggaggcccccaccgccacccccaaagcaggccccacattagcccagtcccgggagagtaaggaaaacagtgcaaagaaagagatgaaatttgaggacccgtggctgaaacgagaagaggaagtgaaaaaagagacggctcatcccaatgaagaagggatgatgaggtgtgagactgccacgggcccctcgaatgctgagaccagagcagagcaggagcaggacggaaagcccagtccgggagacaggctcagcagcagcagcggagaggtgtcggcctccccggtcactgacaacttcaggagggtcgtggatgggtgtgagatggccctgcccggtttggccacccagagccccgtgcatcccaacaaaagcgtcaagtccagcagccttcccagggcctttcagaaggccagccggcaggaggagccggacagcctctcctattactgcgctgctgagaccaacggggtgggtgcagcctcgggcaccccgccctccaaggctaccctggaggggaaggtggcttcccccaagcactgtgttctggctcggcccaaagggactccccctctgccccctgtccgaaagtccagcctggaccagaagaaccgggccagccctcagcacagtgccagcggcagcggcaccagcagccccctgaaccaaccagccgccttcccggcgggcctcccagacgagcctagcggcaagacgaaggacgccagcagcagcagcaagctcttcagtgccaagctggagcagctggccagcagaagcaactcgctgggcagggcgacagtcagccactacgaatgcctctccctggagcgggccgagagcctgtcctccgtgagctcccggctgcacgcgggcaaggacggcaccatgccccgcgcggggaggagcctgggccgcagcgccgggacctcgccccccagctccggggcctcgcccaaggccggccagtccaagatctccgccgtgagcagactcctcctggccagccccagagcgcgcggcccgtccgcctccaccaccaaaaccctcagcttctccaccaagtccctgccgcaggcggtgggccagggctccagctcgccccccggtgggaagcacacgccctggtccacgcagtccctcagcaggaacaggagctcgggcctggcctccaagcttcccctgcgggccgtcagcgggcgcatctcggagctgctgcagggtggcgcgggcgcccggggcttgcagctgcgggccgggcccgaggcggaggcgcgcgggggggccctggccgaggacgagcccgcggccgcgcacctgctcccgtcgccctacagcaagatcacgcccccgcggaggccccaccgctgcagcagcggccacggcagcgacaacagcagcgtgctgagcggggagctcccgccggccatggggaagacggccctgttctaccacagcggcggcagcagcggctacgagagcgtgatgcgggacagcgaggccaccggcagcgcgtcctcggcgcaggactccacgagcgagaacagcagctccgtgggcggcaggtgccggagcctcaagaccccgaagaaacgctccaatccaggttctcagagacggaggcttatcccagcactatccctggacacctcttcccctgtgagaaaaccccccaacagcacaggcgtccgctgggtggatggccccttgcggagcagcccgaggggccttggggaaccctttgagattaaagtctatgaaatcgatgacgtggagcgcctgcagcggcgacgagggggtgccagcaaggaggccatgtgcttcaatgcaaagctgaagattctggaacaccgccagcagaggatcgccgaggtccgcgcgaagtacgagtggctgatgaaggagctggaggcgaccaaacagtatctgatgctggatcccaacaagtggctcagtgaatttgacttggagcaggtttgggagctggattccctggagtacctggaggcactggagtgtgtgacggagcgcctggagagccgtgtcaacttctgcaaggcccatctcatgatgatcacctgcttcgacatcacctccaggcgccggtagatgagccagacccttgtcctagtggtcccccgctccccaggacttcagagatgttgcacgcccctaggccctctgtgctggggcatcaaagacaatgaatgaggatgaaggttggtggcaagtctggagcgggcgttgagcggaaggcgagttttcttttgttttctgtaggaaaggtgcaaacgtcaaacaccgtggaaggagaaaaggatgggaagcccgaggggtgtccaagccctgtgagactgaaaaagcactttgaggaaccttaaagaccttgtttgtacataagaactgctagcaaaagagacctcactcttctcttgctttcgtgagaaaggaggggcgtggatgtaggattgctgtggaaagcgaacacaaaacaacccagaatgactgattaagtgccttgcaaatctttattattatccaaacatttatgttcatactttcttgtgtacagatggtgctagtcaagatgaaaacaacaaaacaaacaagaaaaacattttggaaatgt

SEQ ID NO: 10849 - DNA, 1189 bp, Homo sapiens
  source 1..1189: mol_type = unassigned DNA
cctggagaaatgcttcctgctcctcccgccctccccaccaccatcctgctgtatttaaagctgctttggtgatgctttgctcatctcagtgaattttcagttcagaccttttcactaaggatcattatggaagaaagaggggtaagaagtgtggctgagtagcctaggattaattcatcagtccccaaataagcaaacacgatgtctcaggatggacggtgaaattctggacctcacaggaccctgctttctcggctgtgattcacgacaaactccaggtccccaacaccatccggaaggcatggaacgaccgggacaaccgctgtgacatttgcgccactcacctgaaccagttgaagcaggaggccatccagatggtgctgacgttggagcaggcagccggcagtgagcactacgacgcctcgccctgctccccgccaccgctctccaacatccccaccctggtggggtcccggcacgtgggtgggctccagcagcccagagactgggcctttgtgcccgccccctgtgccacctccaactacacaggcttcgccaacaagcacggcagcaaacccagcagccttggggtcagcaatggggcggaaaagaagagcgggtccccaacccaccaggccaaggtcagcctccagatggccaccagtccaagcaatgggaacatcctcaattcggtggccatccaggctcaccagtacctggatggcacctggtccctgtcgagaaccaacggggtcaccctgtacccataccaggactccgaagctcttgtcacacgtggcaggggccggttagaagactcggcggctgcgccagcgctgatgagcgaggacagaggagcatgaaactggtgctttcctgtaaaatattcaaaagcagatggcctctggatcagtgccagagccattccccgggcagagaagcatctagaccttgtcactaccaagggtgcggctccacacccgcgggacccgagcctctagaaatgagggagaagacgactctgcctttctgcaatttagacgtcgcaaggatgaaaacgatgcggacaggctttccagcagtgagcctggggaaatctgcgtcacatgggcgacagaaggtccctcgaatccctcaatccccgtggcccgcaccactgtgtaataatctccaaaggttgcagtaggaa

SEQ ID NO: 10850 - DNA, 12113 bp, Homo sapiens
  source 1..12113: mol_type = unassigned DNA
tcctgagatggccccagatctgcaagagacatttgagagaagctatttattagcagacgtgaagaaatggattctgcacttgattatttagccatgacttatcaatgatgatggattggaaagcagtagctgcccagaagttaaatctgtcttctaaaaagaagaaacatcggccttccacttcttccgctgccgaaccaccgctctttgcaaccagcttcagtgggattctgcagacctcccctcccccagccccaccctgcctgctgagggctgtcaacaaggtgaaggacaccccggggctgggcaaggtgaaagtcatgcttcgcatctgttccaccttggctcgagatacttcagaatccagctctttcttaaaggtggacccacggaagaagcagatcaccttgtacgatcccctgacttgtggaggtcaaaatgccttccaaaagagaggcaaccaggttcctccaaagatgtttgccttcgatgcagtttttccacaagacgcttctcaggctgaagtgtgtgcaggcaccgtggcagaggtgatccagtctgtggtcaacggggcagatggctgcgtgttctgtttcggccacgccaaactgggaaaatcctacaccatgatcggaaaggatgattccatgcagaacctgggcatcattccctgtgccatctcttggctcttcaagctcataaacgaacgcaaggaaaagaccggcgcccgtttctcagtccgggtttccgccgtggaagtgtgggggaaggaggagaacctgcgggacctgctgtcggaggtggccacgggcagcctgcaggacggccagtccccgggcgtgtacctctgtgaggaccccatctgcggcacgcagctgcagaaccagagcgagctgcgggcccccaccgcagagaaggctgcctttttcctggatgccgccattgcctcccgcaggagccaccaacaggactgtgatgaggacgaccaccgcaactcacacgtgttcttcacactgcacatctaccagtaccggatggagaagagcgggaaagggggaatgtctggaggtcgcagccgcctgcatctcattgatctcggcagctgtgtgaaagctcttagcaaaaatcgagaaggaggctcagggctgtgtctctcgctgtctgctctgggcaatgtcatcctggctctcgtcaatggcagcaaacacattccatacaaagagagcaagctcgccatgttgctgcgggagtctctggggaacatgaactgccgtaccaccatgatcgcgcacatctcggccgcggtcgggagctacgcggagaccctgtccaccatccagattgcatcgagagtcttgaggatgaagaaaaagaagacgaagtacacatccagctcgtccggcggggagagctcctgcgaagaaggccgcatgcgcaggcccacccagctgagacccttccacaccagggccacggtggaccctgacttccccatcgctcacctgtccagcgaccccgactactcctccagcagcgagcagtcctgcgacaccgtcatctacatcgggcccaacggcacggccctctctgacaaggagctcaccgacaacgagggccccccagactttgtccctatcgtgccagccctgcagaagacccggggcgacagccggcccgcagaggcaggagaggctgcagccggcaagtcagaaagggactgcctgaagtgcaacacgtttgccgagctgcaggagaggctggactgcatcgacggcagcgaggagcccagcagctttcctttcgaagaactgcctgctcagtttgggccagagcaggcaagcagaggcccccggttaagccaagcagcgggggcaagcccactctctgagtctgataaggaagataatgggtccgaaggtcagctgaccaacagagaaggccctgaactcccagcctccaagatgcagaggagtcactcacctgtgcccgccgcggcacccgcccacagccccagcccggcctcacccaggagcgtcccgggcagcagtagccagcacagcgcctccccactcgtgcagagccccagcctccagagcagccgggagagcctcaactcctgcggcttcgtggaaggcaagcccaggcccatgggctccccccggctgggcatcgccagcctgtccaagacctcggagtacaagccacccagctctccttcccagagatgcaaagtctacacccagaagggggtcctgccgtctcccgccccactgcctccctcgagcaaggattccggcgtggcgtctagggagtccttgctgcagcccgaggtgcgtacgcccccggttggaatgagcccccaggttttgaaaaaatccatgtctgctgggagcgaagggttcccggaaactcctgtcgatgatgagcagcaggcagctactccttcagagtccaagaaggagatcctgagcaccacgatggtgacggtgcagcagccactggagctgaacggtgaggacgagctggtgttcacgctggtggaggagctgaccatcagcggggtcctggacagcggccgccccaccagcatcatcagcttcaacagcgactgctctgcacgggccctggcctcgggctcgcggcccgtcagcatcatcagcagcatcagcgaggacctggagtgctactccagcacggcccccgtctccgaggtcagcatcacacagttcttgcccctcccgaagatgagcctggatgagaaggcccaggacgcagggagcagacgctcttccatcagctcctggctgagcgagatgagcgcgggcagtgagggtgagcagtcgtgccacagtttcatagcccagacgtgttttgggcacggggaggcaatggcagaacctgtggcctcggagtttgtcagcagcctccagaacaccgctgtggtgtgcagagagaagcccaaggccagccccgacaacttgctcatcctgtctgagatgggagatgactctttcaacaaagcagcccccatcaaaggctgcaaaatatccacagtgagcaaggccatggtcaccatctccaacacggccaatctgagcagctgcgaggggtacatccccatgaagaccaatatcacagtttacccctgcattgccatgagcccccggaacatccaagagccggaggcccccaccgccacccccaaagcaggccccacattagcccagtcccgggagagtaaggaaaacagtgcaaagaaagagatgaaatttgaggacccgtggctgaaacgagaagaggaagtgaaaaaagagacggctcatcccaatgaagaagggatgatgaggtgtgagactgccacgggcccctcgaatgctgagaccagagcagagcaggagcaggacggaaagcccagtccgggagacaggctcagcagcagcagcggagaggtgtcggcctccccggtcactgacaacttcaggagggtcgtggatgggtgtgagatggccctgcccggtttggccacccagagccccgtgcatcccaacaaaagcgtcaagtccagcagccttcccagggcctttcagaaggccagccggcaggaggagccggacagcctctcctattactgcgctgctgagaccaacggggtgggtgcagcctcgggcaccccgccctccaaggctaccctggaggggaaggtggcttcccccaagcactgtgttctggctcggcccaaagggactccccctctgccccctgtccgaaagtccagcctggaccagaagaaccgggccagccctcagcacagtgccagcggcagcggcaccagcagccccctgaaccaaccagccgccttcccggcgggcctcccagacgagcctagcggcaagacgaaggacgccagcagcagcagcaagctcttcagtgccaagctggagcagctggccagcagaagcaactcgctgggcagggcgacagtcagccactacgaatgcctctccctggagcgggccgagagcctgtcctccgtgagctcccggctgcacgcgggcaaggacggcaccatgccccgcgcggggaggagcctgggccgcagcgccgggacctcgccccccagctccggggcctcgcccaaggccggccagtccaagatctccgccgtgagcagactcctcctggccagccccagagcgcgcggcccgtccgcctccaccaccaaaaccctcagcttctccaccaagtccctgccgcaggcggtgggccagggctccagctcgccccccggtgggaagcacacgccctggtccacgcagtccctcagcaggaacaggagctcgggcctggcctccaagcttcccctgcgggccgtcagcgggcgcatctcggagctgctgcagggtggcgcgggcgcccggggcttgcagctgcgggccgggcccgaggcggaggcgcgcgggggggccctggccgaggacgagcccgcggccgcgcacctgctcccgtcgccctacagcaagatcacgcccccgcggaggccccaccgctgcagcagcggccacggcagcgacaacagcagcgtgctgagcggggagctcccgccggccatggggaagacggccctgttctaccacagcggcggcagcagcggctacgagagcgtgatgcgggacagcgaggccaccggcagcgcgtcctcggcgcaggactccacgagcgagaacagcagctccgtgggcggcaggtgccggagcctcaagaccccgaagaaacgctccaatccaggttctcagagacggaggcttatcccagcactatccctggacacctcttcccctgtgagaaaaccccccaacagcacaggcgtccgctgggtggatggccccttgcggagcagcccgaggggccttggggaaccctttgagattaaagtctatgaaatcgatgacgtggagcgcctgcagcggcgacgagggggtgccagcaaggaggccatgtgcttcaatgcaaagctgaagattctggaacaccgccagcagaggatcgccgaggtccgcgcgaagtacgagtggctgatgaaggagctggaggcgaccaaacagtatctgatgctggatcccaacaagtggctcagtgaatttgacttggagcaggtttgggagctggattccctggagtacctggaggcactggagtgtgtgacggagcgcctggagagccgtgtcaacttctgcaaggcccatctcatgatgatcacctgcttcgacatcacctccaggcgccggtagatgagccagacccttgtcctagtggtcccccgctccccaggacttcagagatgttgcacgcccctaggccctctgtgctggggcatcaaagacaatgaatgaggatgaaggttggtggcaagtctggagcgggcgttgagcggaaggcgagttttcttttgttttctgtaggaaaggtgcaaacgtcaaacaccgtggaaggagaaaaggatgggaagcccgaggggtgtccaagccctgtgagactgaaaaagcactttgaggaaccttaaagaccttgtttgtacataagaactgctagcaaaagagacctcactcttctcttgctttcgtgagaaaggaggggcgtggatgtaggattgctgtggaaagcgaacacaaaacaacccagaatgactgattaagtgccttgcaaatctttattattatccaaacatttatgttcatactttcttgtgtacagatggtgctagtcaagatgaaaacaacaaaacaaacaagaaaaacattttggaaatgtattcacagctctttttctcttggtgttttatcctatttctgacttgctgtttctaagtaagttgtgtttgtagagctatttcttaatcagtattgcttatgaataaatattacctgtcttttatggttattctggtgaggccactcaaacagagagacttccctcggcacgagccagtgtgtgtgtttccaaagtaggtttggagcagcaggtgacctcgatgccacatcccaacaagcagcgtggtcaggtagacccagaaggttgattgtggggcaggtgctttagagaacaggtgaggagacggcacctgcagcacaggggaggaggagtcctttgcgacctgggccctccctgctcctgggaggtgggccgtatgttctgtagaccgtttgcccccctcaagtcctccacacatgtggttccttgacccacaaatccacagtttgcgtggccctcaaaattcatattcatttttattccaaaaagtcttgaacgaaagctggaaccaattcaccagagccatatttctttctttagtattttctagtgttgtgttgtagattgattaaagtgggtttttccccagctgagagaccttctcaggcttgttcagagacttcaactgtattggattagaagaaggattcttgagactgtacatcttgtctgttgtccagagtacaaggatttcagctctcctgtgtcccaaagcctctatgccaagaagggacaggcttgtcctctcagtctttgctcctgcccaaaggcagagagagcttcccctccataactcacacgaccctggataggcagaacatagctgaagactatggatgtccaggtcttggctcccaacaactcaggacctcaaattcagatgttcctccctataacaattcccttaggaattatgatacccattttagtgattgatagaaacctggggtacagagtggtcaagggatttccctgataaaagctgtggtgctgatgatagtgcagcccagaatctaagagtccctgcagccttcgcatcgaggatggtacttaggcgtgtgcagagcacgcttcccttttgccctcaaatgcagcatatcttcatgagcctatttatttccaagctaggctgtctttattaaccaacaactcagccccagccactccccaagcggggaaaaaaacactacgtttcttggtcagtgtacctctggacactgcagcccacacagctggctgaactcggtaaatgggaaccgaagtcttgtgagcttcacatgacctgatcctttgttatcagaacagggttcaggtggccctgttggctcatgtgctttggaagccagctccctgggtcacgagtctggctttgcactttccataagagtctgcttctatgcaaaggtgcaaacaggagacatgcccaaatctgctggctgaacaggctaaactacagtgagaggctgctctggcatggctcgttcttccttctgtgtatctcccaagtctgacaagtgtgttgccctgggaagcaggacctccctgagctccttaaccttgaccccattctgcaggacagtcgcatgctctgggctcgcctctggcctcaaagcacttgtgtaagtgggcttgcttaacagtaatatccttggaggcttctggacccaaagggaagccaatccttcgagtttgccattgggctgctggttgctggtttcaaacatatagttcatgaaaagtctttaattggagattttcaaaggtgaatattctgtttttgttggaaagaaactcatctgatgagtcatcgatgagtttggctttcgcccctgccacatcctcccctgaggttccttccatgctgcactgccttcctttagccagtgacagagcctggtgcccttcctggactgaaaccgatggaatccttccgaggggagtggcattcggcttgcctcctgcctaaatctgcttttatccatttgtagcaactttatgctgtaacaaaaggcggaaggaaaccaagagttctcttagcaagtcagactccttcccaagatggcaatcacagaacacctcgcaggatctcgcaggccacggtgaaggagaatgctttatgttgatgttgtccattctctctctcttctctttgcttttttttgacctaaataagctgcaaacatgttaatttaccaatattgataaaccacatgaagaaatcaggcattttacgttatgatgtgcttgttcctgtctctgcctataaattgactgtattgatgatgaaggaaggagttccggctgaccattctgaagcagtcccagtcacgggaggatgccttacccagtggccagacatgatagttccaggtctccccttggttttggtgatagagaacccaaggaggcaagggggaatatcaacgaacccatttctatttcattacccacaagcgaaaggactagaaaaaaatatttgaaattaacatttagatgcataggtctaactccttgtgtgaacctgtcctcctcaccccctgctccaaatatgtgaggtggaagcattagcagcggagcaaaactaagatctaagaacgggcggtggtgctattgtgtccctgggagtcactccacgtcgcattgcacggtggtgctgaggagcgagagtttgctttatcatgggctttcagttcccacctgcgagctgcaaactttgatcttgttgtccttgaattcccctctacatcacgaggaagctgtctctttcatctcttccggatttggaatcagaacactctgcccgttgtttattcgccagttgccattcttaacatgggggagcattaagatgcaaatgcagagatgtgtcctgtcttgacaaaggtgggaacccctgagctggagaaggggctcctctcatgagaagctggggtaaacagccaggcatcgcagcgtggggaattagacaggcaggaatctggcctggtttgtcataaattagccttcaacttgaagtctattatgttcttataaggcggtagtgacttcagtccagccgcatctaccatccagggtggaggttcaaaaagtcttatacgcacctacaagtctcacgcttgctgctcagactttctgataaaatctcagagttctgtttgtattgaccaaaaatgcagttgtgcccacttgggtgtgtatctcatgtccttgtaaaccagccaccttctttggatagaaggcaaggctgacaaatctgcagatttgttcaatgcaaacacagccgtctatatcattggccactgctgattatattgagtgtttttaggttttttaggtttcttattccaaaaaggattttagactgtaaaatgactaaagatgagttaatttccaaactaaaaaaggaaggagtcctgcctgtactcattgttctttcctgctggactagtaacccattcttggagcacacacagagtccctcgcttctaaagacaatacgtcttaaaccctgaaaacttgccagtgagaaagaggttgaaagtcctgtttgctattagttgaggctaagccgtctgctgccactgtccctggggcctccatgctgccgccggggtatgtggcccagctgtccccccatgaaggacactcttcaatgccaccacacgggagtctgggcagggaggaaaggcacacagcccacttttctctgcaccaaatgaaacaaagctgggtgttcagtgtcactgatgcaagtaaatgggtctcaaattttggtgggggcagtgtttctttggattctgatacctctttttccacctccagaaagtatctgtcaacattggtgggtaacagcttataaagtgcatcacttagtaatcttcctgacaaaatgacacattttaaaattacaacctgttcattatttccatcataatgcaagcgtaattctaatccgggagaagatactgtcatttaagctcatcttctcaaaaaaattttttctgaaaattcctggaaactaatttatccctccctaaacaaacacattctgcttttgggtggccctacccagaacctgcagcaatgtcataacactggacacagtgcggcttggggcagtatcaagccttcattgcatacaaaccttaatctctaagcatagttgttcccaaggtccacacgtgtggaggcgagtactgaaataccacactcacacatctattccatgcgtacctagaaattaccttcaacactaaaaaaggttccttctttcattccctatcctgctaacagcccacattgtaatatttgatttatgaagaagttctaatttatttgtgaactcaggatgttgctttacagcattgctcgtgttctctcatttacttattatgcatcacggttggaaatgctatccacgtgccgtgcatcgaggtggagatttgctggatctgtctgtggctatttttttccatgtttttctcactcaagcaaagtctgttagtggaaacatgggctgggggatggggagaggacagataaagcaagagaatagggattagggtccaatcctcaatgcacagggcttagttcaaaatctaagctgtttctgtagtaagcagccaaatgggaaagatcccttcgttttgaatttgatgagaatgggcttggaaatccacgcccaccggcttgcacggaagaggactcagcctcttcctaatggttcaacattcaattcctgaggaaagtgctgatagtattagttccctacatttccctaagactcccatccaacccctagtgctactgaagagggtttgggaaagcaattggagttccttagcttggatatatatagtacctgtttttttcctctggaaaaaccaaagtactttagtgagtcttacaatcttaaggcattttgtcccctcactgggtcccgagaggcagggaggggctaggccttgagctaggagcaaggacatgggccgccaggcctggttgttactagctgtgcaaccttgggcgagcctcttcgctttgctgggcctcaggttcccgagtggaagactgggggtcagaacagctgcccttctgggagagcatcaagagaaagtggtataagtgatgggaagtgctttgaagaaattaaaggtctgtctaggagctgggggtaatcatttacagatgaagaaactgaagtctagtcattgactggcccgagttcacagagtggttttatagcaaaacagggacttgagtccagcttattggattcttcccatcagatcatattgcaccaggtatgtgtagacatgaacacataccattcctctaaggtgtgtgtacatacacggatgtgtgtgtacaggaggtacctgacatggtgaaaggccataggacagaaaacctgagttctaattccagctttgccagtcgtcccgtccgtgatatattccataggacagaaaacctgagttctaattccagctttgccagtcatcctgtccgtgatatattccataggacagaaaacctgagttctaattccagctttgccagtcgtcccgtccgtgatatattacctaactcctccagaactcagttttctaacctataaaatgaagacattgtgctagatgatctttgtggttccttcaagctctggatctctaattccatgattagtaatgtatgtatgtgtatataaatatgcttatctgtagaaatgggcccatttgaaaagtggagacaaggtctgcccaggtgcatttattgtgccagaaacagtgaattcctaaataagttcataaaatcttgttttacaattcaatggtagtgcttaatgttactgtctgaaatccactgtttaaccagatggaagactggggccattcaaaacattattagttcacaagtgtttgctgttaaaatgcttcaataaaactcatttgttaaagtcagaaattcaactcttctgtacttgggcaggtcccagcagccccttggcaggctagttttgtgcatgggcctttgcaagctatataaacgttaggtgttggcttgattatgataaatatgagcaggctccctggagaacagtccagaaaaaaagagttatagttctcacaaactggtgacatgaatccattaagctgtgtggcattttccagtgtaaagacattgtttgctggctacgatctctgactttttgtggcatatgaggtgtaaaatgttgtcaaaaaagaatctggtgtttaaaaaaaaatcaaactatggtggcattaaatgttcacttttattct

SEQ ID NO: 10851 - DNA, 2262 bp, Homo sapiens
  source 1..2262: mol_type = unassigned DNA
tttctcttttatcttctcccctgtggtagtgtctggaggtcgcagccgcctgcatctcattgatctcggcagctgtgtgaaagctcttagcaaaaatcgagaaggaggctcagggctgtgtctctcgctgtctgctctgggcaatgtcatcctggctctcgtcaatggcagcaaacacattccatacaaagagagcaagctcgccatgttgctgcgggagtctctggggaacatgaactgccgtaccaccatgatcgcgcacatctcggccgcggtcgggagctacgcggagaccctgtccaccatccagattgcatcgagagtcttgaggatgaagaaaaagaagacgaagtacacatccagctcgtccggcggggagagctcctgcgaagaaggccgcatgcgcaggcccacccagctgagacccttccacaccagggccacggtggaccctgacttccccatcgctcacctgtccagcgaccccgactactcctccagcagcgagcagtcctgcgacaccgtcatctacatcgggcccaacggcacggccctctctgacaaggagctcaccgacaacgagggccccccagactttgtccctatcgtgccagccctgcagaagacccggggcgacagccggcccgcagaggcaggagaggctgcagccggcaagtcagaaagggactgcctgaagtgcaacacgtttgccgagctgcaggagaggctggactgcatcgacggcagcgaggagcccagcagctttcctttcgaagaactgcctgctcagtttgggccagagcaggcaagcagaggcccccggttaagccaagcagcgggggcaagcccactctctgagtctgataaggaagataatgggtccgaaggtcagctgaccaacagagaaggccctgaactcccagcctccaagatgcagaggagtcactcacctgtgcccgccgcggcacccgcccacagccccagcccggcctcacccaggagcgtcccgggcagcagtagccagcacagcgcctccccactcgtgcagagccccagcctccagagcagccgggagagcctcaactcctgcggcttcgtggaaggcaagcccaggcccatgggctccccccggctgggcatcgccagcctgtccaagacctcggagtacaagccacccagctctccttcccagagatgcaaagtctacacccagaagggggtcctgccgtctcccgccccactgcctccctcgagcaaggattccggcgtggcgtctagggagtccttgctgcagcccgaggtgcgtacgcccccggttggaatgagcccccaggttttgaaaaaatccatgtctgctgggagcgaagggttcccggaaactcctgtcgatgatgagcagcaggcagctactccttcagagtccaagaaggagatcctgagcaccacgatggtgacggtgcagcagccactggagctgaacggtgaggacgagctggtgttcacgctggtggaggagctgaccatcagcggggtcctggacagcggccgccccaccagcatcatcagcttcaacagcgactgctctgcacgggccctggcctcgggctcgcggcccgtcagcatcatcagcagcatcagcgaggacctggagtgctactccagcacggcccccgtctccgaggtcagcatcacacagttcttgcccctcccgaagatgagcctggatgagaaggcccaggacgcagggagcagacgctcttccatcagctcctggctgagcgagatgagcgcgggcagtgagggtgagcagtcgtgccacagtttcatagcccagacgtgttttgggcacggggaggcaatggcagaacctgtggcctcggagtttgtcagcagcctccagaacaccgctgtggtgtgcagagagaagcccaaggccagccccgacaacttgctcatcctgtctgagatgggagatgactctttcaacaaagcagcccccatcaaaggctgcaaaatatccacagtgagcaaggccatggtcaccatctccaacacggccaatctgagcagctgcgaggggtacatccccatgaagaccaatatcacagtttacccctgcattgccatgagcccccggaacatccaagagccggaggcccccaccgccacccccaaagcaggccccacattagcccagtcccgggagagtaaggaaaacagtgcaaagaaagagatgaaatttgaggacccgtggctgaaacg

SEQ ID NO: 10852 - DNA, 1191 bp, Homo sapiens
  source 1..1191: mol_type = unassigned DNA
cctggagaaatgcttcctgctcctcccgccctccccaccaccatcctgctgtatttaaagctgctttggtgatgctttgctcatctcagtgaattttcagttcagaccttttcactaaggatcattatggaagaaagaggggtaagaagtgtggctgagtagcctaggattaattcatcagtccccaaataagcaaacacgatgtctcaggatggacggtgaaattctggacctcacaggaccctgctttctcggctgtgattcacgacaaactccaggtccccaacaccatccggaaggcatggaacgaccgggacaaccgctgtgacatttgcgccactcacctgaaccagttgaagcaggaggccatccagatggtgctgacgttggagcaggcagccggcagtgagcactacgacgcctcgccctgctccccgccaccgctctccaacatccccaccctggtggggtcccggcacgtgggtgggctccagcagcccagagactgggcctttgtgcccgccccctgtgccacctccaactacacaggcttcgccaacaagcacggcagcaaacccagcagccttggggtcagcaatggggcggaaaagaagagcgggtccccaacccaccaggccaaggtcagcctccagatggccaccagtccaagcaatgggaacatcctcaattcggtggccatccaggctcaccagtacctggatggcacctggtccctgtcgagaaccaacggggtcaccctgtacccataccaggactccgaagctcttgtcacacgtggcaggggccggttagaagactcggcggctgcgccagcgctgatgagcgaggacagaggagcatgaaactggtgctttcctgtaaaatattcaaaagcagatggcctctggatcagtgccagagccattccccgggcagagaagcatctagaccttgtcactaccaagggtgcggctccacacccgcgggacccgagcctctagaaatgagggagaagacgactctgcctttctgcaatttagacgtcgcaaggatgaaaacgatgcggacaggctttccagcagtgagcctggggaaatctgcgtcacatgggcgacagaaggtccctcgaatccctcaatccccgtggcccgcaccactgtgtaataatctccaaaggttgcagtaggaaga

SEQ ID NO: 10853 - DNA, 12690 bp, Homo sapiens
  source 1..12690: mol_type = unassigned DNA
aggaccctgctttctcggctgtgattcacgacaaactccaggtccccaacaccatccggaaggcatggaacgaccgggacaaccgctgtgacatttgcgccactcacctgaaccagttgaagcaggaggccatccagatggtgctgacgttggagcaggcagccggcagtgagcactacgacgcctcgccctgctccccgccaccgctctccaacatccccaccctggtggggtcccggcacgtgggtgggctccagcagcccagagactgggcctttgtgcccgccccctgtgccacctccaactacacaggcttcgccaacaagcacggcagcaaacccagcagccttggggtcagcaatggggcggaaaagaagagcgggtccccaacccaccaggccaaggtcagcctccagatggccaccagtccaagcaatgggaacatcctcaattcggtggccatccaggctcaccagtacctggatggcacctggtccctgtcgagaaccaacggggtcaccctgtacccataccagatctcccagctgatgacagagagtagccgggagggactaacagaagcagtgctgaaccgctacaatgcagacaagccttccgcctgcagtgtcccagcctcgcagggctcctgcgtggccagcgagacttccacaggcacatcggtggccgcctccttctttgcacgagctgcccagaagttaaatctgtcttctaaaaagaagaaacatcggccttccacttcttccgctgccgaaccaccgctctttgcaaccagcttcagtgggattctgcagacctcccctcccccagccccaccctgcctgctgagggctgtcaacaaggtgaaggacaccccggggctgggcaaggtgaaagtcatgcttcgcatctgttccaccttggctcgagatacttcagaatccagctctttcttaaaggtggacccacggaagaagcagatcaccttgtacgatcccctgacttgtggaggtcaaaatgccttccaaaagagaggcaaccaggttcctccaaagatgtttgccttcgatgcagtttttccacaagacgcttctcaggctgaagtgtgtgcaggcaccgtggcagaggtgatccagtctgtggtcaacggggcagatggctgcgtgttctgtttcggccacgccaaactgggaaaatcctacaccatgatcggaaaggatgattccatgcagaacctgggcatcattccctgtgccatctcttggctcttcaagctcataaacgaacgcaaggaaaagaccggcgcccgtttctcagtccgggtttccgccgtggaagtgtgggggaaggaggagaacctgcgggacctgctgtcggaggtggccacgggcagcctgcaggacggccagtccccgggcgtgtacctctgtgaggaccccatctgcggcacgcagctgcagaaccagagcgagctgcgggcccccaccgcagagaaggctgcctttttcctggatgccgccattgcctcccgcaggagccaccaacaggactgtgatgaggacgaccaccgcaactcacacgtgttcttcacactgcacatctaccagtaccggatggagaagagcgggaaagggggaatgtctggaggtcgcagccgcctgcatctcattgatctcggcagctgtgtgaaagctcttagcaaaaatcgagaaggaggctcagggctgtgtctctcgctgtctgctctgggcaatgtcatcctggctctcgtcaatggcagcaaacacattccatacaaagagagcaagctcgccatgttgctgcgggagtctctggggaacatgaactgccgtaccaccatgatcgcgcacatctcggccgcggtcgggagctacgcggagaccctgtccaccatccagattgcatcgagagtcttgaggatgaagaaaaagaagacgaagtacacatccagctcgtccggcggggagagctcctgcgaagaaggccgcatgcgcaggcccacccagctgagacccttccacaccagggccacggtggaccctgacttccccatcgctcacctgtccagcgaccccgactactcctccagcagcgagcagtcctgcgacaccgtcatctacatcgggcccaacggcacggccctctctgacaaggagctcaccgacaacgagggccccccagactttgtccctatcgtgccagccctgcagaagacccggggcgacagccggcccgcagaggcaggagaggctgcagccggcaagtcagaaagggactgcctgaagtgcaacacgtttgccgagctgcaggagaggctggactgcatcgacggcagcgaggagcccagcagctttcctttcgaagaactgcctgctcagtttgggccagagcaggcaagcagaggcccccggttaagccaagcagcgggggcaagcccactctctgagtctgataaggaagataatgggtccgaaggtcagctgaccaacagagaaggccctgaactcccagcctccaagatgcagaggagtcactcacctgtgcccgccgcggcacccgcccacagccccagcccggcctcacccaggagcgtcccgggcagcagtagccagcacagcgcctccccactcgtgcagagccccagcctccagagcagccgggagagcctcaactcctgcggcttcgtggaaggcaagcccaggcccatgggctccccccggctgggcatcgccagcctgtccaagacctcggagtacaagccacccagctctccttcccagagatgcaaagtctacacccagaagggggtcctgccgtctcccgccccactgcctccctcgagcaaggattccggcgtggcgtctagggagtccttgctgcagcccgaggtgcgtacgcccccggttggaatgagcccccaggttttgaaaaaatccatgtctgctgggagcgaagggttcccggaaactcctgtcgatgatgagcagcaggcagctactccttcagagtccaagaaggagatcctgagcaccacgatggtgacggtgcagcagccactggagctgaacggtgaggacgagctggtgttcacgctggtggaggagctgaccatcagcggggtcctggacagcggccgccccaccagcatcatcagcttcaacagcgactgctctgcacgggccctggcctcgggctcgcggcccgtcagcatcatcagcagcatcagcgaggacctggagtgctactccagcacggcccccgtctccgaggtcagcatcacacagttcttgcccctcccgaagatgagcctggatgagaaggcccaggacgcagggagcagacgctcttccatcagctcctggctgagcgagatgagcgcgggcagtgagggtgagcagtcgtgccacagtttcatagcccagacgtgttttgggcacggggaggcaatggcagaacctgtggcctcggagtttgtcagcagcctccagaacaccgctgtggtgtgcagagagaagcccaaggccagccccgacaacttgctcatcctgtctgagatgggagatgactctttcaacaaagcagcccccatcaaaggctgcaaaatatccacagtgagcaaggccatggtcaccatctccaacacggccaatctgagcagctgcgaggggtacatccccatgaagaccaatatcacagtttacccctgcattgccatgagcccccggaacatccaagagccggaggcccccaccgccacccccaaagcaggccccacattagcccagtcccgggagagtaaggaaaacagtgcaaagaaagagatgaaatttgaggacccgtggctgaaacgagaagaggaagtgaaaaaagagacggctcatcccaatgaagaagggatgatgaggtgtgagactgccacgggcccctcgaatgctgagaccagagcagagcaggagcaggacggaaagcccagtccgggagacaggctcagcagcagcagcggagaggtgtcggcctccccggtcactgacaacttcaggagggtcgtggatgggtgtgagatggccctgcccggtttggccacccagagccccgtgcatcccaacaaaagcgtcaagtccagcagccttcccagggcctttcagaaggccagccggcaggaggagccggacagcctctcctattactgcgctgctgagaccaacggggtgggtgcagcctcgggcaccccgccctccaaggctaccctggaggggaaggtggcttcccccaagcactgtgttctggctcggcccaaagggactccccctctgccccctgtccgaaagtccagcctggaccagaagaaccgggccagccctcagcacagtgccagcggcagcggcaccagcagccccctgaaccaaccagccgccttcccggcgggcctcccagacgagcctagcggcaagacgaaggacgccagcagcagcagcaagctcttcagtgccaagctggagcagctggccagcagaagcaactcgctgggcagggcgacagtcagccactacgaatgcctctccctggagcgggccgagagcctgtcctccgtgagctcccggctgcacgcgggcaaggacggcaccatgccccgcgcggggaggagcctgggccgcagcgccgggacctcgccccccagctccggggcctcgcccaaggccggccagtccaagatctccgccgtgagcagactcctcctggccagccccagagcgcgcggcccgtccgcctccaccaccaaaaccctcagcttctccaccaagtccctgccgcaggcggtgggccagggctccagctcgccccccggtgggaagcacacgccctggtccacgcagtccctcagcaggaacaggagctcgggcctggcctccaagcttcccctgcgggccgtcagcgggcgcatctcggagctgctgcagggtggcgcgggcgcccggggcttgcagctgcgggccgggcccgaggcggaggcgcgcgggggggccctggccgaggacgagcccgcggccgcgcacctgctcccgtcgccctacagcaagatcacgcccccgcggaggccccaccgctgcagcagcggccacggcagcgacaacagcagcgtgctgagcggggagctcccgccggccatggggaagacggccctgttctaccacagcggcggcagcagcggctacgagagcgtgatgcgggacagcgaggccaccggcagcgcgtcctcggcgcaggactccacgagcgagaacagcagctccgtgggcggcaggtgccggagcctcaagaccccgaagaaacgctccaatccaggttctcagagacggaggcttatcccagcactatccctggacacctcttcccctgtgagaaaaccccccaacagcacaggcgtccgctgggtggatggccccttgcggagcagcccgaggggccttggggaaccctttgagattaaagtctatgaaatcgatgacgtggagcgcctgcagcggcgacgagggggtgccagcaaggaggccatgtgcttcaatgcaaagctgaagattctggaacaccgccagcagaggatcgccgaggtccgcgcgaagtacgagtggctgatgaaggagctggaggcgaccaaacagtatctgatgctggatcccaacaagtggctcagtgaatttgacttggagcaggtttgggagctggattccctggagtacctggaggcactggagtgtgtgacggagcgcctggagagccgtgtcaacttctgcaaggcccatctcatgatgatcacctgcttcgacatcacctccaggcgccggtagatgagccagacccttgtcctagtggtcccccgctccccaggacttcagagatgttgcacgcccctaggccctctgtgctggggcatcaaagacaatgaatgaggatgaaggttggtggcaagtctggagcgggcgttgagcggaaggcgagttttcttttgttttctgtaggaaaggtgcaaacgtcaaacaccgtggaaggagaaaaggatgggaagcccgaggggtgtccaagccctgtgagactgaaaaagcactttgaggaaccttaaagaccttgtttgtacataagaactgctagcaaaagagacctcactcttctcttgctttcgtgagaaaggaggggcgtggatgtaggattgctgtggaaagcgaacacaaaacaacccagaatgactgattaagtgccttgcaaatctttattattatccaaacatttatgttcatactttcttgtgtacagatggtgctagtcaagatgaaaacaacaaaacaaacaagaaaaacattttggaaatgtattcacagctctttttctcttggtgttttatcctatttctgacttgctgtttctaagtaagttgtgtttgtagagctatttcttaatcagtattgcttatgaataaatattacctgtcttttatggttattctggtgaggccactcaaacagagagacttccctcggcacgagccagtgtgtgtgtttccaaagtaggtttggagcagcaggtgacctcgatgccacatcccaacaagcagcgtggtcaggtagacccagaaggttgattgtggggcaggtgctttagagaacaggtgaggagacggcacctgcagcacaggggaggaggagtcctttgcgacctgggccctccctgctcctgggaggtgggccgtatgttctgtagaccgtttgcccccctcaagtcctccacacatgtggttccttgacccacaaatccacagtttgcgtggccctcaaaattcatattcatttttattccaaaaagtcttgaacgaaagctggaaccaattcaccagagccatatttctttctttagtattttctagtgttgtgttgtagattgattaaagtgggtttttccccagctgagagaccttctcaggcttgttcagagacttcaactgtattggattagaagaaggattcttgagactgtacatcttgtctgttgtccagagtacaaggatttcagctctcctgtgtcccaaagcctctatgccaagaagggacaggcttgtcctctcagtctttgctcctgcccaaaggcagagagagcttcccctccataactcacacgaccctggataggcagaacatagctgaagactatggatgtccaggtcttggctcccaacaactcaggacctcaaattcagatgttcctccctataacaattcccttaggaattatgatacccattttagtgattgatagaaacctggggtacagagtggtcaagggatttccctgataaaagctgtggtgctgatgatagtgcagcccagaatctaagagtccctgcagccttcgcatcgaggatggtacttaggcgtgtgcagagcacgcttcccttttgccctcaaatgcagcatatcttcatgagcctatttatttccaagctaggctgtctttattaaccaacaactcagccccagccactccccaagcggggaaaaaaacactacgtttcttggtcagtgtacctctggacactgcagcccacacagctggctgaactcggtaaatgggaaccgaagtcttgtgagcttcacatgacctgatcctttgttatcagaacagggttcaggtggccctgttggctcatgtgctttggaagccagctccctgggtcacgagtctggctttgcactttccataagagtctgcttctatgcaaaggtgcaaacaggagacatgcccaaatctgctggctgaacaggctaaactacagtgagaggctgctctggcatggctcgttcttccttctgtgtatctcccaagtctgacaagtgtgttgccctgggaagcaggacctccctgagctccttaaccttgaccccattctgcaggacagtcgcatgctctgggctcgcctctggcctcaaagcacttgtgtaagtgggcttgcttaacagtaatatccttggaggcttctggacccaaagggaagccaatccttcgagtttgccattgggctgctggttgctggtttcaaacatatagttcatgaaaagtctttaattggagattttcaaaggtgaatattctgtttttgttggaaagaaactcatctgatgagtcatcgatgagtttggctttcgcccctgccacatcctcccctgaggttccttccatgctgcactgccttcctttagccagtgacagagcctggtgcccttcctggactgaaaccgatggaatccttccgaggggagtggcattcggcttgcctcctgcctaaatctgcttttatccatttgtagcaactttatgctgtaacaaaaggcggaaggaaaccaagagttctcttagcaagtcagactccttcccaagatggcaatcacagaacacctcgcaggatctcgcaggccacggtgaaggagaatgctttatgttgatgttgtccattctctctctcttctctttgcttttttttgacctaaataagctgcaaacatgttaatttaccaatattgataaaccacatgaagaaatcaggcattttacgttatgatgtgcttgttcctgtctctgcctataaattgactgtattgatgatgaaggaaggagttccggctgaccattctgaagcagtcccagtcacgggaggatgccttacccagtggccagacatgatagttccaggtctccccttggttttggtgatagagaacccaaggaggcaagggggaatatcaacgaacccatttctatttcattacccacaagcgaaaggactagaaaaaaatatttgaaattaacatttagatgcataggtctaactccttgtgtgaacctgtcctcctcaccccctgctccaaatatgtgaggtggaagcattagcagcggagcaaaactaagatctaagaacgggcggtggtgctattgtgtccctgggagtcactccacgtcgcattgcacggtggtgctgaggagcgagagtttgctttatcatgggctttcagttcccacctgcgagctgcaaactttgatcttgttgtccttgaattcccctctacatcacgaggaagctgtctctttcatctcttccggatttggaatcagaacactctgcccgttgtttattcgccagttgccattcttaacatgggggagcattaagatgcaaatgcagagatgtgtcctgtcttgacaaaggtgggaacccctgagctggagaaggggctcctctcatgagaagctggggtaaacagccaggcatcgcagcgtggggaattagacaggcaggaatctggcctggtttgtcataaattagccttcaacttgaagtctattatgttcttataaggcggtagtgacttcagtccagccgcatctaccatccagggtggaggttcaaaaagtcttatacgcacctacaagtctcacgcttgctgctcagactttctgataaaatctcagagttctgtttgtattgaccaaaaatgcagttgtgcccacttgggtgtgtatctcatgtccttgtaaaccagccaccttctttggatagaaggcaaggctgacaaatctgcagatttgttcaatgcaaacacagccgtctatatcattggccactgctgattatattgagtgtttttaggttttttaggtttcttattccaaaaaggattttagactgtaaaatgactaaagatgagttaatttccaaactaaaaaaggaaggagtcctgcctgtactcattgttctttcctgctggactagtaacccattcttggagcacacacagagtccctcgcttctaaagacaatacgtcttaaaccctgaaaacttgccagtgagaaagaggttgaaagtcctgtttgctattagttgaggctaagccgtctgctgccactgtccctggggcctccatgctgccgccggggtatgtggcccagctgtccccccatgaaggacactcttcaatgccaccacacgggagtctgggcagggaggaaaggcacacagcccacttttctctgcaccaaatgaaacaaagctgggtgttcagtgtcactgatgcaagtaaatgggtctcaaattttggtgggggcagtgtttctttggattctgatacctctttttccacctccagaaagtatctgtcaacattggtgggtaacagcttataaagtgcatcacttagtaatcttcctgacaaaatgacacattttaaaattacaacctgttcattatttccatcataatgcaagcgtaattctaatccgggagaagatactgtcatttaagctcatcttctcaaaaaaattttttctgaaaattcctggaaactaatttatccctccctaaacaaacacattctgcttttgggtggccctacccagaacctgcagcaatgtcataacactggacacagtgcggcttggggcagtatcaagccttcattgcatacaaaccttaatctctaagcatagttgttcccaaggtccacacgtgtggaggcgagtactgaaataccacactcacacatctattccatgcgtacctagaaattaccttcaacactaaaaaaggttccttctttcattccctatcctgctaacagcccacattgtaatatttgatttatgaagaagttctaatttatttgtgaactcaggatgttgctttacagcattgctcgtgttctctcatttacttattatgcatcacggttggaaatgctatccacgtgccgtgcatcgaggtggagatttgctggatctgtctgtggctatttttttccatgtttttctcactcaagcaaagtctgttagtggaaacatgggctgggggatggggagaggacagataaagcaagagaatagggattagggtccaatcctcaatgcacagggcttagttcaaaatctaagctgtttctgtagtaagcagccaaatgggaaagatcccttcgttttgaatttgatgagaatgggcttggaaatccacgcccaccggcttgcacggaagaggactcagcctcttcctaatggttcaacattcaattcctgaggaaagtgctgatagtattagttccctacatttccctaagactcccatccaacccctagtgctactgaagagggtttgggaaagcaattggagttccttagcttggatatatatagtacctgtttttttcctctggaaaaaccaaagtactttagtgagtcttacaatcttaaggcattttgtcccctcactgggtcccgagaggcagggaggggctaggccttgagctaggagcaaggacatgggccgccaggcctggttgttactagctgtgcaaccttgggcgagcctcttcgctttgctgggcctcaggttcccgagtggaagactgggggtcagaacagctgcccttctgggagagcatcaagagaaagtggtataagtgatgggaagtgctttgaagaaattaaaggtctgtctaggagctgggggtaatcatttacagatgaagaaactgaagtctagtcattgactggcccgagttcacagagtggttttatagcaaaacagggacttgagtccagcttattggattcttcccatcagatcatattgcaccaggtatgtgtagacatgaacacataccattcctctaaggtgtgtgtacatacacggatgtgtgtgtacaggaggtacctgacatggtgaaaggccataggacagaaaacctgagttctaattccagctttgccagtcgtcccgtccgtgatatattccataggacagaaaacctgagttctaattccagctttgccagtcatcctgtccgtgatatattccataggacagaaaacctgagttctaattccagctttgccagtcgtcccgtccgtgatatattacctaactcctccagaactcagttttctaacctataaaatgaagacattgtgctagatgatctttgtggttccttcaagctctggatctctaattccatgattagtaatgtatgtatgtgtatataaatatgcttatctgtagaaatgggcccatttgaaaagtggagacaaggtctgcccaggtgcatttattgtgccagaaacagtgaattcctaaataagttcataaaatcttgttttacaattcaatggtagtgcttaatgttactgtctgaaatccactgtttaaccagatggaagactggggccattcaaaacattattagttcacaagtgtttgctgttaaaatgcttcaataaaactcatttgttaaagtcagaaattcaactcttctgtacttgggcaggtcccagcagccccttggcaggctagttttgtgcatgggcctttgcaagctatataaacgttaggtgttggcttgattatgataaatatgagcaggctccctggagaacagtccagaaaaaaagagttatagttctcacaaactggtgacatgaatccattaagctgtgtggcattttccagtgtaaagacattgtttgctggctacgatctctgactttttgtggcatatgaggtgtaaaatgttgtcaaaaaagaatctggtgtttaaaaaaaaatcaaactatggtggcattaaatgttcacttttattcta

SEQ ID NO: 10854 - DNA, 2571 bp, Homo sapiens
  source 1..2571: mol_type = unassigned DNA
tcctgagatggccccagatctgcaagagacatttgagagaagctatttattagcagacgtgaagaaatggattctgcacttgattatttagccatgacttatcaatgatgatggattggaaagcagtagctgcccagaagttaaatctgtcttctaaaaagaagaaacatcggccttccacttcttccgctgccgaaccaccgctctttgcaaccagcttcagtgggattctgcagacctcccctcccccagccccaccctgcctgctgagggctgtcaacaaggtgaaggacaccccggggctgggcaaggtgaaagtcatgcttcgcatctgttccaccttggctcgagatacttcagaatccagctctttcttaaaggtggacccacggaagaagcagatcaccttgtacgatcccctgacttgtggaggtcaaaatgccttccaaaagagaggcaaccaggttcctccaaagatgtttgccttcgatgcagtttttccacaagacgcttctcaggctgaagtgtgtgcaggcaccgtggcagaggtgatccagtctgtggtcaacggggcagatggctgcgtgttctgtttcggccacgccaaactgggaaaatcctacaccatgatcggaaaggatgattccatgcagaacctgggcatcattccctgtgccatctcttggctcttcaagctcataaacgaacgcaaggaaaagaccggcgcccgtttctcagtccgggtttccgccgtggaagtgtgggggaaggaggagaacctgcgggacctgctgtcggaggtggccacgggcagcctgcaggacggccagtccccgggcgtgtacctctgtgaggaccccatctgcggcacgcagctgcagaaccagagcgagctgcgggcccccaccgcagagaaggctgcctttttcctggatgccgccattgcctcccgcaggagccaccaacaggactgtgatgaggacgaccaccgcaactcacacgtgttcttcacactgcacatctaccagtaccggatggagaagagcgggaaagggggaatgtctggaggtcgcagccgcctgcatctcattgatctcggcagctgtgtgaaagctcttagcaaaaatcgagaaggaggctcagggctgtgtctctcgctgtctgctctgggcaatgtcatcctggctctcgtcaatggcagcaaacacattccatacaaagagagcaagctcgccatgttgctgcgggagtctctggggaacatgaactgccgtaccaccatgatcgcgcacatctcggccgcggtcgggagctacgcggagaccctgtccaccatccagattgcatcgagagtcttgaggatgaagaaaaagaagacgaagtacacatccagctcgtccggcggggagagctcctgcgaagaaggccgcatgcgcaggcccacccagctgagacccttccacaccagggccacggtggaccctgacttccccatcgctcacctgtccagcgaccccgactactcctccagcagcgagcagtcctgcgacaccgtcatctacatcgggcccaacggcacggccctctctgacaaggagctcaccgacaacgagggccccccagactttgtccctatcgtgccagccctgcagaagacccggggcgacagccggcccgcagaggcaggagaggctgcagccggcaagtcagaaagggactgcctgaagtgcaacacgtttgccgagctgcaggagaggctggactgcatcgacggcagcgaggagcccagcagctttcctttcgaagaactgcctgctcagtttgggccagagcaggcaagcagaggcccccggttaagccaagcagcgggggcaagcccactctctgagtctgataaggaagataatgggtccgaaggtcagctgaccaacagagaaggccctgaactcccagcctccaagatgcagaggagtcactcacctgtgcccgccgcggcacccgcccacagccccagcccggcctcacccaggagcgtcccgggcagcagtagccagcacagcgcctccccactcgtgcagagccccagcctccagagcagccgggagagcctcaactcctgcggcttcgtggaaggcaagcccaggcccatgggctccccccggctgggcatcgccagcctgtccaagacctcggagtacaagccacccagctctccttcccagagatgcaaagtctacacccagaagggggtcctgccgtctcccgccccactgcctccctcgagcaaggattccggcgtggcgtctagggagtccttgctgcagcccgaggtgcgtacgcccccggttggaatgagcccccaggttttgaaaaaatccatgtctgctgggagcgaagggttcccggaaactcctgtcgatgatgagcagcaggcagctactccttcagagtccaagaaggagatcctgagcaccacgatggtgacggtgcagcagccactggagctgaacggtgaggacgagctggtgttcacgctggtggaggagctgaccatcagcggggtcctggaca

SEQ ID NO: 10855 - DNA, 6103 bp, Homo sapiens
  source 1..6103: mol_type = unassigned DNA
atccggggcagcggggaatggctgagccaggggttcgccgcccccgccgccgccgccgccgccgccgccgccgccgccgcccgctttcggctcgggcctcaggaccgtagcatcctgagacattttgaattgacacttctcaagatttgactggatcagagttcatcatgtcaaagttgaaaagctcagagtcagtcagggtggtggttcgctgtcggcccatgaatggcaaggaaaaggctgcttcgtatgacaaagtggtggatgtggatgttaagctggggcaggtgtctgtgaagaaccccaaagggacggcccatgaaatgcccaagaccttcacctttgatgccgtctatgactggaatgccaagcagtttgaactgtacgatgagacgttccgaccacttgttgactctgtcctgcaaggtttcaatggaaccatttttgcctatggacaaactgggacaggaaaaacctacaccatggaaggaatccgtggtgaccctgaaaaaagaggagtcattcctaactcatttgaccatatcttcacccacatctctcgatcccagaatcaacaatacctggtcagggcttcttacttagagatctaccaggaggagatccgagatttgctctcaaaggatcagaccaaaaggcttgagctcaaagagaggcctgacacaggagtgtatgtgaaagacctgtcttcctttgtcaccaagagtgtgaaggagatagagcatgtgatgaatgtggggaaccagaaccgttctgtcggtgctaccaacatgaacgagcacagctcgcgttctcatgcaattttcgttatcactattgagtgcagcgaggtgggcctcgatggtgaaaaccacatccgtgtaggaaaattgaaccttgtagatcttgctggcagcgaacggcaagccaagaccggcgcacaaggggagagattaaaagaagctaccaagatcaacctctccctttccgctttgggtaatgtcatctctgctctagtggacggcaaaagcactcacattccatatcgggactcaaagcttaccaggctcctccaagattcccttggtggcaatgccaagactgtgatggtggccaacgtggggcctgcctcttacaacgtagaagagactctgaccactctgcgatatgccaaccgtgccaaaaacattaagaacaaaccaagggtcaatgaggaccccaaggatgccctccttcgagaattccaggaagagattgctcggctcaaggcccagctggaaaaacggtccattggtaggaggaagaggcgagagaagcggagggaaggtggtggcagtggtgggggtggggaagaggaggaggaggagggagaagagggtgaggaggaaggggatgataaggatgattactggcgggaacagcaagaaaaactggagattgagaagcgggccattgtagaggatcacagcttggttgcagaggagaagatgaggctgctgaaggagaaagagaaaaagatggaggacctgcggcgggagaaggatgctgccgagatgctgggcgccaagatcaaggccatggagagtaagttgcttgttggaggaaaaaatatagtagatcatacgaatgaacagcagaaaatcctggagcagaaacgacaggaaattgcagagcagaaacgtcgagaaagagaaatccagcaacagatggaaagtcgagatgaggagaccttggaacttaaagagacatacagctcattgcagcaagaggtggacatcaagaccaaaaaactcaaaaagctcttctccaagcttcaggcagtgaaggctgagatccatgacctccaagaagaacacatcaaggagcgccaagagctagagcagactcagaatgagctcaccagggagctgaaactcaagcatcttattatagaaaactttatccctctggaagaaaaaagtaaaattatgaatagagccttctttgatgaagaggaagatcattggaaactacatcctataaccagactggagaaccagcagatgatgaagcggccagtctcagccgtgggatataagagaccattgagccagcacgcaagaatgtccatgatgattcgtccagaggcccgatatagggcagaaaacattgtgctgttagagctggacatgcccagccggaccaccagagactatgagggtccagccattgcccccaaggtccaggctgcattggatgcggctctgcaggatgaagatgagatacaggtggatgcatcatcatttgaaagcactgcaaataagaaatccaaggccaggcctaaaagtggaaggaagtcgggatcctcctcctcttcctcaggaacccctgcatctcagctttatccacagtctcgggggctggttccaaagtaaagccagcttctcctctcccagggcggaaacagcatttgccttctgagagaagagactagcaaaaagctgcagagaggattcggcccaaactcagaactgttcccctgaggagaagcggtggcctctttgcagatcaaccaacttaatctggttgaacgtgctgttcctaatctggcactcagcccctctgggaaacatcttttaattagcatctcagaaatgcatgggtaaggtaaagtgcgatagttcaagtggaaagcaagagaatgaccagtgaccttgcttccttcccccttgccttcttctcccccttcccctgtgctccctttctctcctctctccttttctagcctgttctttacatggggctcccttcttgttgaacaatagggcagaatcaggagtcaccttagcaggaccacatctttggagcctcgggataaaatgacagtgaggttgaaaagtgaaaaccctagaacttgaataggtgcctgttcttgtagggagaaatgagaaatcgcatttggatccaggccccaggtgggcaccatcagcagtcttgcttccatgcacctcagtaagaagtggatctgcctttgggacctgctcagtgaggaaatctcttccaatttctgcttctgaatgattcaatgttgggagcaatagaaataacattccctttgccttctctgagtgtttagggaaatagcttctttaaaacctcaaaaccatgaccatcctgtcaaagacctaagtctgtaagctggtgccatgtccatacaccatgtcactttactcttcatttgtcaccatcttttcccatgcacgcatactctgaacatccttgtgtgggcccatcctctgcatccagagcatgctctgcagtgggcctgttttgtggaagaaaggaggctgtctctgccttctctgatgggactggagttgagggaaggagctgtattgtggcacttctgaattccccgttttgttccatattggtatagagagcagaagagtagctaggcagatgcagagatggagacatgagactcagtgcagtgggcagggaagacataacagatggaagcaaaggaatcctgcctgccttcagcagagaattcaccgaatcctagaactgtggctccctccaggcagagcctaagatgctggtgaagaatagctgtgtgattgaataggctcaaaggagagttcagaattcccatttacatattactagtttggtttgtaagttttagttccttgtattattgagattcagagcttcattttatgttggtcattaggtgaatattactcattttccctcaagagaagctcataagtgtgtgtgggtgtgagagcacgatggtgcctgtgttctgtgaatgtgtccatatgtgtctgtaagagagacagagaccaagaacttgcccaattttagaaatacactaatgtgcagttgttgccttttgtctgtattgaaggcccattgaatgactaatccaggctggaagcattcccatgtgggtgtctgagtccatgagccaagcctgaggggacagtgagtctccaggtctgccacactggtgcaccttgctggcacggtgcctcaggaaggtggcgactcaggtgggccttgagttatattttaactcagctgctcagttcccagggcacatttctggatcagaacccatgggaaacaggaggtactaagtgcaatgtcttagcattctgcaaaatggagatctgttgtccagcggcttatctcctttttagtaacccttctttctgaacccagggcccttttcagccttccctcatattttcttgagatcaaactttacttctttcttatttactaagaatttgcctgtttgaataagaacaaaacgctaaggtgggtagcctaagctgattttctgctggttacacgtgtctctcacaccacatttcctcaaagctaatctgaattctgtaggctaaaaatattcatgtagcaaatctgagaattgaaaactgcagataaccggccgggtatggtgactcatgcctgtaatcctagcactttgggaggccgaggtgggtggaccacctgaggttaggacttcaagaccagcctggccaacatggtgaaaccccatctgtactaaaaatacaaaaatttgcctggtgtggtggtgcatgcctctagtcctagctactcgggaggctgaggcacgagaatcacttgaacctgggaggcggaggttgcagtgagtcgagataacactactgcattccagcctgggtgacagagtgagactccccctcaaaaaaaaaaaaaaaaaaaaaaaaaacagaaagaaagaaaaagaaaactgcagataaccctatacattaatactggtatctcgaggtgactcttctgaccaagggtggttaagtgacacatagaacttttctaagagaagacagacaagttgacaggcatgccttgtactcagctgtgttcatgtggtggtctgtggaaagaaaagaagactcatttggaaatgaagctgtccctttccaagcagtctctggtgcttttcttctctcaaaatggatccgataaatatttgaatagagcagattgtagaatgtcgtgctgtcaccagaaagctgctgttttgggttctgcattgagccaaatatgtagaggacctaccaagcccactgagggactaggttttcatgtctctagtcatacctagaatgttctgagccgtctgagggccttcatgccggcagcagctagcaaagccagaaagcaagtctaacaggatctaagatgaccatcaggagaaggagtttgagactgtgtatgcaacccccaatagacccccttttactctgatctggagaatgtatctggcttcatattttcaagtcacatgtctctcagacccctggattcagaacccaaggccacaaatcataggcatgaagcactttcttaagactgacctaacgctggattatttcccgtccaatgcctgcatgctgcttgaattgctccacccacacctccatgaccaagggcgccagagtgctgcaactggggcgtgggccgctctctgcttttcctgtctgactctgacaagtcctccctcactgaatgtagaatcgttgccaagtttctgagaagtgtcgattccctgttaacatggatatcagttctgcctcacatttcccacttgaggttgaggcgtactggagacaacacctcagaccatctgaaccccatcagtggacgaaaatggggctgttaatatactctaaaagccatactaaaaatgctctgagggaactggctaagaatagtgggcctggtgattgtctatcacgcaaggctttgttttgtactgttcagaaatctgtcacctttctgcctgcccttgtttcctgaatgaaatgcttctggggttatttatgaaaggagtgatcctggggcaggcaggaggcagtgggcttcatggctccttgaagttattactgatcttgaccttctctttggctacctttagacaaagaatacgccaatcaatacttggggctctaagttttacaattgatatttatttgtatcatctctttgtctaggaatgtaaaagtgattctaaactaagatgtgtaataaaaatcaatcagatttattgtacctacaaaaa

SEQ ID NO: 10856 - DNA, 8611 bp, Homo sapiens
  source 1..8611: mol_type = unassigned DNA
ggggtgcagagcgttacagtgacagaggcattatcccaaggacactgtcatacatttttgaacagttacaaaaggacagcagcaaaatatatacaacacacatttcctatttggaaatctacaatgaatgtggttatgatcttttggatccaagacatgaagcctccagtttggaagatttgccgaaagtgacaatactggaggatcctgatcagaacattcacctgaaaaacttgactctccatcaggcaaccacagaggaagaagctctgaatttgctttttttaggagacaccaaccgaatgattgcagagactcctatgaaccaagcttcaacccgttcccactgcattttcaccattcatttgtcaagcaaggaaccaggatctgcaactgtacgacatgccaaactccatctggttgacctggctggttcagagcgagttgcaaagactggagtagggggccatcttctaacagaggccaagtatatcaacttgtcactacattacttagaacaggttatcattgccctttcagaaaagcaccgttcgcacattccttatagaaactccatgatgaccagtgtcctaagagacagtttgggagggaactgcatgacaactatgattgcaacactctccttggagaaaaggaatcttgatgagtctatatcaacctgcagatttgcacagcgagtggcactcataaagaatgaagctgttcttaatgaagaaattaaccccagattagtgattaaacgcctacaaaaggaaatccaggaactgaaggatgaactggccatggtcactggggagcagaggacagaggcactcacagaagcagagctccttcagctggaaaaactaataacatcctttttggaagaccaggattcagacagtagattagaggttggcgcggatatgcgtaaagttcatcactgttttcatcatttaaagaaactattgaatgacaagaagatccttgaaaacaatacagtctcctctgaaagcaaagaccaagattgtcaagaaccattaaaagaagaagaatatagaaagctacgagatattctgaaacagagagataacgaaatcaatatcctggtcaacatgttaaaaaaagaaaagaagaaagctcaggaggctctccacttggctggcatggatagacgtgaattcagacagtcccagagcccacccttccgcctaggaaacccagaagaaggtcaaagaatgcgactatcctcagctccctcacaggcccaggacttcagcattttggggaaaagatccagtttgctccacaagaaaataggaatgagagaggaaatgtcattaggatgccaggaggcttttgaaatcttcaagagggaccacgctgacagcgttaccatcgatgacaacaaacagattctgaaacagagattttctgaagccaaggccctgggagaaagtataaatgaagcaagaagtaaaattggtcacctgaaggaagaaatcacccagcggcatatacagcaagtagccctaggaatctcggaaaacatggccgtgcctctgatgccagaccagcaggaggagaagctgcgatcacaactggaggaagaaaagagaaggtataaaacaatgttcactcgcctgaaagccctgaaggtggagatcgagcacttgcagctgctcatggacaaagccaaggtgaagctacagaaagagtttgaagtctggtgggcagaggaggccaccaacctgcaggtaaattctccagcagtgaattcactcgatcacacgaagccatttctccagacatctgactcccagcatgaatggtcccaactcctctctaacaaaagtgatgtgaatgccaggaaaatcctgccctcgccttgccccagtccacacagccagaaacagagcagcaccagcaccccactggaagacagcatccccaagaggccagtgtcgtccatccctctcaccggagacagccagacggactcggacatcatcgccttcatcaaggccagacagagcattctgcagaagcaatgtttgggaagcaattgaatttccaggaaatatccatccatgaattatgccagcaagaatgaagcacagatgaaggcagcgcccctcacttgctctggcttcagaagtgaactatgggctgctgggagcaactagtgactttgattcccatggaggggactgtgtttctttaaggatgctgacctggaggccaccgagaggctggggctggggctgaccacaacatccttcctgtggttgctggagctgctggcagggccaggcaaggccagagtgctaggggcagggtgaaggcttcagctcactgttgtagtgacgttttgtgtagatctttataagcttttgagaatgtgaaatagcaccatcaaaatataatgtcagaggatgctcacaccagtggaatgtggggggaatatttttatttttaacgatttgccagctctctcccttggcccgtgctctggtttggaagcccagaaatggccatgacaggtccaggcaggatgtcccagccacaggcaaggcagtggaatgcagggcatcctgaaggccaatcctgatctcccagaccacatctttcaccatcagcctcttggccaggatgacctggaggcagtgcctgaacagctgtgtctccagggagccatctgccctgcagggtctaaggacatcatagcacccagagaacagtgggcagctcccaggggctctgctgagagcttgagagagggcagtgtgggtaccttgggcctcacaaccttcacccagccacttgggaggatttgggctgacactccccacttccacagggaaaaacatagctgcctgggggtcttgtctccatgggccctctccatgacagatccaagggaaggtgggcagccctcaaggaggttcttgaagaactgccccctgggccagggggttccaacccagctgcagccagggaggggcagcggagggtgagcaggagtggcacctggaaatgaagctaactggataaaagtgctggtccactgctcctggtgtctctgtcctataaatacaggacctgatgaccctggaggggagcagagtggtaatatagtataattggcttgattttctttttcgttttttaggactgggtaacaggatcatgcaggagaagattaaaccattacatttctaagctaggcaggcccatcgagctcctctaatccacacccctattttatataattagaaggccagagtgaaggggagattcagcttgctgttctatgccactgacaaatgtcccctcttcagggggcttcccctgaccactccatctcgagtcaccccctagttatcccctatcccattaccattttttctgcatcactatctgacatgttatccttccgaacttgcctatttttgaaatacctgcaaccccccataatactaagagctccaatgcaacagggacctgtttgtcttgctcattgctgtgtcccaagcacagagtcgctgttcagtaaacggtccttcagttcatgagtagacgagccagaacccagatgtgtttctcaggctggtgtcactctgacttcccccaggctctgactgaatcccatcgggacaggggccagcatctctggtccactcctggccctcacagttcaatggaacatagtaagccctctgtaaagtctgtagaaccagaggaagaccaaattctgattctagaagcctccccaagagtccatggaacacacatgtaactgcacacacacacacacatacacacacacactctcaagagccctgaagatggcatggcatttgccccagtcccctatgtagcagcagcagtattcttggcatgccttagtgccctcagccctctagagctgggtagagtctactaacttttattttcttttatttttactttcttttatttattttttgagatggggggggtctctgtcagccaggctggggtgcagtggtgcgaccatacctcactagtcagcctccaactcctgggctcaagccatactcagcctccaactcctgggctcaagcgatcctctcacctcagcctccaaagtagctggaactacaggcatgcaccaccacacctagctcgttttaaattttttgtagagacagggtctcactgtgtggctcaggatggtctcaaattcctggccttaagcgatgctcccgccttggcctcccaaagtgctgggattgcaggcatgagccacataccctgccagagtctttcaacattagatctcccactgagacatcatctcctggatccaaaggccttactgacagagatgtgtggcatggccccatgcggggtgtgaaccagcctcctggggcaatcactaagacaggaaaggaaatgaagacagaaaaacacacaacatgggatctggggccactggtgtccagagcatatgcaaagtgtgtgcagcaactggccaaggggccttttgctccgaacatcccctaatggaagcccagcctttgatatggacacatgcttgacagcagtgcaccttcccagagttcactggcctctgcaaatgggagaaattgatgcaatgttttgaaaagactttccagcaatccacctgggatcagtggagccacggatgacaagaagtatctgagttcactctaggccaaaatgtgggattttcaaaaacattttctggaaagcagcctagccagtgactccagcccagtccctgctagaattcaactggctctaccaatcccttgacaagaagtagggtggacggaggttggaggagggaagttaaaatgtagcttgcccagatcttgctaaaaaggagttttagaaagcagatagagaaattgtggtatactgaatacatcattttaattcttcaccaccagtatagaattacacatccaaagctttgtcatggcccactttgactaatgtggtgttggcaaacctgatccaggcagaggcttgaattgtgctctcatggttgagcttgcctcttgctccagtgatctctcttgggatgaacatgccatgggtagctgctgccccttcagcctggaacatccagagagcagacctgagcccagtctacagcctggagcagagcctcccaggcaagcccagcccagatcagctgaactatggctcacccaaagacctattggcatgagaatatatgctgcttgtcataaaccactgaggtttagagtggtttgttatatagcattaattgtagcaatagcagactggcacagaaattggaacccagagacagtatatgactggatctaggatttctcagtgcagagttcattgtctctccatgcagcctgtggaaaggcactgagagcatcctgtatatggaaaagcaggaccaccacctacagccatgatgaagcaacaaggacctgatttaccctcctgctttaaatgactaaaaatgagacaaaatcctctatacaaaccaatggttttcagccattggataacaagcaatatagggtatgattgatccgcaagagaagggaaacaagtgaggggagccctatgattgctccaacttactgcctgcagtgagttttcaggctgcagcccaggaagggggaaccaggtagagcccagtggtttccctgagttgaggaaatggagctgggaatccagggaggacaaagtggcttaaatttgcaaggcagagtcccagggatgagagagagagaaggagagagagaggagaaaaaagagagagaaagagagagagcatgctctggagatcttcagagggttacccttgagtcttcagctaactaccgatcaacatctgcatgtgaagaaattacccaaggcaggggaaagaaccaccaggaggaagcaggtggaataatttcctgagataacactgtgttgggaagagttcatgtttccaacagccagagtggagaaacctcccaaaacagtcattgtatagagacacataaggtactgcctcagaagtggggccaaattagtcctagatgatagattgctctggtcccacctaacaaagcttaaaaagccagccccaaaggagtcaaattgtttccagtaagtttccaagtaacttcaatgagtcccaaaacaaagcttcaaaatatctaaaggaatatgaaaaacaaaccaaaaagaaaccagcatccaacaatatagaatccacaatgtctggtgtccattaaaaaataatcaggcatgcaaagaagcaggaaaatatgggccatgagaggagaaaaaaccatcaatagaaatagaggccgggtgtggtggctcactcctataatcccagcactttgggaggccgaggcaggaggatcacctgaggtcaggagttcaagaacagcctgttcaacatggggaaaccccgtctctactaaaaatacaaaaaatagccgggcatggtgttgcgtacctgtaatcccagctactcagaggctgaggcaggagaattgcttgagcccaggaggcagaggttacagtgagccgaaattgtgccattgcactccagcttgggcaacaagagtgaaactctgtctcaaaaaaaaaaaaaagaaaaaacaaatagaaacagccccaggcatggcacagttgatagagtaaatagacagaaacattttttaaaatgcaatgggtgtgtgtttcaaatctaggcagaaaaaatgctccttgtaattccttaaacataagcatgtctcattcatctggtcattgttttgacaaggatgtgccatccattgtgctaagttctgaggagtcagaggtgacagagacagagaaagtgccagcattcttggaaccttctaacgaaggagagggacaagccaggcatggtggctcacgcctgtaatcccaacactttgggagactgaggctggcggatcacgaggtcaggagtttgagaccaacctggccaacatggcgaaaccccatcgctactaaaaatacaaaaattagctgggtgtggtggtgcgcacctgtaatcccagctactctggaggctgaggcaggacaatcacttgaaccctggaggcagagtttgcagtgagctgagatcgtgccactgcactccaacctgggcaacaagagcgagactccttctctgaaaaaaaaaaaaagagagggacaataaacaagtaagcaagacaatctgattaagaaggagttggggttagctgggcatggtagcaagcgcctgtagtctcagctactcgggaggctgaggtgggaggatccttgaacccaggaggttaaggctgcagtgagctgtgatcacaccactgcactccagcctggatgacagagcaagaccctgtctcagaaaaagaagaaggagttgggggtggggtaggatgggcttggactcactatcaaggtgggtgggagtgtgagaacccggcaaggtgcaaagagagaagcagggaagggaagcttaggacaatgatggcaggttgggtattgggtgatgggaagaggcaaaggacgtggagcttggcaaaaaggggacttgtggggatttgggccatgtgagcatgtgggggagacagtgttccttccataacacgtgtccagggactgccagggctccgaggcagagcaggtgtagagaggttggctgtgaatgttggatgttgaaaacatatgtgtcaaatgtgggaggaaaaagcagtgtttccttgaatacaagctcctcctcaccttgcgaaaagtggcctctgagtgtagccctgaatgcatctcccaaggaataggaggaagcagcaaccttttcagagttaactgctttatttgggttttccatggcctcgtgccagccagcagggctgagccagtttcacccacactgagagggaactcagcaaagagcaagcagcatgccagctggtactcttccctctccattcactcagctcctgatctcaggagggcagcccctccccaggccagcacccctccccttctggccccaggtgtgggatgttgttgttttcttttctccgaaacatctcctgggtttgtcttttccatcactgtctttagactgaggcaagcagtccccatgccttcagccccatgttttgggggtaacctgtgctttgacatgctttgctaaaaactttctaagtctccctctggtgctgggaccagccatgaccaacaacgtcatccatgcaggccacccctaacatagtccaggcctcatgtgggtctcagttcccttttcttctttcaggaagttctccagtgcatgcatagggttgaccagatgtcccaaggtgctctaggacttatgcctatgaagctgttttagggcttcctagtcagtccctggttccaggaaagcagcctgatgaggagatcattcccgctggctggtgtggcatttcttttatggcactacctgggattgggccaccagacctgcgctaacatgctgatttgatggactcttaacatcataggacaaagaatcgtcatgtgaaccaattagacaataaacaaatgcctaagtgcc

SEQ ID NO: 10857 - DNA, 9082 bp, Homo sapiens
  source 1..9082: mol_type = unassigned DNA
gttgctaagactgtgggtcgccggaggtggtgggagttagttttggcagcccgggcctgagagaggtcaagggtcattgcagagccagggaggagatggtgaagcagactatccagatattcgcgagggtgaagccccctgtccggaagcaccaacaagggatttattccatagatgaagatgaaaaattaatacctagcttggaaatcatcttaccacgtgatttggcagatgggtttgtgaataataagcgagaaagctacaaatttaaatttcaaagaatttttgatcaggatgcaaaccaagagaccgtttttgaaaacattgccaaaccagttgctgggagtgtcctggcaggttacaatggtaccatctttgcatatgggcaaacaggcagcgggaagacattcactatcacagggggtgcagagcgttacagtgacagaggcattatcccaaggacactgtcatacatttttgaacagttacaaaaggacagcagcaaaatatatacaacacacatttcctatttggaaatctacaatgaatgtggttatgatcttttggatccaagacatgaagcctccagtttggaagatttgccgaaagtgacaatactggaggatcctgatcagaacattcacctgaaaaacttgactctccatcaggcaaccacagaggaagaagctctgaatttgctttttttaggagacaccaaccgaatgattgcagagactcctatgaaccaagcttcaacccgttcccactgcattttcaccattcatttgtcaagcaaggaaccaggatctgcaactgtacgacatgccaaactccatctggttgacctggctggttcagagcgagttgcaaagactggagtagggggccatcttctaacagaggccaagtatatcaacttgtcactacattacttagaacaggttatcattgccctttcagaaaagcaccgttcgcacattccttatagaaactccatgatgaccagtgtcctaagagacagtttgggagggaactgcatgacaactatgattgcaacactctccttggagaaaaggaatcttgatgagtctatatcaacctgcagatttgcacagcgagtggcactcataaagaatgaagctgttcttaatgaagaaattaaccccagattagtgattaaacgcctacaaaaggaaatccaggaactgaaggatgaactggccatggtcactggggagcagaggacagaggcactcacagaagcagagctccttcagctggaaaaactaataacatcctttttggaagaccaggattcagacagtagattagaggttggcgcggatatgcgtaaagttcatcactgttttcatcatttaaagaaactattgaatgacaagaagatccttgaaaacaatacagtctcctctgaaagcaaagaccaagattgtcaagaaccattaaaagaagaagaatatagaaagctacgagatattctgaaacagagagataacgaaatcaatatcctggtcaacatgttaaaaaaagaaaagaagaaagctcaggaggctctccacttggctggcatggatagacgtgaattcagacagtcccagagcccacccttccgcctaggaaacccagaagaaggtcaaagaatgcgactatcctcagctccctcacaggcccaggacttcagcattttggggaaaagatccagtttgctccacaagaaaataggaatgagagaggaaatgtcattaggatgccaggaggcttttgaaatcttcaagagggaccacgctgacagcgttaccatcgatgacaacaaacagattctgaaacagagattttctgaagccaaggccctgggagaaagtataaatgaagcaagaagtaaaattggtcacctgaaggaagaaatcacccagcggcatatacagcaagtagccctaggaatctcggaaaacatggccgtgcctctgatgccagaccagcaggaggagaagctgcgatcacaactggaggaagaaaagagaaggtataaaacaatgttcactcgcctgaaagccctgaaggtggagatcgagcacttgcagctgctcatggacaaagccaaggtgaagctacagaaagagtttgaagtctggtgggcagaggaggccaccaacctgcaggtaaattctccagcagtgaattcactcgatcacacgaagccatttctccagacatctgactcccagcatgaatggtcccaactcctctctaacaaaagttctggaggctgggaagtccaagatcaaggcactggcagattcgatgtctgtgatgtgaatgccaggaaaatcctgccctcgccttgccccagtccacacagccagaaacagagcagcaccagcaccccactggaagacagcatccccaagaggccagtgtcgtccatccctctcaccggagacagccagacggactcggacatcatcgccttcatcaaggccagacagagcattctgcagaagcaatgtttgggaagcaattgaatttccaggaaatatccatccatgaattatgccagcaagaatgaagcacagatgaaggcagcgcccctcacttgctctggcttcagaagtgaactatgggctgctgggagcaactagtgactttgattcccatggaggggactgtgtttctttaaggatgctgacctggaggccaccgagaggctggggctggggctgaccacaacatccttcctgtggttgctggagctgctggcagggccaggcaaggccagagtgctaggggcagggtgaaggcttcagctcactgttgtagtgacgttttgtgtagatctttataagcttttgagaatgtgaaatagcaccatcaaaatataatgtcagaggatgctcacaccagtggaatgtggggggaatatttttatttttaacgatttgccagctctctcccttggcccgtgctctggtttggaagcccagaaatggccatgacaggtccaggcaggatgtcccagccacaggcaaggcagtggaatgcagggcatcctgaaggccaatcctgatctcccagaccacatctttcaccatcagcctcttggccaggatgacctggaggcagtgcctgaacagctgtgtctccagggagccatctgccctgcagggtctaaggacatcatagcacccagagaacagtgggcagctcccaggggctctgctgagagcttgagagagggcagtgtgggtaccttgggcctcacaaccttcacccagccacttgggaggatttgggctgacactccccacttccacagggaaaaacatagctgcctgggggtcttgtctccatgggccctctccatgacagatccaagggaaggtgggcagccctcaaggaggttcttgaagaactgccccctgggccagggggttccaacccagctgcagccagggaggggcagcggagggtgagcaggagtggcacctggaaatgaagctaactggataaaagtgctggtccactgctcctggtgtctctgtcctataaatacaggacctgatgaccctggaggggagcagagtggtaatatagtataattggcttgattttctttttcgttttttaggactgggtaacaggatcatgcaggagaagattaaaccattacatttctaagctaggcaggcccatcgagctcctctaatccacacccctattttatataattagaaggccagagtgaaggggagattcagcttgctgttctatgccactgacaaatgtcccctcttcagggggcttcccctgaccactccatctcgagtcaccccctagttatcccctatcccattaccattttttctgcatcactatctgacatgttatccttccgaacttgcctatttttgaaatacctgcaaccccccataatactaagagctccaatgcaacagggacctgtttgtcttgctcattgctgtgtcccaagcacagagtcgctgttcagtaaacggtccttcagttcatgagtagacgagccagaacccagatgtgtttctcaggctggtgtcactctgacttcccccaggctctgactgaatcccatcgggacaggggccagcatctctggtccactcctggccctcacagttcaatggaacatagtaagccctctgtaaagtctgtagaaccagaggaagaccaaattctgattctagaagcctccccaagagtccatggaacacacatgtaactgcacacacacacacacatacacacacacactctcaagagccctgaagatggcatggcatttgccccagtcccctatgtagcagcagcagtattcttggcatgccttagtgccctcagccctctagagctgggtagagtctactaacttttattttcttttatttttactttcttttatttattttttgagatggggggggtctctgtcagccaggctggggtgcagtggtgcgaccatacctcactagtcagcctccaactcctgggctcaagccatactcagcctccaactcctgggctcaagcgatcctctcacctcagcctccaaagtagctggaactacaggcatgcaccaccacacctagctcgttttaaattttttgtagagacagggtctcactgtgtggctcaggatggtctcaaattcctggccttaagcgatgctcccgccttggcctcccaaagtgctgggattgcaggcatgagccacataccctgccagagtctttcaacattagatctcccactgagacatcatctcctggatccaaaggccttactgacagagatgtgtggcatggccccatgcggggtgtgaaccagcctcctggggcaatcactaagacaggaaaggaaatgaagacagaaaaacacacaacatgggatctggggccactggtgtccagagcatatgcaaagtgtgtgcagcaactggccaaggggccttttgctccgaacatcccctaatggaagcccagcctttgatatggacacatgcttgacagcagtgcaccttcccagagttcactggcctctgcaaatgggagaaattgatgcaatgttttgaaaagactttccagcaatccacctgggatcagtggagccacggatgacaagaagtatctgagttcactctaggccaaaatgtgggattttcaaaaacattttctggaaagcagcctagccagtgactccagcccagtccctgctagaattcaactggctctaccaatcccttgacaagaagtagggtggacggaggttggaggagggaagttaaaatgtagcttgcccagatcttgctaaaaaggagttttagaaagcagatagagaaattgtggtatactgaatacatcattttaattcttcaccaccagtatagaattacacatccaaagctttgtcatggcccactttgactaatgtggtgttggcaaacctgatccaggcagaggcttgaattgtgctctcatggttgagcttgcctcttgctccagtgatctctcttgggatgaacatgccatgggtagctgctgccccttcagcctggaacatccagagagcagacctgagcccagtctacagcctggagcagagcctcccaggcaagcccagcccagatcagctgaactatggctcacccaaagacctattggcatgagaatatatgctgcttgtcataaaccactgaggtttagagtggtttgttatatagcattaattgtagcaatagcagactggcacagaaattggaacccagagacagtatatgactggatctaggatttctcagtgcagagttcattgtctctccatgcagcctgtggaaaggcactgagagcatcctgtatatggaaaagcaggaccaccacctacagccatgatgaagcaacaaggacctgatttaccctcctgctttaaatgactaaaaatgagacaaaatcctctatacaaaccaatggttttcagccattggataacaagcaatatagggtatgattgatccgcaagagaagggaaacaagtgaggggagccctatgattgctccaacttactgcctgcagtgagttttcaggctgcagcccaggaagggggaaccaggtagagcccagtggtttccctgagttgaggaaatggagctgggaatccagggaggacaaagtggcttaaatttgcaaggcagagtcccagggatgagagagagagaaggagagagagaggagaaaaaagagagagaaagagagagagcatgctctggagatcttcagagggttacccttgagtcttcagctaactaccgatcaacatctgcatgtgaagaaattacccaaggcaggggaaagaaccaccaggaggaagcaggtggaataatttcctgagataacactgtgttgggaagagttcatgtttccaacagccagagtggagaaacctcccaaaacagtcattgtatagagacacataaggtactgcctcagaagtggggccaaattagtcctagatgatagattgctctggtcccacctaacaaagcttaaaaagccagccccaaaggagtcaaattgtttccagtaagtttccaagtaacttcaatgagtcccaaaacaaagcttcaaaatatctaaaggaatatgaaaaacaaaccaaaaagaaaccagcatccaacaatatagaatccacaatgtctggtgtccattaaaaaataatcaggcatgcaaagaagcaggaaaatatgggccatgagaggagaaaaaaccatcaatagaaatagaggccgggtgtggtggctcactcctataatcccagcactttgggaggccgaggcaggaggatcacctgaggtcaggagttcaagaacagcctgttcaacatggggaaaccccgtctctactaaaaatacaaaaaatagccgggcatggtgttgcgtacctgtaatcccagctactcagaggctgaggcaggagaattgcttgagcccaggaggcagaggttacagtgagccgaaattgtgccattgcactccagcttgggcaacaagagtgaaactctgtctcaaaaaaaaaaaaaagaaaaaacaaatagaaacagccccaggcatggcacagttgatagagtaaatagacagaaacattttttaaaatgcaatgggtgtgtgtttcaaatctaggcagaaaaaatgctccttgtaattccttaaacataagcatgtctcattcatctggtcattgttttgacaaggatgtgccatccattgtgctaagttctgaggagtcagaggtgacagagacagagaaagtgccagcattcttggaaccttctaacgaaggagagggacaagccaggcatggtggctcacgcctgtaatcccaacactttgggagactgaggctggcggatcacgaggtcaggagtttgagaccaacctggccaacatggcgaaaccccatcgctactaaaaatacaaaaattagctgggtgtggtggtgcgcacctgtaatcccagctactctggaggctgaggcaggacaatcacttgaaccctggaggcagagtttgcagtgagctgagatcgtgccactgcactccaacctgggcaacaagagcgagactccttctctgaaaaaaaaaaaaagagagggacaataaacaagtaagcaagacaatctgattaagaaggagttggggttagctgggcatggtagcaagcgcctgtagtctcagctactcgggaggctgaggtgggaggatccttgaacccaggaggttaaggctgcagtgagctgtgatcacaccactgcactccagcctggatgacagagcaagaccctgtctcagaaaaagaagaaggagttgggggtggggtaggatgggcttggactcactatcaaggtgggtgggagtgtgagaacccggcaaggtgcaaagagagaagcagggaagggaagcttaggacaatgatggcaggttgggtattgggtgatgggaagaggcaaaggacgtggagcttggcaaaaaggggacttgtggggatttgggccatgtgagcatgtgggggagacagtgttccttccataacacgtgtccagggactgccagggctccgaggcagagcaggtgtagagaggttggctgtgaatgttggatgttgaaaacatatgtgtcaaatgtgggaggaaaaagcagtgtttccttgaatacaagctcctcctcaccttgcgaaaagtggcctctgagtgtagccctgaatgcatctcccaaggaataggaggaagcagcaaccttttcagagttaactgctttatttgggttttccatggcctcgtgccagccagcagggctgagccagtttcacccacactgagagggaactcagcaaagagcaagcagcatgccagctggtactcttccctctccattcactcagctcctgatctcaggagggcagcccctccccaggccagcacccctccccttctggccccaggtgtgggatgttgttgttttcttttctccgaaacatctcctgggtttgtcttttccatcactgtctttagactgaggcaagcagtccccatgccttcagccccatgttttgggggtaacctgtgctttgacatgctttgctaaaaactttctaagtctccctctggtgctgggaccagccatgaccaacaacgtcatccatgcaggccacccctaacatagtccaggcctcatgtgggtctcagttcccttttcttctttcaggaagttctccagtgcatgcatagggttgaccagatgtcccaaggtgctctaggacttatgcctatgaagctgttttagggcttcctagtcagtccctggttccaggaaagcagcctgatgaggagatcattcccgctggctggtgtggcatttcttttatggcactacctgggattgggccaccagacctgcgctaacatgctgatttgatggactcttaacatcataggacaaagaatcgtcatgtgaaccaattagacaataaacaaatgcctaagtgcc

SEQ ID NO: 10858 - DNA, 2394 bp, Homo sapiens
  source 1..2394: mol_type = unassigned DNA
acagtcctgaggggtgcagcgggtggcactggaagggcctcctcagcaggttgtcagccagctggaagagcctggggccacctgtctggtcagagtctctctgctgtgggcctcttggagccagggctggttttgtggtctgactgaagtgacaatgaaattaataggatcctgatgctgtgactgaggccatttccctgtgtctccaaacaggaatgagagaggaaatgtcattaggatgccaggaggcttttgaaatcttcaagagggaccacgctgacagcgttaccatcgatgacaacaaacagattctgaaacagagattttctgaagccaaggccctgggagaaagtataaatgaagcaagaagtaaaattggtcacctgaaggaagaaatcacccagcggcatatacagcaagtagccctaggaatctcggaaaacatggccgtgcctctgatgccagaccagcaggaggagaagctgcgatcacaactggaggaagaaaagagaaggtataaaacaatgttcactcgcctgaaagccctgaaggtggagatcgagcacttgcagctgctcatggacaaagccaaggtgaagctacagaaagagtttgaagtctggtgggcagaggaggccaccaacctgcaggtaaattctccagcagtgaattcactcgatcacacgaagccatttctccagacatctgactcccagcatgaatggtcccaactcctctctaacaaaagtgatgtgaatgccaggaaaatcctgccctcgccttgccccagtccacacagccagaaacagagcagcaccagcaccccactggaagacagcatccccaagaggccagtgtcgtccatccctctcaccggagacagccagacggactcggacatcatcgccttcatcaaggccagacagagcattctgcagaagcaatgtttgggaagcaattgaatttccaggaaatatccatccatgaattatgccagcaagaatgaagcacagatgaaggcagcgcccctcacttgctctggcttcagaagtgaactatgggctgctgggagcaactagtgactttgattcccatggaggggactgtgtttctttaaggatgctgacctggaggccaccgagaggctggggctggggctgaccacaacatccttcctgtggttgctggagctgctggcagggccaggcaaggccagagtgctaggggcagggtgaaggcttcagctcactgttgtagtgacgttttgtgtagatctttataagcttttgagaatgtgaaatagcaccatcaaaatataatgtcagaggatgctcacaccagtggaatgtggggggaatatttttatttttaacgatttgccagctctctcccttggcccgtgctctggtttggaagcccagaaatggccatgacaggtccaggcaggatgtcccagccacaggcaaggcagtggaatgcagggcatcctgaaggccaatcctgatctcccagaccacatctttcaccatcagcctcttggccaggatgacctggaggcagtgcctgaacagctgtgtctccagggagccatctgccctgcagggtctaaggacatcatagcacccagagaacagtgggcagctcccaggggctctgctgagagcttgagagagggcagtgtgggtaccttgggcctcacaaccttcacccagccacttgggaggatttgggctgacactccccacttccacagggaaaaacatagctgcctgggggtcttgtctccatgggccctctccatgacagatccaagggaaggtgggcagccctcaaggaggttcttgaagaactgccccctgggccagggggttccaacccagctgcagccagggaggggcagcggagggtgagcaggagtggcacctggaaatgaagctaactggataaaagtgctggtccactgctcctggtgtctctgtcctataaatacaggacctgatgaccctggaggggagcagagtggtaatatagtataattggcttgattttctttttcgttttttaggactgggtaacaggatcatgcaggagaagattaaaccattacatttctaagctaggcaggcccatcgagctcctctaatccacacccctattttatataattagaaggccagagtgaaggggagattcagcttgctgttctatgccactgacaaatgtcccctcttcagggggcttcccctgaccactccatctcgagtcaccccctagttatcccctatcccattaccattttttctgcatcactatctgacatgttatccttccgaacttgcctatttttgaaatacctgcaaccccccataatactaagagctccaatgcaacagg

SEQ ID NO: 10859 - DNA, 1330 bp, Homo sapiens
  source 1..1330: mol_type = unassigned DNA
ctggaagagcctggggccacctgtctggtcagagtctctctgctgtgggcctcttggagccagggctggttttgtggtctgactgaagtgacaatgaaattaataggatcctgatgctgtgactgaggccatttccctgtgtctccaaacaggaatgagagaggaaatgtcattaggatgccaggaggcttttgaaatcttcaagagggaccacgctgacagcgttaccatcgatgacaacaaacagattctgaaacagagattttctgaagccaaggccctgggagaaagtataaatgaagcaagaagtaaaattggtcacctgaaggaagaaatcacccagcggcatatacagcaagtagccctaggaatctcggaaaacatggccgtgcctctgatgccagaccagcaggaggagaagctgcgatcacaactggaggaagaaaagagaaggtataaaacaatgttcactcgcctgaaagccctgaaggtggagatcgagcacttgcagctgctcatggacaaagccaaggtgaagctacagaaagagtttgaagtctggtgggcagaggaggccaccaacctgcaggtaaattctccagcagtgaattcactcgatcacacgaagccatttctccagacatctgactcccagcatgaatggtcccaactcctctctaacaaaagttctggaggctgggaagtccaagatcaaggcactggcagattcgatgtctgtgatgtgaatgccaggaaaatcctgccctcgccttgccccagtccacacagccagaaacagagcagcaccagcaccccactggaagacagcatccccaagaggccagtgtcgtccatccctctcaccggagacagccagacggactcggacatcatcgccttcatcaaggccagacagagcattctgcagaagcaatgtttgggaagcaattgaatttccaggaaatatccatccatgaattatgccagcaagaatgaagcacagatgaaggcagcgcccctcacttgctctggcttcagaagtgaactatgggctgctgggagcaactagtgactttgattcccatggaggggactgtgtttctttaaggatgctgacctggaggccaccgagaggctggggctggggctgaccacaacatccttcctgtggttgctggagctgctggcagggccaggcaaggccagagtgctaggggcagggtgaaggcttcagctcactgttgtagtgacgttttgtgtagatctttataagcttttgagaatgtgaaatagcaccatcaaaatataatgtcagaggatgctcacacca

SEQ ID NO: 10860 - DNA, 743 bp, Homo sapiens
  source 1..743: mol_type = unassigned DNA
actcctatgaaccaagcttcaacccgttcccactgcattttcaccattcatttgtcaagcaaggaaccaggatctgcaactgtacgacatgccaaactccatctggttgacctggctggttcagagcgagttgcaaagactggagtagggggccatcttctaacagaggccaagtatatcaacttgtcactacattacttagaacaggttatcattgccctttcagaaaagcaccgttcgcacattccttatagaaactccatgatgaccagtgtcctaagagacagtttgggagggaactgcatgacaactatgattgcaacactctccttggagaaaaggaatcttgatgagtctatatcaacctgcagatttgcacagcgagtggcactcataaagaatgaagctgttcttaatgaagaaattaaccccagattaaaagcaccaagctcctctgatggagttctcttctgcagaaaccaatgagtgaggcaggatctgtttcagcaaaggccctggtcaggtatcagcatcacacagtgttcctgctggagagaggagacagcatgcaaagtcaagattcaggtggaactgaactgctagggtggattttgttgctgtccctacccttccagaagccctatagcattacagtgctgaatgagaaagagagttaacaaagttattagccccaagacaaaaactagttcagaatttaaggaaaataaacatattagacattg

SEQ ID NO: 10861 - DNA, 582 bp, Homo sapiens
  source 1..582: mol_type = unassigned DNA
gttgctaagactgtgggtcgccggaggtggtgggagttagttttggcagcccgggcctgagagaggtcaagggtcattgcagagccagggaggagatggtgaagcagactatccagatattcgcgagggtgaagccccctgtccggaagcaccaacaagggatttattccatagatgaagatgaaaaattaatacctagcttggaaatcatcttaccacgtgatttggcagatgggtttgtgaataataagcgagaaagctacaaatttaaagactgggttttaccatgttgcccaggctggtcttgaactcctgggctcaagcgatctgaccctccttggcctcccaaagtgctgggattacaggtgtgagccaccgcgcctggcccctgctttgctttttctgaagaggacgttctcccactgatatttcaaagaatttttgatcaggatgcaaaccaagagaccgtttttgaaaacattgccaaaccagttgctgggagtgtcctggcaggttacaatggtaccatctttgcatatgggcaaacaggcagcgggaagacattcactatcacagggggtg

SEQ ID NO: 10862 - DNA, 2035 bp, Homo sapiens
  source 1..2035: mol_type = unassigned DNA
tacccaccatttgtatacaggagtacaacagcacagtgtggttgagactacagggcaaacattgtgctaagttagatttcaaagaatttttgatcaggatgcaaaccaagagaccgtttttgaaaacattgccaaaccagttgctgggagtcctacaggaactggatcaacccagcaagtctgcagttcccaaggtcttcaggatgaggcaccagtgcagttatgtagtatttttccgccaaagtgatatgttttaaactgacagattttcattgttccatttgatgctaatattttcttctaacaatagcttttctcttaatgatgccttttacttatgtaaacatgtttttctcataaaaacttaaatagtcattttgctttttattaatggaatcaccaccaagcaatctttataagattgtcatttatatggctacattaaataacacagttctgttttcatacatagaaattctaataatataaaaaattatgtagccaaaaatattgaaacatttatacatgaaaagcttgagtcacagaaacctagggttgaaaggaacttcaaggtctttagccttcctccaagaaatataacttacaaaagtgagcagaagtttttatatattcacttgcccttaggctcttaatttaactccacactgagcattttcgacactgacttgttttgagaaaggttatcataagggagcttttccgtttctgctacctcaaatgcgtgtatcttttttcttagcctttcttcctttactcttctctcagaaatatttctctttactatccttactacatggagctttgtttccagctaagtttgcttttttcagaagtttatctcctaattcagttccaaccagggttgccagatttagaaaatgaaaaatataggactcccagttaaatgtgaatttcagataaatggtgaacacgtttttagtataaatatgtcccaaatgttgcatgggtcatacccataaaattattcattgtttctctgaaattcaaatttaactgtattttattggacaaccctatgtaaaacccttatgcctgcaaccttgtctgtaaatttcctttgctgaagttcacatctccatcagtgcactgaactacgcagaggacactcttctgtggctgcattttcctctgcctgcagccatttccatctggatcctgctctgttctccccttgctggtttctcagcttacctgcagtcccccattggccactcttcttgagctgtctcctgttggtggcacagcagtgtttattatgcttgacactcctaggttaccttgagtcctcctttactcttgtcctggacaataacaattcctgttcattcttcttccgcagggggatctttccctccttccctcctcatctttacttccccttccccttctccctcctgtctgtccctgcttgtctgttccctacactgccctcattcaggtttctgcccacccacttgcccacccagcctcctgctctagacactccctgtccaggccatcttgcactgcctggttaatcattcagaaatattgtaccaattctactctttccctccttcagtgacttactattgtctgcagaatgaagtataagttccttattcaaggactcatatgcaggaactttccagaattgtcctcttcctatttccctagtgccattgacatcgttactttgcatcagtgcctaccaccctttccgatactctcactctttcactataatatattattgaaaactcccttcgggaagttttaaattatgtaatcatttggcatacagataaaaggaagcattattttagtttatatcactgtattagtaaatgttacattatatagtttatcctaataaaatgtaataatattcacattatataaatagcaagaaatgttttgacttttccctatttagcaaatgacacacactttcttgtatttgaattaattagataattaaaaatgtgatttttaaataaaatttaaaatggca

SEQ ID NO: 10863 - DNA, 2386 bp, Homo sapiens
  source 1..2386: mol_type = unassigned DNA
gggtcattgcagagccagggaggagatggtgaagcagactatccagatattcgcgagggtgaagccccctgtccggaagcaccaacaagggatttattccatagatgaagatgaaaaattaatacctagcttggaaatcatcttaccacgtgatttggcagatgggtttgtgaataataagcgagaaagctacaaatttaaatttcaaagaatttttgatcaggatgcaaaccaagagaccgtttttgaaaacattgccaaaccagttgctgggagtgtcctggcaggttacaatggtaccatctttgcatatgggcaaacaggcagcgggaagacattcactatcacagggggtgcagagcgttacagtgacagaggcattatcccaaggacactgtcatacatttttgaacagttacaaaaggacagcagcaaaatatatacaacacacatttcctatttggaaatctacaatgaatgtggttatgatcttttggatccaagacatgaagcctccagtttggaagatttgccgaaagtgacaatactggaggatcctgatcagaacattcacctgaaaaacttgactctccatcaggcaaccacagaggaagaagctctgaatttgctttttttaggagacaccaaccgaatgattgcagagactcctatgaaccaagcttcaacccgttcccactgcattttcaccattcatttgtcaagcaaggaaccaggatctgcaactgtacgacatgccaaactccatctggttgacctggctggttcagagcgagttgcaaagactggagtagggggccatcttctaacagaggccaagtatatcaacttgtcactacattacttagaacaggttatcattgccctttcagaaaagcaccgttcgcacattccttatagaaactccatgatgaccagtgtcctaagagacagtttgggagggaactgcatgacaactatgattgcaacactctccttggagaaaaggaatcttgatgagtctatatcaacctgcagatttgcacagcgagtggcactcataaagaatgaagctgttcttaatgaagaaattaaccccagattagtgattaaacgcctacaaaaggaaatccaggaactgaaggatgaactggccatggtcactggggagcagaggacagaggcactcacagaagcagagctccttcagctggaaaaactaataacatcctttttggaagaccaggattcagacagtagattagaggttggcgcggatatgcgtaaagttcatcactgttttcatcatttaaagaaactattgaatgacaagaagatccttgaaaacaatacagtctcctctgaaagcaaagaccaagattgtcaagaaccattaaaagaagaagaatatagaaagctacgagatattctgaaacagagagataacgaaatcagtatcctttctgaagtgatgaagaaacttcctctatcctggtttgaaaggggaatgagagaggaaatgtcattaggatgccaggaggcttttgaaatcttcaagagggaccacgctgacagcgttaccatcgatgacaacaaacagattctgaaacagagattttctgaagccaaggccctgggagaaagtataaatgaagcaagaagtaaaattggtcacctgaaggaagaaatcacccagcggcatatacagcaagtagccctaggaatctcggaaaacatggccgtgcctctgatgccagaccagcaggaggagaagctgcgatcacaactggaggaagaaaagagaaggtataaaacaatgttcactcgcctgaaagccctgaaggtggagatcgagcacttgcagctgctcatggacaaagccaaggtgaagctacagaaagagtttgaagtctggtgggcagaggaggccaccaacctgcaggtaaattctccagcagtgaattcactcgatcacacgaagccatttctccagacatctgactcccagcatgaatggtcccaactcctctctaacaaaagttctggaggctgggaagtccaagatcaaggcactggcagattcgatgtctgtgatgtgaatgccaggaaaatcctgccctcgccttgccccagtccacacagccagaaacagagcagcaccagcaccccactggaagacagcatccccaagaggccagtgtcgtccatccctctcaccggagacagccagacggactcggacatcatcgccttcatcaaggccagacagagcattctgcagaagcaatatcttcagctcctttgttctctgttcccaaagtcagctgtctcctctgctcaggcttctacaaacaggaaggggctgagtgatgttttggtaactcgttga

SEQ ID NO: 10864 - DNA, 3304 bp, Homo sapiens
  source 1..3304: mol_type = unassigned DNA
ggcgccgtcggagggagagtagacgtcaggcggagggagggaggcaggcaggcagggaggcagggagggagagagggaaggaagagaaggggagagaaagggggagcaaagaccgaaagagacccagagagatacagcttgagaggagaaataattaaagggggagggcgaccaggaggagaaaaaggtctgggaggaaagagagataaagagaatcggagggcagggaaatgagtttgtgcgcgtgagtgtgcgcgcgcgcgtgtgtgtgtgcaggggcgggcgcgggcgggcggggggcgggctcccgggctcccgggctcccctcctccccagcccgctcctctggctcgctcgccaactccgggccccagccgcgggcgggcgcacggcgggcggacagcatgctgagcctcctcgtctggatcctcactctctccgatactttctcccaaggtaaggacccagacccgcttcagccaggagccagctgaccagacggtggtggctggacagcgggccgtgctcccctgtgtgctgctcaactactctggaattgtgcaatggaccaaggacgggctggccctgggcatgggccagggcctcaaagcctggccacggtaccgggttgtgggctccgcagacgctgggcagtacaacctggagatcacagatgctgagctctctgacgacgcctcttacgagtgccaggccacggaggccgccctgcgctctcggcgggccaaactcaccgtgctcaaccctcctacagtgaccctgtccattgagccacagacggtgcaggagggtgagcgtgttgtctttacctgccaggccacagccaaccccgagatcttgggctacaggtgggccaaagggggtttcttgattgaagacgcccacgagagtcgctatgagacaaatgtggattattcctttttcacggagcctgtgtcttgtgaggttcacaacaaagtgggaagcaccaatgtcagcactttagtaaatgtccactttgctccccggattgtagttgaccccaaacccacaaccacagacattggctctgatgtgacccttacctgtgtctgggttgggaatccccccctcactctcacctggaccaaaaaggactcaaatatggtcctgagtaacagcaaccagctgctgctgaagtcggtgactcaggcagacgctggcacctacacctgccgggccatcgtgcctcgaatcggagtggctgagcgggaggtgccgctctatgtgaacgggccccccatcatctccagtgaggcagtgcagtatgctgtgaggggtgacggtggcaaggtggagtgtttcattgggagcacaccacccccagaccgcatagcatgggcctggaaggagaacttcttggaggtggggaccctggaacgctatacagtggagaggaccaactcaggcagtggggtgctatccacgctcaccatcaacaatgtcatggaggccgactttcagactcactacaactgcaccgcctggaacagcttcgggccaggcacagccatcatccagctggaagagcgagaggtgttacctgtgggcatcatagctggggccaccatcggcgcgagcatcctgctcatcttcttcttcatcgccttggtattcttcctctaccggcgccgcaaaggcagtcgcaaagacgtgaccctgaggaagctggatatcaaggtggagacagtgaaccgagagccacttacgatgcattctgaccgggaggatgacaccgccagcgtctccacagcaacccgggtcatgaaggccatctactcgtcgtttaaggatgatgtggatctgaagcaggacctgcgctgcgacaccatcgacacccgggaggagtatgagatgaaggaccccaccaatggctactacaacgtgcgtgcccatgaagaccgcccgtcttccagggcagtgctctatgctgactaccgtgcccctggccctgcccgcttcgacggccgcccctcatcccgtctctcccactccagcggctatgcccagctcaacacctatagccggggccctgcctctgactatggccctgagcccacaccccctggccctgctgccccagctggcactgacacaaccagccagctgtcctacgagaactatgagaagttcaactcccatcccttccctggggcagctgggtaccccacctaccgactgggctacccccaggccccaccctctggcctggagcggaccccatatgaggcgtatgaccccattggcaagtacgccacagccactcgattctcctacacctcccagcactcggactacggccagcgattccagcagcgcatgcagactcacgtgtaggggccagagcctggctggggcatctctgcggggcagaggagaaggctttcacagctgttccctgatattcaggggcattgctcattgctcccttctcggaccagccttcttcctcccaccatggcaggtggggagcaggtctcccagaaacaccccgtcccgaggatggtgctctgtgcatgccccagcctcctgggcctgcccttccctcttcttcgggaggatgtgtctcttctgacctgcactcttgcctgaccctagaatggggacagggaaagtgaaggttagggaaagcagaggggggcactttttagcattccctttctatcccacccctctgatctcccataagtggaaatgggggtacccagggatgggcaggctttggcctagggacatgaagtatgggagtgggtggctgtggcacagacaggtggaaaacgggatagcctggccagtccctctgttgtctgcattcgtgccctgggtgcctctctccttcctcagggtactgcagaagggagcgaacagggtactgttcgctcttgtctacagaacagccctggcactgcattcaaatccagtcttcattcagctgggatcaaaatgccagtcaccttggctacccactgtggacagctgtctgtcagcatgcagagggatccaggaatccccccggcagcacggcccgctttccttctcctccatgctgggccagccagataagtcagggtcctggtggagaaagaaaggctaggaccatgtcctcattgacccagatactgctgtgtgctgcacagcagtgaaccaacactagagggagccacacaagcctcctctccccagtctgccccacttcctggctttaactcttgagctggtttggggagtggtgaggtaggggtgggggtgctgtaggctctttttcaaa

SEQ ID NO: 10865 - DNA, 2874 bp, Homo sapiens
  source 1..2874: mol_type = unassigned DNA
ccgctcctctggctcgctcgccaactccgggccccagccgcgggcgggcgcacggcgggcggacagcatgctgagcctcctcgtctggatcctcactctctccgatactttctcccaagggacccagacccgcttcagccaggagccagctgaccagacggtggtggctggacagcgggccgtgctcccctgtgtgctgctcaactactctggaattgtgcaatggaccaaggacgggctggccctgggcatgggccagggcctcaaagcctggccacggtaccgggttgtgggctccgcagacgctgggcagtacaacctggagatcacagatgctgagctctctgacgacgcctcttacgagtgccaggccacggaggccgccctgcgctctcggcgggccaaactcaccgtgctcatccccccagaggacaccaggattgacggaggccctgtgattctactgcaggcaggcaccccccacaacctcacatgccgggccttcaatgcgaagcctgctgccaccatcatctggttccgggacgggacgcagcaggagggcgctgtggccagcacggaattgctgaaggatgggaagagggagaccaccgtgagccaactgcttattaaccccacggacctggacatagggcgtgtcttcacttgccgaagcatgaacgaagccatccctagtggcaaggagacttccatcgagctggatgtgcaccaccctcctacagtgaccctgtccattgagccacagacggtgcaggagggtgagcgtgttgtctttacctgccaggccacagccaaccccgagatcttgggctacaggtgggccaaagggggtttcttgattgaagacgcccacgagagtcgctatgagacaaatgtggattattcctttttcacggagcctgtgtcttgtgaggttcacaacaaagtgggaagcaccaatgtcagcactttagtaaatgtccactttgctccccggattgtagttgaccccaaacccacaaccacagacattggctctgatgtgacccttacctgtgtctgggttgggaatccccccctcactctcacctggaccaaaaaggactcaaatatggtcctgagtaacagcaaccagctgctgctgaagtcggtgactcaggcagacgctggcacctacacctgccgggccatcgtgcctcgaatcggagtggctgagcgggaggtgccgctctatgtgaacgggccccccatcatctccagtgaggcagtgcagtatgctgtgaggggtgacggtggcaaggtggagtgtttcattgggagcacaccacccccagaccgcatagcatgggcctggaaggagaacttcttggaggtggggaccctggaacgctatacagtggagaggaccaactcaggcagtggggtgctatccacgctcaccatcaacaatgtcatggaggccgactttcagactcactacaactgcaccgcctggaacagcttcgggccaggcacagccatcatccagctggaagagcgagaggtgttacctgtgggcatcatagctggggccaccatcggcgcgagcatcctgctcatcttcttcttcatcgccttggtattcttcctctaccggcgccgcaaaggcagtcgcaaagacgtgaccctgaggaagctggatatcaaggtggagacagtgaaccgagagccacttacgatgcattctgaccgggaggatgacaccgccagcgtctccacagcaacccgggtcatgaaggccatctactcgtcgtttaaggatgatgtggatctgaagcaggacctgcgctgcgacaccatcgacacccgggaggagtatgagatgaaggaccccaccaatggctactacaacgtgcgtgcccatgaagaccgcccgtcttccagggcagtgctctatgctgactaccgtgcccctggccctgcccgcttcgacggccgcccctcatcccgtctctcccactccagcggctatgcccagctcaacacctatagccggggccctgcctctgactatggccctgagcccacaccccctggccctgctgccccagctggcactgacacaaccagccagctgtcctacgagaactatgagaagttcaactcccatcccttccctggggcagctgggtaccccacctaccgactgggctacccccaggccccaccctctggcctggagcggaccccatatgaggcgtatgaccccattggcaagtacgccacagccactcgattctcctacacctcccagcactcggactacggccagcgattccagcagcgcatgcagactcacgtgtaggggccagagcctggctggggcatctctgcggggcagaggagaaggctttcacagctgttccctgatattcaggggcattgctcattgctcccttctcggaccagccttcttcctcccaccatggcaggtggggagcaggtctcccagaaacaccccgtcccgaggatggtgctctgtgcatgccccagcctcctgggcctgcccttccctcttcttcgggaggatgtgtctcttctgacctgcactcttgcctgaccctagaatggggacagggaaagtgaaggttagggaaagcagaggggggcactttttagcattccctttctatcccacccctctgatctcccataagtggaaatgggggtacccagggatgggcaggctttggcctagggacatgaagtatgggagtgggtggctgtggcacagacaggtggaaaacgggatagcctggccagtccctctgttgtctgcattcgtgccctgggtgcctctctccttcctcagggtactgcagaagggagcgaacaggg

SEQ ID NO: 10866 - DNA, 6870 bp, Homo sapiens
  source 1..6870: mol_type = unassigned DNA
acttgccgaagcatgaacgaagccatccctagtggcaaggagacttccatcgagctggatgtgcaccaccctcctacagtgaccctgtccattgagccacagacggtgcaggagggtgagcgtgttgtctttacctgccaggccacagccaaccccgagatcttgggctacaggtgggccaaagggggtttcttgattgaagacgcccacgagagtcgctatgagacaaatgtggattattcctttttcacggagcctgtgtcttgtgaggttcacaacaaagtgggaagcaccaatgtcagcactttagtaaatgtccactttgctccccggattgtagttgaccccaaacccacaaccacagacattggctctgatgtgacccttacctgtgtctgggttgggaatccccccctcactctcacctggaccaaaaaggactcaaatatggggcccaggcctcctggctccccacccgaggctgctctctctgcccaggtcctgagtaacagcaaccagctgctgctgaagtcggtgactcaggcagacgctggcacctacacctgccgggccatcgtgcctcgaatcggagtggctgagcgggaggtgccgctctatgtgaacgggccccccatcatctccagtgaggcagtgcagtatgctgtgaggggtgacggtggcaaggtggagtgtttcattgggagcacaccacccccagaccgcatagcatgggcctggaaggagaacttcttggaggtggggaccctggaacgctatacagtggagaggaccaactcaggcagtggggtgctatccacgctcaccatcaacaatgtcatggaggccgactttcagactcactacaactgcaccgcctggaacagcttcgggccaggcacagccatcatccagctggaagagcgagaggtgttacctgtgggcatcatagctggggccaccatcggcgcgagcatcctgctcatcttcttcttcatcgccttggtattcttcctctaccggcgccgcaaaggcagtcgcaaagacgtgaccctgaggaagctggatatcaaggtggagacagtgaaccgagagccacttacgatgcattctgaccgggaggatgacaccgccagcgtctccacagcaacccgggtcatgaaggccatctactcgtcgtttaaggatgatgtggatctgaagcaggacctgcgctgcgacaccatcgacacccgggaggagtatgagatgaaggaccccaccaatggctactacaacgtgcgtgcccatgaagaccgcccgtcttccagggcagtgctctatgctgactaccgtgcccctggccctgcccgcttcgacggccgcccctcatcccgtctctcccactccagcggctatgcccagctcaacacctatagccggggccctgcctctgactatggccctgagcccacaccccctggccctgctgccccagctggcactgacacaaccagccagctgtcctacgagaactatgagaagttcaactcccatcccttccctggggcagctgggtaccccacctaccgactgggctacccccaggccccaccctctggcctggagcggaccccatatgaggcgtatgaccccattggcaagtacgccacagccactcgattctcctacacctcccagcactcggactacggccagcgattccagcagcgcatgcagactcacgtgtaggggccagagcctggctggggcatctctgcggggcagaggagaaggctttcacagctgttccctgatattcaggggcattgctcattgctcccttctcggaccagccttcttcctcccaccatggcaggtggggagcaggtctcccagaaacaccccgtcccgaggatggtgctctgtgcatgccccagcctcctgggcctgcccttccctcttcttcgggaggatgtgtctcttctgacctgcactcttgcctgaccctagaatggggacagggaaagtgaaggttagggaaagcagaggggggcactttttagcattccctttctatcccacccctctgatctcccataagtggaaatgggggtacccagggatgggcaggctttggcctagggacatgaagtatgggagtgggtggctgtggcacagacaggtggaaaacgggatagcctggccagtccctctgttgtctgcattcgtgccctgggtgcctctctccttcctcagggtactgcagaagggagcgaacagggtactgttcgctcttgtctacagaacagccctggcactgcattcaaatccagtcttcattcagctgggatcaaaatgccagtcaccttggctacccactgtggacagctgtctgtcagcatgcagagggatccaggaatccccccggcagcacggcccgctttccttctcctccatgctgggccagccagataagtcagggtcctggtggagaaagaaaggctaggaccatgtcctcattgacccagatactgctgtgtgctgcacagcagtgaaccaacactagagggagccacacaagcctcctctccccagtctgccccacttcctggctttaactcttgagctggtttggggagtggtgaggtaggggtgggggtgctgtaggctctttttcaaagaaaacaaaaaacaatgaaaacctcatttgggaagaaaagctgtagggattcccccacccaaatacaagtcccagtggaaaggaaaggtagtacctattcttctccatggggttcctaacaccctccattactctttcagtctccaagcactttgaatccatttttaaacattcaggttgccagacctgtcacacagtggactctgatagggttacggagggggcctggctctcagtctctactctcctatgtcccatcagttggttggaggccaccttccagggggtatgggagacaggttttggtttttaagtgtcttttttttttttcttggaccaatcagattccttcttccactttcagtgccttgagtgtcaagctttggatgaccgaccctatgtgggcggttgtgtggggagtgggtacttgtgagcctcggacacactgttaagtgttacagtgttaggagagagatgggtgaggggacctggagaggtaaggggcctggaaatggccctgacagagaacttgtgctgaccgggagaaggtggtgcggaagggcaccgcaggcattacacaggccatttctcctcctccatgtgcacgcacatccaacacacaccttccatgtgactgcttctcagccaccactttctgaccaaagagaacaggcgctccaaggagaacctgtacccctgccccagcctcgccttcctaaaaagcagtgtctggagttggctgtttcccgcctccccagctgcatgtccagcccagtgggagacagggcctctggtgcagttcccaaaatgttcctcgccctttctccgtggtcaccattcataattcatgttcgctttaatgagttacatgcttatcagccacaggccattaccacccttatggatgggtctggggggcgacattcctggccaaccccttgtaggaaggaccagataatacccaggaagcaagtagctctaattttaacttcacaggaagtctgtgcatcctccttcatttcagcagggaaaactcctgtggagtgggccctatctggggcatttacaggcttccagctgtattccatccctggaagctgatacctttctatagagtccttttatgagagctcagtgggaaggtctgtcaagaaattcaggttcttgtacagacaaattcatgcaaatttctattattttcacaaaaaccagaaaccatgggggaatccaaagacttgaagtctaaagatggtggcttttaaaacatgcatattccaaaaagaattcatttttgttttgggtttggctagattctcttatttatccccttttagcttaagtattagtttcattctactgaaatgatggagagagggcctaaggttactaggtaattgagctgatggtgcagggagaattgttgagaaaggaagcctagtttccagaagcctgacacagagctacttcactgtcctctactccttaacaaggtaactggagcctcttgggtgtcaaacaagcaccctggaaggcacagggaagcatcagcaaccaaggtagtctctgccctctgtaacttacgtgttggtgcatcagaatctgaattggaacctacctgatgggcccagtggaatagcttttctggggagtggaaggcgtccttgatcacagagctttgctgtcgaatcctggagtcctgcaacatggtgatgcctcagtagttggtgatcctgatcacctttggtggcttgttttagtggaaagagcaagggactaaaggtcaggagacccaggacccagtcctgaagctgcaaaggttagatctcggcctaactttctgttcattgcccccaatttgtctggcctgtaaaatgaagggggagggttgcataaacctaaaactattctggttttgttatacccatagggttgggggtagggatgggactgcccattgctggcaaggaactgggaacagtagcaagcatggtgagggctggagagctggctgggggggttctctcctgttcaaagaagctttcaccatgggcttcattatcttgtcagaagtgaattagtttccaccagggacccctttatcccaaacagcaacacaaaatacaccctaaacctcagagtaaaattgatgtggggctatcctttggctatcgggtcatctgtgctgctccccactcatttctgatgggtttgcaaaggtgccttttgccagggcaggacatagtatgcacatagggatattgttatgtgcctaggtttcaggcactccttctgtaggggaaaatgggaggagccttcctccaccctgatccttaggaacattcctctggcccagggacagcttgttcttctcaccaaacaggtgaagcctgcagtccaaggtgcctggagccagaggtcggggagtaagcacagctgcccctgcctgagaaggagcagcttgcaaggggagccggtggagggaaaggggtacaacagctttggaatacattctggatcttgaggaggatcttgtgattttggctgagccacggtcacttccctcgtgaaggacccgccctatatcctaaattctggatccctcaaagtccagccacagagtttgcatgaagcaaaaagcctagtaagtgagaaaggaaaggggccagggatgggagcagtgctgtgctgttatcactgtcttgcttggaatgaaaacatctgagcaccctgtcttcaagcggtacgctctccccttattccagcagggctactttcctcttcactctgatgaggggagctttatctgctttcaaaatggagcacgtcgcactggagtttcgtgccctctcgttaacctgtcaggagccacagggctccataaaacggaatcagtgtctcaatatacatgacctatgttcatagcaatgttcagccatttgggtttgaagaaaaccacattaaagccaagacccgtttggagcgaactgccttgttctttgctgtgtggaaggttctgtccctactgctgaactccagttcctccccaagcaccctggcctcagaaatcctggcttccccaagttagtgctgtctgacctgagccaggccactgcttggtgcctctacaggccactgtgcatgttgagaattgcccaaaaggattagtgaagctcctgaccctggcgaggccataatgaacactgaagtgcacaggccaagggatgtaattgaaaggcatttatttttgtgaagatgctgtaaaattagcatttaaatatcccattcccttctcttggcctcctcctatccccctatggtatttctcctcctctcctcaaggccaggctttttgtgaaaggcattggctcatctttgtcagcgtggtcctgacgttcacctctgggctgctggagaggactgagagatgtgtggtttggtaggaagggggtgtgtgtgggggttagtggggaatcccatttttttgcatcactgtgaggtagcttcaggccctgtccctggagaaataattgctgcgcagaagtcacaggccatactgggcagttctggtacaaacctgcccttattaataataacaataataataataactccatttgcatagaactgtcactcattcctgccagtctgctgtccctaccctggttttttgctggccccaaccactggccttgttgagtatcgatgggccctgagctcttctgtttgcttttggagctcttcagatgctgtcccccctgagaataccctaactctggggaaagagcagccaaaatcccaatacagtaaaactccacacaatcttgttagcaacagtgacccagaaaattttgagaagtccaatttcaccagaagaggcccagggctccctgtggtcacattttctacccagccattcttggcattgcaacctccatttctagctcctgttgaattttctccacccagaccccaaaaataaatggatccatgatgataattaagagaagagaaaaaaagatattatttttgttaggacaaaccattgtaggtttttagcaatgtgtatctgtgtgtccctcacaccttttcctattctacttttttttcctttttttaaaaatattatgtactatatttttagtctcaaacacactatatattatatatatttaatttttttatatatataaatataaatgttttaaaaagta

SEQ ID NO: 10867 - DNA, 7519 bp, Homo sapiens
  source 1..7519: mol_type = unassigned DNA
ggcgccgtcggagggagagtagacgtcaggcggagggagggaggcaggcaggcagggaggcagggagggagagagggaaggaagagaaggggagagaaagggggagcaaagaccgaaagagacccagagagatacagcttgagaggagaaataattaaagggggagggcgaccaggaggagaaaaaggtctgggaggaaagagagataaagagaatcggagggcagggaaatgagtttgtgcgcgtgagtgtgcgcgcgcgcgtgtgtgtgtgcaggggcgggcgcgggcgggcggggggcgggctcccgggctcccgggctcccctcctccccagcccgctcctctggctcgctcgccaactccgggccccagccgcgggcgggcgcacggcgggcggacagcatgctgagcctcctcgtctggatcctcactctctccgatactttctcccaagtccccccagaggacaccaggattgacggaggccctgtgattctactgcaggcaggcaccccccacaacctcacatgccgggccttcaatgcgaagcctgctgccaccatcatctggttccgggacgggacgcagcaggagggcgctgtggccagcacggaattgctgaaggatgggaagagggagaccaccgtgagccaactgcttattaaccccacggacctggacatagggcgtgtcttcacttgccgaagcatgaacgaagccatccctagtggcaaggagacttccatcgagctggatgtgcaccaccctcctacagtgaccctgtccattgagccacagacggtgcaggagggtgagcgtgttgtctttacctgccaggccacagccaaccccgagatcttgggctacaggtgggccaaagggggtttcttgattgaagacgcccacgagagtcgctatgagacaaatgtggattattcctttttcacggagcctgtgtcttgtgaggttcacaacaaagtgggaagcaccaatgtcagcactttagtaaatgtccactttgctccccggattgtagttgaccccaaacccacaaccacagacattggctctgatgtgacccttacctgtgtctgggttgggaatccccccctcactctcacctggaccaaaaaggactcaaatatggtcctgagtaacagcaaccagctgctgctgaagtcggtgactcaggcagacgctggcacctacacctgccgggccatcgtgcctcgaatcggagtggctgagcgggaggtgccgctctatgtgaacgggccccccatcatctccagtgaggcagtgcagtatgctgtgaggggtgacggtggcaaggtggagtgtttcattgggagcacaccacccccagaccgcatagcatgggcctggaaggagaacttcttggaggtggggaccctggaacgctatacagtggagaggaccaactcaggcagtggggtgctatccacgctcaccatcaacaatgtcatggaggccgactttcagactcactacaactgcaccgcctggaacagcttcgggccaggcacagccatcatccagctggaagagcgagaggtgttacctgtgggcatcatagctggggccaccatcggcgcgagcatcctgctcatcttcttcttcatcgccttggtattcttcctctaccggcgccgcaaaggcagtcgcaaagacgtgaccctgaggaagctggatatcaaggtggagacagtgaaccgagagccacttacgatgcattctgaccgggaggatgacaccgccagcgtctccacagcaacccgggtcatgaaggccatctactcgtcgtttaaggatgatgtggatctgaagcaggacctgcgctgcgacaccatcgacacccgggaggagtatgagatgaaggaccccaccaatggctactacaacgtgcgtgcccatgaagaccgcccgtcttccagggcagtgctctatgctgactaccgtgcccctggccctgcccgcttcgacggccgcccctcatcccgtctctcccactccagcggctatgcccagctcaacacctatagccggggccctgcctctgactatggccctgagcccacaccccctggccctgctgccccagctggcactgacacaaccagccagctgtcctacgagaactatgagaagttcaactcccatcccttccctggggcagctgggtaccccacctaccgactgggctacccccaggccccaccctctggcctggagcggaccccatatgaggcgtatgaccccattggcaagtacgccacagccactcgattctcctacacctcccagcactcggactacggccagcgattccagcagcgcatgcagactcacgtgtaggggccagagcctggctggggcatctctgcggggcagaggagaaggctttcacagctgttccctgatattcaggggcattgctcattgctcccttctcggaccagccttcttcctcccaccatggcaggtggggagcaggtctcccagaaacaccccgtcccgaggatggtgctctgtgcatgccccagcctcctgggcctgcccttccctcttcttcgggaggatgtgtctcttctgacctgcactcttgcctgaccctagaatggggacagggaaagtgaaggttagggaaagcagaggggggcactttttagcattccctttctatcccacccctctgatctcccataagtggaaatgggggtacccagggatgggcaggctttggcctagggacatgaagtatgggagtgggtggctgtggcacagacaggtggaaaacgggatagcctggccagtccctctgttgtctgcattcgtgccctgggtgcctctctccttcctcagggtactgcagaagggagcgaacagggtactgttcgctcttgtctacagaacagccctggcactgcattcaaatccagtcttcattcagctgggatcaaaatgccagtcaccttggctacccactgtggacagctgtctgtcagcatgcagagggatccaggaatccccccggcagcacggcccgctttccttctcctccatgctgggccagccagataagtcagggtcctggtggagaaagaaaggctaggaccatgtcctcattgacccagatactgctgtgtgctgcacagcagtgaaccaacactagagggagccacacaagcctcctctccccagtctgccccacttcctggctttaactcttgagctggtttggggagtggtgaggtaggggtgggggtgctgtaggctctttttcaaagaaaacaaaaaacaatgaaaacctcatttgggaagaaaagctgtagggattcccccacccaaatacaagtcccagtggaaaggaaaggtagtacctattcttctccatggggttcctaacaccctccattactctttcagtctccaagcactttgaatccatttttaaacattcaggttgccagacctgtcacacagtggactctgatagggttacggagggggcctggctctcagtctctactctcctatgtcccatcagttggttggaggccaccttccagggggtatgggagacaggttttggtttttaagtgtcttttttttttttcttggaccaatcagattccttcttccactttcagtgccttgagtgtcaagctttggatgaccgaccctatgtgggcggttgtgtggggagtgggtacttgtgagcctcggacacactgttaagtgttacagtgttaggagagagatgggtgaggggacctggagaggtaaggggcctggaaatggccctgacagagaacttgtgctgaccgggagaaggtggtgcggaagggcaccgcaggcattacacaggccatttctcctcctccatgtgcacgcacatccaacacacaccttccatgtgactgcttctcagccaccactttctgaccaaagagaacaggcgctccaaggagaacctgtacccctgccccagcctcgccttcctaaaaagcagtgtctggagttggctgtttcccgcctccccagctgcatgtccagcccagtgggagacagggcctctggtgcagttcccaaaatgttcctcgccctttctccgtggtcaccattcataattcatgttcgctttaatgagttacatgcttatcagccacaggccattaccacccttatggatgggtctggggggcgacattcctggccaaccccttgtaggaaggaccagataatacccaggaagcaagtagctctaattttaacttcacaggaagtctgtgcatcctccttcatttcagcagggaaaactcctgtggagtgggccctatctggggcatttacaggcttccagctgtattccatccctggaagctgatacctttctatagagtccttttatgagagctcagtgggaaggtctgtcaagaaattcaggttcttgtacagacaaattcatgcaaatttctattattttcacaaaaaccagaaaccatgggggaatccaaagacttgaagtctaaagatggtggcttttaaaacatgcatattccaaaaagaattcatttttgttttgggtttggctagattctcttatttatccccttttagcttaagtattagtttcattctactgaaatgatggagagagggcctaaggttactaggtaattgagctgatggtgcagggagaattgttgagaaaggaagcctagtttccagaagcctgacacagagctacttcactgtcctctactccttaacaaggtaactggagcctcttgggtgtcaaacaagcaccctggaaggcacagggaagcatcagcaaccaaggtagtctctgccctctgtaacttacgtgttggtgcatcagaatctgaattggaacctacctgatgggcccagtggaatagcttttctggggagtggaaggcgtccttgatcacagagctttgctgtcgaatcctggagtcctgcaacatggtgatgcctcagtagttggtgatcctgatcacctttggtggcttgttttagtggaaagagcaagggactaaaggtcaggagacccaggacccagtcctgaagctgcaaaggttagatctcggcctaactttctgttcattgcccccaatttgtctggcctgtaaaatgaagggggagggttgcataaacctaaaactattctggttttgttatacccatagggttgggggtagggatgggactgcccattgctggcaaggaactgggaacagtagcaagcatggtgagggctggagagctggctgggggggttctctcctgttcaaagaagctttcaccatgggcttcattatcttgtcagaagtgaattagtttccaccagggacccctttatcccaaacagcaacacaaaatacaccctaaacctcagagtaaaattgatgtggggctatcctttggctatcgggtcatctgtgctgctccccactcatttctgatgggtttgcaaaggtgccttttgccagggcaggacatagtatgcacatagggatattgttatgtgcctaggtttcaggcactccttctgtaggggaaaatgggaggagccttcctccaccctgatccttaggaacattcctctggcccagggacagcttgttcttctcaccaaacaggtgaagcctgcagtccaaggtgcctggagccagaggtcggggagtaagcacagctgcccctgcctgagaaggagcagcttgcaaggggagccggtggagggaaaggggtacaacagctttggaatacattctggatcttgaggaggatcttgtgattttggctgagccacggtcacttccctcgtgaaggacccgccctatatcctaaattctggatccctcaaagtccagccacagagtttgcatgaagcaaaaagcctagtaagtgagaaaggaaaggggccagggatgggagcagtgctgtgctgttatcactgtcttgcttggaatgaaaacatctgagcaccctgtcttcaagcggtacgctctccccttattccagcagggctactttcctcttcactctgatgaggggagctttatctgctttcaaaatggagcacgtcgcactggagtttcgtgccctctcgttaacctgtcaggagccacagggctccataaaacggaatcagtgtctcaatatacatgacctatgttcatagcaatgttcagccatttgggtttgaagaaaaccacattaaagccaagacccgtttggagcgaactgccttgttctttgctgtgtggaaggttctgtccctactgctgaactccagttcctccccaagcaccctggcctcagaaatcctggcttccccaagttagtgctgtctgacctgagccaggccactgcttggtgcctctacaggccactgtgcatgttgagaattgcccaaaaggattagtgaagctcctgaccctggcgaggccataatgaacactgaagtgcacaggccaagggatgtaattgaaaggcatttatttttgtgaagatgctgtaaaattagcatttaaatatcccattcccttctcttggcctcctcctatccccctatggtatttctcctcctctcctcaaggccaggctttttgtgaaaggcattggctcatctttgtcagcgtggtcctgacgttcacctctgggctgctggagaggactgagagatgtgtggtttggtaggaagggggtgtgtgtgggggttagtggggaatcccatttttttgcatcactgtgaggtagcttcaggccctgtccctggagaaataattgctgcgcagaagtcacaggccatactgggcagttctggtacaaacctgcccttattaataataacaataataataataactccatttgcatagaactgtcactcattcctgccagtctgctgtccctaccctggttttttgctggccccaaccactggccttgttgagtatcgatgggccctgagctcttctgtttgcttttggagctcttcagatgctgtcccccctgagaataccctaactctggggaaagagcagccaaaatcccaatacagtaaaactccacacaatcttgttagcaacagtgacccagaaaattttgagaagtccaatttcaccagaagaggcccagggctccctgtggtcacattttctacccagccattcttggcattgcaacctccatttctagctcctgttgaattttctccacccagaccccaaaaataaatggatccatgatgataattaagagaagagaaaaaaagatattatttttgttaggacaaaccattgtaggtttttagcaatgtgtatctgtgtgtccctcacaccttttcctattctacttttttttcctttttttaaaaatattatgtactatatttttagtctcaaacacactatatattatatatatttaatttttttatatatataaatataaatgttttaaaaagt

SEQ ID NO: 10868 - DNA, 3470 bp, Homo sapiens
  source 1..3470: mol_type = unassigned DNA
cgctcgcggctctgggggctcggctttgccgcgctcgctgcacttgggcgagagctggaacgtggaccagagctcggatcccatcgcagctaccgcgatgagaggcgctcgcggcgcctgggattttctctgcgttctgctcctactgcttcgcgtccagacaggctcttctcaaccatctgtgagtccaggggaaccgtctccaccatccatccatccaggaaaatcagacttaatagtccgcgtgggcgacgagattaggctgttatgcactgatccgggctttgtcaaatggacttttgagatcctggatgaaacgaatgagaataagcagaatgaatggatcacggaaaaggcagaagccaccaacaccggcaaatacacgtgcaccaacaaacacggcttaagcaattccatttatgtgtttgttagagatcctgccaagcttttccttgttgaccgctccttgtatgggaaagaagacaacgacacgctggtccgctgtcctctcacagacccagaagtgaccaattattccctcaaggggtgccaggggaagcctcttcccaaggacttgaggtttattcctgaccccaaggcgggcatcatgatcaaaagtgtgaaacgcgcctaccatcggctctgtctgcattgttctgtggaccaggagggcaagtcagtgctgtcggaaaaattcatcctgaaagtgaggccagccttcaaagctgtgcctgttgtgtctgtgtccaaagcaagctatcttcttagggaaggggaagaattcacagtgacgtgcacaataaaagatgtgtctagttctgtgtactcaacgtggaaaagagaaaacagtcagactaaactacaggagaaatataatagctggcatcacggtgacttcaattatgaacgtcaggcaacgttgactatcagttcagcgagagttaatgattctggagtgttcatgtgttatgccaataatacttttggatcagcaaatgtcacaacaaccttggaagtagtagataaaggattcattaatatcttccccatgataaacactacagtatttgtaaacgatggagaaaatgtagatttgattgttgaatatgaagcattccccaaacctgaacaccagcagtggatctatatgaacagaaccttcactgataaatgggaagattatcccaagtctgagaatgaaagtaatatcagatacgtaagtgaacttcatctaacgagattaaaaggcaccgaaggaggcacttacacattcctagtgtccaattctgacgtcaatgctgccatagcatttaatgtttatgtgaatacaaaaccagaaatcctgacttacgacaggctcgtgaatggcatgctccaatgtgtggcagcaggattcccagagcccacaatagattggtatttttgtccaggaactgagcagagatgctctgcttctgtactgccagtggatgtgcagacactaaactcatctgggccaccgtttggaaagctagtggttcagagttctatagattctagtgcattcaagcacaatggcacggttgaatgtaaggcttacaacgatgtgggcaagacttctgcctattttaactttgcatttaaagagcaaatccatccccacaccctgttcactcctttgctgattggtttcgtaatcgtagctggcatgatgtgcattattgtgatgattctgacctacaaatatttacagaaacccatgtatgaagtacagtggaaggttgttgaggagataaatggaaacaattatgtttacatagacccaacacaacttccttatgatcacaaatgggagtttcccagaaacaggctgagttttgggaaaaccctgggtgctggagctttcgggaaggttgttgaggcaactgcttatggcttaattaagtcagatgcggccatgactgtcgctgtaaagatgctcaagccgagtgcccatttgacagaacgggaagccctcatgtctgaactcaaagtcctgagttaccttggtaatcacatgaatattgtgaatctacttggagcctgcaccattggagggcccaccctggtcattacagaatattgttgctatggtgatcttttgaattttttgagaagaaaacgtgattcatttatttgttcaaagcaggaagatcatgcagaagctgcactttataagaatcttctgcattcaaaggagtcttcctgcagcgatagtactaatgagtacatggacatgaaacctggagtttcttatgttgtcccaaccaaggccgacaaaaggagatctgtgagaataggctcatacatagaaagagatgtgactcccgccatcatggaggatgacgagttggccctagacttagaagacttgctgagcttttcttaccaggtggcaaagggcatggctttcctcgcctccaagaattgtattcacagagacttggcagccagaaatatcctccttactcatggtcggatcacaaagatttgtgattttggtctagccagagacatcaagaatgattctaattatgtggttaaaggaaacgctcgactacctgtgaagtggatggcacctgaaagcattttcaactgtgtatacacgtttgaaagtgacgtctggtcctatgggatttttctttgggagctgttctctttaggaagcagcccctatcctggaatgccggtcgattctaagttctacaagatgatcaaggaaggcttccggatgctcagccctgaacacgcacctgctgaaatgtatgacataatgaagacttgctgggatgcagatcccctaaaaagaccaacattcaagcaaattgttcagctaattgagaagcagatttcagagagcaccaatcatatttactccaacttagcaaactgcagccccaaccgacagaagcccgtggtagaccattctgtgcggatcaattctgtcggcagcaccgcttcctcctcccagcctctgcttgtgcacgacgatgtctgagcagaatcagtgtttgggtcacccctccaggaatgatctcttcttttggcttccatgatggttattttcttttctttcaacttgcatccaactccaggatagtgggcaccccactgcaatcctgtctttctgagcacactttagtggccgatgatttttgtcatcagccaccatcctattgcaaaggttccaactgtatatattcccaatagcaacgtagcttctaccatgaacagaaaacattctgatttggaaaaagagagggaggtatggactgggggccagagtcctttccaaggcttctccaattctgcccaaaaatatggttgatagtttacctgaataaatggtagtaatcacagttggccttcagaaccatccatagtagtatgatgatacaagattagaagctgaaaacctaagtcctttatgtggaaaacagaacatcattaga

SEQ ID NO: 10869 - DNA, 5186 bp, Homo sapiens
  source 1..5186: mol_type = unassigned DNA
cgctcgcggctctgggggctcggctttgccgcgctcgctgcacttgggcgagagctggaacgtggaccagagctcggatcccatcgcagctaccgcgatgagaggcgctcgcggcgcctgggattttctctgcgttctgctcctactgcttcgcgtccagacaggctcttctcaaccatctgtgagtccaggggaaccgtctccaccatccatccatccaggaaaatcagacttaatagtccgcgtgggcgacgagattaggctgttatgcactgatccgggctttgtcaaatggacttttgagatcctggatgaaacgaatgagaataagcagaatgaatggatcacggaaaaggcagaagccaccaacaccggcaaatacacgtgcaccaacaaacacggcttaagcaattccatttatgtgtttgttagagatcctgccaagcttttccttgttgaccgctccttgtatgggaaagaagacaacgacacgctggtccgctgtcctctcacagacccagaagtgaccaattattccctcaaggggtgccaggggaagcctcttcccaaggacttgaggtttattcctgaccccaaggcgggcatcatgatcaaaagtgtgaaacgcgcctaccatcggctctgtctgcattgttctgtggaccaggagggcaagtcagtgctgtcggaaaaattcatcctgaaagtgaggccagccttcaaagctgtgcctgttgtgtctgtgtccaaagcaagctatcttcttagggaaggggaagaattcacagtgacgtgcacaataaaagatgtgtctagttctgtgtactcaacgtggaaaagagaaaacagtcagactaaactacaggagaaatataatagctggcatcacggtgacttcaattatgaacgtcaggcaacgttgactatcagttcagcgagagttaatgattctggagtgttcatgtgttatgccaataatacttttggatcagcaaatgtcacaacaaccttggaagtagtagataaaggattcattaatatcttccccatgataaacactacagtatttgtaaacgatggagaaaatgtagatttgattgttgaatatgaagcattccccaaacctgaacaccagcagtggatctatatgaacagaaccttcactgataaatgggaagattatcccaagtctgagaatgaaagtaatatcagatacgtaagtgaacttcatctaacgagattaaaaggcaccgaaggaggcacttacacattcctagtgtccaattctgacgtcaatgctgccatagcatttaatgtttatgtgaatacaaaaccagaaatcctgacttacgacaggctcgtgaatggcatgctccaatgtgtggcagcaggattcccagagcccacaatagattggtatttttgtccaggaactgagcagagatgctctgcttctgtactgccagtggatgtgcagacactaaactcatctgggccaccgtttggaaagctagtggttcagagttctatagattctagtgcattcaagcacaatggcacggttgaatgtaaggcttacaacgatgtgggcaagacttctgcctattttaactttgcatttaaaggtaacaacaaagagcaaatccatccccacaccctgttcactcctttgctgattggtttcgtaatcgtagctggcatgatgtgcattattgtgatgattctgacctacaaatatttacagaaacccatgtatgaagtacagtggaaggttgttgaggagataaatggaaacaattatgtttacatagacccaacacaacttccttatgatcacaaatgggagtttcccagaaacaggctgagttttgggaaaaccctgggtgctggagctttcgggaaggttgttgaggcaactgcttatggcttaattaagtcagatgcggccatgactgtcgctgtaaagatgctcaagccgagtgcccatttgacagaacgggaagccctcatgtctgaactcaaagtcctgagttaccttggtaatcacatgaatattgtgaatctacttggagcctgcaccattggagggcccaccctggtcattacagaatattgttgctatggtgatcttttgaattttttgagaagaaaacgtgattcatttatttgttcaaagcaggaagatcatgcagaagctgcactttataagaatcttctgcattcaaaggagtcttcctgcagcgatagtactaatgagtacatggacatgaaacctggagtttcttatgttgtcccaaccaaggccgacaaaaggagatctgtgagaataggctcatacatagaaagagatgtgactcccgccatcatggaggatgacgagttggccctagacttagaagacttgctgagcttttcttaccaggtggcaaagggcatggctttcctcgcctccaagaattgtattcacagagacttggcagccagaaatatcctccttactcatggtcggatcacaaagatttgtgattttggtctagccagagacatcaagaatgattctaattatgtggttaaaggaaacgctcgactacctgtgaagtggatggcacctgaaagcattttcaactgtgtatacacgtttgaaagtgacgtctggtcctatgggatttttctttgggagctgttctctttaggaagcagcccctatcctggaatgccggtcgattctaagttctacaagatgatcaaggaaggcttccggatgctcagccctgaacacgcacctgctgaaatgtatgacataatgaagacttgctgggatgcagatcccctaaaaagaccaacattcaagcaaattgttcagctaattgagaagcagatttcagagagcaccaatcatatttactccaacttagcaaactgcagccccaaccgacagaagcccgtggtagaccattctgtgcggatcaattctgtcggcagcaccgcttcctcctcccagcctctgcttgtgcacgacgatgtctgagcagaatcagtgtttgggtcacccctccaggaatgatctcttcttttggcttccatgatggttattttcttttctttcaacttgcatccaactccaggatagtgggcaccccactgcaatcctgtctttctgagcacactttagtggccgatgatttttgtcatcagccaccatcctattgcaaaggttccaactgtatatattcccaatagcaacgtagcttctaccatgaacagaaaacattctgatttggaaaaagagagggaggtatggactgggggccagagtcctttccaaggcttctccaattctgcccaaaaatatggttgatagtttacctgaataaatggtagtaatcacagttggccttcagaaccatccatagtagtatgatgatacaagattagaagctgaaaacctaagtcctttatgtggaaaacagaacatcattagaacaaaggacagagtatgaacacctgggcttaagaaatctagtatttcatgctgggaatgagacataggccatgaaaaaaatgatccccaagtgtgaacaaaagatgctcttctgtggaccactgcatgagcttttatactaccgacctggtttttaaatagagtttgctattagagcattgaattggagagaaggcctccctagccagcacttgtatatacgcatctataaattgtccgtgttcatacatttgaggggaaaacaccataaggtttcgtttctgtatacaaccctggcattatgtccactgtgtatagaagtagattaagagccatataagtttgaaggaaacagttaataccattttttaaggaaacaatataaccacaaagcacagtttgaacaaaatctcctcttttagctgatgaacttattctgtagattctgtggaacaagcctatcagcttcagaatggcattgtactcaatggatttgatgctgtttgacaaagttactgattcactgcatggctcccacaggagtgggaaaacactgccatcttagtttggattcttatgtagcaggaaataaagtataggtttagcctccttcgcaggcatgtcctggacaccgggccagtatctatatatgtgtatgtacgtttgtatgtgtgtagacaaatatttggaggggtatttttgccctgagtccaagagggtcctttagtacctgaaaagtaacttggctttcattattagtactgctcttgtttcttttcacatagctgtctagagtagcttaccagaagcttccatagtggtgcagaggaagtggaaggcatcagtccctatgtatttgcagttcacctgcacttaaggcactctgttatttagactcatcttactgtacctgttccttagaccttccataatgctactgtctcactgaaacatttaaattttaccctttagactgtagcctggatattattcttgtagtttacctctttaaaaacaaaacaaaacaaaacaaaaaactccccttcctcactgcccaatataaaaggcaaatgtgtacatggcagagtttgtgtgttgtcttgaaagattcaggtatgttgcctttatggtttcccccttctacatttcttagactacatttagagaactgtggccgttatctggaagtaaccatttgcactggagttctatgctctcgcacctttccaaagttaacagattttggggttgtgttgtcacccaagagattgttgtttgccatactttgtctgaaaaattcctttgtgtttctattgacttcaatgatagtaagaaaagtggttgttagttatagatgtctaggtacttcaggggcacttcattgagagttttgtcttggatattcttgaaagtttatatttttataattttttcttacatcagatgtttctttgcagtggcttaatgtttgaaattattttgtggctttttttgtaaatattgaaatgtagcaataatgtcttttgaatattcccaagcccatgagtccttgaaaatattttttatatatacagtaactttatgtgtaaatacataagcggcgtaagtttaaaggatgttggtgttccacgtgttttattcctgtatgttgtccaattgttgacagttctgaagaattctaataaaatgtacatatataaatcaa

SEQ ID NO: 10870 - DNA, 538 bp, Homo sapiens
  source 1..538: mol_type = unassigned DNA
ggctttgccgcgctcgctgcacttgggcgagagctggaacgtggaccagagctcggatcccatcgcagctaccgcgatgagaggcgctcgcggcgcctgggattttctctgcgttctgctcctactgcttcgcgtccagacaggctcttctcaaccatctgtgagtccaggggaaccgtctccaccatccatccatccaggaaaatcagacttaatagtccgcgtgggcgacgagattaggctgttatgcactgatccgggctttgtcaaatggacttttgagatcctggatgaaacgaatgagaataagcagaatgaatggatcacggaaaaggcagaagccaccaacaccggcaaatacacgtgcaccaacaaacacggcttaagcaattccatttatgtgtttgttagaggtaaatgcttggctttctgcagtgctgtgctttcaagaatttaatatcctgctcttaattttggatgacatatggatgactgagccatagataaaatatttctggctgggtctagaaggcctaaa

SEQ ID NO: 10871 - DNA, 746 bp, Homo sapiens
  source 1..746: mol_type = unassigned DNA
atatatctcaccttctttctaaccttttcttatgtgcttttagggcccaccctggtcattacagaatattgttgctatggtgatcttttgaattttttgagaagaaaacgtgattcatttatttgttcaaagcaggaagatcatgcagaagctgcactttataagaatcttctgcattcaaaggagtcttcctgcagcgatagtactaatgagtacatggacatgaaacctggagtttcttatgttgtcccaaccaaggccgacaaaaggagatctgtgagaataggctcatacatagaaagagatgtgactcccgccatcatggaggatgacgagttggccctagacttagaagacttgctgagcttttcttaccaggtggcaaagggcatggctttcctcgcctccaagaattgtattcacagagacttggcagccagaaatatcctccttactcatggtcggatcacaaagatttgtgattttggtctagccagagacatcaagaatgattctaattatgtggttaaaggaaacgtgagtacccattctctgcttgacagtcctgcaaaggatttttagtttcaactttcgataaaaattgtttcctgtgattttcataatgtaaatcctgtctagggatatcacacattttagcagtcaaattaagtatacttcagcaaaatttgcatggtatgctgaacattactacaactaacattcaataatagaagtcctaattctaa

SEQ ID NO: 10872 - DNA, 5191 bp, Homo sapiens
  source 1..5191: mol_type = unassigned DNA
ttaagtgtaaagaataagggagttaacgccaaaaataaatgaacaaaaatgccgtcatgtctggcagctcaggtggcaaatcttccaaaagactacatgataaccctcaaatatgtccccgggatggatgttttgccaagtcattgttggataagcgagatggtagtacaattgtcagacagcttgactgatcttctggacaagttttcaaatatttctgaaggcttgagtaattattccatcatagacaaacttgtgaatatagtggatgaccttgtggagtgcgtgaaagaaaactcatctaaggatctaaaaaaatcattcaagagcccagaacccaggctctttactcctgaagaattctttagaatttttaatagatccattgatgccttcaaggactttgtagtggcatctgaaactagtgattgtgtggtttcttcaacattaagtcctgagaaagattccagagtcagtgtcacaaaaccatttatgttaccccctgttgcagccagctcccttaggaatgacagcagtagcagtaataggaaggccaaaaatccccctggagactccagcctacactgggcagccatggcattgccagcattgttttctcttataattggctttgcttttggagccttatactggaagaagagacagccaagtcttacaagggcagttgaaaatatacaaattaatgaagaggataatgagataagtatgttgcaagagaaagagagagagtttcaagaagtgtaattgtggcttgtatcaacactgttactttcgtacattggctggtaacagttcatgtttgcttcataaatgaagcagctttaaacaaattcatattctgtctggagtgacagaccacatctttatctgttcttgctacccatgactttatatggatgattcagaaattggaacagaatgttttactgtgaaactggcactgaattaatcatctataaagaagaacttgcatggagcaggactctattttaaggactgcgggacttgggtctcatttagaacttgcagctgatgttggaagagaaagcacgtgtctcagactgcatgtaccatttgcatggctccagaaatgtctaaatgctgaaaaaacacctagctttattcttcagatacaaactgcagcctgtagttatcctggtctctgcaagtagatttcagcttggatagtgagggtaacaatttttctcaaagggatctggaaaaaatgtttaaaactcagtagtgtcagccactgtacagtgtagaaagcagtgggaactgtgattggatttggcaacatgtcagctttatagttgccgattagtgatatgggtctgatttcgatctcttcctgatgtaaaccatgctcacccatatcccactatacaaatgcaaatggttgcctggttccatttatgcaagggagccagtactgaattatgccttggcagaggggagactccaaaagagtcatcgcaggaagaagttaagaacactgaacatcagaacagtctgccaagaaggacattggcatcctgggaaagtccgccttttcccttgaccactatagggtgtataaatcgtgtttgcaaaatgtgttatgatgtgtttatattctaaaactattacagagctatgtaaagggacttaggagaaaatgctgaatgtaagatggtcccatttcaatttccaccatgggagagcctaaaaataaattatgacatttagtatctaaggttagaaaaccacgcccacatgctaatatgggtgttgaaaactaggttacttataatgcaaggaatcaggaaactttagttatttatagtataatcaccattatctgtttaaaggatccatttagttaaaatcgggcactctatattcattaaggtttatgaattaaaaagaaagctttatgtagttatgcatgtcagtttgctatttaaaatgtgtgacagtgtttgtcatattaagagtgaatttggcaggaattcccaagatggacattgtgcttttaaactagaacttgtaagacattatgtgaatatcccttgccaattttttttataataagaaaacatctgactaaagtcaaagaatgatttcttatggtttattttgatgaaagttcttttaacatgtcttgaatgtacacataaaggaatccaaagctttccattctaacttaatctttgtgataacattattgccatgttctacaaccgtaagatgacagttttcaatgtagtgacacaaaagggcatgaaaaactaactgctagctttcctttcatttcaaaagtccaagaatttctagtatatttggattttagcttctgttcaaagcaaatccagatgcaactccagtaagtggcctttgctcttttttgtaccaaagagcccagatgattcctacagtccctttcttctctaacatgctgtggttccttaaatatgagtaatttctctaagatataacccaggtgctttgagaagctgcattaaggtgttcaggccctcagatatcacatggtacacttgattagtaataaaaccagagatcaatttaaattgctgataggtcctgtctcagtgtgtggcattgactgttttcaggaaaatagatacagattaatatgagttatgcgtgtaggttgtgtatagattgagaagatagatacttctcaatctagtagtttgatttatttaaccaatggtttcagtttgcttgagcatatgaaaatcctgcttaatgtgcttaagagtataataaatgtgtacttttgtcctcaaacctagtagctgggttttaacactcatggacatggtcttaatcaatggagttaaataaacaaattcagcaagttattaaatctgacatggtaggagaggggagatgtgtcctgcttattaaatgtgttggtccattgaaagttacatggattgccaatttttaaaacactaaagttgaataaaatgcatgaacaatagaaaaatgctgaacattattttggatgctagctgcttggacattaactgtgttatttctgctttgagatgaaaatatatatttatctttgcttattttatcccagatgtgttctgaatatccttcttcataaatcatggaaaactcactgctgagatagtaaaccatgaaatcgccttttcagttggtgccatgtatctgacagttccatcttggaaggtttcaaaattaccttttaaaatgatctcagaagtctgtagattctcaatgatactgaaagctttgcacctctttggtagaaaccaggtctatttagaaaatggctttatgataaatgttgcctcctgagtgataatgaagtgttcctggatattgtattgtaatttaatgtgcttaccacactgccacattttaatgagtcagagaaaaattaatttttcttcaatacaataatagaacaagtagcctattctcttaaaaagtatgtgaaaagaaaattatgaaaaaatatgcatacctaatgaagtattggttttagtaagaattaaatacatttcattgagctttaaagtactttggagaaactttggggcacgttttcctactctaattcaactaaagttataaataaagagaaaaactcattcagaaatcatggattttaaaaatattttactgcagccaagttttcatttcaaaatgtaatttcagtttggagcttttaggcattatgtatatttaaaaaatatattcttcaaaaatgcattttggcatggtgggatggatgttgcaaaagatatccggagcctccagtctgtcattaactgatatggtaaatcacctctcttctttgggtctcaattttttatttatctatatggtaaactcagagatcactccttaggggtgagtcctattgcaatatgaccgacaaagaagacaaaatagcattgaaactaacccatacaaaatatccaactctggattctgtgaataagtatcttgaccataaaaagtcattgctgttcttgtttctaatgtaaatagtgtccattagtaaaagtgaaattcagtcttaagtagggtgaattggatcaccatttacacaagagatggctttttcctttgcttgaataaacattttggatcacctccaaagaatgaaaaccagtagtacgttttagtcatattagtcaggatgagaaactataagatgtgtgtaacatttggaaatgcaccaaagtgagcgtttaaatcttctcattttattgaaaactaagagcagaaaatgtaaaatgctcatgaaggttttgaatgccaaaagatattttagaatcaatttataaaggggtaattcattaattacactttaaaattggaaagtgggataagaaatctaaagtaaaccagcttatctttgaaacaatattattttgaaattggctttaaaataaaaccattcagattgaaattctaattagctcatttgtggagtttgatcacacaattcataatgttgctgctttccattaactagtcttgaaatgcctttgtttgtaaaaataaaataatggtactttcattttataacaaggtgtttttttcaagaaataatccatgctaaaatggatatttgtgatcctgaaatgtttactaagcattgtaaatttatttataactgccatctccaactacatccttatgatgtttttaacaataaaattaaaacaactgttaaactaaaaaccacaccgttttccagtacttgatctctgagctacaatactcactaaatataattttccaatcaaaatattctattctatattctaagggttaatatgtgattatagtgtccacttgccaccatttttttaaatcaatggacttgaaaagtattaatttagatggatgcgcagatataccctcagttcagtcatagattggagtttgcatataataatgtaaatgtatgtcgacactattctaaatagttctattatgactgaaatttaattaaataaaaaaggttgtaaaatgtgatgtgtatgtgtatatactgtatgtgtactttttaaaataggtgtatgtcccaacccttttttatacaggtttgaatttaaaattacatgatatatacatatactttattgttctaaataaagaattttatgcactctca

SEQ ID NO: 10873 - DNA, 1642 bp, Homo sapiens
  source 1..1642: mol_type = unassigned DNA
ccgcctcgcgccgagactagaagcgctgcgggaagcagggacagtggagagggcgctgcgctcgggctacccaatgcgtggactatctgccgccgctgttcgtgcaatatgctggagctccagaacagctaaacggagtcgccacaccactgtttgtgctggatcgcagcgctgcctttccttatgaagaagacacaaacttggattctcacttgcatttatcttcagctgctcctatttaatcctctcgtcaaaactgaagggatctgcaggaatcgtgtgactaataatgtaaaagacgtcactaaattggtggcaaatcttccaaaagactacatgataaccctcaaatatgtccccgggatggatgttttgccaagtcattgttggataagcgagatggtagtacaattgtcagacagcttgactgatcttctggacaagttttcaaatatttctgaaggcttgagtaattattccatcatagacaaacttgtgaatatagtggatgaccttgtggagtgcgtgaaagaaaactcatctaaggatctaaaaaaatcattcaagagcccagaacccaggctctttactcctgaagaattctttagaatttttaatagatccattgatgccttcaaggactttgtagtggcatctgaaactagtgattgtgtggtttcttcaacattaagtcctgagaaagattccagagtcagtgtcacaaaaccatttatgttaccccctgttgcagccagctcccttaggaatgacagcagtagcagtaataggaaggccaaaaatccccctggagactccagcctacactgggcagccatggcattgccagcattgttttctcttataattggctttgcttttggagccttatactggaagaagagacagccaagtcttacaagggcagttgaaaatatacaaattaatgaagaggataatgagataagtatgttgcaagagaaagagagagagtttcaagaagtgtaattgtggcttgtatcaacactgttactttcgtacattggctggtaacagttcatgtttgcttcataaatgaagcagctttaaacaaattcatattctgtctggagtgacagaccacatctttatctgttcttgctacccatgactttatatggatgattcagaaattggaacagaatgttttactgtgaaactggcactgaattaatcatctataaagaagaacttgcatggagcaggactctattttaaggactgcgggacttgggtctcatttagaacttgcagctgatgttggaagagaaagcacgtgtctcagactgcatgtaccatttgcatggctccagaaatgtctaaatgctgaaaaaacacctagctttattcttcagatacaaactgcagcctgtagttatcctggtctctgcaagtagatttcagcttggatagtgagggtaacaatttttctcaaagggatctggaaaaaatgtttaaaactcagtagtgtcagccactgtacagtgtagaaagcagtgggaactgtgattggatttggcaacatgtcagctttatagttgccgattagtgatatgggtctgatttcgatctcttcctgatgtaaaccatgctcacccatatccca

SEQ ID NO: 10874 - DNA, 1948 bp, Homo sapiens
  source 1..1948: mol_type = unassigned DNA
aacagagggagctccgagccctctctggcgcgcgaggtatttcgtctgtccccgggggtgccaggtgagccccagcggatccgggagggtaagctgggactcctcgcgagcagtagctgcagggtaccaagcttcgccctctgcgtccccgcgccttcgcggtctcccgccagtgcaggtccggggcccccaggcgagcggacaaggttggcctaatctgccaaacttctggggcatttaccgtgctctggccgccctcccgattcttccctccgcgcccttgcctgcttctcgcctaccccgggctccggaagggaaggaggcgtgtccggagcaggcgggcgggaactgtataaaagcgccggcggctcagcagccgggcttcgctcgccgcctcgcgccgagactagaagcgctgcgggaagcagggacagtggagagggcgctgcgctcgggctacccaatgcgtggactatctgccgccgctgttcgtgcaatatgctggagctccagaacagctaaacggagtcgccacaccactgtttgtgctggatcgcagcgctgcctttccttatgaagaagacacaaacttggattctcacttgcatttatcttcagctgctcctatttaatcctctcgtcaaaactgaagggatctgcaggaatcgtgtgactaataatgtaaaagacgtcactaaattggtggcaaatcttccaaaagactacatgataaccctcaaatatgtccccgggatggatgttttgccaagtcattgttggataagcgagatggtagtacaattgtcagacagcttgactgatcttctggacaagttttcaaatatttctgaaggcttgagtaattattccatcatagacaaacttgtgaatatagtggatgaccttgtggagtgcgtgaaagaaaactcatctaaggatctaaaaaaatcattcaagagcccagaacccaggctctttactcctgaagaattctttagaatttttaatagatccattgatgccttcaaggactttgtagtggcatctgaaactagtgattgtgtggtttcttcaacattaagtcctgagaaagggaaggccaaaaatccccctggagactccagcctacactgggcagccatggcattgccagcattgttttctcttataattggctttgcttttggagccttatactggaagaagagacagccaagtcttacaagggcagttgaaaatatacaaattaatgaagaggataatgagataagtatgttgcaagagaaagagagagagtttcaagaagtgtaattgtggcttgtatcaacactgttactttcgtacattggctggtaacagttcatgtttgcttcataaatgaagcagctttaaacaaattcatattctgtctggagtgacagaccacatctttatctgttcttgctacccatgactttatatggatgattcagaaattggaacagaatgttttactgtgaaactggcactgaattaatcatctataaagaagaacttgcatggagcaggactctattttaaggactgcgggacttgggtctcatttagaacttgcagctgatgttggaagagaaagcacgtgtctcagactgcatgtaccatttgcatggctccagaaatgtctaaatgctgaaaaaacacctagctttattcttcagatacaaactgcagcctgtagttatcctggtctctgcaagtagatttcagcttggatagtgagggtaacaatttttctcaaagggatctggaaaaaatgtttaaaactcagtagtgtcagccactgtacagtgtagaaagcagtgggaactgtgattggatttggcaacatgtcagctttatagttgccgattagtgatatgggtctgatttcgatctcttcctgatgtaaaccatgctcacccatatccca

SEQ ID NO: 10875 - DNA, 565 bp, Homo sapiens
  source 1..565: mol_type = unassigned DNA
gcttcgctcgccgcctcgcgccgagactagaagcgctgcgggaagcagggacagtggagagggcgctgcgctcgggctacccaatgcgtggactatctgccgccgctgttcgtgcaatatgctggagctccagaacagctaaacggagtcgccacaccactgtttgtgctggatcgcagcgctgcctttccttatgaagaagacacaaggaaggccaaaaatccccctggagactccagcctacactgggcagccatggcattgccagcattgttttctcttataattggctttgcttttggagccttatactggaagaagagacagccaagtcttacaagggcagttgaaaatatacaaattaatgaagaggataatgagataagtatgttgcaagagaaagagagagagtttcaagaagtgtaattgtggcttgtatcaacactgttactttcgtacattggctggtaacagttcatgtttgcttcataaatgaagcagctttaaacaaattcatattctgtctggagtgacagaccacatctttatctgttcttgctaccca

SEQ ID NO: 10876 - DNA, 555 bp, Homo sapiens
  source 1..555: mol_type = unassigned DNA
ttcgctcgccgcctcgcgccgagactagaagcgctgcgggaagcagggacagtggagagggcgctgcgctcgggctacccaatgcgtggactatctgccgccgctgttcgtgcaatatgctggagctccagaacagctaaacggagtcgccacaccactgtttgtgctggatcgcagcgctgcctttccttatgaagaagacacaacaaagcagctgctttgaaaagaagctcaaaggattaccttgaaatggttacccactctcccccttttctgctccaagaagaaagtttctttctgtattttcccagcattattaagagtcaagacttgaggccttaagacttggattctcacttgcatttatcttcagctgctcctatttaatcctctcgtcaaaactgaagggatctgcaggaatcgtgtgactaataatgtaaaagacgtcactaaattggtggcaaatcttccaaaagactacatgataaccctcaaatatgtccccgggatggatgttttgccaagtcattgttggataagcgagatggtagtaca

SEQ ID NO: 10877 - DNA, 5191 bp, Homo sapiens; identical to SEQ ID NO: 10872
  source 1..5191: mol_type = unassigned DNA

SEQ ID NO: 10878 - DNA, 1642 bp, Homo sapiens; identical to SEQ ID NO: 10873
  source 1..1642: mol_type = unassigned DNA

SEQ ID NO: 10879 - DNA, 1948 bp, Homo sapiens; identical to SEQ ID NO: 10874
  source 1..1948: mol_type = unassigned DNA

SEQ ID NO: 10880 - DNA, 565 bp, Homo sapiens; identical to SEQ ID NO: 10875
  source 1..565: mol_type = unassigned DNA

SEQ ID NO: 10881 - DNA, 555 bp, Homo sapiens; identical to SEQ ID NO: 10876
  source 1..555: mol_type = unassigned DNA

SEQ ID NO: 10882 - DNA, 388 bp, Homo sapiens
  source 1..388: mol_type = unassigned DNA
ggccctgccctgcttttctacatcaccactgtcttgtcagttagctcggctcaggcattgcatgcctgatctgtatctttgggaatcctgtgaggtaatggttctagatccaaaagaatggataaagagactgtttcagttcccgaaattatccaggcacattctgtgcgctactgaacttcagaaagcaccagtccatccagtgtgcagaggctgatgaaaaagttaataaacagaatggcgactccgatgttgagcaagatcaccatgaccaccaggataggcgctgagccctggaagagagcgaggggaagaggtgagcgacagctgcggggggctctgcctgggccaccacgcctcccacccacgtcttttcaccaagctagca

SEQ ID NO: 10883 - DNA, 4572 bp, Homo sapiens
  source 1..4572: mol_type = unassigned DNA
gccccacgagcacctgtttccgagcggagagcgcgggccgttttctttcctggtgtcccgtcgcggcttgggacccggcaagatgggcaagaagggcaagaaggagaagaagggccgcggcgcggagaagacggccgccaagatggagaagaaggtgtctaagcgctcgcggaaggaggaggaagacctggaagcgctcatagcccatttccagacactcgatgccaagaggactcagactgtggaacttccgtgccccccaccctcaccaaggttaaatgcctccctctcggttcatcctgagaaagatgagttaatcctttttggaggtgaatatttcaacggccaaaaaacttttttgtataacgagctctatgtctacaataccagaaaggacacctggaccaaagttgacatccccagtccacctccgaggcgctgtgctcaccaggcggtggtagtgcctcaaggtggcggacagctgtgggtctttggaggggagtttgcctctcccaacggagagcagttctaccactacaaggatctctgggtcctgcatttggccaccaagacctgggaacaagtcaaatcaacaggcggtccttcgggtcggagtggacatcggatggtggcctggaagagacaattgatcctgtttggtggcttccatgaaagtacacgggattacatctactacaacgacgtgtatgcctttaatctggacaccttcacatggagcaagctgtccccgtcagggacggggcccacacccagatcaggctgccagatgtccgtcactccccagggcggcatcgtcgtctatgggggctactcgaaacagagagttaagaaagacgtggacaagggcacacggcactcagacatgttcctgctgaagccagaggacggaagagaagacaagtgggtttggactcggatgaacccttcgggggtcaagcccaccccacggtctggcttttccgtggccatggccccgaatcaccagacactgttcttcgggggtgtctgtgacgaggaagaggaggagagcctgtcgggcgagttcttcaacgatctgtacttctacgacgccaccaggaaccgttggtttgagggacagctgaagggacccaagtctgaaaagaagaaacgcaggcggggcagaaaagaggagcccgaaggtggtagcaggccggcgtgtgggggagctggcacccaggggcctgtgcagctggtcaaggaggtggtggccgaggatggcaccgtggtcaccattaagcaggtgctcaccgcgccaggctcggcggggcagccccggtctgaggacgaagacagccttgaggaggccggcagccccgcacctgggccgtgtccacgctccaacgccatgctggctgtgaagcatggggtgctctacgtctatgggggcatgtttgaggccggcgaccgccaggtcaccctcagcgacctgcactgcctggacctgcacaggatggaggcgtggaaggccttggtggagatggacccagaaactcaggagtggctggaggagacggactcggaagaggacagtgaggaggttgagggcgccgagggtggggtcgacgacgaagacagcggagaggagagcggtgcggaggactgaggctgtgacaaaccctgtgcccacgctgcctccactgccgggagactcagggctgggggagacatgccctggtcaccactgcggagactcagggctgggggagacatgccctgcacgtttcctgctcgaaaaccaggagagcctccacgtgccgactagctctgtccacacatccattgcgcagctctgcagcggaaggaccttcagtaaagacgctgcctgaccccagggcctgggagcccccggcagaccggccctccttgccaaacagtggctgccctttatggactcggcgcctggcagagccactgtggaggaggagttggctgtcatggtcaggggaggcagcccttgggttgtcaaggttggtggtcaacgttgaacccatatctgctggaatctcccggtctgttccacacacgatcatgcgggaagctctgggacccgaaggctgttctgatctcgggggtcacaagttctcacagcagcctggggtcaccagggaccagacccggcgttagcctctgtaaggagctgcctggctgctgggctgagctttgttgcaggcccaggaagatgaccaagaaggacagagcagagccccatctaccactgctgggagggcccgagggagcacgtgcacagcagagccccatcctccactccctgggctcgaagaggcttcctcggtgtggatggcagctggagtggacgaggcggacgagtggcagtgaggtaggcatgtgaggttgttgcctggcccactctgccgaccccagaaacccagcggcctgggcccagcacccggctacacatggggctgagccagcaacctccttggcacctggggacagtcgcttcctcagtttctgcgtaccgactgcctcacctgacacgcggcctgggcgcgagagaagccaaccagagcgtctgtcgcacgtatgaggtgaaatccgcactgtcccatgaagactgtgaggggagttgccacccgcacacggcccaggagcgccagcagcttggggaccaccacaggcctcagggtctcttcagtccgacgggtccagctgtcgataaaacctcccggggaaggagtaaaggacaaccaagaacctgaactgcaaaagtatgaaaaacatttcatttccctcgagttctccacactttaggtctgcagcgccttgggggtgactgatggccctccgtgagacgcggtggccatgtgcttctacaagtgaaaaggagcaagtgtggttagagcctggagtatggacgtcccggggaccgctggcccatggcctggcttggggccttacaggggagcgagctgagtgaatgcaggggagggcccgtctttctacagtgtgtatcttgtttttgagacagactcactctgtcgtccaggctggagtgcagtggcgcgatctctgctcactgcaacctctgcctcccgggttcaagcgattctcctgcctcagcctcctcagtagctgggattacaggcacctgccaccacgcctggctaatttttgtattttttttttagtagagatggggtttcactatgttggtcaggctggcctcgagctcctgacctcaggtgatccacctgccttggcctcccaaagtgctgggattacaggcatgagccaccgcgcccggccctgccctgcttttctacatcaccactgtcttgtcagttagctcggctcaggcattgcatgcctgatctgtatctttgggaatcctgtgaggtaatggttctagatccaaaagaatggataaagagactgtttcagttcccgaaattatccaggcacattctgtgcgctactgaacttcagaaagcaccagtccatccagtgtgcagaggctggtaagtaaaacaggccagccgtgggcacagacagtttcaccagaggccccggggcagagggtcttctccagctcttccagggcggggctcatctgttcctgggccagaggtggacctgtctgcaggcttgtaagggtggggagacgccagcctggcccatgggctgtccacacccaccccccgcagaccgcgctgctgtctgcaggggatgccaccacttcctcctggcctcgggtgcacaggtgaaacatgaagaagctattggggcggaaaatggctctcaccaggctgctctcgggttaatgaaaactcgtcaaattctccatgcagcagcagccagccgggcacatgctgtcctgccctgcccgactgtgtgcagggaagcaggtcccctgggcctgggcggagggactgcgtgcctgtcagggaaggccgaggctccggacaggcgggaagcagccttctgcttaatcaccccatgtggaaaccaattaaagattcgattctctcagacccggggcattttagccttggttgaatcctcctggaattcacagggaagtggctttgccctctgccctcgctgctggaaggcaaggggccgttctcgccttggttttctaggttgtgttgcggcaggagctgactgcccctaggcctagatctctgcacaacttcgctcagggacacctgcctctgtgcatgtctcatggtgtgaatgtgtttcctgctcacaggtaccgttttgtgtcatgcagttactggaatgtacaaaagcagctgtgatctttgtgagagctgcacagagcaggagtctgagagctgcacagagcaggagtctttatttggttcacttctggtctgcagcaaccacttgctactaaaagatggaaaagatgtacaaaaatgtcacagccctttagaaagcgacattatcagaaatgtatgaccttcagtcctccctccctctcctatgcccccaccagaccaggcggcgagaaggaacagggagtgaacatgtaacggaaaacaataaaactgaatttaactg

SEQ ID NO: 10884 - DNA, 343 bp, Homo sapiens
  source 1..343: mol_type = unassigned DNA
tggcatgggcgcacgagaagggtgtgtctgagacaggatgtttatcccaaatgccaggagtggacgaggcggacgagtggcagtgaggctgagccagcaacctccttggcacctggggacagtcgcttcctcagtttctgcgtaccgactgcctcacctgacacgcggcctgggcgcgagagaagccaaccaggtgcctgagttgactgactccttccgccctccagcttcctccctccgccctccaacctcctccctccaccctccaacctcctccctccgccctccaacctcctccctctgccctgcaacctcctcccctctgccctccaacctcctccct

SEQ ID NO: 10885 - DNA, 445 bp, Homo sapiens
  source 1..445: mol_type = unassigned DNA
cgaagacagcggagaggagagcggtgcggaggactgaggctgtgacaaaccctgtgcccacgctgcctccactgccgggagactcagggctgggggagacatgccctggtcaccactgcggagactcagggctgggggagacatgccctggccaccagtggtgagccagcgagacaggaccccacgcgcgctgacccggggacgccatggaactcactcgcgattcctgcacgcgcgctgacccggggacgccatggaactcactcgcgattcctgctcacagcacgtttcctgctcgaaaaccaggagagcctccacgtgccgactagctctgtccacacatccattgcgcagctctgcagcggaaggaccttcagtaaagacgctggtttgtaacgagagaagcgttccaaagtgtcacacgacattgtttattactaaaagg

SEQ ID NO: 10886 - DNA, 1287 bp, Homo sapiens
  source 1..1287: mol_type = unassigned DNA
ggtcagtttctccctatggaactactgggcttttagaatgataggaaacctggcctgtccctttacaggtgcgttacagtcaggcgaagctgggctgcgtgaccctgggcagggtgggcggctctcacctgtggagatgcagcactgaggggcccctccagcgtggttgctaacacagactgcctaggagcgtgcttttctcatcctggaccccagctactgcttaatttgcaggcggtggtagtgcctcaaggtggcggacagctgtgggtctttggaggggagtttgcctctcccaacggagagcagttctaccactacaaggatctctgggtcctgcatttggccaccaagacctgggaacaagtcaaatcaacaggcggtccttcgggtcggagtggacatcggatggtggcctggaagagacaattgatcctgtttggtggcttccatgaaagtacacgggattacatctactacaacgacgtgtatgcctttaatctggacaccttcacatggagcaagctgtccccgtcagggacggggcccacacccagatcaggctgccagatgtccgtcactccccagggcggcatcgtcgtctatgggggctactcgaaacagagagttaagaaagacgtggacaagggcacacggcactcagacatgttcctgctgaagccagaggacggaagagaagacaagtgggtttggactcggatgaacccttcgggggtcaagcccaccccacggtctggcttttccgtggccatggccccgaatcaccagacactgttcttcgggggtgtctgtgacgaggaagaggaggagagcctgtcgggcgagttcttcaacgatctgtacttctacgacgccaccaggaaccgttggtttgagggacagctgaagaaactcaggagtggctggaggagacggactcggaagaggacagtgaggaggttgagggcgccgagggtggggtcgacgacgaagacagcggagaggagagcggtgcggaggactgagagcccctgccaggggcgcctggcaagtgctgtgcccacgtccgcccaggacccagccgtgttgagtgaagctcttggggccagcgtgcgtcctgacgcacaggagagagctgaaggtgggtggcccaggccagggtgtgaactttctcccatggtttagtctctgacgcggcactgggccggaagttcaactgagtgcagtgcaggtggattccctcagcagcctgtgtgttgtgtgaaataaattggacttgaaacaaga

SEQ ID NO: 10887 - DNA, 1663 bp, Homo sapiens
  source 1..1663: mol_type = unassigned DNA
cccggcaagatgggcaagaagggcaagaaggagaagaagggccgcggcgcggagaagacggccgccaagatggagaagaaggtgtctaagcgctcgcggaaggaggagacttttttgtataacgagctctatgtctacaataccagaaaggacacctggaccaaagttgacatccccagtccacctccgaggcgctgtgctcaccaggcggtggtagtgcctcaaggtggcggacagctgtgggtctttggaggggagtttgcctctcccaacggagagcagttctaccactacaaggatctctgggtcctgcatttggccaccaagacctgggaacaagtcaaatcaacaggcggtccttcgggtcggagtggacatcggatggtggcctggaagagacaattgatcctgtttggtggcttccatgaaagtacacgggattacatctactacaacgacgtgtatgcctttaatctggacaccttcacatggagcaagctgtccccgtcagggacggggcccacacccagatcaggctgccagatgtccgtcactccccagggcggcatcgtcgtctatgggggctactcgaaacagagagttaagaaagacgtggacaagggcacacggcactcagacatgttcctgctgaagccagaggacggaagagaagacaagtgggtttggactcggatgaacccttcgggggtcaagcccaccccacggtctggcttttccgtggccatggccccgaatcaccagacactgttcttcgggggtgtctgtgacgaggaagaggaggagagcctgtcgggcgagttcttcaacgatctgtacttctacgacgccaccaggaaccgttggtttgagggacagctgaagggacccaagtctgaaaagaagaaacgcaggcggggcagaaaagaggagcccgaaggtggtagcaggccggcgtgtgggggagctggcacccaggggcctgtgcagctggtcaaggaggtggtggccgaggatggcaccgtggtcaccattaagcaggtgctcaccgcgccaggctcggcggggcagccccggtctgaggacgaagacagccttgaggaggccggcagccccgcacctgggccgtgtccacgctccaacgccatgctggctgtgaagcatggggtgctctacgtctatgggggcatgtttgaggccggcgaccgccaggtcaccctcagcgacctgcactgcctggacctgcacaggatggaggcgtggaaggccttggtggagatggacccagaaactcaggagtggctggaggagacggactcggaagaggacagtgaggaggttgagggcgccgagggtggggtcgacgacgaagacagcggagaggagagcggtgcggaggactgagagcccctgccaggggcgcctggcaagtgctgtgcccacgtccgcccaggacccagccgtgttgagtgaagctcttggggccagcgtgcgtcctgacgcacaggagagagctgaaggtgggtggcccaggccagggtgtgaactttctcccatggtttagtctctgacgcggcactgggccggaagttcaactgagtgcagtgcaggtggattccctcagcagcctgtgtgttgtgtgaaataaattggacttgaaacaaga

SEQ ID NO: 10888 - DNA, 1821 bp, Homo sapiens
  source 1..1821: mol_type = unassigned DNA
ctccgccccacgagcacctgtttccgagcggagagcgcgggccgttttctttcctggtgtcccgtcgcggcttgggacccggcaagatgggcaagaagggcaagaaggagaagaagggccgcggcgcggagaagacggccgccaagatggagaagaaggtgtctaagcgctcgcggaaggaggaggaagacctggaagcgctcatagcccatttccagacactcgatgccaagaggactcagactgtggaacttccgtgccccccaccctcaccaaggttaaatgcctccctctcggttcatcctgagaaagatgagttaatcctttttggaggtgaatatttcaacggccaaaaaacttttttgtataacgagctctatgtctacaataccagaaaggacacctggaccaaagttgacatccccagtccacctccgaggcgctgtgctcaccaggcggtggtagtgcctcaaggtggcggacagctgtgggtctttggaggggagtttgcctctcccaacggagagcagttctaccactacaaggatctctgggtcctgcatttggccaccaagacctgggaacaagtcaaggattacatctactacaacgacgtgtatgcctttaatctggacaccttcacatggagcaagctgtccccgtcagggacggggcccacacccagatcaggctgccagatgtccgtcactccccagggcggcatcgtcgtctatgggggctactcgaaacagagagttaagaaagacgtggacaagggcacacggcactcagacatgttcctgctgaagccagaggacggaagagaagacaagtgggtttggactcggatgaacccttcgggggtcaagcccaccccacggtctggcttttccgtggccatggccccgaatcaccagacactgttcttcgggggtgtctgtgacgaggaagaggaggagagcctgtcgggcgagttcttcaacgatctgtacttctacgacgccaccaggaaccgttggtttgagggacagctgaagggacccaagtctgaaaagaagaaacgcaggcggggcagaaaagaggagcccgaaggtggtagcaggccggcgtgtgggggagctggcacccaggggcctgtgcagctggtcaaggaggtggtggccgaggatggcaccgtggtcaccattaagcaggtgctcaccgcgccaggctcggcggggcagccccggtctgaggacgaagacagccttgaggaggccggcagccccgcacctgggccgtgtccacgctccaacgccatgctggctgtgaagcatggggtgctctacgtctatgggggcatgtttgaggccggcgaccgccaggtcaccctcagcgacctgcactgcctggacctgcacaggatggaggcgtggaaggccttggtggagatggacccagaaactcaggagtggctggaggagacggactcggaagaggacagtgaggaggttgagggcgccgagggtggggtcgacgacgaagacagcggagaggagagcggtgcggaggactgagaagagcccctgccaggggcgcctggcaagtgctgtgcccacgtccgcccaggacccagccgtgttgagtgaagctcttggggccagcgtgcgtcctgacgcacaggagagagctgaaggtgggtggcccaggccagggtgtgaactttctcccatggtttagtctctgacgcggcactgggccggaagttcaactgagtgcagtgcaggtggattccctcagcagcctgtgtgttgtgtgaaataaattggacttgaaacaaga

SEQ ID NO: 10889 - DNA, 1377 bp, Homo sapiens
  source 1..1377: mol_type = unassigned DNA
agttggtgccggtgctggcgtgtggagggctgactcttggcgtgatgcctgtgcagatcaacaggcggtccttcgggtcggagtggacatcggatggtggcctggaagagacaattgatcctgtttggtggcttccatgaaagtacacgggattacatctactacaacgacgtgtatgcctttaatctggacaccttcacatggagcaagctgtccccgtcagggacggggcccacacccagatcaggctgccagatgtccgtcactccccagggcggcatcgtcgtctatgggggctactcgaaacagagagttaagaaagacgtggacaagggcacacggcactcagacatgttcctgctgaagccagaggacggaagagaagacaagtgggtttggactcggatgaacccttcgggggtcaagcccaccccacggtctggcttttccgtggccatggccccgaatcaccagacactgttcttcgggggtgtctgtgacgaggaagaggaggagagcctgtcgggcgagttcttcaacgatctgtacttctacgacgccaccaggaaccgttggtttgagggacagctgaagggacccaagtctgaaaagaagaaacgcaggcggggcagaaaagaggagcccgaaggtggtagcaggccggcgtgtgggggagctggcacccaggggcctgtgcagctggtcaaggaggtggtggccgaggatggcaccgtggtcaccattaagcaggtgctcaccgcgccaggctcggcggggcagccccggtctgaggacgaagacagccttgaggaggccggcagccccgcacctgggccgtgtccacgctccaacgccatgctggctgtgaagcatggggtgctctacgtctatgggggcatgtttgaggccggcgaccgccaggtcaccctcagcgacctgcactgcctggacctgcacaggatggaggcgtggaaggccttggtggagatggacccagaaactcaggagtggctggaggagacggactcggaagaggacagtgaggaggttgagggcgccgagggtggggtcgacgacgaagacagcggagaggagagcggtgcggaggactgagaagagcccctgccaggggcgcctggcaagtgctgtgcccacgtccgcccaggacccagccgtgttgagtgaagctcttggggccagcgtgcgtcctgacgcacaggagagagctgaaggtgggtggcccaggccagggtgtgaactttctcccatggtttagtctctgacgcggcactgggccggaagttcaactgagtgcagtgcaggtggattccctcagcagcctgtgtgttgtgtgaaataaattggacttgaaacaag

SEQ ID NO: 10890 - DNA, 1886 bp, Homo sapiens
  source 1..1886: mol_type = unassigned DNA
gcggagagcgcgggccgttttctttcctggtgtcccgtcgcggcttgggacccggcaagatgggcaagaagggcaagaaggagaagaagggccgcggcgcggagaagacggccgccaagatggagaagaaggtgtctaagcgctcgcggaaggaggaggaagacctggaagcgctcatagcccatttccagacactcgatgccaagaggactcagactgtggaacttccgtgccccccaccctcaccaaggttaaatgcctccctctcggttcatcctgagaaagatgagttaatcctttttggaggtgaatatttcaacggccaaaaaacttttttgtataacgagctctatgtctacaataccagaaaggacacctggaccaaagttgacatccccagtccacctccgaggcgctgtgctcaccaggcggtggtagtgcctcaaggtggcggacagctgtgggtctttggaggggagtttgcctctcccaacggagagcagttctaccactacaaggatctctgggtcctgcatttggccaccaagacctgggaacaagtcaaatcaacaggcggtccttcgggtcggagtggacatcggatggtggcctggaagagacaattgatcctgtttggtggcttccatgaaagtacacgggattacatctactacaacgacgtgtatgcctttaatctggacaccttcacatggagcaagctgtccccgtcagggacggggcccacacccagatcaggctgccagatgtccgtcactccccagggcggcatcgtcgtctatgggggctactcgaaacagagagttaagaaagacgtggacaagggcacacggcactcagacatgttcctgctgaagccagaggacggaagagaagacaagtgggtttggactcggatgaacccttcgggggtcaagcccaccccacggtctggcttttccgtggccatggccccgaatcaccagacactgttcttcgggggtgtctgtgacgaggaagaggaggagagcctgtcgggcgagttcttcaacgatctgtacttctacgacgccaccaggaaccgttggtttgagggacagctgaagggacccaagtctgaaaagaagaaacgcaggcggggcagaaaagaggagcccgaaggtggtagcaggccggcgtgtgggggagctggcacccaggggcctgtgcagctggtcaaggaggtggtggccgaggatggcaccgtggtcaccattaagcaggtgctcaccgcgccaggctcggcggggcagccccggtctgaggacgaagacagccttgaggaggccggcagccccgcacctgggccgtgtccacgctccaacgccatgctggctgtgaagcatggggtgctctacgtctatgggggcatgtttgaggccggcgaccgccaggtcaccctcagcgacctgcactgcctggacctgcacaggatggaggcgtggaaggccttggtggagatggacccagaaactcaggagtggctggaggagacggactcggaagaggacagtgaggaggttgagggcgccgagggtggggtcgacgacgaagacagcggagaggagagcggtgcggaggactgagaagagcccctgccaggggcgcctggcaagtgctgtgcccacgtccgcccaggacccagccgtgttgagtgaagctcttggggccagcgtgcgtcctgacgcacaggagagagctgaaggtgggtggcccaggccagggtgtgaactttctcccatggtttagtctctgacgcggcactgggccggaagttcaactgagtgcagtgcaggtggattccctcagcagcctgtgtgttgtgtgaaataaattggacttgaaacaag

SEQ ID NO: 10891 - DNA, 2072 bp, Homo sapiens
  source 1..2072: mol_type = unassigned DNA
tttactgtccacgtgagcatagctgctgtccagggccagcccagcacaggcacagcagtgggtgacagtcccagaaggggatcccccagttggcctcagggtctctgagtgtaccaggtcagccggacccagaaagggccaaggagggctggtcgctgttggttgcaaactcctgaagctgcttttgacgtgtggtggcacctgggctggaaattggaaaaacacgcgggttcgtttctggacccacagtccgcctcgctcttttactttagaaggaattgctccaagcagagtctacacaggtttcccctgtggcttttcttcagagagcgtgttgaccccagctagtgtcacggttctcacactgtgatctcagggccgttgacattccccaggattacggaggacctcagagagctttcccttttgaaactcactgttgcagagtccagacacaaagtggatcttagaagtctagaatgtgaagctgactttgggttgatctggaggtagtgatccttggaaaatttggaaataacctggcaaatgtcacctcgtgagctggcagcgttttgtgacaaaatgacaaaggctgtgacagaagggtccagactgacccctgcgacgcagccagggaagtgggacagagagggatggacagctgtcctgcaggaggcagcctgacctgagagctcccctttaaaaacgtttggtgaggaagggcccctctctggctcgccgtttgtagtaaatgagctgggcttgtgggcctgaccgtctgtcttgcttgggaaaggggaggaagcccctcagcctggcttccccagcccttctgggagccagcactgtgggtgattgggttttcccagggtgagcgtcggagcctgtggggctggtgccctgtgtgtggggtctggtgggcctgtccacctctcagtggaggtgtggagcggcccctcagtgaggacacgcagtggggggttttctgccccagcccaggagtgaacggcgaggctagtgggagacaggagcgtgctcctgcagcccagtgcctgcacccagggcagtcagggatggcgccttcctgggtcacacactccccacgcttgtgggtggtccccgcaaacccttgcctggccttgtgggcatagcaggaatgacccctgcctcgctgaagctgctgctctctgcttcctcggtctattaatagggacccaagtctgaaaagaagaaacgcaggcggggcagaaaagaggagcccgaaggtggtagcaggccggcgtgtgggggagctggcacccaggggcctgtgcagctggtcaaggaggtggtggccgaggatggcaccgtggtcaccattaagcaggtgctcaccgcgccaggctcggcggggcagccccggtctgaggacgaagacagccttgaggaggccggcagccccgcacctgggccgtgtccacgctccaacgccatgctggctgtgaagcatggggtgctctacgtctatgggggcatgtttgaggccggcgaccgccaggtcaccctcagcgacctgcactgcctggacctgcacaggatggaggcgtggaaggccttggtggagatggacccaggacgtagccaccaccgtcccgcagcctcccccacctgcctcagctgcgctgacgtgtatgtgcgttcattctgcttttgaagaaactcaggagtggctggaggagacggactcggaagaggacagtgaggaggttgagggcgccgagggtggggtcgacgacgaagacagcggagaggagagcggtgcggaggactgagaagagcccctgccaggggcgcctggcaagtgctgtgcccacgtccgcccaggacccagccgtgttgagtgaagctcttggggccagcgtgcgtcctgacgcacaggagagagctgaaggtgggtggcccaggccagggtgtgaactttctcccatggtttagtctctgacgcggcactgggccggaagttcaactgagtgcagtgcaggtggattccctcagcagcctgtgtgttgtgtgaaataaattggacttgaaac

SEQ ID NO: 10892 - DNA, 1757 bp, Homo sapiens
  source 1..1757: mol_type = unassigned DNA
tctttcctggtgtcccgtcgcggcttgggacccggcaagatgggcaagaagggcaagaaggagaagaagggccgcggcgcggagaagacggccgccaagatggagaagaaggtgtctaagcgctcgcggaaggaggaggaagacctggaagcgctcatagcccatttccagacactcgatgccaagaggactcagactgtggaacttccgtgccccccaccctcaccaagacttttttgtataacgagctctatgtctacaataccagaaaggacacctggaccaaagttgacatccccagtccacctccgaggcgctgtgctcaccaggcggtggtagtgcctcaaggtggcggacagctgtgggtctttggaggggagtttgcctctcccaacggagagcagttctaccactacaaggatctctgggtcctgcatttggccaccaagacctgggaacaagtcaaatcaacaggcggtccttcgggtcggagtggacatcggatggtggcctggaagagacaattgatcctgtttggtggcttccatgaaagtacacgggattacatctactacaacgacgtgtatgcctttaatctggacaccttcacatggagcaagctgtccccgtcagggacggggcccacacccagatcaggctgccagatgtccgtcactccccagggcggcatcgtcgtctatgggggctactcgaaacagagagttaagaaagacgtggacaagggcacacggcactcagacatgttcctgctgaagccagaggacggaagagaagacaagtgggtttggactcggatgaacccttcgggggtcaagcccaccccacggtctggcttttccgtggccatggccccgaatcaccagacactgttcttcgggggtgtctgtgacgaggaagaggaggagagcctgtcgggcgagttcttcaacgatctgtacttctacgacgccaccaggaaccgttggtttgagggacagctgaagggacccaagtctgaaaagaagaaacgcaggcggggcagaaaagaggagcccgaaggtggtagcaggccggcgtgtgggggagctggcacccaggggcctgtgcagctggtcaaggaggtggtggccgaggatggcaccgtggtcaccattaagcaggtgctcaccgcgccaggctcggcggggcagccccggtctgaggacgaagacagccttgaggaggccggcagccccgcacctgggccgtgtccacgctccaacgccatgctggctgtgaagcatggggtgctctacgtctatgggggcatgtttgaggccggcgaccgccaggtcaccctcagcgacctgcactgcctggacctgcacaggatggaggcgtggaaggccttggtggagatggacccagaaactcaggagtggctggaggagacggactcggaagaggacagtgaggaggttgagggcgccgagggtggggtcgacgacgaagacagcggagaggagagcggtgcggaggactgagagcccctgccaggggcgcctggcaagtgctgtgcccacgtccgcccaggacccagccgtgttgagtgaagctcttggggccagcgtgcgtcctgacgcacaggagagagctgaaggtgggtggcccaggccagggtgtgaactttctcccatggtttagtctctgacgcggcactgggccggaagttcaactgagtgcagtgcaggtggattccctcagcagcctgtgtgttg

SEQ ID NO: 10893 - DNA, 1065 bp, Homo sapiens
  source 1..1065: mol_type = unassigned DNA
gagcggagagcgcgggccgttttctttcctggtgtcccgtcgcggcttgggacccggcaagatgggcaagaagggcaagaaggagaagaagggccgcggcgcggagaagacggccgccaagatggagaagaaggtgtctaagcgctcgcggaaggaggaggcggtggtagtgcctcaaggtggcggacagctgtgggtctttggaggggagtttgcctctcccaacggagagcagttctaccactacaaggatctctgggtcctgcatttggccaccaagacctgggaacaagtcaaatcaacaggcggtccttcgggtcggagtggacatcggatggtggcctggaagagacaattgatcctgtttggtggcttccatgaaagtacacgggattacatctactacaacgacgtgtatgcctttaatctggacaccttcacatggagcaagctgtccccgtcagggacggggcccacacccagatcaggctgccagatgtccgtcactccccagggcggcatcgtcgtctatgggggctactcgaaacagagagttaagaaagacgtggacaagggcacacggcactcagacatgttcctgctgaagccagaggacggaagagaagacaagtgggtttggactcggatgaacccttcgggggtcaagcccaccccacggtctggcttttccgtggccatggccccgaatcaccagacactgttcttcgggggtgtctgtgacgaggaagaggaggagagcctgtcgggcgagttcttcaacgatctgtacttctacgacgccaccaggaaccgttggtttgagggacagctgaagggacccaagtctgaaaagaagaaacgcaggcggggcagaaaagaggagcccgaaggtggtagcaggccggcgtgtgggggagctggcacccaggggcctgtgcagctggtcaaggaggtggtggccgaggatggcaccgtggtcaccattaagcaggtgctcaccgcgccaggctcggcggggcagccccggtctgaggacgaagacagccttgaggaggccggcagccc

SEQ ID NO: 10894 - DNA, 2232 bp, Homo sapiens
  source 1..2232: mol_type = unassigned DNA
catttccagacactcgatgccaagaggactcagactgtggaacttccgtgccccccaccctcaccaaggttaaatgcctccctctcggttcatcctgagaaagatgagttaatcctttttggaggtgaatatttcaacggccaaaaagtaaagtatatatttttttcttttcttcccatgttgcgtgagtatcatttgacagaaagttaacttaaggcagtgacatcaaatatgcgttagccccttcaccccttgtatcacgcgcttgagccgtcaggcctgatgtgagacgtcgccaggatgctccaggccctggcatgactgttgatgacttcagtggtcctggggtctctattcctgggacttaggctgaggcccagctctgccgtcatcactcttggcgggcgcacccctctttgtggttgtctgtgctgttcttcctcccagcgggtttccaggtttcacactcagctttcaggttgtcttaaacacggaaagtgctgataaattttagggctaatttttatttttgagcaggccagtaagacctgtgtttcacaattgtgtgtgacacacaaaagcaggagctcaccttccctgcagcccgggatgggccttgggggtttgactgcatttgtccatcttcgtctctcagttttcgtgcatttagaaactaggcttgactgggtacagtggctcatgcctgtaatcccagcactttgggaggccgaggtgggcagatcacctgaggtcaggagtttgagagcagtctggccaatgtggtgaaacccagtctctgctaacgatacaaaaattagcggggtgtggtggcgggcgcctgtagtcctagctacttggaggctgaggcagagaatcacttgcacctgggaggcggaggttgcagtgagcaaagattgcgccattgcactccattgtgggcaacagcgagacttcatctcaaacaaaacaaaaacaaaaaaactaggctggaattaggagaatgaccagtcctaataacaacgagggctttcagtaccttccagattgatgggcctggtgggcgttcggtcgttttcattgtgtcgtcatccccaatggccccggggacccagcccatggcctccctgtgctggtatggtttacattcctttagcatgtcagtttcccagggaattgtcatgattaagattgttctcaccacttccttggaagcgtatcatttgtgacactgacattcttcttccttcctgtagacttttttgtataacgagctctatgtctacaataccagaaaggacacctggaccaaagttgacatccccagtccacctccgaggcgctgtgctcaccaggcggtggtagtgcctcaaggtggcggacagctgtgggtctttggaggggagtttgcctctcccaacggagagcagttctaccactacaaggatctctgggtcctgcatttggccaccaagacctgggaacaagtcaaatcaacaggcggtccttcgggtcggagtggacatcggatggtggcctggaagagacaattgatcctgtttggtggcttccatgaaagtacacgggattacatctactacaacgacgtgtatgcctttaatctggacaccttcacatggagcaagctgtccccgtcagggacggggcccacacccagatcaggctgccagatgtccgtcactccccagggcggcatcgtcgtctatgggggctactcgaaacagagagttaagaaagacgtggacaagggcacacggcactcagacatgttcctgctgaagccagaggacggaagagaagacaagtgggtttggactcggatgaacccttcgggggtcaagcccaccccacggtctggcttttccgtggccatggccccgaatcaccagacactgttcttcgggggtgtctgtgacgaggaagaggaggagagcctgtcgggcgagttcttcaacgatctgtacttctacgacgccaccaggaaccgttggtttgagggacagctgaagggacccaagtctgaaaagaagaaacgcaggcggggcagaaaagaggagcccgaaggtggtagcaggccggcgtgtgggggagctggcacccaggggcctgtgcagctggtcaaggaggtggtggccgaggatggcaccgtggtcaccattaagcaggtgctcaccgcgccaggctcggcggggcagccccggtctgaggacgaag

SEQ ID NO: 10895 - DNA, 875 bp, Homo sapiens
  source 1..875: mol_type = unassigned DNA
atctactacaacgacgtgtatgcctttaatctggacaccttcacatggagcaagctgtccccgtcagggacggggcccacacccagatcaggctgccagatgtccgtcactccccagggcggcatcgtcgtctatgggggctactcgaaacagagagttaagaaagacgtggacaagggcacacggcactcagacatgttcctgctgaagccagaggacggaagagaagacaagtgggtttggactcggatgaacccttcgggggtcaagcccaccccacggtctggcttttccgtggccatggccccgaatcaccagacactgttcttcgggggtgtctgtgacgaggaagaggaggagagcctgtcgggcgagttcttcaacgatctgtacttctacgacgccaccaggaaccgttggtttgagggacagctgaaggtagtgcaacctctgagtagcatgcgccgtggtgcgcagccctaacttgggtccctgccaccactgccttcctccagcaccttttggtattggggcccccaaagcccatgagctctctcaagaggggcgagggttccgtctctgactgtcctgggtgactaggcttggagagcccttggtcacggtccccttagtctgtcctggatgctggcggggctgctacctcagaagccagttgccctgggctgaggtgcccgggacctccccggccctctgtgtgagaagggtttgctggaggtcctggtgtggaccagcctgtgttatgacccttgagcttccctggtttccgacaccatctttactgtccacgtgagcatagctgctgtccagggccagcccagcacaggcacagcagtgggtgacagtcccagaagggg

SEQ ID NO: 10896 - DNA, 585 bp, Homo sapiens
  source 1..585: mol_type = unassigned DNA
agctattttgagatctcttcagtctcttgcttgagtgggagttgcctgcaaagctgccccattgcgactttgcagcatagatctccgtactgtttcttatttttgtttctgtgtgtttgttttaaatgtgtgtgcgctcatggattacatctactacaacgacgtgtatgcctttaatctggacaccttcacatggagcaagctgtccccgtcagggacggggcccacacccagatcaggctgccagatgtccgtcactccccagggcggcatcgtcgtctatgggggctactcgaaacagagagttaagaaagacgtggacaagggcacacggcactcagacatgttcctgctgaagccagaggacggaagagaagacaagtgggtttggactcggatgaacccttcgggggtcaagcccaccccacggtctggcttttccgtggccatggccccgaatcaccagacactgttcttcgggggtgtctgtgacgaggaagaggaggagagcctgtcgggcgagttcttcaacgatctgtacttctacgacgccaccaggaaccgttggtttgagggacagctgaa

SEQ ID NO: 10897 - DNA, 559 bp, Homo sapiens
  source 1..559: mol_type = unassigned DNA
atgtgtttcaagatatttctctgtctgttgcttgtctttttattttctaatggtgtatttttgaagttttttatgttggcggagtccagtttataatgttctacctaggaaatctttatgcagtccaaggtcttggagatgttctcctgttttattcttgaggtttgagcttagctagctgggctcttagcaggatggttttggtagttgatagatcagattaaatggtatttaatttgtgagcagtaagtgctcacaaaacagaaatcagtgtaaaaattggattttgtttgttgttgtcgtctttagaacaaccagaaattaagcaggttgatagtgtctttttgtttatttcattttagatcaacaggcggtccttcgggtcggagtggacatcggatggtggcctggaagagacaattgatcctgtttggtggcttccatgaaagtacacgggattacatctactacaacgacgtgtatgcctttaatctggacaccttcacatggagcaagctgtccccgtcagggacggggcccacacccagatcaggctgcc

SEQ ID NO: 10898 - DNA, 562 bp, Homo sapiens
  source 1..562: mol_type = unassigned DNA
gttttctttcctggtgtcccgtcgcggcttgggacccggcaagatgggcaagaagggcaagaaggagaagaagggccgcggcgcggagaagacggccgccaagatggagaagaaggtgtctaagcgctcgcggaaggaggagatgtgactgagcccagtcgaatcacactgattggaggaaagctgagcgggctgtggctccgcggcgggtcctgggaataagtctcacgtgtgcctgcttgcttgccctaggaagacctggaagcgctcatagcccatttccagacactcgatgccaagaggactcagactgtggaacttccgtgccccccaccctcaccaagacttttttgtataacgagctctatgtctacaataccagaaaggacacctggaccaaagttgacatccccagtccacctccgaggcgctgtgctcaccagatcaacaggcggtccttcgggtcggagtggacatcggatggtggcctggaagagacaattgatcctgtttggtggcttccatgaaagtacacgggattacatctactacaacgacgtgt

SEQ ID NO: 10899 - DNA, 582 bp, Homo sapiens
  source 1..582: mol_type = unassigned DNA
acagatgtgactgagcccagtcgaatcacactgattggaggaaagctgagcgggctgtggctccgcggcgggtcctgggaataagtctcacgtgtgcctgcttgcttgccctaggaagacctggaagcgctcatagcccatttccagacactcgatgccaagaggactcagactgtggaacttccgtgccccccaccctcaccaagacttttttgtataacgagctctatgtctacaataccagaaaggacacctggaccaaagttgacatccccagtccacctccgaggcgctgtgctcaccaggcggtggtagtgcctcaaggtggcggacagctgtgggtctttggaggggagtttgcctctcccaacggagagcagttctaccactacaaggatctctgggtcctgcatttggccaccaagacctgggaacaagtcaaatcaacaggcggtccttcgggtcggagtggacatcggatggtggcctggaagagacaattgatcctgtttggtggcttccatgaaagtacacggaaccagcatggcaattgattgatgtgaaggtgccactcacaccttt

SEQ ID NO: 10900 - DNA, 560 bp, Homo sapiens
  source 1..560: mol_type = unassigned DNA
acgagcacctgtttccgagcggagagcgcgggccgttttctttcctggtgtcccgtcgcggcttgggacccggcaagatgggcaagaagggcaagaaggagaagaagggccgcggcgcggagaagacggccgccaagatggagaagaaggtgtctaagcgctcgcggaaggaggaggaagacctggaagcgctcatagcccatttccagacactcgatgccaagaggactcagactgtggaacttccgtgccccccaccctcaccaaggttaaatgcctccctctcggttcatcctgagaaagatgagttaatcctttttggagaaaggacacctggaccaaagttgacatccccagtccacctccgaggcgctgtgctcaccaggcggtggtagtgcctcaaggtggcggacagctgtgggtctttggaggggagtttgcctctcccaacggagagcagttctaccactacaaggatctctgggtcctgcatttggccaccaagacctgggaacaagtcaaatcaacaggcggtccttcgggtcggagtggacatcgga

SEQ ID NO: 10901 - DNA, 563 bp, Homo sapiens
  source 1..563: mol_type = unassigned DNA
acctgtttccgagcggagagcgcgggccgttttctttcctggtgtcccgtcgcggcttgggacccggcaagatgggcaagaagggcaagaaggagaagaagggccgcggcgcggagaagacggccgccaagatggagaagaaggtgtctaagcgctcgcggaaggaggaggaagacctggaagcgctcatagcccatttccagacactcgatgccaagaggactcagactgtggaacttccgtgccccccaccctcaccaaggttaaatgcctccctctcggttcatcctgagaaagatgagttaatcctttttggagacttttttgtataacgagctctatgtctacaataccagaaaggacacctggaccaaagttgacatccccagtccacctccgaggcgctgtgctcaccaggcggtggtagtgcctcaaggtggcggacagctgtgggtctttggaggggagtttgcctctcccaacggagagcagttctaccactacaaggatctctgggtcctgcatttggccaccaagacctgggaacaagtcaaatcaacagg

SEQ ID NO: 10902 - DNA, 546 bp, Homo sapiens
  source 1..546: mol_type = unassigned DNA
agcacctgtttccgagcggagagcgcgggccgttttctttcctggtgtcccgtcgcggcttgggacccggcaagatgggcaagaagggcaagaaggagaagaagggccgcggcgcggagaagacggccgccaagatggagaagaaggtgtctaagcgctcgcggaaggaggagatgtgactgagcccagtcgaatcacactgattggaggaaagctgagcgggctgtggctccgcggcgggtcctgggaataagtctcacgtgtgcctgcttgcttgccctaggaagacctggaagcgctcatagcccatttccagacactcgatgccaagaggactcagactgtggaacttccgtgccccccaccctcaccaagacttttttgtataacgagctctatgtctacaataccagaaaggacacctggaccaaagttgacatccccagtccacctccgaggcgctgtgctcaccaggcggtggtagtgcctcaaggtggcggacagctgtgggtctttggaggggagtttgcctctcccaacggagag

SEQ ID NO: 10903 - DNA, 562 bp, Homo sapiens
  source 1..562: mol_type = unassigned DNA
tttctttcctggtgtcccgtcgcggcttgggacccggcaagatgggcaagaagggcaagaaggagaagaagggccgcggcgcggagaagacggccgccaagatggagaagaaggtgtctaagcgctcgcggaaggaggagcccggggtctgcaggaggatccgtcctgaccttggggttgagtgttctgcggctgctgctcatggattccctaaccggggccagttttatggcctgccgtgcgccaggcacagctccctgggctttactcctcacgagcaggaagacctggaagcgctcatagcccatttccagacactcgatgccaagaggactcagactgtggaacttccgtgccccccaccctcaccaaggttaaatgcctccctctcggttcatcctgagaaagatgagttaatcctttttggaggtgaatatttcaacggccaaaaaacttttttgtataacgagctctatgtctacaataccagaaaggacacctggaccaaagttgacatccccagtccacctccgaggcgctgtgctcaccaggcggtggtagt

SEQ ID NO: 10904 - DNA, 584 bp, Homo sapiens
  source 1..584: mol_type = unassigned DNA
atttctgtgcgccgagctccgccccacgagcacctgtttccgagcggagagcgcgggccgttttctttcctggtgtcccgtcgcggcttgggacccggcaagatgggcaagaagggcaagaaggagaagaagggccgcggcgcggagaagacggccgccaagatggagaagaaggtgtctaagcgctcgcggaaggaggagacctggaagcgctcatagcccatttccagacactcgatgccaagaggactcagactgtggaacttccgtgccccccaccctcaccaagatggaatcttgctctgtcgccaggctggagtgcaatggcatgatctcagctcactgcaacccccaactcccaggttcaagtggttctcctgcctcagcctcccgagtagctgggaccataggttaaatgcctccctctcggttcatcctgagaaagatgagttaatcctttttggaggtgaatatttcaacggccaaaaaacttttttgtataacgagctctatgtctacaataccagaaaggacacctggaccaaagttgacatccccagtccacctccgaggcgctgtgctca

SEQ ID NO: 10905 - DNA, 528 bp, Homo sapiens
  source 1..528: mol_type = unassigned DNA
acctgtttccgagcggagagcgcgggccgttttctttcctggtgtcccgtcgcggcttgggacccggcaagatgggcaagaagggcaagaaggagaagaagggccgcggcgcggagaagacggccgccaagatggagaagaaggtgtctaagcgctcgcggaaggaggagagggcaaataatcatcacagcagccctgagcagtgagcagcagatggttaagtgaagaaggcactggagccacggggtatcccgtagcagctgatggcggccatcacggttgtctccttccctctggtcctcagcccggggtctgcaggaggatccgtcctgaccttggggttgagtgttctgcggctgctgctcatggattccctaaccggggccagttttatggcctgccgtgcgccaggcacagctccctgggctttactcctcacgagcaggaagacctggaagcgctcatagcccatttccagacactcgatgccaagaggactcagactgtggaacttccgtgccccccacc

SEQ ID NO: 10906 - DNA, 564 bp, Homo sapiens
  source 1..564: mol_type = unassigned DNA
acctgtttccgagcggagagcgcgggccgttttctttcctggtgtcccgtcgcggcttgggacccggcaagatgggcaagaagggcaagaaggagaagaagggccgcggcgcggagaagacggccgccaagatggagaagaaggtgtctaagcgctcgcggaaggaggagagggcaaataatcatcacagcagccctgagcagtgagcagcagatggttaagtgaagaaggcactggagccacggggtatcccgtagcagctgatggcggccatcacggttgtctccttccctctggtcctcagcccggggtctgcaggaggatccgtcctgaccttggggttgagtgttctgcggctgctgctcatggattccctaaccggggccagttttatggcctgccgtgcgccaggcacagctccctgggctttactcctcacgagcagatggagtcctgctctgtcacccagagcaagtgtcgcagtggcatgatctcagctcattgcaacctctgcctcccaggctcaagcaattctcctgcctcagcctcccgagtagtttggga

SEQ ID NO: 10907 - DNA, 1422 bp, Homo sapiens
  source 1..1422: mol_type = unassigned DNA
atttctgtgcgccgagctccgccccacgagcacctgtttccgagcggagagcgcgggccgttttctttcctggtgtcccgtcgcggcttgggacccggcaagatgggcaagaagggcaagaaggagaagaagggccgcggcgcggagaagacggccgccaagatggagaagaaggtgtctaagcgctcgcggaaggaggaggaagacctggaagcgctcatagcccatttccagacactcgatgccaagaggactcagactgtggaacttccgtgccccccaccctcaccaaggttaaatgcctccctctcggttcatcctgagaaagatgagttaatcctttttggaggtgaatatttcaacggccaaaaaacttttttgtataacgagctctatgtctacaataccagaaaggacacctggaccaaagttgacatccccagtccacctccgaggcgctgtgctcaccaggcggtggtagtgcctcaaggtggcggacagctgtgggtctttggaggggagtttgcctctcccaacggagagcagttctaccactacaaggatctctgggtcctgcatttggccaccaagacctgggaacaagtcaaatcaacaggcggtccttcgggtcggagtggacatcggatggtggcctggaagagacaattgatcctgtttggtggcttccatgaaagtacacgggattacatctactacaacgacgtgtatgcctttaatctggacaccttcacatggagcaagctgtccccgtcagggacggggcccacacccagatcaggctgccagatgtccgtcactccccagggcggcatcgtcgtctatgggggctactcgaaacagagagttaagaaagacgtggacaagggcacacggcactcagacatgttcctgctgaagccagaggacggaagagaagacaagtgggtttggactcggatgaacccttcgggggtcaagcccaccccacggtctggcttttccgtggccatggccccgaatcaccagacactgttcttcgggggtgtctgtgacgaggaagaggaggagagcctgtcgggcgagttcttcaacgatctgtacttctacgacgccaccaggaaccgttggtttgagggacagctgaagaaactcaggagtggctggaggagacggactcggaagaggacagtgaggaggttgagggcgccgagggtggggtcgacgacgaagacagcggagaggagagcggtgcggaggactgagagcccctgccaggggcgcctggcaagtgctgtgcccacgtccgcccaggacccagccgtgttgagtgaagctcttggggccagcgtgcgtcctgacgcacaggagagagctgaaggtgggtggcccaggccagggtgtgaactttctcccatggtttag

SEQ ID NO: 10908 - DNA, 4444 bp, Homo sapiens
  source 1..4444: mol_type = unassigned DNA
gcagatgagcagagtcctgctagagaggtcagctcagcgtccaggagggggcgcctgcccccgaggaggccacggacatgcctgggaagttgctgccggagaagtgtgctctgatgtggctacatttggggacgcgggctccccagaggcccaagcgagaaagccgggggttcccaggctgggggtgcaggacgggccaggcactgccctgcagggcccgcccccctgcccctgcaccctcacacccatcttcctctctcagcctgaccccagggcctgggagcccccggcagaccggccctccttgccaaacagtggctgccctttatggactcggcgcctggcagagccactgtggaggaggagttggctgtcatggtcaggggaggcagcccttgggttgtcaaggttggtggtcaacgttgaacccatatctgctggaatctcccggtctgttccacacacgatcatgcgggaagctctgggacccgaaggctgttctgatctcgggggtcacaagttctcacagcagcctggggtcaccagggaccagacccggcgttagcctctgtaaggagctgcctggctgctgggctgagctttgttgcaggcccaggaagatgaccaagaaggacagagcagagccccatctaccactgctgggagggcccgagggagcacgtgcacagcagagccccatcctccactccctgggctcgaagaggcttcctcggtgtggatggcagctgttaacgagcagtggtggtgcagctggaggcctctgtcccatggggcacagacgggagaaggatggcggacgggtgtgcacgcttgggaggacgggcgggcggcataggcctgagcaggtggcatgggcgcacgagaagggtgtgtctgagacaggatgtttatcccaaatgccaggagtggacgaggcggacgagtggcagtgaggtaggcatgtgaggttgttgcctggcccactctgccgaccccagaaacccagcggcctgggcccagcacccggctacacatggggtgagctcacgcccacactgtggcctgtgcccgtcacggggctgcttgcttctcctaggcttgggaacaagctggcatgaacgctgtggccgcattcacagctcaggcacttccactttgggtttcatgaagaaacagacttaaagagcatttgttcctaatgggtgggctgaagcttgggaggagcattcagcttctctccacagtatggcttcacctgttcctgagcgccctgctaccctcttgctaacctgggtggctgaggtcctctgctttggtggcgttgacttcccgtctgcagccagcgccaggtgccagcccccgcctctgctcatcgggaagcgctggcctgcaggtgctttgtggttgccacggacccttgttctgtccctttccagcacccaccccccacgcgctgtgcattccgtagttcattttcaaggcagggggcacatggtgaaaatacagcctggctttttttcaacaaatgcagctgcactcttccttgcttgttttgaaggctgagccagcaacctccttggcacctggggacagtcgcttcctcagtttctgcgtaccgactgcctcacctgacacgcggcctgggcgcgagagaagccaaccaggtgcctgagttgactgactccttccgccctccagcttcctccctccgccctccaacctcctccctccaccctccaacctcctccctccgccctccaacctcctccctctgccctgcaacctcctcccctctgccctccaacctcctccctccgccctccaatctcctccctctgccctgcatcctcctcccctccgccctccaacctcctccctccgccctccaacctcctccctccgccctccaacctcctccctccgccctctgccctcctccctctgccctccagcgttctccctcctccctccaccctgtttcctccctccacctcttctctcctccctccaccctcttccttctaccctcttccctctgccctcttcttctgccctcctccctccaccctctttcctccctcctccctccaccctctgccctcctccctctaccccctgccctcctccctccgccttatctggaatcggggtcttggtcctgggctggaggcagaccctggcccgggcgaggttaaaggtactgcaggagggcggcatcatgatgtcctgaagcttgttgcgcccggtgctgtcggccggctgaaggcagaaacagtcacagcacctgcagctatggaaggcgacgactgaaaatctaataggcaccttgatgtcaagtttccaagaccaaaggcaagaacagtcagatcaaacttcggaagagtcagagaaagtgagcatgacctagaggagggagacggtccttccgctgtctcctgcagagcgtctgtcgcacgtatgaggtgaaatccgcactgtcccatgaagactgtgaggggagttgccacccgcacacggcccaggagcgccagcagcttggggaccaccacaggcctcagggtctcttcagtccgacgggtccagctgtcgataaaacctcccggggaaggagtaaaggacaaccaagaacctgaactgcaaaagtatgaaaaacatttcatttccctcgagttctccacactttaggtctgcagcgccttgggggtgactgatggccctccgtgagacgcggtggccatgtgcttctacaagtgaaaaggagcaagtgtggttagagcctggagtatggacgtcccggggaccgctggcccatggcctggcttggggccttacaggggagcgagctgagtgaatgcaggggagggcccgtctttctacagtgtgtatcttgtttttgagacagactcactctgtcgtccaggctggagtgcagtggcgcgatctctgctcactgcaacctctgcctcccgggttcaagcgattctcctgcctcagcctcctcagtagctgggattacaggcacctgccaccacgcctggctaatttttgtattttttttttagtagagatggggtttcactatgttggtcaggctggcctcgagctcctgacctcaggtgatccacctgccttggcctcccaaagtgctgggattacaggcatgagccaccgcgcccggccctgccctgcttttctacatcaccactgtcttgtcagttagctcggctcaggcattgcatgcctgatctgtatctttgggaatcctgtgaggtaatggttctagatccaaaagaatggataaagagactgtttcagttcccgaaattatccaggcacattctgtgcgctactgaacttcagaaagcaccagtccatccagtgtgcagaggctggtaagtaaaacaggccagccgtgggcacagacagtttcaccagaggccccggggcagagggtcttctccagctcttccagggcggggctcatctgttcctgggccagaggtggacctgtctgcaggcttgtaagggtggggagacgccagcctggcccatgggctgtccacacccaccccccgcagaccgcgctgctgtctgcaggggatgccaccacttcctcctggcctcgggtgcacaggtgaaacatgaagaagctattggggcggaaaatggctctcaccaggctgctctcgggttaatgaaaactcgtcaaattctccatgcagcagcagccagccgggcacatgctgtcctgccctgcccgactgtgtgcagggaagcaggtcccctgggcctgggcggagggactgcgtgcctgtcagggaaggccgaggctccggacaggcgggaagcagccttctgcttaatcaccccatgtggaaaccaattaaagattcgattctctcagacccggggcattttagccttggttgaatcctcctggaattcacagggaagtggctttgccctctgccctcgctgctggaaggcaaggggccgttctcgccttggttttctaggttgtgttgcggcaggagctgactgcccctaggcctagatctctgcacaacttcgctcagggacacctgcctctgtgcatgtctcatggtgtgaatgtgtttcctgctcacaggtaccgttttgtgtcatgcagttactggaatgtacaaaagcagctgtgatctttgtgagagctgcacagagcaggagtctgagagctgcacagagcaggagtctttatttggttcacttctggtctgcagcaaccacttgctactaaaagatggaaaagatgtacaaaaatgtcacagccctttagaaagcgacattatcagaaatgtatgaccttcagtcctccctccctctcctatgcccccaccagaccaggcggcgagaaggaacagggagtgaacatgtaacggaaaacaataaaactgaatttaactgg

SEQ ID NO: 10909 - DNA, 3256 bp, Homo sapiens
  source 1..3256: mol_type = unassigned DNA
ggtcaggcggaggctctgccgctgcggccgcagtagctcagctcctattcctgggaagcctggaacggggacttttgaaaataactgcagcggcattcgggttagggtccgtgctctccgcctgcgccaggacagggtgaagtggtcggggcgagcagagggtgcgaaggtgcgggtgctggtgcctcgcagcaggagggagccccggctgcgccgcgcgactccctctttggccctcggagcgcagcacccggcggacaagcggcgggacgccaggacgcggcgagcaagatctctcgtggaagaggaagaccaacacatgaaattgtcccttggaggcagcgaaatgggcctctcatcccatttgcagtcttccaaggcaggacctacacgcatctttaccagcaatacccacagttctgtggtgttacagggctttgaccagcttcgacttgaaggattgctttgtgatgtgaccctgatgccaggtgacacagatgatgctttccctgtgcatagagtcatgatggcatctgctagtgattacttcaaggctatgttcacaggtggaatgaaagaacaagatttaatgtgcattaaacttcatggtgtgagcaaagtcggtctaaggaaaattattgatttcatttatactgcaaagctttctcttaatatggacaaccttcaagacacgctggaagctgccagtttcctacagattctgccagttttggacttctgtaaagtgtttctcatatctggggtcactttagacaactgtgttgaagttggacggattgccaacacctacaatctaaccgaagtggataaatacgttaacagtttcgtcttgaagaattttcctgcattgctgagcacaggggagttcttgaaactcccttttgagcgtcttgccttcgtgctttccagtaatagccttaagcactgtactgaacttgagctctttaaggctacctgtcgttggcttcgcctggaagagcctcggatggactttgctgcaaaattaatgaagaacatacgatttccactgatgacaccacaggagctcattaattacgtgcaaacggtggatttcatgagaactgacaatacttgtgtgaatttgcttttggaagccagcaattaccaaatgatgccatatatgcagccagttatgcagtcagacaggactgccattaggtctgacaccactcacttggttacactaggaggagtgctgaggcagcagctggttgtcagtaaggaattgcgcatgtatgatgaaaaggcccatgagtggaaatcgttagcccccatggatgccccaaggtaccagcatggcatcgccgtcattggaaattttctctatgtggttggcggacagagtaattatgatacaaaaggaaaaacggcagttgatacagtcttcagatttgatcctcgatacaataaatggatgcaagttgcatctttaaatgaaaagcgcaccttcttccacctaagtgccctcaaaggatatctgtatgcagttggtgggcgaaatgcagcaggtgaactgcccacagtagaatgttacaatccaagaacaaatgaatggacctatgttgccaaaatgagtgagccccactatggccatgctggaactgtgtatggaggagtgatgtatatttcaggaggaattactcatgatactttccaaaaggagctcatgtgctttgaccctgatactgacaaatggatccagaaggcgccaatgaccactgtcagaggtctgcattgcatgtgtacagtgggagaaaggctctatgtcattggtggcaatcacttcagaggaacaagtgattatgatgatgtcctaagctgtgaatactattcacctatccttgaccagtggaccccaattgctgccatgttaagagggcagagtgatgttggggtcgctgtcttcgaaaataaaatctatgtggttggggggtattcttggaataatcgttgtatggtagagatagtgcagaaatatgatccagataaagatgaatggcataaggtttttgatctgccagaatcccttggtggcattcgtgcttgcacactcacagtttttccaccagaagaaaccacaccatcaccttctagagagtcccctctttctgcaccttaagatcatctctacaactaagatgctgtagttctatctttgcaatgtgtcataaattctcttctttttcccccttaagtagtatatatgttaggattaccctctggtaattgatacagatattggaaaaaagacaacattgatgttatttgtgctctttgtttggcctagaatgtttataaagtggtaacacaaccattctggaaatgtatcccatagaagctgatgtttaacatatgaaaaaaaaagtattgtctataaaatgtttcttcagtactttttaaatgctgtgtattgggtgtaaggtatttgtcatcttacattagtaaacccaataagccaagttgaaggtggattatagtaaatgtacaactgtgctcactaggcttcaagtaaaaagttttcctttcatctttgactgtaagatgtcaaagggaggcagcctgcttgaacaggaaacaatacacaaaaggttgccaactcgcatgagctacctccctcttttcataaagtatttttgacatatctgtcaacccacttgactgtgtgggtgcattgagaacacaaagtttcctagacacacaggagaagtagcttaaattcactaatattaatttaaaaagcagcatgaaccctctacttataaacaagggtttggtgtttttaaagtgtgtatacatacatacacatacacacatgcacatatgtcaaatataatttttttaaaaattgagtggcacatcaaagaaatgtgaaattaaaaagaattcttccaaaaagcagcttccattaaaatgggaattcagtatgcacatactgaatgcatatatgtagaaccatacagaatttaggtggataagggctagaaattttgagcaacaaaatttgtcacttgaccagattttatcttcaaaaactgtattctactccttctcctttgctgttgaggtaacttgcatattatatgtattctgtatactcagttcataaggttatttagcacaaagtatagcagcttcacctggagagctgcttttgctcagtaaattcaacttccatgttttatctttttttgttcaataaaaacatttaatgtca

SEQ ID NO: 10910 - DNA, 5331 bp, Homo sapiens
  source 1..5331: mol_type = unassigned DNA
cttggaattactcagataatcattcctttaagcatagattgatataattgtggcttggggtttgcagagaagtgttacctccttgcaatgttgaagaacagtgctcttcacattcaatcaataaacttaataaaggggagatagatgggaatattgaatctgctaagaaggttaacatggcatgtactgttaccaaagcagaaattagtagggagtgttttgaatgttaaaaagtcaaaagatactgataaaacatcatgaaaaagataattttagtccaggcttcttcagcttttgaagtaattaattaaaaaggcaagcatattatgttggcaagaaagggctgcattttcactttttgctttctgtttttaagagcaagagacaaatgacaaagtaaataagttgttacttgtagtttactcaaaaaagcaatttccgggatatgtcattgtggcaatgtgaattcagctttactcctatcccttttacatctgcagtttcataagaatgataattgatggtcatttaagcactgcataataaagaaatgtctttggaatgatctacagaaagaagattctgtattcattcagaggacatatattaagtctttcgtgctaggctctgtgcagggaatacagaaactaataaaacagtctgcttgaatatcctattaatataatctggatgaatagacattttctggttagggataacagtcaccatcaatcaatttctgacttttccaattgattctgtaattttaaacgtctgtccacaaaagttgtttaaaattgtgtgtgtgtgctatatatcataaatataacttaattctctttaaagctatctctgaaactctggtggaaggctatatccagtttcttttatgctttttaaaatcttaagttattctcttctttattaaatatctatcagaattgaattaaacatggttatatattattaattcatttttggttatactatggctctaatatcattaagaagaattgatgtcatccttaaggccagaatttttgctaattattgcaagatttaaaaccacttagttggtgtcataattcaaaaagcagaatctttagtatggtctttttcttgttaaaactgatcaacttggggttttaggtatgacaggaaaaaaaggtgaaacctttctgatattggatagctcagttagacagttagaaaagcaaataattcaaaattgaggaaattacagaaaaaatgaagagttccagcacttgaaaatctgctctccttcttttttcctaatgtctattttagcagtctttttagcagtctgtatcatgaatgcagaaccaaattcatgagccatgggctccccactcttaggcaggtgatccagagattattttagcaatgtatacctatggagaaacacaagatctcttctaaggaatgatgaaaggttattaataatggcacatttttagtataacctgagatttttaaactatcaaatgtattgtcatattctctttgcatctaagtgacctactgactaaggttctcctattcttacttatgccccttgaaaatactattgctgcaatacatgcaaatacagaattgcctgtatttatatttttagtattcatttctttgaaaagatggaaatgtgactagattgtagctattaaacaatcccaaactggtaagtgagagatactgctagaaaaagaaattatatcatgtgaaaaattttgttcagttggggttgattagaactactactaataacagaagataaagtaatgcattaatatataacaattaatcttttacttttattaatgggggtttggagtgggaatcagactagacctagattcaaaccctgggccaaccactttaataagtggtttctgacccttctttagtctgtgtataaaattattggcaagtacctgctatataatgactattcaataaatggtagctatcatttttatcttttcaaaattaggtgttccaaattaattttaactatatgcagcataatttgatggcattgctatctaaatagtaacatatcaacagtaattactgtggcctttaaaaactctgtgactataattttgaaccaccttttaagttgatttctcagttatcatctgtatattctgtacttggaaaccattttacaaatatacatttcttctaagataaagagtggtacaagcgtataatatagtgaaacaatattcaccatattgcatggtcatatgattgcaatagtgactgattatttttctaaataatctcattgtaaattgtacaagttttaatttccccttctttcttatgtaaaaaaactttcagatctctcgtggaagaggaagaccaacacatgaaattgtcccttggaggcagcgaaatgggcctctcatcccatttgcagtcttccaaggcaggacctacacgcatctttaccagcaatacccacagttctgtggtgttacagggctttgaccagcttcgacttgaaggattgctttgtgatgtgaccctgatgccaggtgacacagatgatgctttccctgtgcatagagtcatgatggcatctgctagtgattacttcaaggctatgttcacaggtggaatgaaagaacaagatttaatgtgcattaaacttcatggtgtgagcaaagtcggtctaaggaaaattattgatttcatttatactgcaaagctttctcttaatatggacaaccttcaagacacgctggaagctgccagtttcctacagattctgccagttttggacttctgtaaagtgtttctcatatctggggtcactttagacaactgtgttgaagttggacggattgccaacacctacaatctaaccgaagtggataaatacgttaacagtttcgtcttgaagaattttcctgcattgctgagcacaggggagttcttgaaactcccttttgagcgtcttgccttcgtgctttccagtaatagccttaagcactgtactgaacttgagctctttaaggctacctgtcgttggcttcgcctggaagagcctcggatggactttgctgcaaaattaatgaagaacatacgatttccactgatgacaccacaggagctcattaattacgtgcaaacggtggatttcatgagaactgacaatacttgtgtgaatttgcttttggaagccagcaattaccaaatgatgccatatatgcagccagttatgcagtcagacaggactgccattaggtctgacaccactcacttggttacactaggaggagtgctgaggcagcagctggttgtcagtaaggaattgcgcatgtatgatgaaaaggcccatgagtggaaatcgttagcccccatggatgccccaaggtaccagcatggcatcgccgtcattggaaattttctctatgtggttggcggacagagtaattatgatacaaaaggaaaaacggcagttgatacagtcttcagatttgatcctcgatacaataaatggatgcaagttgcatctttaaatgaaaagcgcaccttcttccacctaagtgccctcaaaggatatctgtatgcagttggtgggcgaaatgcagcaggtgaactgcccacagtagaatgttacaatccaagaacaaatgaatggacctatgttgccaaaatgagtgagccccactatggccatgctggaactgtgtatggaggagtgatgtatatttcaggaggaattactcatgatactttccaaaaggagctcatgtgctttgaccctgatactgacaaatggatccagaaggcgccaatgaccactgtcagaggtctgcattgcatgtgtacagtgggagaaaggctctatgtcattggtggcaatcacttcagaggaacaagtgattatgatgatgtcctaagctgtgaatactattcacctatccttgaccagtggaccccaattgctgccatgttaagagggcagagtgatgttggggtcgctgtcttcgaaaataaaatctatgtggttggggggtattcttggaataatcgttgtatggtagagatagtgcagaaatatgatccagataaagatgaatggcataaggtttttgatctgccagaatcccttggtggcattcgtgcttgcacactcacagtttttccaccagaagaaaccacaccatcaccttctagagagtcccctctttctgcaccttaagatcatctctacaactaagatgctgtagttctatctttgcaatgtgtcataaattctcttctttttcccccttaagtagtatatatgttaggattaccctctggtaattgatacagatattggaaaaaagacaacattgatgttatttgtgctctttgtttggcctagaatgtttataaagtggtaacacaaccattctggaaatgtatcccatagaagctgatgtttaacatatgaaaaaaaaagtattgtctataaaatgtttcttcagtactttttaaatgctgtgtattgggtgtaaggtatttgtcatcttacattagtaaacccaataagccaagttgaaggtggattatagtaaatgtacaactgtgctcactaggcttcaagtaaaaagttttcctttcatctttgactgtaagatgtcaaagggaggcagcctgcttgaacaggaaacaatacacaaaaggttgccaactcgcatgagctacctccctcttttcataaagtatttttgacatatctgtcaacccacttgactgtgtgggtgcattgagaacacaaagtttcctagacacacaggagaagtagcttaaattcactaatattaatttaaaaagcagcatgaaccctctacttataaacaagggtttggtgtttttaaagtgtgtatacatacatacacatacacacatgcacatatgtcaaatataatttttttaaaaattgagtggcacatcaaagaaatgtgaaattaaaaagaattcttccaaaaagcagcttccattaaaatgggaattcagtatgcacatactgaatgcatatatgtagaaccatacagaatttaggtggataagggctagaaattttgagcaacaaaatttgtcacttgaccagattttatcttcaaaaactgtattctactccttctcctttgctgttgaggtaacttgcatattatatgtattctgtatactcagttcataaggttatttagcacaaagtatagcagcttcacctggagagctgcttttgctcagtaaattcaacttccatgttttatctttttttgttcaataaaaacatttaatgtc

SEQ ID NO: 10911 - DNA, 3234 bp, Homo sapiens
  source 1..3234: mol_type = unassigned DNA
gcagagttctgaagcagtttatattcttcttacattttgccttctcctagctggaaagcagagggactggaatttttgaaacgggcttttcccataatggcattcttgatttgtgtggccagagcttgcacaggaggaaagcaggctgctgaatttagtcactgatctctattagcggtagcctaaggctatgctgaggtttatatcccatttgtattgttgcagctcaaaagaagattgttcagaggatgacaagtgtattctgagtagatctctcgtggaagaggaagaccaacacatgaaattgtcccttggaggcagcgaaatgggcctctcatcccatttgcagtcttccaaggcaggacctacacgcatctttaccagcaatacccacagttctgtggtgttacagggctttgaccagcttcgacttgaaggattgctttgtgatgtgaccctgatgccaggtgacacagatgatgctttccctgtgcatagagtcatgatggcatctgctagtgattacttcaaggctatgttcacaggtggaatgaaagaacaagatttaatgtgcattaaacttcatggtgtgagcaaagtcggtctaaggaaaattattgatttcatttatactgcaaagctttctcttaatatggacaaccttcaagacacgctggaagctgccagtttcctacagattctgccagttttggacttctgtaaagtgtttctcatatctggggtcactttagacaactgtgttgaagttggacggattgccaacacctacaatctaaccgaagtggataaatacgttaacagtttcgtcttgaagaattttcctgcattgctgagcacaggggagttcttgaaactcccttttgagcgtcttgccttcgtgctttccagtaatagccttaagcactgtactgaacttgagctctttaaggctacctgtcgttggcttcgcctggaagagcctcggatggactttgctgcaaaattaatgaagaacatacgatttccactgatgacaccacaggagctcattaattacgtgcaaacggtggatttcatgagaactgacaatacttgtgtgaatttgcttttggaagccagcaattaccaaatgatgccatatatgcagccagttatgcagtcagacaggactgccattaggtctgacaccactcacttggttacactaggaggagtgctgaggcagcagctggttgtcagtaaggaattgcgcatgtatgatgaaaaggcccatgagtggaaatcgttagcccccatggatgccccaaggtaccagcatggcatcgccgtcattggaaattttctctatgtggttggcggacagagtaattatgatacaaaaggaaaaacggcagttgatacagtcttcagatttgatcctcgatacaataaatggatgcaagttgcatctttaaatgaaaagcgcaccttcttccacctaagtgccctcaaaggatatctgtatgcagttggtgggcgaaatgcagcaggtgaactgcccacagtagaatgttacaatccaagaacaaatgaatggacctatgttgccaaaatgagtgagccccactatggccatgctggaactgtgtatggaggagtgatgtatatttcaggaggaattactcatgatactttccaaaaggagctcatgtgctttgaccctgatactgacaaatggatccagaaggcgccaatgaccactgtcagaggtctgcattgcatgtgtacagtgggagaaaggctctatgtcattggtggcaatcacttcagaggaacaagtgattatgatgatgtcctaagctgtgaatactattcacctatccttgaccagtggaccccaattgctgccatgttaagagggcagagtgatgttggggtcgctgtcttcgaaaataaaatctatgtggttggggggtattcttggaataatcgttgtatggtagagatagtgcagaaatatgatccagataaagatgaatggcataaggtttttgatctgccagaatcccttggtggcattcgtgcttgcacactcacagtttttccaccagaagaaaccacaccatcaccttctagagagtcccctctttctgcaccttaagatcatctctacaactaagatgctgtagttctatctttgcaatgtgtcataaattctcttctttttcccccttaagtagtatatatgttaggattaccctctggtaattgatacagatattggaaaaaagacaacattgatgttatttgtgctctttgtttggcctagaatgtttataaagtggtaacacaaccattctggaaatgtatcccatagaagctgatgtttaacatatgaaaaaaaaagtattgtctataaaatgtttcttcagtactttttaaatgctgtgtattgggtgtaaggtatttgtcatcttacattagtaaacccaataagccaagttgaaggtggattatagtaaatgtacaactgtgctcactaggcttcaagtaaaaagttttcctttcatctttgactgtaagatgtcaaagggaggcagcctgcttgaacaggaaacaatacacaaaaggttgccaactcgcatgagctacctccctcttttcataaagtatttttgacatatctgtcaacccacttgactgtgtgggtgcattgagaacacaaagtttcctagacacacaggagaagtagcttaaattcactaatattaatttaaaaagcagcatgaaccctctacttataaacaagggtttggtgtttttaaagtgtgtatacatacatacacatacacacatgcacatatgtcaaatataatttttttaaaaattgagtggcacatcaaagaaatgtgaaattaaaaagaattcttccaaaaagcagcttccattaaaatgggaattcagtatgcacatactgaatgcatatatgtagaaccatacagaatttaggtggataagggctagaaattttgagcaacaaaatttgtcacttgaccagattttatcttcaaaaactgtattctactccttctcctttgctgttgaggtaacttgcatattatatgtattctgtatactcagttcataaggttatttagcacaaagtatagcagcttcacctggagagctgcttttgctcagtaaattcaacttccatgttttatctttttttgttcaataaaaacatttaatgtc

SEQ ID NO: 10912 - DNA, 3972 bp, Homo sapiens
  source 1..3972: mol_type = unassigned DNA
attaagagcatgctactctgtacttcgctgctgcagaagagagagtgatatttgtgttactacagcatgttgtaaatgtgtgagattttgctcatctcagcttggaaataagaatagggaaaggagagcaacttgaatcagaagctactagaagaacctgcagagttctgaagcagtttatattcttcttacattttgccttctcctagctggaaagcagagggactggaatttttgaaacgggcttttcccataatggcattcttgatttgtgtggccagagcttgcacaggaggaaagcaggctgctgaatttagtcactgatctctattagcggtagcctaaggctatgctgaggtttatatcccatttgtattgttgcagctcaaaagaagattgttcagaggatgacaagtgtattctgagtaggtatgttgttgtttcattttcatatgaaacccatctatgttttttcttgctactattggtcagaaatcaggttaataggtgcagaatatagtacagtgctgcagtatccctgttaaggtagaacaatggtattgcaagcttaaaaaaaaaaagcctggctgcttttattaaataaagctgcattgtatggtatgcacagtgcagtcctaaaaaaatatactgcagtcaacgcttttctggcactattgttgagttggaatgattgaatcatcatattgctttaggggacagaagaatttaaggaggtaccttacagccctattttacagattggaagcatcggtttaagggcactggcagaatcctttgcttgttctccgcggcagccactgctgtgtcagtacagtgtggaatggaagtcttagttggtagtctgttatggaaacgctctttactgttattgtagtaccgtggtgacaacatgccattgaaatggaaaacgagctctcctgctatctggaaattcccagttcctgtgcttaaaacatccaggtcaactccactttctccagcatacatatctctcgtggaagaggaagaccaacacatgaaattgtcccttggaggcagcgaaatgggcctctcatcccatttgcagtcttccaaggcaggacctacacgcatctttaccagcaatacccacagttctgtggtgttacagggctttgaccagcttcgacttgaaggattgctttgtgatgtgaccctgatgccaggtgacacagatgatgctttccctgtgcatagagtcatgatggcatctgctagtgattacttcaaggctatgttcacaggtggaatgaaagaacaagatttaatgtgcattaaacttcatggtgtgagcaaagtcggtctaaggaaaattattgatttcatttatactgcaaagctttctcttaatatggacaaccttcaagacacgctggaagctgccagtttcctacagattctgccagttttggacttctgtaaagtgtttctcatatctggggtcactttagacaactgtgttgaagttggacggattgccaacacctacaatctaaccgaagtggataaatacgttaacagtttcgtcttgaagaattttcctgcattgctgagcacaggggagttcttgaaactcccttttgagcgtcttgccttcgtgctttccagtaatagccttaagcactgtactgaacttgagctctttaaggctacctgtcgttggcttcgcctggaagagcctcggatggactttgctgcaaaattaatgaagaacatacgatttccactgatgacaccacaggagctcattaattacgtgcaaacggtggatttcatgagaactgacaatacttgtgtgaatttgcttttggaagccagcaattaccaaatgatgccatatatgcagccagttatgcagtcagacaggactgccattaggtctgacaccactcacttggttacactaggaggagtgctgaggcagcagctggttgtcagtaaggaattgcgcatgtatgatgaaaaggcccatgagtggaaatcgttagcccccatggatgccccaaggtaccagcatggcatcgccgtcattggaaattttctctatgtggttggcggacagagtaattatgatacaaaaggaaaaacggcagttgatacagtcttcagatttgatcctcgatacaataaatggatgcaagttgcatctttaaatgaaaagcgcaccttcttccacctaagtgccctcaaaggatatctgtatgcagttggtgggcgaaatgcagcaggtgaactgcccacagtagaatgttacaatccaagaacaaatgaatggacctatgttgccaaaatgagtgagccccactatggccatgctggaactgtgtatggaggagtgatgtatatttcaggaggaattactcatgatactttccaaaaggagctcatgtgctttgaccctgatactgacaaatggatccagaaggcgccaatgaccactgtcagaggtctgcattgcatgtgtacagtgggagaaaggctctatgtcattggtggcaatcacttcagaggaacaagtgattatgatgatgtcctaagctgtgaatactattcacctatccttgaccagtggaccccaattgctgccatgttaagagggcagagtgatgttggggtcgctgtcttcgaaaataaaatctatgtggttggggggtattcttggaataatcgttgtatggtagagatagtgcagaaatatgatccagataaagatgaatggcataaggtttttgatctgccagaatcccttggtggcattcgtgcttgcacactcacagtttttccaccagaagaaaccacaccatcaccttctagagagtcccctctttctgcaccttaagatcatctctacaactaagatgctgtagttctatctttgcaatgtgtcataaattctcttctttttcccccttaagtagtatatatgttaggattaccctctggtaattgatacagatattggaaaaaagacaacattgatgttatttgtgctctttgtttggcctagaatgtttataaagtggtaacacaaccattctggaaatgtatcccatagaagctgatgtttaacatatgaaaaaaaaagtattgtctataaaatgtttcttcagtactttttaaatgctgtgtattgggtgtaaggtatttgtcatcttacattagtaaacccaataagccaagttgaaggtggattatagtaaatgtacaactgtgctcactaggcttcaagtaaaaagttttcctttcatctttgactgtaagatgtcaaagggaggcagcctgcttgaacaggaaacaatacacaaaaggttgccaactcgcatgagctacctccctcttttcataaagtatttttgacatatctgtcaacccacttgactgtgtgggtgcattgagaacacaaagtttcctagacacacaggagaagtagcttaaattcactaatattaatttaaaaagcagcatgaaccctctacttataaacaagggtttggtgtttttaaagtgtgtatacatacatacacatacacacatgcacatatgtcaaatataatttttttaaaaattgagtggcacatcaaagaaatgtgaaattaaaaagaattcttccaaaaagcagcttccattaaaatgggaattcagtatgcacatactgaatgcatatatgtagaaccatacagaatttaggtggataagggctagaaattttgagcaacaaaatttgtcacttgaccagattttatcttcaaaaactgtattctactccttctcctttgctgttgaggtaacttgcatattatatgtattctgtatactcagttcataaggttatttagcacaaagtatagcagcttcacctggagagctgcttttgctcagtaaattcaacttccatgttttatctttttttgttcaataaaaacatttaatgtc

SEQ ID NO: 10913 - DNA, 2353 bp, Homo sapiens
  source 1..2353: mol_type = unassigned DNA
agagaatttgatgagagagggatccacaagaacatgacaaatgatgagagttcaaaccttaagagaaaaatgggcttattggagacggaggcaattgtcattaaaacaagccgatttcaaggatatattcaaaaaatcaacttcaggatctctcgtggaagaggaagaccaacacatgaaattgtcccttggaggcagcgaaatgggcctctcatcccatttgcagtcttccaaggcaggacctacacgcatctttaccagcaatacccacagttctgtggtgttacagggctttgaccagcttcgacttgaaggattgctttgtgatgtgaccctgatgccaggtgacacagatgatgctttccctgtgcatagagtcatgatggcatctgctagtgattacttcaaggctatgttcacaggtggaatgaaagaacaagatttaatgtgcattaaacttcatggtgtgagcaaagtcggtctaaggaaaattattgatttcatttatactgcaaagctttctcttaatatggacaaccttcaagacacgctggaagctgccagtttcctacagattctgccagttttggacttctgtaaagtgtttctcatatctggggtcactttagacaactgtgttgaagttggacggattgccaacacctacaatctaaccgaagtggataaatacgttaacagtttcgtcttgaagaattttcctgcattgctgagcacaggggagttcttgaaactcccttttgagcgtcttgccttcgtgctttccagtaatagccttaagcactgtactgaacttgagctctttaaggctacctgtcgttggcttcgcctggaagagcctcggatggactttgctgcaaaattaatgaagaacatacgatttccactgatgacaccacaggagctcattaattacgtgcaaacggtggatttcatgagaactgacaatacttgtgtgaatttgcttttggaagccagcaattaccaaatgatgccatatatgcagccagttatgcagtcagacaggactgccattaggtctgacaccactcacttggttacactaggaggagtgctgaggcagcagctggttgtcagtaaggaattgcgcatgtatgatgaaaaggcccatgagtggaaatcgttagcccccatggatgccccaaggtaccagcatggcatcgccgtcattggaaattttctctatgtggttggcggacagagtaattatgatacaaaaggaaaaacggcagttgatacagtcttcagatttgatcctcgatacaataaatggatgcaagttgcatctttaaatgaaaagcgcaccttcttccacctaagtgccctcaaaggatatctgtatgcagttggtgggcgaaatgcagcaggtgaactgcccacagtagaatgttacaatccaagaacaaatgaatggacctatgttgccaaaatgagtgagccccactatggccatgctggaactgtgtatggaggagtgatgtatatttcaggaggaattactcatgatactttccaaaaggagctcatgtgctttgaccctgatactgacaaatggatccagaaggcgccaatgaccactgtcagaggtctgcattgcatgtgtacagtgggagaaaggctctatgtcattggtggcaatcacttcagaggaacaagtgattatgatgatgtcctaagctgtgaatactattcacctatccttgaccagtggaccccaattgctgccatgttaagagggcagagtgatgttggggtcgctgtcttcgaaaataaaatctatgtggttggggggtattcttggaataatcgttgtatggtagagatagtgcagaaatatgatccagataaagatgaatggcataaggtttttgatctgccagaatcccttggtggcattcgtgcttgcacactcacagtttttccaccagaagaaaccacaccatcaccttctagagagtcccctctttctgcaccttaagatcatctctacaactaagatgctgtagttctatctttgcaatgtgtcataaattctcttctttttcccccttaagtagtatatatgttaggattaccctctggtaattgatacagatattggaaaaaagacaacattgatgttatttgtgctctttgtttggcctagaatgtttataaagtggtaacacaaccattctggaaatgtatcccatagaagctgatgtttaacatatgaaaaaaaaagtattgtctataaaatgtttcttcagtactttttaaatgctgtgtattgggtgtaaggtatttgtcatcttacattagtaaacccaataag

SEQ ID NO: 10914 - DNA, 306 bp, Homo sapiens
  source 1..306: mol_type = unassigned DNA
cattatccaacttttagaggtgatggatcatctgcatagaggggaattggttgctgcaatacttcgtaaccggagacggaggcaattgtcattaaaacaagccgatttcaaggatatattcaaaaaatcaacttcaggatctctcgtggaagaggaagaccaacacatgaaattgtcccttggaggcagcgaaatgggcctctcatcccatttgcagtcttccaaggcaggacctacacgcatctttaccagcaatacccacagttctgtggtgttacagggctttgaccagcttcgacttgaagg

SEQ ID NO: 10915 - DNA, 3322 bp, Homo sapiens
  source 1..3322: mol_type = unassigned DNA
actgccccctccctccccaactgggttcccgcccccctccctcagcagcccccccacaccctggtgaggtcaggcggaggctctgccgctgcggccgcagtagctcagctcctattcctgggaagcctggaacggggacttttgaaaataactgcagcggcattcgggttagggtccgtgctctccgcctgcgccaggacagggtgaagtggtcggggcgagcagagggtgcgaaggtgcgggtgctggtgcctcgcagcaggagggagccccggctgcgccgcgcgactccctctttggccctcggagcgcagcacccggcggacaagcggcgggacgccaggacgcggcgagcaagatctctcgtggaagaggaagaccaacacatgaaattgtcccttggaggcagcgaaatgggcctctcatcccatttgcagtcttccaaggcaggacctacacgcatctttaccagcaatacccacagttctgtggtgttacagggctttgaccagcttcgacttgaaggattgctttgtgatgtgaccctgatgccaggtgacacagatgatgctttccctgtgcatagagtcatgatggcatctgctagtgattacttcaaggctatgttcacaggtggaatgaaagaacaagatttaatgtgcattaaacttcatggtgtgagcaaagtcggtctaaggaaaattattgatttcatttatactgcaaagctttctcttaatatggacaaccttcaagacacgctggaagctgccagtttcctacagattctgccagttttggacttctgtaaagtgtttctcatatctggggtcactttagacaactgtgttgaagttggacggattgccaacacctacaatctaaccgaagtggataaatacgttaacagtttcgtcttgaagaattttcctgcattgctgagcacaggggagttcttgaaactcccttttgagcgtcttgccttcgtgctttccagtaatagccttaagcactgtactgaacttgagctctttaaggctacctgtcgttggcttcgcctggaagagcctcggatggactttgctgcaaaattaatgaagaacatacgatttccactgatgacaccacaggagctcattaattacgtgcaaacggtggatttcatgagaactgacaatacttgtgtgaatttgcttttggaagccagcaattaccaaatgatgccatatatgcagccagttatgcagtcagacaggactgccattaggtctgacaccactcacttggttacactaggaggagtgctgaggcagcagctggttgtcagtaaggaattgcgcatgtatgatgaaaaggcccatgagtggaaatcgttagcccccatggatgccccaaggtaccagcatggcatcgccgtcattggaaattttctctatgtggttggcggacagagtaattatgatacaaaaggaaaaacggcagttgatacagtcttcagatttgatcctcgatacaataaatggatgcaagttgcatctttaaatgaaaagcgcaccttcttccacctaagtgccctcaaaggatatctgtatgcagttggtgggcgaaatgcagcaggtgaactgcccacagtagaatgttacaatccaagaacaaatgaatggacctatgttgccaaaatgagtgagccccactatggccatgctggaactgtgtatggaggagtgatgtatatttcaggaggaattactcatgatactttccaaaaggagctcatgtgctttgaccctgatactgacaaatggatccagaaggcgccaatgaccactgtcagaggtctgcattgcatgtgtacagtgggagaaaggctctatgtcattggtggcaatcacttcagaggaacaagtgattatgatgatgtcctaagctgtgaatactattcacctatccttgaccagtggaccccaattgctgccatgttaagagggcagagtgatgttggggtcgctgtcttcgaaaataaaatctatgtggttggggggtattcttggaataatcgttgtatggtagagatagtgcagaaatatgatccagataaagatgaatggcataaggtttttgatctgccagaatcccttggtggcattcgtgcttgcacactcacagtttttccaccagaagaaaccacaccatcaccttctagagagtcccctctttctgcaccttaagatcatctctacaactaagatgctgtagttctatctttgcaatgtgtcataaattctcttctttttcccccttaagtagtatatatgttaggattaccctctggtaattgatacagatattggaaaaaagacaacattgatgttatttgtgctctttgtttggcctagaatgtttataaagtggtaacacaaccattctggaaatgtatcccatagaagctgatgtttaacatatgaaaaaaaaagtattgtctataaaatgtttcttcagtactttttaaatgctgtgtattgggtgtaaggtatttgtcatcttacattagtaaacccaataagccaagttgaaggtggattatagtaaatgtacaactgtgctcactaggcttcaagtaaaaagttttcctttcatctttgactgtaagatgtcaaagggaggcagcctgcttgaacaggaaacaatacacaaaaggttgccaactcgcatgagctacctccctcttttcataaagtatttttgacatatctgtcaacccacttgactgtgtgggtgcattgagaacacaaagtttcctagacacacaggagaagtagcttaaattcactaatattaatttaaaaagcagcatgaaccctctacttataaacaagggtttggtgtttttaaagtgtgtatacatacatacacatacacacatgcacatatgtcaaatataatttttttaaaaattgagtggcacatcaaagaaatgtgaaattaaaaagaattcttccaaaaagcagcttccattaaaatgggaattcagtatgcacatactgaatgcatatatgtagaaccatacagaatttaggtggataagggctagaaattttgagcaacaaaatttgtcacttgaccagattttatcttcaaaaactgtattctactccttctcctttgctgttgaggtaacttgcatattatatgtattctgtatactcagttcataaggttatttagcacaaagtatagcagcttcacctggagagctgcttttgctcagtaaattcaacttccatgttttatctttttttgttcaataaaaacatttaatgtc

SEQ ID NO: 10916 - DNA, 3396 bp, Homo sapiens
  source 1..3396: mol_type = unassigned DNA
actgccccctccctccccaactgggttcccgcccccctccctcagcagcccccccacaccctggtgaggtcaggcggaggctctgccgctgcggccgcagtagctcagctcctattcctgggaagcctggaacggggacttttgaaaataactgcagcggcattcgggttagggtccgtgctctccgcctgcgccaggacagggtgaagtggtcggggcgagcagagggtgcgaaggtgcgggtgctggtgcctcgcagcaggagggagccccggctgcgccgcgcgactccctctttggccctcggagcgcagcacccggcggacaagcggcgggacgccaggacgcggcgagcaaggtcattatccaacttttagaggtgatggatcatctgcatagaggggaattggttgctgcaatacttcgtaaccgatctctcgtggaagaggaagaccaacacatgaaattgtcccttggaggcagcgaaatgggcctctcatcccatttgcagtcttccaaggcaggacctacacgcatctttaccagcaatacccacagttctgtggtgttacagggctttgaccagcttcgacttgaaggattgctttgtgatgtgaccctgatgccaggtgacacagatgatgctttccctgtgcatagagtcatgatggcatctgctagtgattacttcaaggctatgttcacaggtggaatgaaagaacaagatttaatgtgcattaaacttcatggtgtgagcaaagtcggtctaaggaaaattattgatttcatttatactgcaaagctttctcttaatatggacaaccttcaagacacgctggaagctgccagtttcctacagattctgccagttttggacttctgtaaagtgtttctcatatctggggtcactttagacaactgtgttgaagttggacggattgccaacacctacaatctaaccgaagtggataaatacgttaacagtttcgtcttgaagaattttcctgcattgctgagcacaggggagttcttgaaactcccttttgagcgtcttgccttcgtgctttccagtaatagccttaagcactgtactgaacttgagctctttaaggctacctgtcgttggcttcgcctggaagagcctcggatggactttgctgcaaaattaatgaagaacatacgatttccactgatgacaccacaggagctcattaattacgtgcaaacggtggatttcatgagaactgacaatacttgtgtgaatttgcttttggaagccagcaattaccaaatgatgccatatatgcagccagttatgcagtcagacaggactgccattaggtctgacaccactcacttggttacactaggaggagtgctgaggcagcagctggttgtcagtaaggaattgcgcatgtatgatgaaaaggcccatgagtggaaatcgttagcccccatggatgccccaaggtaccagcatggcatcgccgtcattggaaattttctctatgtggttggcggacagagtaattatgatacaaaaggaaaaacggcagttgatacagtcttcagatttgatcctcgatacaataaatggatgcaagttgcatctttaaatgaaaagcgcaccttcttccacctaagtgccctcaaaggatatctgtatgcagttggtgggcgaaatgcagcaggtgaactgcccacagtagaatgttacaatccaagaacaaatgaatggacctatgttgccaaaatgagtgagccccactatggccatgctggaactgtgtatggaggagtgatgtatatttcaggaggaattactcatgatactttccaaaaggagctcatgtgctttgaccctgatactgacaaatggatccagaaggcgccaatgaccactgtcagaggtctgcattgcatgtgtacagtgggagaaaggctctatgtcattggtggcaatcacttcagaggaacaagtgattatgatgatgtcctaagctgtgaatactattcacctatccttgaccagtggaccccaattgctgccatgttaagagggcagagtgatgttggggtcgctgtcttcgaaaataaaatctatgtggttggggggtattcttggaataatcgttgtatggtagagatagtgcagaaatatgatccagataaagatgaatggcataaggtttttgatctgccagaatcccttggtggcattcgtgcttgcacactcacagtttttccaccagaagaaaccacaccatcaccttctagagagtcccctctttctgcaccttaagatcatctctacaactaagatgctgtagttctatctttgcaatgtgtcataaattctcttctttttcccccttaagtagtatatatgttaggattaccctctggtaattgatacagatattggaaaaaagacaacattgatgttatttgtgctctttgtttggcctagaatgtttataaagtggtaacacaaccattctggaaatgtatcccatagaagctgatgtttaacatatgaaaaaaaaagtattgtctataaaatgtttcttcagtactttttaaatgctgtgtattgggtgtaaggtatttgtcatcttacattagtaaacccaataagccaagttgaaggtggattatagtaaatgtacaactgtgctcactaggcttcaagtaaaaagttttcctttcatctttgactgtaagatgtcaaagggaggcagcctgcttgaacaggaaacaatacacaaaaggttgccaactcgcatgagctacctccctcttttcataaagtatttttgacatatctgtcaacccacttgactgtgtgggtgcattgagaacacaaagtttcctagacacacaggagaagtagcttaaattcactaatattaatttaaaaagcagcatgaaccctctacttataaacaagggtttggtgtttttaaagtgtgtatacatacatacacatacacacatgcacatatgtcaaatataatttttttaaaaattgagtggcacatcaaagaaatgtgaaattaaaaagaattcttccaaaaagcagcttccattaaaatgggaattcagtatgcacatactgaatgcatatatgtagaaccatacagaatttaggtggataagggctagaaattttgagcaacaaaatttgtcacttgaccagattttatcttcaaaaactgtattctactccttctcctttgctgttgaggtaacttgcatattatatgtattctgtatactcagttcataaggttatttagcacaaagtatagcagcttcacctggagagctgcttttgctcagtaaattcaacttccatgttttatctttttttgttcaataaaaacatttaatgtc

SEQ ID NO: 10917 - DNA, 3102 bp, Homo sapiens
  source 1..3102: mol_type = unassigned DNA
tagaagagtgatatttgtgtgagagcctgggtcaggcttattttgagacgtgggccccactgaggtcattatccaacttttagaggtgatggatcatctgcatagaggggaattggttgctgcaatacttcgtaaccgatctctcgtggaagaggaagaccaacacatgaaattgtcccttggaggcagcgaaatgggcctctcatcccatttgcagtcttccaaggcaggacctacacgcatctttaccagcaatacccacagttctgtggtgttacagggctttgaccagcttcgacttgaaggattgctttgtgatgtgaccctgatgccaggtgacacagatgatgctttccctgtgcatagagtcatgatggcatctgctagtgattacttcaaggctatgttcacaggtggaatgaaagaacaagatttaatgtgcattaaacttcatggtgtgagcaaagtcggtctaaggaaaattattgatttcatttatactgcaaagctttctcttaatatggacaaccttcaagacacgctggaagctgccagtttcctacagattctgccagttttggacttctgtaaagtgtttctcatatctggggtcactttagacaactgtgttgaagttggacggattgccaacacctacaatctaaccgaagtggataaatacgttaacagtttcgtcttgaagaattttcctgcattgctgagcacaggggagttcttgaaactcccttttgagcgtcttgccttcgtgctttccagtaatagccttaagcactgtactgaacttgagctctttaaggctacctgtcgttggcttcgcctggaagagcctcggatggactttgctgcaaaattaatgaagaacatacgatttccactgatgacaccacaggagctcattaattacgtgcaaacggtggatttcatgagaactgacaatacttgtgtgaatttgcttttggaagccagcaattaccaaatgatgccatatatgcagccagttatgcagtcagacaggactgccattaggtctgacaccactcacttggttacactaggaggagtgctgaggcagcagctggttgtcagtaaggaattgcgcatgtatgatgaaaaggcccatgagtggaaatcgttagcccccatggatgccccaaggtaccagcatggcatcgccgtcattggaaattttctctatgtggttggcggacagagtaattatgatacaaaaggaaaaacggcagttgatacagtcttcagatttgatcctcgatacaataaatggatgcaagttgcatctttaaatgaaaagcgcaccttcttccacctaagtgccctcaaaggatatctgtatgcagttggtgggcgaaatgcagcaggtgaactgcccacagtagaatgttacaatccaagaacaaatgaatggacctatgttgccaaaatgagtgagccccactatggccatgctggaactgtgtatggaggagtgatgtatatttcaggaggaattactcatgatactttccaaaaggagctcatgtgctttgaccctgatactgacaaatggatccagaaggcgccaatgaccactgtcagaggtctgcattgcatgtgtacagtgggagaaaggctctatgtcattggtggcaatcacttcagaggaacaagtgattatgatgatgtcctaagctgtgaatactattcacctatccttgaccagtggaccccaattgctgccatgttaagagggcagagtgatgttggggtcgctgtcttcgaaaataaaatctatgtggttggggggtattcttggaataatcgttgtatggtagagatagtgcagaaatatgatccagataaagatgaatggcataaggtttttgatctgccagaatcccttggtggcattcgtgcttgcacactcacagtttttccaccagaagaaaccacaccatcaccttctagagagtcccctctttctgcaccttaagatcatctctacaactaagatgctgtagttctatctttgcaatgtgtcataaattctcttctttttcccccttaagtagtatatatgttaggattaccctctggtaattgatacagatattggaaaaaagacaacattgatgttatttgtgctctttgtttggcctagaatgtttataaagtggtaacacaaccattctggaaatgtatcccatagaagctgatgtttaacatatgaaaaaaaaagtattgtctataaaatgtttcttcagtactttttaaatgctgtgtattgggtgtaaggtatttgtcatcttacattagtaaacccaataagccaagttgaaggtggattatagtaaatgtacaactgtgctcactaggcttcaagtaaaaagttttcctttcatctttgactgtaagatgtcaaagggaggcagcctgcttgaacaggaaacaatacacaaaaggttgccaactcgcatgagctacctccctcttttcataaagtatttttgacatatctgtcaacccacttgactgtgtgggtgcattgagaacacaaagtttcctagacacacaggagaagtagcttaaattcactaatattaatttaaaaagcagcatgaaccctctacttataaacaagggtttggtgtttttaaagtgtgtatacatacatacacatacacacatgcacatatgtcaaatataatttttttaaaaattgagtggcacatcaaagaaatgtgaaattaaaaagaattcttccaaaaagcagcttccattaaaatgggaattcagtatgcacatactgaatgcatatatgtagaaccatacagaatttaggtggataagggctagaaattttgagcaacaaaatttgtcacttgaccagattttatcttcaaaaactgtattctactccttctcctttgctgttgaggtaacttgcatattatatgtattctgtatactcagttcataaggttatttagcacaaagtatagcagcttcacctggagagctgcttttgctcagtaaattcaacttccatgttttatctttttttgttcaataaaaacatttaatgtc

SEQ ID NO: 10918 - DNA, 6272 bp, Homo sapiens
  source 1..6272: mol_type = unassigned DNA
gtttcaactcttgcttgaatcaagaacagaagcctctctttagacaggacttatccagagggggctgcaggcgagcactctcgtgccccgccggagcgacccggctcgtgccgggagcggctgctcgtagacgtccgaggagcctgccgagtgccgtcccggcgcccgaccgcccacccatcggcccgctggcccggttcttcctgatgcagactgccgtccactagaggctggacaggaccccccgaggtgattcatggcaggggacgtggaaggattctgttcctccatccacgacaccagtgtctctgctgggttcagagcactgtatgaggagggattgcttcttgatgtcactctggttattgaagatcatcagttccaggcccataaagcactcttggccacccagagtgattacttcagaattatgtttactgcagacatgagggaacgagatcaggacaaaattcatttaaaaggtctaacagctaccggtttcagccatgtcctgcaatttatgtactatggaactatagagctgagtatgaataccgttcatgagattcttcaggctgccatgtatgttcaacttatagaagtggtgaagttctgctgctcttttctcttagcgaagatctgcctagaaaattgtgcagaaattatgagactcttagatgatttcggcgtaaacatcgagggagtcagggagaagttagacacctttctgctagacaactttgtgccactcatgtctaggcctgactttctgtcctatctgagctttgagaagctcatgtcttacttggataatgatcatctgagcaggttcccagagatagagctgtacgaggctgtgcagtcttggctgcggcatgatagaagacgctggagacataccgataccatcattcagaatatccggttttgcttgatgaccccaaccagcgtttttgagaaggttaagacatcagaattttatagatactcccgacagctccgttacgaagttgaccaagcattgaattactttcagaatgttcaccagcagcctttgttggatatgaagtcaagccgcatccgttctgcaaaaccgcaaactacagtatttcgaggaatgattggacatagcatggttaacagtaaaatacttctcttaaagaaaccaagagtctggtgggagctagaaggcccacaagtacctctgcgacctgactgccttgctatcgtcaataattttgtgttcctgttaggcggggaagagctgggcccggatggtgaattccatgcttcttccaaagtattcaggtatgacccgagacagaactcctggctgcagatggcagatatgtctgtaccacgctctgaatttgctgtaggtgttattgggaagtttatttacgccgtagcaggcagaaccagagatgagactttctattcaactgagagatatgacatcaccaacgataaatgggaatttgtggatccttatccagttaacaaatatggacatgaggggacagtgctcaataacaaattgtttatcaccggtggaatcacctcatcttccacctccaagcaagtgtgcgtgtttgaccccagcaaagaagggaccatagaacaacggaccaggagaactcaagtggttaccaactgttgggagaataagagcaagatgaattacgcgagatgctttcacaagatgatttcttacaatggcaagctttatgtcttcggtggtgtctgtgtgatcttgagggcctctttcgaatctcagggatgcccttctacagaagtatacaacccagagactgatcagtggaccatcttggcatccatgccgattggtagaagtggccatggtgtgactgtgctggacaaacaaataatggttcttggaggcctttgttataatggtcattacagcgattccatcctcacttttgatccggatgaaaacaagtggaaggaagatgagtaccctcggatgccctgcaagctggatggtttacaagtatgcaacctgcattttccggactatgtactggatgaggtcaggcgttgcaactaatgacatcctcctccctaaaaaaagaggcaaacaaagtatttgtttgcacagagtaattaattaaaacatataaagaaaaacctcaccagttttactatcaaagccattggtctaacattgtaagaatttttcattctgtgctagcatcctttttttcttttcagtggcctcaaactcatgcaataagttaattctaagtgctagctcttgaaactacttccagaagcagttgaatagaatgctccacttatctgggatattgattttctgctttaaacatttctttcagatgttagcgtaggagtcatgtgtcttctaagagaagacccgataagtgtcactggatgtgatttcagtctctgtctctatctgaaacctttttgaagatttatttcagtgtatttcagtctgttatactttttagttttattatttaaaagtttaaaactcttgacctttttgcatggctttttgctgaaaatgcaaaaatataaattttctacaaaattaactttttatattcaaaacactatttctaagctgccttctcttatccgcattgtgttagtgaaagcatattcatactcgcatacaacctataaatacacaaggcacatcccttttatgcgtggttaggattctatatttttaagctagtgcacttacttgcacacacagttcgccatacttgttgaattttagatgtaacgtcttttcacatattaacatttttagaaagttgaaataactggagtcctcatttgctatcaaagtagcctatcttcagtccatactgattcagtaatatttgaactccttatatttctgaaacatgtatggttatgaaaactaacactttatattttattttcaaaagtaaatgttagtgttctttgtcgatgtatgtcttttctttttgaaaatgtttttctttgcagtctgtttaacgttaccctgtttttagtgagaatcggagtggtatatgacaagttctggccctgcagcatgcaagcacttttaaagagcatttaggtaataccagactcctaaatcaaggccccttaaaagtaagtgcaactcccattttttacattcagtaaggctgctgcatttgttattgaatggaaggtagaaactcttagaaaatttgacctcagttttgacttagaggtaagaaatagaattataatgttactggttttatctacttgtttattttgtacaaaatacccagcgacactagggatgtaagccctcagtttttgttttatttactgaaagctattagcatgaaggatagtaaccacaaagttcagaatggatcaagaatagctgtttaaaagcatttataataagtgttttaggattagctgcacctttcaactctttaaatgcagaggaaaaaacatagttgacaaagttaagcaagaataacctgggagtggatcattgaaattgatgccatttgcgcatgagtagtctatatctgatacagactagatctatactggcaaaacttgccagatcttagaatattggtgcaatattgcaatgccttctatatggctgctgatgtataaattttctagtttcactttgtttggtgttttttgtttttttgtttgtttgtttgtttttttgctgctgccaccattgaacataaaatggaagtgtgaagtcatggaaatgtgaagactttggtttttgggggttttttgggcagttattagacatactatgagattaaacctgatcttcaaactccagaattggaggcatttgggtttaagaaaccaggtacataagtagcttttgaaaaaaccattggcattgatttcaaaaatcaataataatcttattttatatatgagacttatattttcattaactagtcctgtcatttacttacagtttccaaacatgaaatttggtatcttgtttcccatggtaatatgggtaaaagtctttttctacatttaaaaaatacattattttatttttgaaagttaggaataagttagccatttaatttttttctacattagtttagtggctttgtatgtgtgctattttgctttaaagaaaataacgtcttcattattttcctcattgatgtcttttgctagaaaagaccaagaaagagccatcaggccaggtatccacatcaaagcctttacactatagtggtggttctctttaattgcttagatatgacttcatgaccctagtcagggtgacatctgggcaaacatttgagtattcttggtcttccattttaaagacagaggccaagatcaaagttcatgttttgtaaaattcgtaaaatcttaacttgaactaactctgggttcagctttacgtaagtcacgtcggacctgatgttagctgtaatcagttttgagctttaaggatagttgctgttgcttgggttctgaatgtatgagaaaactccctgtttatatgtagttctaatttaggttattttaaatccatgattaacttacattcccttttaaaattatggttttattgctgcaagagatttatttttgttatactaaactatggaaaagtttttcatagcatttttttcaagtttattttttgtgtgcttcatttggagtttttgtttatatacattgcgctcaaaaaagtagttttttgaaaaattcagtaagatttgaatctatacagtttaactgttatgacctttatgcgtgttgttttcactttatatctcaaatgccagagttcacaaaaatagctgatcttcattaattacatcttaattagaaccatttgttctcttccgtgtctttgaccttctaagttttgattttaaagaaattccttgcactacagccttttcttaaaatgcaagattctcactttgaaggttttgtgttggaagaaatgctactggtttttaaaaagcaaagcttaactaatagaattattagcttttcttgagacagctttctgtgtcctcattactctgctctgtgtgagtgttactagaatttgtgaaatactgactgagcccttcacttatcttttctaaagcagcacctttggacacctcattctgggaagcctgctcgagtcatagtaaaggacacacgctttatgtggggagaagtggtaaaaatggagttttgtcttaattacatgaaactaagctttaaaatattttataacagattatttgagctgcataatctaaacatgtcaaacgttcagtgggactatttttatatatgtatatgtgggtgtaggtcataacatttcagtttataatataaattgttatttcagtttataagctatctctcagaggagactagctcttttgagaattcataatttaaagttttagactgaagtaaaatgcaacatagataatagtgtaaatcagatataattgagggctatatggcagtaaaactgctagtgccagttttcttgtttgcctgttatacatttttgatttttgtttttgtattctgaacattttgagagatcatatgtttgttcaattacatttagagttggtttgggaataaatatcttctaaaaagagatttatcttaaaaatggaagtcctaaaaattagtttatccagagtttataaagtcaaatattcagtaggcatagactggaatagataaattcatggaaatcatatcctttcagtacaccgtataacttcaatattacacaagtaacattgaggagaatgccatcagctttgttctcccttaaattctttggttttctttttacattttgggaacaactgcatttaaaatgttattagtcagtatatagtaaggattaggtgtttgctttctgaaggaatggtccagtgaggtgattgggagaggttattttctacctaacttgtatatgccctatacctcttgggcatactttgtctatagaaaaatattttgacctttaggtacattttgggccagtagtcaaataatcctagggccgatataaaaatcttagaataatttaaggtttgccttttatacctgttttgaaagcctttacatttttgtcaggtaatttttcccaagccgtggatataatctattcaaacatgtttatgctatccattctgtttttaaattgaaaaaaatgttaaaagtgtttatgaagaaaagtttaaataaaatatttttaatctttaaaa

SEQ ID NO: 10919 - DNA, 2616 bp, Homo sapiens
  source 1..2616: mol_type = unassigned DNA
acgtgacggcccaggcccccgccccgccggctcctctcgcccagcctcccgcctcgcgcctcccgcctcccgcctcccgcctccctccagctgcgagtgcggcctcggctggcggcggcaccaggccacagttgtaagggatcttgtggctgtcaggatggcagaggagcaggagttcacccagctctgcaagttgcctgcacagccctcacacccacactgcgtgaacaacacctaccgcagcgcacagcactcccaggctctgctccgagggctgctggctctccgggacagcggaatcctcttcgatgttgtgctggtggtggagggcagacacatcgaggcccatcgcatcctgctggctgcgtcctgcgattacttcagaggaatgtttgctgggggattgaaggagatggaacaggaagaggtcctgatccacggtgtgtcctacaatgctatgtgccaaatcctacatttcatatacacctccgagctggagctcagcctgagcaatgtacaagagacactggtggctgcctgccagcttcagatcccagaaattatccatttctgctgtgatttcctcatgtcctgggtggacgaagagaacattctcgatgtctaccggctggcagagctgtttgacttgagccgcctgactgagcaactggacacctatatcctcaaaaactttgtggccttctctcggactgacaagtaccgccagcttccattggagaaggtctactccctcctcagcagcaatcgcctggaggtctcctgcgagaccgaggtatatgagggggcccttctctaccattatagcctggagcaggtgcaggctgaccagatctcgctgcacgagcccccaaagctccttgagacagtgcggtttccgctgatggaagctgaggtcctgcagcggctgcatgacaagctggaccccagccctttgagggacacagtggccagcgccctcatgtaccaccggaacgagagcctacagcccagcctgcagagcccgcaaacggagctgcggtcggacttccagtgcgttgtgggcttcgggggcattcactccacgccgtccactgtcctcagcgaccaggccaagtatctaaaccccttactgggagagtggaagcacttcactgcctccctggccccccgcatgtccaaccagggcatcgcggtgctcaacaacttcgtatacttgattggaggggacaacaatgtccaaggatttcgagcagagtcccgatgctggaggtatgacccacggcacaaccgctggttccagatccagtccctgcagcaggagcacgccgacctgtccgtgtgtgttgtaggcaggtacatctacgctgtggcgggccgtgactaccacaatgacctgaatgctgtggagcgctacgaccctgccaccaactcctgggcatacgtggccccactcaagagggaggtgtatgcccacgcaggcgcgacgctggaggggaagatgtatatcacctgcggccgcagaggggaggattacctgaaagagacacactgctacgatccaggcagcaacacttggcacacactggctgatgggcctgtgcggcgcgcctggcacggcatggcaaccctcctcaacaagctgtatgtgatcgggggcagcaacaacgatgccggatacaggagggacgtgcaccaggtggcctgctacagctgcacgtctggacagtggtcatctgtctgcccactccctgctgggcacggtgagcctggcattgctgtgctggacaacaggatctatgtgttaggtggccgctcacacaaccgcggcagccgcacaggctacgtgcacatttacgatgtggagaaggactgctgggaggaagggccccagctggacaactccatctcaggcctggcggcctgtgtgctcaccctgccccgctccctgctccttgagccgccccgcgggacccctgaccgcagccaggccgacccggactttgcctctgaggtgatgagtgtgtctgactgggaggagtttgacaactccagtgaggactaggctccctgtgcctggcatcagagggaagggaggctggggctgcagggcagtgaaacccacgcagcctaggccagagcactttactccaggcagggcccctgcccctgttggccacagcttatgggccctgccctctttcttcacaccagccccttggccagcctgccgcaggcatctcagggccatgcagatcccaggctgtggattacgtcactgcaggaactgcttctgaaaggctttggccttcctcagtgagccctggaggggttggccttctctcctccctgcctagatcagtccttctccaaaaggacctgggagctggcagcctgggcaggggggctgaggcacgtggtagccctctttctgtgaatggggtggggctgtgggggcagctggggttggaggatgagagctcctgaggggcagaggagcagagatgcatcagctcgcctgggactggctctgtgataaaaagacccctcccgctgggttttcagaccccatgttgttggtcaatgaaataaagcatcttacagaaggtgttaactgtt

SEQ ID NO: 10920 - DNA, 596 bp, Homo sapiens
  source 1..596: mol_type = unassigned DNA
tttgacttgagccgcctgactgagcaactggacacctatatcctcaaaaactttgtggccttctctcggactgacaagtaccgccagcttccattggagaaggtctactccctcctcagcagcaatcgcctggaggtctcctgcgagaccgaggtatgacccacggcacaaccgctggttccagatccagtccctgcagcaggagcacgccgacctgtccgtgtgtgttgtaggcaggtacatctacgctgtggcgggccgtgactaccacaatgacctgaatgctgtggagcgctacgaccctgccaccaactcctgggcatacgtggccccactcaagagggagctggggaagcagcagttctccagcttggccacagaggggcagccttggctttcaaccagctgcatcgtggctgccggtgttccttcatgcacgcattcattccgcaactactaagcaccatgtaccaagtcctgggaatccagtggtgacaagaaatgagaaagactccccactccatggtgtttacagccttgtaggagaaaccactcttaaccagaaaacagatcagtaaagtggttacaattatggt

SEQ ID NO: 10921 - DNA, 1389 bp, Homo sapiens
  source 1..1389: mol_type = unassigned DNA
tgcgagtgcggcctcggctggcggcggcaccaggccacagttgtaagggatcttgtggctgtcaggatggcagaggagcaggagttcacccagctctgcaagttgcctgcacagccctcacacccacactgcgtgaacaacacctaccgcagcgcacagcactcccaggctctgctccgagggctgctggctctccgggacagcggaatcctcttcgatgttgtgctggtggtggagggcagacacatcgaggcccatcgcatcctgctggctgcgtcctgcgattacttcagaggaatgtttgctgggggattgaaggagatggaacaggaagaggtcctgatccacggtgtgtcctacaatgctatgtgccaaatcctacatttcatatacacctccgagctggagctcagcctgagcaatgtacaagagacactggtggctgcctgccagcttcagatcccagaaattatccatttctgctgtgatttcctcatgtcctgggtggacgaagagaacattctcgatgtctaccggctggcagagctgtttgacttgagccgcctgactgagcaactggacacctatatcctcaaaaactttgtggccttctctcggactgacaagtaccgccagcttccattggagaaggtctactccctcctcagcagcaatcgcctggaggtctcctgcgagaccgaggtatatgagggggcccttctctaccattatagcctggagcaggtgcaggctgaccagatctcgctgcacgagcccccaaagctccttgagacagtgcggtttccgctgatggaagctgaggtcctgcagcggctgcatgacaagctggaccccagccctttgagggacacagtggccagcgccctcatgtaccaccggaacgagagcctacagcccagcctgcagagcccgcaaacggagctgcggtcggacttccagtgcgttgtgggcttcgggggcattcactccacgccgtccactgtcctcagcgaccaggccaagtatctaaaccccttactgggagagtggaagcacttcactgcctccctggccccccgcatgtccaaccagggcatcgcggtgctcaacaacttcgtatacttgattggaggggacaacaatgtccaaggatttcgagcagagtcccgatgctggaggtatgacccacggcacaaccgctggttccagatccagtccctgcagcaggagcacgccgacctgtccgtgtgtgttgtaggcaggtacatctacgctgtggcgggccgtgactaccacaatgacctgaatgctgtggagcgctacgaccctgccaccaactcctgggcatacgtggccccactcaagagggaggtaaggaagccctcgaag

SEQ ID NO: 10922 - DNA, 724 bp, Homo sapiens
  source 1..724: mol_type = unassigned DNA
tccctccagctgcgagtgcggcctcggctggcggcggcaccagaggaatgtttgctgggggattgaaggagatggaacaggaagaggtcctgatccacggtgtgtcctacaatgctatgtgccaaatcctacatttcatatacacctccgagctggagctcagcctgagcaatgtacaagagacactggtggctgcctgccagcttcagatcccagaaattatccatttctgctgtgatttcctcatgtcctgggtggacgaagagaacattctcgatgtctaccggctggcagagctgtttgacttgagccgcctgactgagcaactggacacctatatcctcaaaaactttgtggccttctctcggactgacaagtaccgccagcttccattggagaaggtctactccctcctcagcagcaatcgcctggaggtctcctgcgagaccgaggtatatgagggggcccttctctaccattatagcctggagcaggtgcaggctgaccagatctcgctgcacgagcccccaaagctccttgagacagtgcggtttccgctgatggaagctgaggtcctgcagcggctgcatgacaagctggaccccagccctttgagggacacagtggccagcgccctcatgtaccaccggaacgagagcctacagcccagcctgcagagcccgcaaacggagctgcggtcggacttccagtgcgttgtgggctt

SEQ ID NO: 10923 - DNA, 1045 bp, Homo sapiens
  source 1..1045: mol_type = unassigned DNA
tccagctgcgagtgcggcctcggctggcggcggcaccagttgaacacatggaggctcctaaagagtgatgttcctggagagggcctggaagctctgcaccacttcccacatgtctggccccatgcatctcttcatcttaaaggaaagtaggccctggaaatgccacccccttggcacccacctcccagactcctggctgtgtgtctcctgaccactactcaggccacagttgtaagggatcttgtggctgtcaggatggcagaggagcaggagttcacccagctctgcaagttgcctgcacagccctcacacccacactgcgtgaacaacacctaccgcagcgcacagcactcccaggctctgctccgagggctgctggctctccgggacagcggaatcctcttcgatgttgtgctggtggtggagggcagacacatcgaggcccatcgcatcctgctggctgcgtcctgcgattacttcagaggaatgtttgctgggggattgaaggagatggaacaggaagaggtcctgatccacggtgtgtcctacaatgctatgtgccaaatcctacatttcatatacacctccgagctggagctcagcctgagcaatgtacaagagacactggtggctgcctgccagcttcagatcccagaaattatccatttctgctgtgatttcctcatgtcctgggtggacgaagagaacattctcgatgtctaccggctggcagagctgtttgacttgagccgcctgactgagcaactggacacctatatcctcaaaaactttgtggccttctctcggactgacaagtaccgccagcttccattggagaaggtctactccctcctcagcagcaatcgcctggaggtctcctgcgagaccgaggtatatgagggggcccttctctaccattatagcctggagcaggtgcaggctgaccagatctcgctgcacgagcccccaaagctccttgagacagtgcggtttccgctgatggaagctgaggtcctgcagcggctgcatgacaagctggacccca

SEQ ID NO: 10924 - DNA, 742 bp, Homo sapiens
  source 1..742: mol_type = unassigned DNA
agctgcgagtgcggcctcggctggcggcggcaccaggatggcagaggagcaggagttcacccagctctgcaagttgcctgcacagccctcacacccacactgcgtgaacaacacctaccgcagcgcacagcactcccaggctctgctccgagggctgctggctctccgggacagcggaatcctcttcgatgttgtgctggtggtggagggcagacacatcgaggcccatcgcatcctgctggctgcgtcctgcgattacttcagaggaatgtttgctgggggattgaaggagatggaacaggaagaggtcctgatccacggtgtgtcctacaatgctatgtgccaaatcctacatttcatatacacctccgagctggagctcagcctgagcaatgtacaagagacactggtggctgcctgccagcttcagatcccagaaattatccatttctgctgtgatttcctcatgtcctgggtggacgaagagaacattctcgatgtctaccggctggcagagctgtttgacttgagccgcctgactgagcaactggacacctatatcctcaaaaactttgtggccttctctcggactgacaagtaccgccagcttccattggagaaggtctactccctcctcagcagcaatcgcctggaggtctcctgcgagaccgaggtatatgagggggcccttctctaccattatagcctggagcaggtgcaggctgaccagatctcgctgcac

SEQ ID NO: 10925 - DNA, 792 bp, Homo sapiens
  source 1..792: mol_type = unassigned DNA
agctgcgagtgcggcctcggctggcggcggcaccagtatgggtttagggagtagctgccatttatcccttcccaagagagcagaggcactactatgctcacggaaggccacagttgtaagggatcttgtggctgtcaggatggcagaggagcaggagttcacccagctctgcaagttgcctgcacagccctcacacccacactgcgtgaacaacacctaccgcagcgcacagcactcccaggctctgctccgagggctgctggctctccgggacagcggaatcctcttcgatgttgtgctggtggtggagggcagacacatcgaggcccatcgcatcctgctggctgcgtcctgcgattacttcagaggaatgtttgctgggggattgaaggagatggaacaggaagaggtcctgatccacggtgtgtcctacaatgctatgtgccaaatcctacatttcatatacacctccgagctggagctcagcctgagcaatgtacaagagacactggtggctgcctgccagcttcagatcccagaaattatccatttctgctgtgatttcctcatgtcctgggtggacgaagagaacattctcgatgtctaccggctggcagagctgtttgacttgagccgcctgactgagcaactggacacctatatcctcaaaaactttgtggccttctctcggactgacaagtaccgccagcttccattggagaaggtctactccctcctcagcagcaatcgcctggaggtctcctgcgagaccgaggtatatgagggggccct

SEQ ID NO: 10926 - DNA, 550 bp, Homo sapiens
  source 1..550: mol_type = unassigned DNA
ctcccgcctcccgcctccctccagctgcgagtgcggcctcggctggcggcggcaccaggccacagttgtaagggatcttgtggctgtcaggatggcagaggagcaggagttcacccagctctgcaagttgcctgcacagccctcacacccacactgcgtgaacaacacctaccgcagcgcacagcactcccaggctctgctccgagggctgctggctctccgggacagcggaatcctcttcgatgttgtgctggtggtggagggcagacacatcgaggcccatcgcatcctgctggctgcgtcctgcgattacttcagatgctgttcaccagcccaggcttgaatgggtgtcattctctctgcagatcccagaaattatccatttctgctgtgatttcctcatgtcctgggtggacgaagagaacattctcgatgtctaccggctggcagagctgtttgacttgagccgcctgactgagcaactggacacctatatcctcaaaaactttgtggccttctctcggactgacaagtaccgccagcttccatt

SEQ ID NO: 10927 - DNA, 572 bp, Homo sapiens
  source 1..572: mol_type = unassigned DNA
tcccgcctcccgcctcccgcctccctccagctgcgagtgcggcctcggctggcggcggcaccaggccacagttgtaagggatcttgtggctgtcaggatggcagaggagcaggagttcacccagctctgcaagttgcctgcacagccctcacacccacactgcgtgaacaacacctaccgcagcgcacagcactcccaggctctgctccgagggctgctggctctccgggacagcggaatcctcttcgatgttgtgctggtggtggagggcagacacatcgaggcccatcgcatcctgctggctgcgtcctgcgattacttcagaggaatgtttgctgggggattgaaggagatggaacaggaagaggtcctgatccacggtgtgtcctacaatgctatgtgccaaatcctacatttcatatacacctccgagctggagctcagcctgagcaatgtacaagagacactggtggctgcctgccagcttcagatgctgttcaccagcccaggcttgaatgggtgtcattctctctgcagatcccagaaattatccatttctgctgtgatttcct

SEQ ID NO: 10928 - DNA, 824 bp, Homo sapiens
  source 1..824: mol_type = unassigned DNA
cccagcctcccgcctcgcgcctcccgcctcccgcctcccgcctccctccagctgcgagtgcggcctcggctggcggcggcaccaggccacagttgtaagggatcttgtggctgtcaggatggcagaggagcaggagttcacccagctctgcaagttgcctgcacagccctcacacccacactgcgtgaacaacacctaccgcagcgcacagcactcccaggctctgctccgagggctgctggctctccgggacagcggaatcctcttcgatgttgtgctggtggtggagggcagacacatcgaggcccatcgcatcctgctggctgcgtcctgcgattacttcagcatgagcttcaccactcgctctaccttctccaccaactactggtccctgggctctgtccaggctcccagctatggcgcctggctggtcagcagcgtggccagcgtctatgcaggcaccgagggctctggttcctggatcttcgtgtcccgctccaccagcttccagggctgcatggggtctgggggcctggccgcggggatggctggggatctggcaggaatgggaagcatccagaatgagaaggagaccatacaaagcctgaatgaccgcctggcctcctacctggacagagcgaggagcctggagaccgagaaccggaagctggagagcaaaatccagaagcacttggagaagaagggacccagatcagagactggaggcattacttcaagaccatcgaggacctgagggctcagatctttgcaaatactgtggacaacgcccgtatctttctgtagatcgacaatgcccgtcttgc

SEQ ID NO: 10929 - DNA, 708 bp, Homo sapiens
  source 1..708: mol_type = unassigned DNA
gagaggtcagaaaagggagaattatcatagagcagagtttccaggcaagagaatcctaagtgagaggtggtcatggggtatacaccttggctgtggccatctctggggccttggtgagaaagatgagccagcccaggagggggaaaggaatgggtgggtggctggatagaggtcccaggtcctggaggcagactcaggggcagacacatcgaggcccatcgcatcctgctggctgcgtcctgcgattacttcaggtgagttcactagagctgtttgtaagaagaataacaaaggtaatcctggctctgctagtaaaggtactggcggtgacagtggctggtctcctgctcacctcagagcctcccctactccttgtggctatgacttagtcaacaagtgtgagagacagaagggggtcttagagttcatttttcattcagtgatcctgtttcttgggctttgcctcctcttctcttccctctcttctcttccttttcttttccttttctctctcttttcttttctcttttctttcctcctttctctcctcccctcccttaccattcctcccctccgtcagtaattattgctgtgtatgcatcaccttctggctcacacctctcatccctcaggtgttagcctctggccctcccagtgagctctgtggcccctctggggtttcttatggcctccttcgtgaccccatcc

SEQ ID NO: 10930 - DNA, 769 bp, Homo sapiens
  source 1..769: mol_type = unassigned DNA
gtactgtgatattgtgaaatatatatttggtcttgtctcatttcttggcatacaacttctaaaatctttggactttccagagtgatgcctttttgtatgctggccagcagcccctaggtagcttcaggatgggggctggtgacaggaaaggccaaggcaggcataagagggttgggactttcagcctcacctctcaacctccggagaggggagacaggctgaagattaagttcatcaccaatggccagtgatttaatcagtcatgcctacataatgaagcttccataaaaattctgaatgactgggtttggaaaacttctggatagttgaacacatggaggctcctaaagagtgatgttcctggagagggcctggaagctctgcaccacttcccacatgtctggccccatgcatctcttcatcttaaaggaaagtaggccctggaaatgccacccccttggcacccacctcccagactcctggctgtgtgtctcctgaccactactcaggccacagttgtaagggatcttgtggctgtcaggatggcagaggagcaggagttcacccagctctgcaagttgcctgcacagccctcacacccacactgcgtgaacaacacctaccgcagcgcacagcactcccaggctctgctccgagggctgctggctctccgggacagcggaatcctcttcgatgttgtgctggtggtggagggcagacacatcgaggcccatcgcatcctgctggctgcgtcctgcgattacttcag

SEQ ID NO: 10931 - DNA, 3425 bp, Homo sapiens
  source 1..3425: mol_type = unassigned DNA
ctcccgcctggccgccccggcccgccgtgacccacggccgcctccggagcccgacgcgcagggcatatacttctcttgtcttggttggatgcacaaatctgtgtgcagtgctttttgcccgttgcctagacgatcacttggtttctctgaggatgtctggttctcgtaaagagtttgatgtgaaacagattttgaaaatcagatggaggtggtttggtcatcaagcatcatctcctaattctacagttgacagccagcagggagaattttggaaccgaggacagactggagcaaacggtgggagaaagtttttagatccatgtagcctacaattgcctttggcttcaattggttaccgaaggtccagccaactggattttcagaattcaccttcttggccaatggcatccacctctgaagtccctgcatttgagtttacagcagaagattgtggcggtgcacattggctggatagaccagaagtggatgatggcactagtgaagaagaaaatgaatctgattccagttcatgcaggacttccaatagtagtcagacattatcatcctgtcatactatggagccatgtacatcagatgaatttttccaagcccttaatcatgccgagcaaacatttaaaaaaatggaaaactatttgagacataaacagttgtgtgatgtaattttagtcgctggtgatcgcagaattccagctcacagattggtgctctcctctgtctcagactattttgctgccatgtttactaatgatgtcagagaggcaagacaagaagaaataaaaatggaaggtgtagaaccaaattcgttgtggtccttgatccagtatgcttatacaggccgccttgaattaaaagaagataatattgagtgcctgttatctacagcttgccttcttcagctttcacaggttgtagaagcatgctgtaagtttttaatgaaacagcttcatccatccaactgtcttggaattcgttcttttgctgatgcccaaggttgtacagatttgcataaagtggctcacaattatactatggagcatttcatggaagtaatcagaaaccaggaatttgtattattaccagccagcgaaattgcaaagctcttggctagtgatgacatgaacattcctaatgaggagacaatattgaatgcacttcttacttgggtccgtcatgatttggaacagagacggaaagatctaagtaaacttttggcttatattaggctacctcttcttgcaccacagttcctggcagacatggaaaataatgtactttttcgggatgatatagaatgtcagaaactcattatggaagcaatgaagtaccatttattaccagagagacgacccatgttacaaagtcctcggacaaaacctaggaagtcaactgttggtacattatttgcagttgggggaatggattcaacaaaaggagcaacaagcattgaaaagtatgatctccgtacaaatatgtggactccagtagcaaatatgaatgggaggaggctacagttcggtgttgcagtgctagatgacaaactgtatgtggttggaggaagagatggactgaagactttgaatactgtagagtgctacaaccccaaaacaaaaacttggagtgtgatgccacctatgtccacacatagacatggccttggtgtggctgtactggaaggtcccatgtatgccgtaggaggacatgatggctggagctatctgaacacagtggaaagatgggaccctcaggctcgccagtggaattttgttgccactatgtctacccctaggagtacagtaggtgtggcagtactaagtggaaaactttatgcagttggtggtcgtgatggaagttcttgtctcaaatcagtagaatgttttgatcctcatactaataagtggacactgtgtgcacagatgtcaaaaaggagaggtggcgtaggagtgacgacctggaatggactgctgtatgctataggggggcacgatgctcccgcatccaacttgacttccagactctcagactgtgtggaaagatatgatcccaaaacagacatgtggactgcagtagcatccatgagcatcagcagagatgcagtgggggtctgtttacttggtgataagttatatgctgttggggggtatgatggacaggcataccttaatactgtggaggcttatgatccccagacaaatgagtggacccaggttgctccactgtgcctaggaagagctggagcttgtgttgtgactgtaaaattataatttagtgccccgttttctacatgaagacaccgtcttcctttattaatttagtataattattctatcaatggatacatttttagtaaatgtgcattgtcacaatcctgggcacaaagtgcctgatgtcaaaatgaagatagtaaaacaagggaggaagcagtggatggaccaggattaattcctttcatttcttagtaaattaaaacctgcagctggtggattgtgatcacacattcccgaagtaataagtgaggacgaatgcactgctctggaacataacccagtgctaactgggggtttcatttattcagtcaagcacatcttactcacatccagatttattttcctacagtgcaaacacaccagatgaaactttaaaatgttactttttgtaagcttatcataaatgagttgcagtaatttgtttgcttgtttgtttaaccacaaccactattttaatgatatactaaagataacactatttagttttttcagaaacatctgcattatatgtgtgttggttgtggattttgtttctaaaattggcttagtccaataaataaagaaaagcattaaggacttaaagcaacaataaccaaataaaaacttgataggatctttgaagtctatttaaatattcattccattacatctagactcaccaagaactacatgttatgatgttaagttgaagttgaaacatgatgttttgcattaaatttaagatatgcaaatttatgtagagaaaataaatgttatataccctataatctttcacctaattagtatttaattatatggatttgttttatattataaaagatgttttgattttgtcttttgatattgacaaaattgtttggatatccttatgttctcaagtctgtatctgcctcccctgccttatttcttatgttttgccacagttaacccattgtgcttctttgtaatcaaacagtttgtgggagaatgggcttattgaatgtctaaaaaataagtttaaagtgtttgttaccctaagttttttacatttttaaactctaattacatatgtgaatgttattactctcagtgaattgttattgtttgcaaaaatgcactgggcagtaacattttgtgataaatcctataagatataagtca

SEQ ID NO: 10932 - DNA, 2926 bp, Homo sapiens
  source 1..2926: mol_type = unassigned DNA
ccgccgtgacccacggccgcctccggagcccgacgcggacttccaatagtagtcagacattatcatcctgtcatactatggagccatgtacatcagatgaatttttccaagcccttaatcatgccgagcaaacatttaaaaaaatggaaaactatttgagacataaacagttgtgtgatgtaattttagtcgctggtgatcgcagaattccagctcacagattggtgctctcctctgtctcagactattttgctgccatgtttactaatgatgtcagagaggcaagacaagaagaaataaaaatggaaggtgtagaaccaaattcgttgtggtccttgatccagtatgcttatacaggccgccttgaattaaaagaagataatattgagtgcctgttatctacagcttgccttcttcagctttcacaggttgtagaagcatgctgtaagtttttaatgaaacagcttcatccatccaactgtcttggaattcgttcttttgctgatgcccaaggttgtacagatttgcataaagtggctcacaattatactatggagcatttcatggaagtaatcagaaaccaggaatttgtattattaccagccagcgaaattgcaaagctcttggctagtgatgacatgaacattcctaatgaggagacaatattgaatgcacttcttacttgggtccgtcatgatttggaacagagacggaaagatctaagtaaacttttggcttatattaggctacctcttcttgcaccacagttcctggcagacatggaaaataatgtactttttcgggatgatatagaatgtcagaaactcattatggaagcaatgaagtaccatttattaccagagagacgacccatgttacaaagtcctcggacaaaacctaggaagtcaactgttggtacattatttgcagttgggggaatggattcaacaaaaggagcaacaagcattgaaaagtatgatctccgtacaaatatgtggactccagtagcaaatatgaatgggaggaggctacagttcggtgttgcagtgctagatgacaaactgtatgtggttggaggaagagatggactgaagactttgaatactgtagagtgctacaaccccaaaacaaaaacttggagtgtgatgccacctatgtccacacatagacatggccttggtgtggctgtactggaaggtcccatgtatgccgtaggaggacatgatggctggagctatctgaacacagtggaaagatgggaccctcaggctcgccagtggaattttgttgccactatgtctacccctaggagtacagtaggtgtggcagtactaagtggaaaactttatgcagttggtggtcgtgatggaagttcttgtctcaaatcagtagaatgttttgatcctcatactaataagtggacactgtgtgcacagatgtcaaaaaggagaggtggcgtaggagtgacgacctggaatggactgctgtatgctataggggggcacgatgctcccgcatccaacttgacttccagactctcagactgtgtggaaagatatgatcccaaaacagacatgtggactgcagtagcatccatgagcatcagcagagatgcagtgggggtctgtttacttggtgataagttatatgctgttggggggtatgatggacaggcataccttaatactgtggaggcttatgatccccagacaaatgagtggacccaggttgctccactgtgcctaggaagagctggagcttgtgttgtgactgtaaaattataatttagtgccccgttttctacatgaagacaccgtcttcctttattaatttagtataattattctatcaatggatacatttttagtaaatgtgcattgtcacaatcctgggcacaaagtgcctgatgtcaaaatgaagatagtaaaacaagggaggaagcagtggatggaccaggattaattcctttcatttcttagtaaattaaaacctgcagctggtggattgtgatcacacattcccgaagtaataagtgaggacgaatgcactgctctggaacataacccagtgctaactgggggtttcatttattcagtcaagcacatcttactcacatccagatttattttcctacagtgcaaacacaccagatgaaactttaaaatgttactttttgtaagcttatcataaatgagttgcagtaatttgtttgcttgtttgtttaaccacaaccactattttaatgatatactaaagataacactatttagttttttcagaaacatctgcattatatgtgtgttggttgtggattttgtttctaaaattggcttagtccaataaataaagaaaagcattaaggacttaaagcaacaataaccaaataaaaacttgataggatctttgaagtctatttaaatattcattccattacatctagactcaccaagaactacatgttatgatgttaagttgaagttgaaacatgatgttttgcattaaatttaagatatgcaaatttatgtagagaaaataaatgttatataccctataatctttcacctaattagtatttaattatatggatttgttttatattataaaagatgttttgattttgtcttttgatattgacaaaattgtttggatatccttatgttctcaagtctgtatctgcctcccctgccttatttcttatgttttgccacagttaacccattgtgcttctttgtaatcaaacagtttgtgggagaatgggcttattgaatgtctaaaaaataagtttaaagtgtttgttaccctaagttttttacatttttaaactctaattacatatgtgaatgttattactctcagtgaattgttattgtttgcaaaaatgcactgggcagtaacattttgtgataaatcctataagatataagtc

SEQ ID NO: 10933 - DNA, 2690 bp, Homo sapiens
  source 1..2690: mol_type = unassigned DNA
actgcaacggggatagtgttttctgtctctgtcatttgtggtttaagaaaaagggggtggtgttctgcatttgaaaggactttaatgaatgctgtcagtgtttgtgagacctaatggtcagtatgggaaaggagagccgggaaagtggtctagctgcttcaggataggtggatgagagtttgctctgattgaacggaatgttccaccgtgtttcatctttattcattatcctttgttctttaaaatctgatatattggcataaaagtaattgtagatatatatatgaatgtgatttattttcctttacatatttttgttgtgtacagcagggcatatacttctcttgtcttggttggatgcacaaatctgtgtgcagtgctttttgcccgttgcctagacgatcacttggtttctctgaggatgtctggttctcgtaaagagtttgatgtgaaacagattttgaaaatcagatggaggtggtttggtcatcaagcatcatctcctaattctacagttgacagccagcagggagaattttggaaccgaggacagactggagcaaacggtgggagaaagtttttagatccatgtagcctacaattgcctttggcttcaattggttaccgaaggtccagccaactggattttcagaattcaccttcttggccaatggcatccacctctgaagtccctgcatttgagtttacagcagaagattgtggcggtgcacattggctggatagaccagaagtggatgatggcactagtgaagaagaaaatgaatctgattccagttcatgcaggacttccaatagtagtcagacattatcatcctgtcatactatggagccatgtacatcagatgaatttttccaagcccttaatcatgccgagcaaacatttaaaaaaatggaaaactatttgagacataaacagttgtgtgatgtaattttagtcgctggtgatcgcagaattccagctcacagattggtgctctcctctgtctcagactattttgctgccatgtttactaatgatgtcagagaggcaagacaagaagaaataaaaatggaaggtgtagaaccaaattcgttgtggtccttgatccagtatgcttatacaggccgccttgaattaaaagaagataatattgagtgcctgttatctacagcttgccttcttcagctttcacaggttgtagaagcatgctgtaagtttttaatgaaacagcttcatccatccaactgtcttggaattcgttcttttgctgatgcccaaggttgtacagatttgcataaagtggctcacaattatactatggagcatttcatggaagtaatcagaaaccaggaatttgtattattaccagccagcgaaattgcaaagctcttggctagtgatgacatgaacattcctaatgaggagacaatattgaatgcacttcttacttgggtccgtcatgatttggaacagagacggaaagatctaagtaaacttttggcttatattaggctacctcttcttgcaccacagttcctggcagacatggaaaataatgtactttttcgggatgatatagaatgtcagaaactcattatggaagcaatgaagtaccatttattaccagagagacgacccatgttacaaagtcctcggacaaaacctaggaagtcaactgttggtacattatttgcagttgggggaatggattcaacaaaaggagcaacaagcattgaaaagtatgatctccgtacaaatatgtggactccagtagcaaatatgaatgggaggaggctacagttcggtgttgcagtgctagatgacaaactgtatgtggttggaggaagagatggactgaagactttgaatactgtagagtgctacaaccccaaaacaaaaacttggagtgtgatgccacctatgtccacacatagacatggccttggtgtggctgtactggaaggtcccatgtatgccgtaggaggacatgatggctggagctatctgaacacagtggaaagatgggaccctcaggctcgccagtggaattttgttgccactatgtctacccctaggagtacagtaggtgtggcagtactaagtggaaaactttatgcagttggtggtcgtgatggaagttcttgtctcaaatcagtagaatgttttgatcctcatactaataagtggacactgtgtgcacagatgtcaaaaaggagaggtggcgtaggagtgacgacctggaatggactgctgtatgctataggggggcacgatgctcccgcatccaacttgacttccagactctcagactgtgtggaaagatatgatcccaaaacagacatgtggactgcagtagcatccatgagcatcagcagagatgcagtgggggtctgtttacttggtgataagttatatgctgttggggggtatgatggacaggcataccttaatactgtggaggcttatgatccccagacaaatgagtggacccaggttgctccactgtgcctaggaagagctggagcttgtgttgtgactgtaaaattataatttagtgccccgttttctacatgaagacaccgtcttcctttattaatttagtataattattctatcaatggatacatttttagtaaatgtgcattgtcacaatcctgggcacaaagtgcctgatgtcaaaatgaagata

SEQ ID NO: 10934 - DNA, 3288 bp, Homo sapiens
  source 1..3288: mol_type = unassigned DNA
tgtttcatctttattcattatcctttgttctttaaaatctgatatattggcataaaagtaattgtagatatatatatgaatgtgatttattttcctttacatatttttgttgtgtacagcagggcatatacttctcttgtcttggttggatgcacaaatctgtgtgcagtgctttttgcccgttgcctagacgatcacttggtttctctgaggatgtctggttctcgtaaagagtttgatgtgaaacagattttgaaaatcagatggaggtggtttggtcatcaagcatcatctcctaattctacagttgacagccagcagggagaattttggaaccgaggacagactggagcaaacggtgggagaaagtttttagatccatgtagcctacaattgcctttggcttcaattggttaccgaaggtccagccaactggattttcagaattcaccttcttggccaatggcatccacctctgaagtccctgcatttgagtttacagcagaagattgtggcggtgcacattggctggatagaccagaagtggatgatggcactagtgaagaagaaaatgaatctgattccagttcatgcaggacttccaatagtagtcagacattatcatcctgtcatactatggagccatgtacatcagatgaatttttccaagcccttaatcatgccgagcaaacatttaaaaaaatggaaaactatttgagacataaacagttgtgtgatgtaattttagtcgctggtgatcgcagaattccagctcacagattggtgctctcctctgtctcagactattttgctgccatgtttactaatgatgtcagagaggcaagacaagaagaaataaaaatggaaggtgtagaaccaaattcgttgtggtccttgatccagtatgcttatacaggccgccttgaattaaaagaagataatattgagtgcctgttatctacagcttgccttcttcagctttcacaggttgtagaagcatgctgtaagtttttaatgaaacagcttcatccatccaactgtcttggaattcgttcttttgctgatgcccaaggttgtacagatttgcataaagtggctcacaattatactatggagcatttcatggaagtaatcagaaaccaggaatttgtattattaccagccagcgaaattgcaaagctcttggctagtgatgacatgaacattcctaatgaggagacaatattgaatgcacttcttacttgggtccgtcatgatttggaacagagacggaaagatctaagtaaacttttggcttatattaggctacctcttcttgcaccacagttcctggcagacatggaaaataatgtactttttcgggatgatatagaatgtcagaaactcattatggaagcaatgaagtaccatttattaccagagagacgacccatgttacaaagtcctcggacaaaacctaggaagtcaactgttggtacattatttgcagttgggggaatggattcaacaaaaggagcaacaagcattgaaaagtatgatctccgtacaaatatgtggactccagtagcaaatatgaatgggaggaggctacagttcggtgttgcagtgctagatgacaaactgtatgtggttggaggaagagatggactgaagactttgaatactgtagagtgctacaaccccaaaacaaaaacttggagtgtgatgccacctatgtccacacatagacatggccttggtgtggctgtactggaaggtcccatgtatgccgtaggaggacatgatggctggagctatctgaacacagtggaaagatgggaccctcaggctcgccagtggaattttgttgccactatgtctacccctaggagtacagtaggtgtggcagtactaagtggaaaactttatgcagttggtggtcgtgatggaagttcttgtctcaaatcagtagaatgttttgatcctcatactaataagtggacactgtgtgcacagatgtcaaaaaggagaggtggcgtaggagtgacgacctggaatggactgctgtatgctataggggggcacgatgctcccgcatccaacttgacttccagactctcagactgtgtggaaagatatgatcccaaaacagacatgtggactgcagtagcatccatgagcatcagcagagatgcagtgggggtctgtttacttggtgataagttatatgctgttggggggtatgatggacaggcataccttaatactgtggaggcttatgatccccagacaaatgagtggacccaggtatggcattcatgtttcattattacactgactctctttttattaaaacaattcttatggtaaaacagatcccctcaatcttgtccaatactgaaatatatggcataaatatgacaatcacgttttgattagcgatgagaaaaagaggcaatgtttaattttataacataattaaaatccagaattacctttgagatgtaagttaatactcagagaaattattaattatctgctaccacttgcatgatgaagtgttctagcctgattaaagctgataggactactggagggctgcaacaatgggaggggagactggaaaataaaaacaaggatagtagtcagaaaactttgaacaacttgcccatgtgtgagcagtcggatttttaaatactcaacccattgatatctgggagcagattaaagtcctgataacctaatgaagatggcaaccctaaattacactgagtaagaaacctgatctggcagtcttactaacagaaagaatttcacccttgtgtatttctgggagggtctagcacttctaaaaatgatcttttgagatctttgcttccatcatcaccaagaacagaatcaggaatttgtgcttgtgtcacccagttcagtacttggtacataaaagacaataaatgtttaactgagccaagattttcttgtatacaaggagccatgataagtatggtcaagaaaacaaagcttctaggccaggcatggtggcttatgcctataatcccagcactttgggaggctgaggcgggcagatcacgaggtcaggagttcaagaccagcctgaccaatatggtgagaccccatctctactaaaaatacaaaaaaattagccgggcatggtggcacgtgcctgtaatcccagctactcggggggctgaggcaggagaatcgcttgaacccaggaggcagaggttgcagtgagcagagatcatgccactgcacttcagcctgggtgacagagtgagactccatctt

SEQ ID NO: 10935 - DNA, 3300 bp, Homo sapiens
  source 1..3300: mol_type = unassigned DNA
tgtttcatctttattcattatcctttgttctttaaaatctgatatattggcataaaagtaattgtagatatatatatgaatgtgatttattttcctttacatatttttgttgtgtacagcagggcatatacttctcttgtcttggttggatgcacaaatctgtgtgcagtgctttttgcccgttgcctagacgatcacttggtttctctgaggatgtctggttctcgtaaagagtttgatgtgaaacagattttgaaaatcagatggaggtggtttggtcatcaagcatcatctcctaattctacagttgacagccagcagggagaattttggaaccgaggacagactggagcaaacggtgggagaaagtttttagatccatgtagcctacaattgcctttggcttcaattggttaccgaaggtccagccaactggattttcagaattcaccttcttggccaatggcatccacctctgaagtccctgcatttgagtttacagcagaagattgtggcggtgcacattggctggatagaccagaagtggatgatggcactagtgaagaagaaaatgaatctgattccagttcatgcagattggtgctctcctctgtctcagactattttgctgccatgtttactaatgatgtcagagaggcaagacaagaagaaataaaaatggaaggtgtagaaccaaattcgttgtggtccttgatccagtatgcttatacaggccgccttgaattaaaagaagataatattgagtgcctgttatctacagcttgccttcttcagctttcacaggttgtagaagcatgctgtaagtttttaatgaaacagcttcatccatccaactgtcttggaattcgttcttttgctgatgcccaaggttgtacagatttgcataaagtggctcacaattatactatggagcatttcatggaagtaatcagaaaccaggaatttgtattattaccagccagcgaaattgcaaagctcttggctagtgatgacatgaacattcctaatgaggagacaatattgaatgcacttcttacttgggtccgtcatgatttggaacagagacggaaagatctaagtaaacttttggcttatattaggctacctcttcttgcaccacagttcctggcagacatggaaaataatgtactttttcgggatgatatagaatgtcagaaactcattatggaagcaatgaagtaccatttattaccagagagacgacccatgttacaaagtcctcggacaaaacctaggaagtcaactgttggtacattatttgcagttgggggaatggattcaacaaaaggagcaacaagcattgaaaagtatgatctccgtacaaatatgtggactccagtagcaaatatgaatgggaggaggctacagttcggtgttgcagtgctagatgacaaactgtatgtggttggaggaagagatggactgaagactttgaatactgtagagtgctacaaccccaaaacaaaaacttggagtgtgatgccacctatgtccacacatagacatggccttggtgtggctgtactggaaggtcccatgtatgccgtaggaggacatgatggctggagctatctgaacacagtggaaagatgggaccctcaggctcgccagtggaattttgttgccactatgtctacccctaggagtacagtaggtgtggcagtactaagtggaaaactttatgcagttggtggtcgtgatggaagttcttgtctcaaatcagtagaatgttttgatcctcatactaataagtggacactgtgtgcacagatgtcaaaaaggagaggtggcgtaggagtgacgacctggaatggactgctgtatgctataggggggcacgatgctcccgcatccaacttgacttccagactctcagactgtgtggaaagatatgatcccaaaacagacatgtggactgcagtagcatccatgagcatcagcagagatgcagtgggggtctgtttacttggtgataagttatatgctgttggggggtatgatggacaggcataccttaatactgtggaggcttatgatccccagacaaatgagtggacccaggttgctccactgtgcctaggaagagctggagcttgtgttgtgactgtaaaattataatttagtgccccgttttctacatgaagacaccgtcttcctttattaatttagtataattattctatcaatggatacatttttagtaaatgtgcattgtcacaatcctgggcacaaagtgcctgatgtcaaaatgaagatagtaaaacaagggaggaagcagtggatggaccaggattaattcctttcatttcttagtaaattaaaacctgcagctggtggattgtgatcacacattcccgaagtaataagtgaggacgaatgcactgctctggaacataacccagtgctaactgggggtttcatttattcagtcaagcacatcttactcacatccagatttattttcctacagtgcaaacacaccagatgaaactttaaaatgttactttttgtaagcttatcataaatgagttgcagtaatttgtttgcttgtttgtttaaccacaaccactattttaatgatatactaaagataacactatttagttttttcagaaacatctgcattatatgtgtgttggttgtggattttgtttctaaaattggcttagtccaataaataaagaaaagcattaaggacttaaagcaacaataaccaaataaaaacttgataggatctttgaagtctatttaaatattcattccattacatctagactcaccaagaactacatgttatgatgttaagttgaagttgaaacatgatgttttgcattaaatttaagatatgcaaatttatgtagagaaaataaatgttatataccctataatctttcacctaattagtatttaattatatggatttgttttatattataaaagatgttttgattttgtcttttgatattgacaaaattgtttggatatccttatgttctcaagtctgtatctgcctcccctgccttatttcttatgttttgccacagttaacccattgtgcttctttgtaatcaaacagtttgtgggagaatgggcttattgaatgtctaaaaaataagtttaaagtgtttgttaccctaagttttttacatttttaaactctaattacatatgtgaatgttattactctcagtgaattgttattgtttgcaaaaatgcactgggcagtaacattttgtgataaatcctataagatataag

SEQ ID NO: 10936 - DNA, 585 bp, Homo sapiens
  source 1..585: mol_type = unassigned DNA
agcagaagattgtggcggtgcacattggctggatagaccagaagtggatgatggcactagtgaagaagaaaatgaatctgattccagttcatgcagctctccagactaatatagagaatactaagtaacatgtctctaagatgacagctactaattcctgttaccttcactttcactgaaatgtgtgctatttagggaaatgaaggacattcctccaggagagtttaagggaatgtagaggggctagatgtgattatctggtgaaaaggggacaggaagaaggggaaatcagttagaagaaagaaaataaggaaaaaaataggacttccaatagtagtcagacattatcatcctgtcatactatggagccatgtacatcagatgaatttttccaagcccttaatcatgccgagcaaacatttaaaaaaatggaaaactatttgagacataaacagttgtgtgatgtaattttagtcgctggtgatcgcagaattccagctcacagattggtgctctcctctgtctcagactattttgctgccatgtttactaatgatgtcagagaggcaagacaagaagaaataa

SEQ ID NO: 10937 - DNA, 909 bp, Homo sapiens
  source 1..909: mol_type = unassigned DNA
ccgtacaaatatgtggactccagtagcaaatatgaatgggaggaggctacagttcggtgttgcagtgctagatgacaaactgtatgtggttggaggaagagatggactgaagactttgaatactgtagagtgctacaaccccaaaacaaaaacttggagtgtgatgccacctatgtccacacatagacatggccttggtgtggctgtactggaaggtcccatgtatgccgtaggaggacatgatggctggagctatctgaacacagtggaaagatgggaccctcaggctcgccagtggaattttgttgccactatgtctacccctaggagtacagtaggtgtggcagtactaagtggaaaactttatgcagttggtggtcgtgatggaagttcttgtctcaaatcagtagaatgttttgatcctcatactaataagtggacactgtgtgcacagatgtcaaaaaggagaggtggcgtaggagtgacgacctggaatggactgctgtatgctataggggggcacgatgctcccgcatccaacttgacttccagactctcagactgtgtggaaagatatgatcccaaaacagacatgtggactgcagtagcatccatgagcatcagcagagatgcagtgggggtctgtttacttggtgataagttatatgctgttggggggtatgatggacaggcataccttaatactgtggaggcttatgatccccagacaaatgagtggacccaggtattttcacatacttttgaggacagcaaagatcacctggtggccatcaagcagaccatctggaggcaaaactccttatctgaggaattcagaagtcattagactgccctattatctaaagccggcatcttgtactaggcttctttaccaaaaatgtatttaat

SEQ ID NO: 10938 - DNA, 1708 bp, Homo sapiens
  source 1..1708: mol_type = unassigned DNA
agacccaggagtccaggccctcactgcactcagggaccagtgctcccttccctggaggcctggtcaggggtcaccaagagcagagcgtgggggcgggaggaatgtgtgtgggaggcctgggtaaggaggaaaagggtgtagccagtctcctggctcagggacctgagagacaggggttaaaaggacgttccagaagcatctggggacagaaccagcctcttccagggaggcctgggagctgggggtgtgtgtctggcagtccctgcagccctgggctctgcggcccctgcgtcctccgcttggctctgccactgcatctgagtgtcttctctcctcacggctccccgcatttctaactctttctgcctcctcgtctcaaagctgttccttcccccgactcaagaatccccggagcccggaggcctgcagcaggagcggccatgaagaagctgatggtggtgctgagtctgattgctgcagcctgggcagaggagcagaataagttggtgcatggcggaccctgcgacaagacatctcacccctaccaagctgccctctacacctcgggccacttgctctgtggtggggtccttatccatccactgtgggtcctcacagctgcccactgcaaaaaaccgaatcttcaggtcttcctggggaagcataaccttcggcaaagggagagttcccaggagcagagttctgttgtccgggctgtgatccaccctgactatgatgccgccagccatgaccaggacatcatgctgttgcgcctggcacgcccagccaaactctctgaactcatccagccccttcccctggagagggactgctcagccaacaccaccagctgccacatcctgggctggggcaagacagcagatggtgatttccctgacaccatccagtgtgcatacatccacctggtgtcccgtgaggagtgtgagcatgcctaccctggccagatcacccagaacatgttgtgtgctggggatgagaagtacgggaaggattcctgccagggtgattctgggggtccgctggtatgtggagaccacctccgaggccttgtgtcatggggtaacatcccctgtggatcaaaggagaagccaggagtctacaccaacgtctgcagatacacgaactggatccaaaaaaccattcaggccaagtgaccctgacatgtgacatctacctcccgacctaccaccccactggctggttccagaacgtctctcacctagaccttgcctcccctcctctcctgcccagctctgaccctgatgcttaataaacgcagcgacgtgagggtcctgattctccctggttttaccccagctccatccttgcatcactggggaggacgtgatgagtgaggacttgggtcctcggtcttacccccaccactaagagaatacaggaaaatcccttctaggcatctcctctccccaacccttccacacgtttgatttcttcctgcagaggcccagccacgtgtctggaatcccagctccgctgcttactgtcggtgtccccttgggatgtacctttcttcactgcagatttctcacctgtaagatgaagataaggatgatacagtctccataaggcagtggctgttggaaagatttaaggtttcacacctatgacatacatggaatagcacctgggccaccatgcactcaataaagaatgaattttattatga

SEQ ID NO: 10939 - DNA, 1511 bp, Homo sapiens
  source 1..1511: mol_type = unassigned DNA
ggcggacaaagcccgattgttcctgggccctttccccatcgcgcctgggcctgctccccagcccggggcaggggcgggggccagtgtggtgacacacgctgtagctgtctccccggctggctggctcgctctctcctggggacacagaggtcggcaggcagcacacagagggacctacgggcagctgttccttcccccgactcaagaatccccggagcccggaggcctgcagcaggagcggccatgaagaagctgatggtggtgctgagtctgattgctgcagcctgggcagaggagcagaataagttggtgcatggcggaccctgcgacaagacatctcacccctaccaagctgccctctacacctcgggccacttgctctgtggtggggtccttatccatccactgtgggtcctcacagctgcccactgcaaaaaaccgaatcttcaggtcttcctggggaagcataaccttcggcaaagggagagttcccaggagcagagttctgttgtccgggctgtgatccaccctgactatgatgccgccagccatgaccaggacatcatgctgttgcgcctggcacgcccagccaaactctctgaactcatccagccccttcccctggagagggactgctcagccaacaccaccagctgccacatcctgggctggggcaagacagcagatggtgatttccctgacaccatccagtgtgcatacatccacctggtgtcccgtgaggagtgtgagcatgcctaccctggccagatcacccagaacatgttgtgtgctggggatgagaagtacgggaaggattcctgccagggtgattctgggggtccgctggtatgtggagaccacctccgaggccttgtgtcatggggtaacatcccctgtggatcaaaggagaagccaggagtctacaccaacgtctgcagatacacgaactggatccaaaaaaccattcaggccaagtgaccctgacatgtgacatctacctcccgacctaccaccccactggctggttccagaacgtctctcacctagaccttgcctcccctcctctcctgcccagctctgaccctgatgcttaataaacgcagcgacgtgagggtcctgattctccctggttttaccccagctccatccttgcatcactggggaggacgtgatgagtgaggacttgggtcctcggtcttacccccaccactaagagaatacaggaaaatcccttctaggcatctcctctccccaacccttccacacgtttgatttcttcctgcagaggcccagccacgtgtctggaatcccagctccgctgcttactgtcggtgtccccttgggatgtacctttcttcactgcagatttctcacctgtaagatgaagataaggatgatacagtctccataaggcagtggctgttggaaagatttaaggtttcacacctatgacatacatggaatagcacctgggccaccatgcactcaataaagaatgaattttattatga

SEQ ID NO: 10940 - DNA, 1353 bp, Homo sapiens
  source 1..1353: mol_type = unassigned DNA
ggcggacaaagcccgattgttcctgggccctttccccatcgcgcctgggcctgctccccagcccggggcaggggcgggggccagtgtggtgacacacgctgtagctgtctccccggctggctggctcgctctctcctggggacacagaggtcggcaggcagcacacagagggacctacgggcagctgttccttcccccgactcaagaatccccggagcccggaggcctgcagcaggagcggccatgaagaagctgatggtggtgctgagtctgattgctgcaggaatcttcaggtcttcctggggaagcataaccttcggcaaagggagagttcccaggagcagagttctgttgtccgggctgtgatccaccctgactatgatgccgccagccatgaccaggacatcatgctgttgcgcctggcacgcccagccaaactctctgaactcatccagccccttcccctggagagggactgctcagccaacaccaccagctgccacatcctgggctggggcaagacagcagatggtgatttccctgacaccatccagtgtgcatacatccacctggtgtcccgtgaggagtgtgagcatgcctaccctggccagatcacccagaacatgttgtgtgctggggatgagaagtacgggaaggattcctgccagggtgattctgggggtccgctggtatgtggagaccacctccgaggccttgtgtcatggggtaacatcccctgtggatcaaaggagaagccaggagtctacaccaacgtctgcagatacacgaactggatccaaaaaaccattcaggccaagtgaccctgacatgtgacatctacctcccgacctaccaccccactggctggttccagaacgtctctcacctagaccttgcctcccctcctctcctgcccagctctgaccctgatgcttaataaacgcagcgacgtgagggtcctgattctccctggttttaccccagctccatccttgcatcactggggaggacgtgatgagtgaggacttgggtcctcggtcttacccccaccactaagagaatacaggaaaatcccttctaggcatctcctctccccaacccttccacacgtttgatttcttcctgcagaggcccagccacgtgtctggaatcccagctccgctgcttactgtcggtgtccccttgggatgtacctttcttcactgcagatttctcacctgtaagatgaagataaggatgatacagtctccataaggcagtggctgttggaaagatttaaggtttcacacctatgacatacatggaatagcacctgggccaccatgcactcaataaagaatgaattttattatg

SEQ ID NO: 10941 - DNA, 842 bp, Homo sapiens
  source 1..842: mol_type = unassigned DNA
aggagaggatgcagagggagcagacagagggatggggggagggtcgaggcagtgactaatggaccatgtggcttcccctctcaggagcggccatgaagaagctgatggtggtgctgagtctgattgctgcagcctgggcagaggagcagaataagttggtgcatggcggaccctgcgacaagacatctcacccctaccaagctgccctctacacctcgggccacttgctctgtggtggggtccttatccatccactgtgggtcctcacagctgcccactgcaaaaaaccgaatcttcaggtcttcctggggaagcataaccttcggcaaagggagagttcccaggagcagagttctgttgtccgggctgtgatccaccctgactatgatgccgccagccatgaccaggacatcatgctgttgcgcctggcacgcccagccaaactctctgaactcatccagccccttcccctggagagggactgctcagccaacaccaccagctgccacatcctgggctggggcaagacagcagatggtgatttccctgacaccatccagtgtgcatacatccacctggtgtcccgtgaggagtgtgagcatgcctaccctggccagatcacccagaacatgttgtgtgctggggatgagaagtacgggaaggattcctgccagggtgattctgggggtccgctggtatgtggagaccacctccgaggccttgtgtcatggggtaacatcccctgtggatcaaaggagaagccaggagtctacaccaacgtctgcagatacacgaactggatccaaaaaaccattcaggccaagtgaccctgacatgtgaca

SEQ ID NO: 10942 - DNA, 819 bp, Homo sapiens
  source 1..819: mol_type = unassigned DNA
acagaaccagcctcttccagggaggcctgggagctgggggtgtgtgtctggcagtccctgcagccctgggctctgcggcccctgcgtcctccgcttggctctgccactgcatctgagtgtcttctctcctcacggctccccgcatttctaactctttctgcctcctcgtctcaaagctgttccttcccccgactcaagaatccccggagcccggaggcctgcagcaggagcggccatgaagaagctgatggtggtgctgagtctgattgctgcaggaatcttcaggtcttcctggggaagcataaccttcggcaaagggagagttcccaggagcagagttctgttgtccgggctgtgatccaccctgactatgatgccgccagccatgaccaggacatcatgctgttgcgcctggcacgcccagccaaactctctgaactcatccagccccttcccctggagagggactgctcagccaacaccaccagctgccacatcctgggctggggcaagacagcagatggtgatttccctgacaccatccagtgtgcatacatccacctggtgtcccgtgaggagtgtgagcatgcctaccctggccagatcacccagaacatgttgtgtgctggggatgagaagtacgggaaggattcctgccagggtgattctgggggtccgctggtatgtggagaccacctccgaggccttgtgtcatggggtaacatcccctgtggatcaaaggagaagccaggagtctacaccaacgtctgcagatacacgaactggatccaaaaaaccattcaggccaagtgaccctga

SEQ ID NO: 10943 - DNA, 928 bp, Homo sapiens
  source 1..928: mol_type = unassigned DNA
acagaaccagcctcttccagggaggcctgggagctgggggtgtgtgtctggcagtccctgcagccctgggctctgcggcccctgcgtcctccgcttggctctgccactgcatctgagtgtcttctctcctcacggctccccgcatttctaactctttctgcctcctcgtctcaaagctgttccttcccccgactcaagaatccccggagcccggaggcctgcagcagcctgggcagaggagcagaataagttggtgcatggcggaccctgcgacaagacatctcacccctaccaagctgccctctacacctcgggccacttgctctgtggtggggtccttatccatccactgtgggtcctcacagctgcccactgcaaaaaaccgaatcttcaggtcttcctggggaagcataaccttcggcaaagggagagttcccaggagcagagttctgttgtccgggctgtgatccaccctgactatgatgccgccagccatgaccaggacatcatgctgttgcgcctggcacgcccagccaaactctctgaactcatccagccccttcccctggagagggactgctcagccaacaccaccagctgccacatcctgggctggggcaagacagcagatggtgatttccctgacaccatccagtgtgcatacatccacctggtgtcccgtgaggagtgtgagcatgcctaccctggccagatcacccagaacatgttgtgtgctggggatgagaagtacgggaaggattcctgccagggtgattctgggggtccgctggtatgtggagaccacctccgaggccttgtgtcatggggtaacatcccctgtggatcaaaggagaagccaggagtctacaccaacgtctgcagatacacgaactggatccaaaaaaccattcaggccaagtgaccctga

SEQ ID NO: 10944 - DNA, 1478 bp, Homo sapiens
  source 1..1478: mol_type = unassigned DNA
aggacgttccagaagcatctggggacagaaccagcctcttccagggaggcctgggagctgggggtgtgtgtctggcagtccctgcagccctgggctctgcggcccctgcgtcctccgcttggctctgccactgcatctgagtgtcttctctcctcacggctccccgcatttctaactctttctgcctcctcgtctcaaagctgttccttcccccgactcaagaatccccggagcccggaggcctgcagcagcctgggcagaggagcagaataagttggtgcatggcggaccctgcgacaagacatctcacccctaccaagctgccctctacacctcgggccacttgctctgtggtggggtccttatccatccactgtgggtcctcacagctgcccactgcaaaaaaccgaatcttcaggtcttcctggggaagcataaccttcggcaaagggagagttcccaggagcagagttctgttgtccgggctgtgatccaccctgactatgatgccgccagccatgaccaggacatcatgctgttgcgcctggcacgcccagccaaactctctgaactcatccagccccttcccctggagagggactgctcagccaacaccaccagctgccacatcctgggctggggcaagacagcagatggtgatttccctgacaccatccagtgtgcatacatccacctggtgtcccgtgaggagtgtgagcatgcctaccctggccagatcacccagaacatgttgtgtgctggggatgagaagtacgggaaggattcctgccagggtgattctgggggtccgctggtatgtggagaccacctccgaggccttgtgtcatggggtaacatcccctgtggatcaaaggagaagccaggagtctacaccaacgtctgcagatacacgaactggatccaaaaaaccattcaggccaagtgaccctgacatgtgacatctacctcccgacctaccaccccactggctggttccagaacgtctctcacctagaccttgcctcccctcctctcctgcccagctctgaccctgatgcttaataaacgcagcgacgtgagggtcctgattctccctggttttaccccagctccatccttgcatcactggggaggacgtgatgagtgaggacttgggtcctcggtcttacccccaccactaagagaatacaggaaaatcccttctaggcatctcctctccccaacccttccacacgtttgatttcttcctgcagaggcccagccacgtgtctggaatcccagctccgctgcttactgtcggtgtccccttgggatgtacctttcttcactgcagatttctcacctgtaagatgaagataaggatgatacagtctccataaggcagtggctgttggaaagatttaaggtttcacacctatgacatacatggaatagcacctgggccaccatgcactcaataaagaatgaattttattatg

SEQ ID NO: 10945 - DNA, 6793 bp, Homo sapiens
  source 1..6793: mol_type = unassigned DNA
ggtgcgcggcgcggccgcaggatgcaggccatggacccggccgcggcggatctttacgaggaggacggcaaagacctggacttctacgacttcgagccgctgcccaccctccccgaggacgaggagaacgtgtctctggctgacatcctctccctgcgggaccgcggcctcagcgagcaggaagcctgggccgtgtgcctggagtgcagcctgtccatgcggagcgtggcccacgccgccatcttccagagcctgtgcatcacgcccgacaccctggccttcaacaccagcgggaacgtgtgtttcatggagcagctcagcgacgaccctgagggtgccttcgttccccccgagttcgacgtgaccgggaacacctttgaggcgcacatctactctctgggggccacgctgaaggccgccctcgagtacgtggcagagcccacactggaacccaggctgagccaagacctcgaggcgctgctgagccggatgcaggcggaggaccccggggaccggccggaccttgagagcatcatcgcgctgtgtgaagagaagctgcagctcacatcctcctgtcgcgtgtgccggagcctctctgctgtggggaggagggtcctctccatcgagtccttcggagcgctgcaggatgtcagcgagagcagctggcgggagagacctgccccaggaaacgctgggcccaggaggccgcccggggaccccagcactgacccggaggttctgccgacccccgaaggcccggagtctgagacgagccggggccccagagcctccccaaccaaggctctgctgtccaccccggtgagaaatggcgagagccacagccgggaggggctggccggcctcgtcctggatgccgagcgcaccctcggggagctggacagagacgccctcaggagaagccgcctgcggaaggtgcagacgttccctaggctgctgtccgacagccccgaggccaccctctgcctgccgctgacccgcgggaaaagccagctgcccatatcggaattattctctccggaccccaggaaggcctttctggacaggaaaaatggcctttctagcttccaggctcagcccaaatgcaggctgtggccggagcaggagccggaacaccagctgggacgggttccctgtgcaggccgcagcacggacaggggccctggggtgcccggcagtccaggacagcccgagacttcacaccccagccaggggccagcagaggcccctgcagaccctcgagatgctagcggtgaagcccagactcccagggacgatgagagaattccagaaggagctaggcagctggaaagtgcagccgcggagcagtgggtgtccctgcaggacctcctgtcccagctgggccggcccttccgggagtacgagctgtgggccctgtgcctggcctgcctccgcgcactgcagacacgccctgagcacccagcctacctgtgtctggactccgtgctggttgctgaggacggggctgtgctcttccagccaccccctgccaacggttcctatgactcgttctttctggctcccgagctggcagaggagaggctggtaactgaaaaggcctctgtgtactgtgtggccgccgttctgtggaccgcagccaagttcagcgtcccccgcaaccacaagctggccctgccacgcaggctcaagaccctcctcctggacatggccaggcgcagtgccccggagcggccgtccgcggctgaggccatcaaggtgtgcggcagctacctcctccagcgaggcatggacagccggaaaatccttgcccacctcagagcttccatctgccaggtgtaccaggaggaagagaccatcagcctccaaaacgccttctcagtggttgaactgaagcccagtgtggcaccagccccagagcccagcccaggcttcctgccggtgaacagcgacaccgggcttgtggctgtgccagggcccgtgcccggccagcacccctgcggtgaagaagccacccagctgcctgcagcgttcacctccgaggccacgcacttcaagcccattgtcctcgcgcagaacgcaagtgtggccagggaccagcctgccttggcccaggaggagtccgaggagaggggcggccagagggagggagaaggtgaggagaagctctccctggaggcccacgctgggtcccccagcctgaagacgcctgacgggccggtgcctggtccggggccacagggagcagccccagagcctcttggggcgtcagtgcagcgtgactcagcccagggccgcccctgccctccaccccaggccccagcaaaccagccagagggggcctcatcggcagctcccggctctccagtccccgccccgcccacgaaggcatctgcgctgcccgtagagcaagggccggctgagccgatcccacctggagttgcttccgggggcctcaggcccgacgccctggggcccaccacggcccaccacggcccacgccacccgcccaagcccccacgaagcaaggccaccgagcgcccgggccaggagccagagggccccggggccacccctgccggggaacgtgatgaccagagtccagacagtgtcccagagaggccgcggcccgcagaccggaggctctgtctgccctgcgtggatgcctcgccactcccagggaggacggcctgcccgtcgctgcaggaggccacgcgcctcatccaggaggaatttgccttcgatggctacctggacaatgggctggaggctctgatcatgggggagtacatcttcgccttgaaagatctcacctttgccactttctgtggcgccatttccgagaagttctgtgacctgtactgggatgagaagttgctgcagaacctctttaaggtggtcaacgggcaggcgtcaccctccccaagcacggccgaggaggctgggtcacagctcgagggcagccaaagcccccgctccccgtccagcaagaggccgtcgctgcaccgcctgggaaaagagaagccagccatggccaggaccagcagcagggccccctgctcacccacctcggtgtcggatgtggactcggacgcactgtcacggggaaacttcgaggtggggtttcggcctcagaggtccgtaaaagccgagagagcgcagcagcctgaggctggcgaggacagacggccagctggcggggcctcagacgtggaggcagtgacccgactggccaggtccaaaggggtcggcccagccttgtcccccggcccagccggattccagagctgcagccccggctggtgcagcgccttctacgaggccgactgcttcggggccgacgtccacaactacgtgaaggacctggggcggcagcaggcggacggggccctgcccgacgcccagagcccggagctggaacagcagctcatgatggagaaaagaaactaccgcaagaccctgaagttctaccagaaactcttacagaaggaaaagaggaacaaaggttccgacgtcaagaccatgctgtccaagctgaaagggcagctagaagaaatgaaatccagggtgcaattcctcagcttggtcaagaagtatctgcaggtcatgtacgcggaacgctggggcctggagccctgcaccctcccagtgatcgtgaacatcgcggccgcaccctgcgacacgctggacttcagccccctggacgagtcctcctcgctcatcttctacaacgtcaacaagcacccgggcggccggcagaaggcccgcatcctgcaggccggcacgccgctggggctcatggcctacctgtactccagtgatgccttcctggagggttatgtgcagcaattcctctacaccttccgctacttctgcacaccccacgacttcctgcacttcctcctcgaccgcatcaacagcacgctgaccagggcccaccaggaccccacctcgaccttcaccaagatctacaggcggagcctctgcgtcctgcaggcctgggtggaggactgctacgctgtggacttccctcggaacagcgggctgctggggaagctagaggacttcatctcctccaagatcctacccctggacggctctgccaagcacctgctgggcctcctggaggtgggcatggaccggcgggccgagggcaaccctcgcggcacagacctggagaaccccagggaggccgaggaggatgccagacccttcaacgccctctgtaagaggctctcagaggacggcatctccaggaagagcttcccctggaggctgccccgaggcaacgggctggtgctgccgccacacaaggagcgcccctacaccattgctgccgccctgcccaagccctgcttcctcgaggacttctacggcccctgcgccaagaccagtgagaaggggccctacttcctgacggagtacagcactcaccagctcttcagccagctcacgctgctacagcaggagttgtttcaaaagtgccacccggtccacttcctgaactcacgggccctgggcgtcatggacaagagcactgccatccccaaagccagctcttctgagtctctttcggccaaaacctgcagcttatttctgcccaattacgttcaggacaagtatctgttacagcttctaagaaacgcagatgacgtcagcacctgggtggctgcagagattgtgaccagccacacctccaagctgcaggtgaacttgctgtccaaatttttgctgattgcaaaatcttgctatgagcagagaaacttcgcgacagccatgcagatcctgagcgggctggagcacctggccgtgaggcagtcccctgcctggagaattctgcctgcaaagatagcagaggtcatggaggagctgaaagccgtggaggtcttcctgaagagcgacagcctgtgtctgatggaagggcggcgcttccgggcgcagcccaccctgccctcggcccacctcctggccatgcacatccagcagctggagacaggcggcttcaccatgaccaacggggcccacaggtggagcaagctcaggaacatcgcaaaggtggtgagccaggtgcacgcgttccaggagaacccttacaccttcagccccgaccccaagctccagtcgtacctcaagcagaggattgcccgcttcagcggtgccgacatttccacactcgccgcagatagcagggccaacttccaccaggtctccagcgagaagcactcacggaagattcaggacaagctacggaggatgaaggctacattccagtagccgagctcgggcctggtgtggaattccagatccgaatccgactgtggggggcgggctgggaggtgggagccgcgtctcaggcccggccgttatcaaggcccctccgcccccgaaccctggggagctggaccaggaggtggaggctcaggggaccccatggggacaggcagagctggtctcctcccagcagacggagccaggacgggcacaagagtcttggaggtttgcgtgtttctgctagaattaaaaagttaaatttaaaaatgaaaatgaaagacagcttcccaggagttttgtgcctgtctgcgcctctcacacacagataagtggctcttacccagctctcagtgactcccccacaaaacagcaacagcctccaccgccaactcaacaaacttcagagtagctcctccctgagcaggtttctgagccagcctgggttggctgagcaacgaagggccaaagctgacctctgagtggccaactgcagctcccagggactccgagacctccggtccgagaccctgcctgggttcaccccccacaacccagacccagaaccgctctccccttccctgcccagtgcccctcctccccagcccagacccccaggtgcccaaggcctgctgctggagcaggcaccttgggctgggcctgctcccccagggcccagggccccccagcttagaacagcccttggtgaggtggtcatgcccgggcaaaggccctgcttcctggaaaggacactcagagcagctccaagacagaggctctgtggcgggggtccctgagagtgcccccacccatctcatgccccagggaccgccactgcccaccgcctccagcagccatgcatgtgcgcccgcagccctgcctccacagctcgccacacactcacgcttcgccagagacaggaagtgcgctgcctccacggccccttgcccttgctcaggttcttggaccccaggcagctggtgtggagccccttggccagggccatgggagtcccgcgcagtcagctccacattggcctctgcagctgggtgaccagagccccgggcacggccccagctccgtggggctctcacggtgccaatcacaagacccagggttgtgcttttgagttttagaattagtcattctttagagcagccagctagtggcatttctaggaaaactgtgacctgtgacaaatcgctgcatttttaatgtcaagatgtgttttcccacataaattcaccggagacatccgggccccgcttcgatgtaacatgagaggaagtcggcgtcctggccacgaaatgcagttcacttttttttaggcttttatatggattatgttttgctgacccacgcccgcattttcagattttgtatctaacagacagtgctcagtgcaaatcaacattccagcggtcaggactgaccccggggcagcactgggctcaggcttcagcgcgactgtccgcatggctccctcccgtcctggcaccaatttctgaataaagtcctttctaccagc

SEQ ID NO: 10946 - DNA, 639 bp, Homo sapiens
  source 1..639: mol_type = unassigned DNA
cgaggaggacggcaaagacctggacttctacgacttcgagccgctgcccaccctccccgaggacgaggagaacgtgtctctggctgacatcctctccctgcgggaccgcggcctcagcgagcaggaagcctgggccgtgtgcctggagtgcagcctgtccatgcggagcgtggcccacgccgccatcttccagagcctgtgcatcacgcccgacaccctggccttcaacaccagcgggaacgtgtgtttcatggagcagctcagcgacgaccctgagggtgccttcgttccccccgagttcgacgtgaccgggaacacctttgagcctccaccccatgaggctcccctctccaccccgctgccctgagcaccaatgggctccagtggcccggcctggaagactccgacccctcccccatcgctggcctgtttgcttggcattcatccacgacatgcaggcttagcaagcgtctgggctcacagacagcagggtgagtggggtcctgcctcttgctggttctggtctacacaagtgacagacttgatgtgagacccacaggctggggatccaataatgctgggacatgagaatggggccccaaggctcttgtttgcatcagaggcctccagaggccactg

SEQ ID NO: 10947 - DNA, 438 bp, Homo sapiens
  source 1..438: mol_type = unassigned DNA
cgaggaggacggcaaagacctggacttctacgacttcgagccgctgcccaccctccccgaggacgaggagaacgtgtctctggctgacatcctctccctgcgggaccgcggcctcagcgagcaggaagcctgggccgtgtgcctggagtgcagcctgtccatgcggagcgtggcccacgccgccatcttccagagcctgtgcatcacgcccgacaccctggccttcaacaccagcgggaacgtgtgtttcatggagcagctcagcgacgaccctgagggtgccttcgttccccccgagttcgacgtgaccgggaacacctttgagagccctggccagtgaggccctgtctgggcccaggcggtcctgggagcccccaggtgcgtgttcacagtgtcctcctgaggcccgggctgtggtggacccaccacgctgagtgc

SEQ ID NO: 10948 - DNA, 643 bp, Homo sapiens
  source 1..643: mol_type = unassigned DNA
aacaggtcttaggtggtccctgctctcagacctaccccatggctcacccaggcacgccctgctagggatggagaacgtgtctctggctgacatcctctccctgcgggaccgcggcctcagcgagcaggaagcctgggccgtgtgcctggagtgcagcctgtccatgcggagcgtggcccacgccgccatcttccagagcctgtgcatcacgcccgacaccctggccttcaacaccagcgggaacgtgtgtttcatggagcagctcagcgacgaccctgagggtgccttcgttccccccgagttcgacgtgaccgggaacacctttgagccgtcagcagccaccatgaatcctgcgagccgccacagtagtcctcaccttggttcgtgagcagggctcccgctctcaggagagccgccctcatcgacgctgggcagccgcagcagacagtccctgtggacagagaggtgggaggctcgactccttctcttcatccacctgttttcaaagcagtgagtgcatccagcgtcctccaacgtggaccagtgagcttggttttatgatcttatgaatttaagattcgcacgtctttgatgggattttgtctgttctgctgattccacctgaagctcagaaggcaccccg

SEQ ID NO: 10949 - DNA, 3925 bp, Homo sapiens
  source 1..3925: mol_type = unassigned DNA
gttccgtggctctgacgtccagggaacagcaggacgactcttgaaacaaaatgagacgtggtctaaagccctttccctgacccacgcgttgaaacgctgccacgagtcgtccgtttccccagggaatcgtctcggtgggggtgccggggcctggctgggggtcctgccgggctcacggccagggccggtcttggcaggagaacgtgtctctggctgacatcctctccctgcgggaccgcggcctcagcgagcaggaagcctgggccgtgtgcctggagtgcagcctgtccatgcggagcgtggcccacgccgccatcttccagagcctgtgcatcacgcccgacaccctggccttcaacaccagcgggaacgtgtgtttcatggagcagctcagcgacgaccctgagggtgccttcgttccccccgagttcgacgtgaccgggaacacctttgaggcgcacatctactctctgggggccacgctgaaggccgccctcgagtacgtggcagagcccacactggaacccaggctgagccaagacctcgaggcgctgctgagccggatgcaggcggaggaccccggggaccggccggaccttgagagcatcatcgcgctgtgtgaagagaagctgcagctcacatcctcctgtcgcgtgtgccggagcctctctgctgtggggaggagggtcctctccatcgagtccttcggagcgctgcaggatgtcagcgagagcagctggcgggagagacctgccccaggaaacgctgggcccaggaggccgcccggggaccccagcactgacccggaggttctgccgacccccgaaggcccggagtctgagacgagccggggccccagagcctccccaaccaaggctctgctgtccaccccggtgagaaatggcgagagccacagccgggaggggctggccggcctcgtcctggatgccgagcgcaccctcggggagctggacagagacgccctcaggagaagccgcctgcggaaggtgcagacgttccctaggctgctgtccgacagccccgaggccaccctctgcctgccgctgacccgcgggaaaagccagctgcccatatcggaattattctctccggaccccaggaaggcctttctggacaggaaaaatggcctttctagcttccaggctcagcccaaatgcaggctgtggccggagcaggagccggaacaccagctgggacgggttccctgtgcaggccgcagcacggacaggggccctggggtgcccggcagtccaggacagcccgagacttcacaccccagccaggggccagcagaggcccctgcagaccctcgagatgctagcggtgaagcccagactcccagggacgatgagagaattccagaaggagctaggcagctggaaagtgcagccgcggagcagtgggtgtccctgcaggacctcctgtcccagctgggccggcccttccgggagtacgagctgtgggccctgtgcctggcctgcctccgcgcactgcagacacgccctgagcacccagcctacctgtgtctggactccgtgctggttgctgaggacggggctgtgctcttccagccaccccctgccaacggttcctatgactcgttctttctggctcccgagctggcagaggagaggctggtaactgaaaaggcctctgtgtactgtgtggccgccgttctgtggaccgcagccaagttcagcgtcccccgcaaccacaagctggccctgccacgcaggctcaagaccctcctcctggacatggccaggcgcagtgccccggagcggccgtccgcggctgaggccatcaaggtgtgcggcagctacctcctccagcgaggcatggacagccggaaaatccttgcccacctcagagcttccatctgccaggtgtaccaggaggaagagaccatcagcctccaaaacgccttctcagtggttgaactgaagcccagtgtggcaccagccccagagcccagcccaggcttcctgccggtgaacagcgacaccgggcttgtggctgtgccagggcccgtgcccggccagcacccctgcggtgaagaagccacccagctgcctgcagcgttcacctccgaggccacgcacttcaagcccattgtcctcgcgcagaacgcaagtgtggccagggaccagcctgccttggcccaggaggagtccgaggagaggggcggccagagggagggagaaggtgaggagaagctctccctggaggcccacgctgggtcccccagcctgaagacgcctgacgggccggtgcctggtccggggccacagggagcagccccagagcctcttggggcgtcagtgcagcgtgactcagcccagggccgcccctgccctccaccccaggccccagcaaaccagccagagggggcctcatcggcagctcccggctctccagtccccgccccgcccacgaaggcatctgcgctgcccgtagagcaagggccggctgagccgatcccacctggagttgcttccgggggcctcaggcccgacgccctggggcccaccacggcccaccacggcccacgccacccgcccaagcccccacgaagcaaggccaccgagcgcccgggccaggagccagagggccccggggccacccctgccggggaacgtgatgaccagagtccagacagtgtcccagagaggccgcggcccgcagaccggaggctctgtctgccctgcgtggatgcctcgccactcccagggaggacggcctgcccgtcgctgcaggaggccacgcgcctcatccaggaggaatttgccttcgatggctacctggacaatgggctggaggctctgatcatgggggagtacatcttcgccttgaaagatctcacctttgccactttctgtggcgccatttccgagaagttctgtgacctgtactgggatgagaagttgctgcagaacctctttaaggtggtcaacgggcaggcgtcaccctccccaagcacggccgaggaggctgggtcacagctcgagggcagccaaagcccccgctccccgtccagcaagaggccgtcgctgcaccgcctgggaaaagagaagccagccatggccaggaccagcagcagggccccctgctcacccacctcggtgtcggatgtggactcggacgcactgtcacggggaaacttcgaggtggggtttcggcctcagaggtccgtaaaagccgagagagcgcagcagcctgaggctggcgaggacagacggccagctggcggggcctcagacgtggaggcagtgacccgactggccaggtccaaaggggtcggcccagccttgtcccccggcccagccggattccagagctgcagccccggctggtgcagcgccttctacgaggccgactgcttcggggccgacgtccacaactacgtgaaggacctggggcggcagcaggcggacggggccctgcccgacgcccagagcccggagctggaacagcagctcatgatggagaaaagaaactaccgcaagaccctgaagttctaccagaaactcttacagaaggaaaagaggaacaaaggttccgacgtcaagaccatgctgtccaagctgaaagggcagctagaagaaatgaaatccagggtgcaattcctcagcttggtcaagaagtatctgcaggcaagtgggctccgggccccgctctgccccgtgaggcagtagcttcagacgggcctcccactgttggatgctgtaaatctgtccgtgtgaagttataaaaggggccctgatttgagggtccaatgccaggaagccctggggcgaggggcagagtgaccaagcgcccgtgtcccgctccggcaggtcatgtacgcggaacgctggggcctggagccctgcaccctcccagtgatcgtgaacatcgcggccgc

SEQ ID NO: 10950 - DNA, 6432 bp, Homo sapiens
  source 1..6432: mol_type = unassigned DNA
ggccggcgactcgaagtggacttccgggtcacggcggagctggctctcacgtggaggcggggaaatttcgcccaccggaatgatcaccaagacacacaaagtagaccttgggctcccagagaagaaaaagaagaagaaagtggtcaaagaaccagagactcgatactcagttttaaacaatgatgattactttgctgatgtttctcctttaagagctacatccccctctaagagtgtggcccatgggcaggcacctgagatgcctctagtgaagaaaaagaagaagaaaaagaagggtgtcagcaccctttgcgaggagcatgtagaacctgagaccacgctgcctgctagacggacagagaagtcacccagcctcaggaagcaggtgtttggccacttggagttcctcagtggggaaaagaaaaataagaagtcacctctagccatgtcccatgcctctggggtgaaaacctccccagaccctagacagggtgaggaggaaaccagagttggcaagaagctcaaaaaacacaagaaggaaaaaaagggggcccaggaccccacagccttctcggtccaggacccttggttctgtgaggccagggaggccagggatgttggggacacttgctcagtggggaagaaggatgaggaacaggcagccttggggcagaaacggaagcggaagagccccagagaacacaatgggaaggtgaagaagaaaaaaaaaatccaccaggagggagatgccctcccaggccactccaagccctccaggtccatggagagcagccctaggaaaggaagtaaaaagaagccagtcaaagttgaggctccggaatacatccccataagtgatgaccctaaggcctccgcaaagaaaaagatgaagtccaaaaagaaggtagagcagccagtcatcgaggagccagctctgaaaaggaagaaaaagaagaagaggaaagagagtggggtagcaggagacccttggaaggaggaaacagacacggacttagaggtggtgttggaaaaaaaaggcaacatggatgaggcgcacatagaccaggtgaggcgaaaggccttgcaagaagagatcgatcgcgagtcaggcaaaacggaagcttctgaaaccaggaagtggacgggaacccagtttggccagtgggatactgctggttttgagaacgaggaccaaaaactgaaatttctcagacttatgggtggcttcaaaaacctgtccccttcgttcagccgccccgccagcacgattgcaaggcccaacatggccctcggcaagaaggcggctgacagcctgcagcagaatctgcagcgggactacgaccgggccatgagctggaagtacagccggggagccggcctcggcttctccaccgcccccaacaagatcttttacattgacaggaacgcttccaagtcagtcaagctggaagattaaactctagagttttgtccccccaaaactgccacaattgctttgattattccatttatgctggagattacaaattttttttgtgaaaaaatcagatcttggtgaggacctcgagcagtaagatataaataactcccataagcttagcgttccagtaatggaacactaggcataaatggtttattcagttgtgcaaatgaaagccatctgacagttggctcacattgaacacctgtggagattaaggacgaggacaactatattgatgggcttggatgaactggggcagggcagctcatatttcgggagccaggagaacgagtgagtgctaaaacctcctgttttctgtgttaaacattccgtccctgtttgagacatcagtatgtacagttaacttttgttgagtgtttagcaggtactagggacatactagtgttttccttaatgtatttaatcttcataattatgaaatgggtgctattattagccccatcttatagatgaggcaactgaggttcagggataaagtaataaaattgcctggggtcacccagccactaagtgcagggtgttgtacttttgtacccgaagccctaagttcactattcgccactctgaatgtcccctttagggaatttccaccagaatcctcgttggggattgaaatgtctttagatggaggaaaaagttttatgacaagtctgcatctctgataaaaagtggagtgaatgaggaacggagaatcgcaaactccttttccttccttttcctttcccctgtcatagagcagctgtaggcagagaggtgtctgagttgttaccaaacacatgtgactgagctgctgctgctgggaaatgtgcctctaaaccagtcctgccttttccactggtgtcccttcggccctaagtgctgaggtaggatttttgtgctttgactggattctgaacaaggcattttaggaagagtggttagtcccgcaaatgaatcaatggcagatcccagggacgtgtgtgtgtgttttgagataggctctcactctgtcacccaggctggagtgtagtggcatatcacggcttgttgcaaccactacctatccagcttaagtgatcctcccacctcagcctcccaagtagctgggactgtgggtgtgcaccacaacaaccagctagtgtttaaaattttttgtagagatggggtctcactatattgtccaggctagtcccaaactcctggactcaactcatgctcctgcctcagcccccaagagctgggatcacaggtgtgagccactgtgcccagccccagggatgtgtctgatgagattcttttttatcacaaggaagagaatcccaggtgacttctgtaggtggatattgaatgccaggaggagatgaacgtgtggagatgacacgggaagttgcctcatcggctgtggggacagcgtttccaagcctggactctacagcaagcctcaaagagctccaggtccagtggcccaagtcgcatgtgaccatctgtgaccaccttctttccactcacctagctttttgcatcccaaaatacaggttctgactgggacattttcacgatcgtttggcctgaacatgcctcctacagacatcccagcccaggcaggcctcgatggccagaaagttcagtctcacgtggcaggaaggcctgattagggcctggttcaacagctcgccaaggaagcattctctccatcatctccagtgttggcttcatcaaggctagtacaaagatggcagtaacagttccaggcagcatatcaagaccctagaacattccagaggaagaaaagcctttttgtgtctcaaggaaacttccagaagcctccattgctgggcaatgagtcatctgcccatagctgcacccgcccctgtcatgggaaggctggtgattcccttcagtcaagaagagtggatgctggtgaagtggccatggtgtccacagctgcccattgggcagaggtgaggcaggcacttcaggcagtttccctggctctgaaccctgatccgcaagcattggccaggtcaatagttggacaagtatgtgctacaaggacctacttgggccacttccctcaggacgtgaacttgtcctgcctttctttcctggattcaaccttgagatacataatgggagaggccgtggaaagcccaagaggcagtgttctggatttgagtgagtgccttctgggcacctcctcctttgatggagaaacaaatccctcctgaccttgagcaacactacaggaatgtgcctggtgtaaacaggaaccagccgttcgtttctttttttttgagatggagtctcacggtcgcgcaggctggagtgtggtggcgtgatctcggctcattgtaacctctgcttcctgggttcaagcgattcttgtgcctcagtctcctgagtagctggaatcggccgtttactactcatagtttttatcttgccaagaggtcaccctgacgttggcctgccttagctctgttaaaaaggttgtgctctgccaggtgcggtgactcacgcctgtaatcccagcactttgggaggccaaggtgggcggatcacgaggtcaagagttcgagaccagcctgaccaacatggtgaaaccccgtctctactaaaaatacaaaaattagctgggtgggtgtggtgtcacgggcttgtaatcccggctactcaggaggctgacaggagaatcgcttgaacccgggaggtggaggttgtagtgagctgggatggtgccactgcacactctagccccgggcaacagaatgagactctgtctcaaaaacaaacaaaaaaaaactgtctttgggtgattgtggagaggtgatcatatgtccgctgtgttgctcccatccaagccctggtgactggtagctctcatgagggtgtgatggtcaggccttgcccctggtgtaaattctgtctgtaataggctgtgactttctaactcaacatcaccactggcttaggagttccatttgcacagggggagctttattgcttttctatatacataagaactttacgtctcaccagtggaggttgggcagccaagacaccacaatgctgggtgtcttcagaatggacttaatcttgtccttttgctttctgccagtgcagatcaccatctctcagatgagcaggaccccaccctctggcagtcttgtcttgggagaatcactctgagctcccatcctttgtaaattaacattggtttgagcaccaccctccatcacggctgcagtgagccatgattgcaccactgtgttccagcctgggtgacagagcaagaccccattccaaaaaaaaaaaaaaatttgccaaatagacacagtcctcacaaaagaagttggcagaataacaccccttcctaccacatctcctcagaacctgtgtatttgttaggttacgaaacaaaagggaattaagtttgctaatcagctgaccttaaaacaggaagaggatcccgtgtttctgggtgggccggaggaatcacaaagatccctaaatgtggaagaggaaggcaaaaaagagtccacatcaaagagacttaagaaagacttgactagacactgctggttttgaagatgggaagggaagggtcagaagccaaggaatgtgtgtgctgtctagaagctggaaaaggcaaggaagtagattctcccctagagcctcccagaaggagcgtagccctgctgatgccttaattttagctcagtgagaccaggcggacttaagacctatagaaccgtcagatgacaacattatgttttaagccgctacaattgtggcaatttgttaaagtaacaatagaagacctaatgtaagtaagtctcatgtggaagttgccatggttttgtttttctttctttttttttttttgagacagtctcactctcactccacgcccaggctggagtgcagaggcgtgatctcagctcactgcaacctccacctccagggttcaagcgattctcctgcctcagcctcctgagaagctgggattacaggtgagcaccaccacacccagctaatttttttttgtatttttagtagagatggagtttcaccatgttggccaggatggtcttgatctcttggcctcatgatccacctacctcagcctcccaaagtgttggtattacaggcatgagccaccgcacccaggccccatcatttttattttctacaattctggctgacatcttattgctccatccttgctaatgatagacttcatctcacatagaccagtgttttcagagaccggcttattgattcagtaaagggctgggggaaactgcacacacaaggacatataaaatctaagcctctgcctgggccacatgacaggattcagaagcacctttgatataatgggtgcccgacctcatgtgaaagtccaagttcaggtgtaatgtgagagcggtaagaattcactggcctaggcttgggaactaatgctgcccaccacgttcagcctcagaggagaagaaatgacttgaagaacataatttgtgaatttgccaattgtttttcattttatagcatcacacagtaaaagtagataaaataattttaatgaaaatacttctgtgggccaggtgcggtggcttacgcctgtaatcccagcactttgggaggccgaggcggcggatcacctgaggtcaggagttctagaccagcctgaccaacatggagaaaccccatctctactaaaaatacaaaattagctgggtgtggtggcgcactcctgttatcccagctactcaggaggctgaggcaggagaattgcttagactcgggaggcggaggttggggtgagccgagatcacgccattgtactccagcctgggcaacaagagtgaaactgtctcaaaaaaaagaaaaaaaaacagaattttgtgaaataaaggccacttgggagtatctgagccaccccacaa

SEQ ID NO: 10951 - DNA, 1311 bp, Homo sapiens
  source 1..1311: mol_type = unassigned DNA
cacagcagcccacccagtccagcaaatgcacatgtgttgcaggcctggatgagtgatgggaatggagagggcttccagggtcatcacacacgtgacgctaggtgccaggcacagcacacttctcaagtgaggacgcatgaaatgtcagcatttgtcgttactgaagaaccccaagaaagtggccggcctgaggtctcgctgttggagggtgtcttcagggccaaggcgggtgggagagcatggtgcatgttagtgtggtccttggcctctgtcctgtagtttggtgtcaccgtaggaggaaacagacacggacttagaggtggtgttggaaaaaaaaggcaacatggatgaggcgcacatagaccaggtgaggcgaaaggccttgcaagaagagatcgatcgcgagtcaggcaaaacggaagcttctgaaaccaggaagtggacgggaacccagtttggccagtgggatactgctggttttgagaacgaggaccaaaaactgaaatttctcagacttatgggtggcttcaaaaacctgtccccttcgttcagccgccccgccagcacgattgcaaggcccaacatggccctcggcaagaaggcggctgacagcctgcagcagaatctgcagcgggactacgaccgggccatgagctggaagtacagccggggagccggcctcggcttctccaccgcccccaacaagatcttttacattgacaggaacgcttccaagtcagtcaagctggaagattaaactctagagttttgtccccccaaaactgccacaattgctttgattattccatttatgctggagattacaaattttttttgtgaaaaaatcagatcttggtgaggacctcgagcagtaagatataaataactcccataagcttagcgttccagtaatggaacactaggcataaatggtttattcagttgtgcaaatgaaagccatctgacagttggctcacattgaacacctgtggagattaaggacgaggacaactatattgatgggcttggatgaactggggcagggcagctcatatttcgggagccaggagaacgagtgagtgctaaaacctcctgttttctgtgttaaacattccgtccctgtttgagacatcagtatgtacagttaacttttgttgagtgtttagcaggtactagggacatactagtgttttccttaatgtatttaatcttcataattatgaaatgggtgctattattagccccatcttatagatgaggcaactgaggttcagggataaagtaataaaattgcctggggtcacccagcca

SEQ ID NO: 10952 - DNA, 595 bp, Homo sapiens
  source 1..595: mol_type = unassigned DNA
ggaaaaaaagggggcccaggaccccacagccttctcggtccaggacccttggttctgtgaggccagggaggccagggatgttggggacacttgctcagtggggaagaaggatgaggaacaggcagccttggggcagaaacggaagcggaagagccccagagaacacaatgggaaggtgaagaagaaaaaaaaaatccaccaggagggagatgccctcccaggccactccaagccctccaggtccatggagagcagccctaggaaaggaagtaaaaagaagccagtcaaagttgaggctccggaatacatccccataagtgatgaccctaaggcctccgcaaagaaaaagatgaagtccaaaaagaaggtagagcagccagtcatcgaggagccagctctgaaaaggaagaaaaagaagaagaggaaagagagtggggtagcaggagacccttggaaggaggtgaggcgaaaggccttgcaagaagagatcgatcgcgagtcaggcaaaacggaagcttctgaaaccaggaagtggacgggaacccagtttggccagtgggatactgctggttttgagaacgaggaccaaaaactg

SEQ ID NO: 10953 - DNA, 1394 bp, Homo sapiens
  source 1..1394: mol_type = unassigned DNA
gggccggcgactcgaagtggacttccgggtcacggcggagctggctctcacgtggaggcggggaaatttcgcccaccggaatgatcaccaagacacacaaagtagaccttgggctcccagagaagaaaaagaagaagaaagtggtcaaagaaccagagactcgatactcagttttaaacaatgatgattactttgctgatgtttctcctttaagagctacatccccctctaagagtgtggcccatgggcaggcacctgagatgcctctagtgaagaaaaagaagaagaaaaagaagggtgtcagcaccctttgcgaggagcatgtagaacctgagaccacgctgcctgctagacggacagagaagtcacccagcctcaggaagcaggtgtttggccacttggagttcctcagtggggaaaagaaaaataagaagtcacctctagccatgtcccatgcctctggggtgaaaacctccccagaccctagacagggtgaggaggaaaccagagttggcaagaagctcaaaaaacacaagaaggaaaaaaagggggcccaggaccccacagccttctcggtccaggacccttggttctgtgaggccagggaggccagggatgttggggacacttgctcagtggggaagaaggatgaggaacaggcagccttggggcagaaacggaagcggaagagccccagagaacacaatgggaaggtgaagaagaaaaaaaaaatccaccaggagggagatgccctcccaggccactccaagccctccaggtccatggagagcagccctaggaaaggaagtaaaaagaagccagtcaaagttgaggctccggaatacatccccataagtgatgaccctaaggcctccgcaaagaaaaagatgaagtccaaaaagaaggtagagcagccagtcatcgaggagccagctctgaaaaggaagaaaaagaagaagaggaaagagagtggggtagcaggagacccttggaaggaggaaacagacacggacttagaggtggtgttggaaaaaaaaggcaacatggatgaggcgcacatagaccaggtgaggcgaaaggccttgcaagaagagatcgatcgcgagtcaggcaaaacggaagcttctgaaaccaggaagtggacggtaagtttggggctagggctctgcgaggaggtggcacgctcggcctcccgacgcttcccctcgcctccagcatgaggagtggagcaggagaaccaagtatgtccaggccccagaggcagccctagcctgcagcaggctccctccacagcagaatttgtcctgagctaatttccttccttctgaaaagggcgcttgcctccctcctagagagctggcccggtgagataagctgcctgaacctttgtctca

SEQ ID NO: 10954 - DNA, 1020 bp, Homo sapiens
  source 1..1020: mol_type = unassigned DNA
ggccggcgcggggtgtggagattgcaccagaggaagtgcgcggcggggaagatggggaaatgcggtccacccacatccctgaatccgacccctccagtcggtgtgcgcccgctccggcctgaggccgccgcctccagaaagttttcccgcctcagagccggccctgggaccccacgtaatccctcccagtctgttgatgcggaggcttgggcccatgggagccttggaggtacggatcttacttcctggctcccgcgcgtcctgctggtgatcctgccgggggagtggggtgttgctgcacaggctttggagtcctgtgggcggaattccagtctccgttttccacttgctggctttggaacctagggcaagtgaattattgtagtctctggagcttgcgaggtcgggtattcacaaagatcttcacaaggctgtccctggaatttaaaagcggttttggagaaagcgtttgcgtttgcaggagatgcactgtaacgttcttttcctttctccttgaaagagtgaatgcatttggtcgcagggctaaagaggaggatgctatacttttctaaatggcaagagatggggagagaaggggattaagagttgacccgcaacctcccggtggattctttgttcttaccagatctcttggccactcccctattctgaagtcgtcttggctctcttgactgctcccctattctgaagtcgtcttggctctcttgactgctcccctattctgaagtcgtcttggctctcctgactacactatttcaaggaatgatcaccaagacacacaaagtagaccttgggctcccagagaagaaaaagaagaagaaagtggtcaaagaaccagagactcgatactcagttttaaacaatgatgattactttgctgatgtttctcctttaagagctacatccccctctaagagtgtggcccatgggcaggcacctgagatgcctctagtgaagaaaaagaagaagaaaaagaagggtgtcagcaccctttgcgag

SEQ ID NO: 10955 - DNA, 331 bp, Homo sapiens
  source 1..331: mol_type = unassigned DNA
gccaatttaagcctgtggcatggaacctaaagactagaggcggttgtgtgagtcaggaagaggggccagatatctgagtgttcctctttagtttcttcaattgcaggagagaggttggagtcggtttttgctggcggcgatgtccagcggagagcgtttaagtatggaggcctaactgacaagtgtttcatcttgctcattctctcgtattcgcgaatctgttctgcattccgccgccagagtgatctcaaaattataaaatcagaccactcgtttgctgagttccccttctaccccttgtactgagaataaaattcaatcttgaggtcga

SEQ ID NO: 10956 - DNA, 3655 bp, Homo sapiens
  source 1..3655: mol_type = unassigned DNA
caatttaagcctgtggcatggaacctaaagactagaggcggttgtgtgagtcaggaagaggggccagatatctgagtgttcctctttagtttcttcaattgcaggaaagacagtggttcctgactcaggaagacagtctcagaaacatgtggaatgatattgagctgctaacaaatgatgataccggaagtgggtacctgagtgtcggttcaagaaaagaacatggaactgctttatatcaagtagatttgctagtgaagatctcttctgaaaaggcctcattaaatccaaagatacaggcatgcagcttaagtgatgggtttattattgtagccgaccaatcagtgatattgcttgacagtatttgtagatcacttcaattgcatcttgtctttgatactgaagtggatgtagttggcctttgtcaagaaggaaagtttcttttggttggcgagagaagtggcaacctacatcttattcatgtaacatcaaaacaaacactactcactaatgcatttgttcagaaagctaacgatgaaaatcggcggacttaccagaatcttgtcattgagaaggatggttcaaatgaaggtacctattatatgctacttcttacatacagtggatttttttgtattacaaaccttcagcttttaaaaattcaacaagcaattgagaatgtagacttcagtacagcaaaaaagggaaccggtaattgtgcattctcaaaatgggaaccagattcttccaagaaaggaatgacagttaagaaccttattgatgcagagattattaaaggtgcaaagaagttccagctgatagacaatctactttttgttcttgatactgataacgtgctgagtttatgggatatttacactctaactcctgtatggaactggccctctcttcacgtagaagagtttcttcttactacagaagcagactctccttcatcagtcacgtggcaaggaattacaaatctcaaattaatagctctgacagcttcagctaataagaagatgaaaaacctcatggtttattcattacctacaatggaaatactatattctttggaagtatctagtgtttcttctctggtccaaacaggaattagcacagataccatataccttttagaaggagtttgcaaaaatgatccaaaattgtctgaagactcagtctctgtgttagtactcagatgtcttacggaagctttaccagaaaacagattgagtcggttacttcacaaacacagatttgctgaagctgagagttttgccattcagtttggactagatgttgagcttgtttacaaggtcaagtcaaatcatatattggagaaactggcattgagttctgtggatgccagtgaacagaccgaatggcaacaacttgtagacgacgctaaggaaaatctacataagatccaggatgatgaatttgtggtgaattactgcctgaaagctcagtggataacctatgaaaccactcaagagatgctgaattatgccaaaaccaggcttttgaagaaagaagataaaactgctctcatttattctgatggcttgaaagaggtgctaagagctcatgcaaaattgactactttttatggagcatttggaccagaaaaattcagtggcagttcttggattgaatttctaaataatgaagatgatcttaaagatatttttttacagctaaaagaaggaaaccttgtttgtgcacagtatctttggcttcgacatcgggcaaactttgaaagcagatttgatgtgaaaatgctggagagcttgctcaactcaatgtctgcatcagtctctttgcaaaagctgtgtccatggtttaaaaatgatgtgattccatttgtaagaaggactgtgcctgaaggacagataattcttgcaaaatggttggaacaagcagccaggaaccttgaattaactgataaggcaaattggccagaaaatggacttcaattggcagagatattttttacagcagaaaaaacagacgagttgggattggcatcttcctggcattggatttccttgaaagattatcagaacacagaggaagtatgtcagctaaggactttggtaaataacttgcgagagttgatcacgttgcataggaagtacaactgcaaattagccctctctgattttgagaaggaaaatacaaccaccatagtgttccgaatgtttgataaagtgctggccccagagcttattccctccatcttagagaagtttataagagtttacatgagagaacatgacttgcaagaggaggaacttctcttgctgtacatagaggatttactgaatagatgcagctcaaagtccacatcactctttgaaacagcatgggaagcaaaggccatggcagtaatagcgtgtttatctgacacggacaaaccatcagaattatttgaacttcaagaagatgaagccctacgaagagtgcagtatctcctcctgtctcgtccaattgattatagttcaagaatgctgtttgtatttgcaacatcaactacaaccacattaggtatgcatcagttaacttttgcccatagaactcgagctcttcagtgtctcttctatttggctgacaaggaaactatagaatctctctttaaaaaacccattgaagaagtgaaatcttatttgagatgtataacttttctggcatcatttgagactttgaatatccccatcacatatgaattattttgcagcagtcctaaagaaggaatgattaagggtctgtggaaaaaccacagccacgagtccatggcagtaagattggtgactgagctgtgtttagaatacaaaatctatgacctgcagctttggaatggactcttgcaaaagcttctgggcttcaatatgattccttatctaaggaaagttttaaaagccatctccagtatccattctttatggcaggttccctacttcagcaaagcgtggcagcgtgtgatacagataccactgctttcagcctcttgtcctttaagtcctgatcagctgtcagattgttctgagagtctcatcgctgtcctcgaatgtccagtctcaggtgatcttgacctgatcggagtcgccaggcagtatatccagttagaacttccggcttttgcattagcttgtctgatgctcatgccccactcagagaaaagacaccagcaaattaagaattttctgggttcctgtgaccctcaggttattttaaagcaattggaagagcatatgaacacgggccagctagcaggattttcacatcaaattagaagtctgattttgaataatatcatcaataagaaggagtttgggattttggcaaagaccaaatactttcaaatgttgaagatgcatgcgatgaataccaacaatatcactgagctagtgaactatttggcaaatgacttaagtttagatgaagcttcagtcttgataactgaatattcaaagcactgcgggaaacctgtgcctccagacactgctccctgtgaaattctgaagatgtttcttagtggattatcgtaaatcactgaacctttttttcaagaaggacaagaattttggagtctgctattaatggaccatatttattacagtttttaaattgtacaatctctgtattatagcta

SEQ ID NO: 10957 - DNA, 6975 bp, Homo sapiens
  source 1..6975: mol_type = unassigned DNA
caatttaagcctgtggcatggaacctaaagactagaggcggttgtgtgagtcaggaagaggggccagatatctgagtgttcctctttagtttcttcaattgcagataatatggtgtctaattttatgttgttcaggaaagacagtggttcctgactcaggaagacagtctcagaaacatgtggaatgatattgagctgctaacaaatgatgataccggaagtgggtacctgagtgtcggttcaagaaaagaacatggaactgctttatatcaagtagatttgctagtgaagatctcttctgaaaaggcctcattaaatccaaagatacaggcatgcagcttaagtgatgggtttattattgtagccgaccaatcagtgatattgcttgacagtatttgtagatcacttcaattgcatcttgtctttgatactgaagtggatgtagttggcctttgtcaagaaggaaagtttcttttggttggcgagagaagtggcaacctacatcttattcatgtaacatcaaaacaaacactactcactaatgcatttgttcagaaagctaacgatgaaaatcggcggacttaccagaatcttgtcattgagaaggatggttcaaatgaaggtacctattatatgctacttcttacatacagtggatttttttgtattacaaaccttcagcttttaaaaattcaacaagcaattgagaatgtagacttcagtacagcaaaaaagttacaaggacaaatcaagtccagttttatttctactgaaaattatcatactcttggttgtctcagtcttgtggctggagatttagcaagtgaagttcctgtgataattgggggaaccggtaattgtgcattctcaaaatgggaaccagattcttccaagaaaggaatgacagttaagaaccttattgatgcagagattattaaaggtgcaaagaagttccagctgatagacaatctactttttgttcttgatactgataacgtgctgagtttatgggatatttacactctaactcctgtatggaactggccctctcttcacgtagaagagtttcttcttactacagaagcagactctccttcatcagtcacgtggcaaggaattacaaatctcaaattaatagctctgacagcttcagctaataagaagatgaaaaacctcatggtttattcattacctacaatggaaatactatattctttggaagtatctagtgtttcttctctggtccaaacaggaattagcacagataccatataccttttagaaggagtttgcaaaaatgatccaaaattgtctgaagactcagtctctgtgttagtactcagatgtcttacggaagctttaccagaaaacagattgagtcggttacttcacaaacacagatttgctgaagctgagagttttgccattcagtttggactagatgttgagcttgtttacaaggtcaagtcaaatcatatattggagaaactggcattgagttctgtggatgccagtgaacagaccgaatggcaacaacttgtagacgacgctaaggaaaatctacataagatccaggatgatgaatttgtggtgaattactgcctgaaagctcagtggataacctatgaaaccactcaagagatgctgaattatgccaaaaccaggcttttgaagaaagaagataaaactgctctcatttattctgatggcttgaaagaggtgctaagagctcatgcaaaattgactactttttatggagcatttggaccagaaaaattcagtggcagttcttggattgaatttctaaataatgaagatgatcttaaagatatttttttacagctaaaagaaggaaaccttgtttgtgcacagtatctttggcttcgacatcgggcaaactttgaaagcagatttgatgtgaaaatgctggagagcttgctcaactcaatgtctgcatcagtctctttgcaaaagctgtgtccatggtttaaaaatgatgtgattccatttgtaagaaggactgtgcctgaaggacagataattcttgcaaaatggttggaacaagcagccaggaaccttgaattaactgataaggcaaattggccagaaaatggacttcaattggcagagatattttttacagcagaaaaaacagacgagttgggattggcatcttcctggcattggatttccttgaaagattatcagaacacagaggaagtatgtcagctaaggactttggtaaataacttgcgagagttgatcacgttgcataggaagtacaactgcaaattagccctctctgattttgagaaggaaaatacaaccaccatagtgttccgaatgtttgataaagtgctggccccagagcttattccctccatcttagagaagtttataagagtttacatgagagaacatgacttgcaagaggaggaacttctcttgctgtacatagaggatttactgaatagatgcagctcaaagtccacatcactctttgaaacagcatgggaagcaaaggccatggcagtaatagcgtgtttatctgacacggacctcatatttgatgccgtgctcaagatcatgtatgcggcagtggttccttggagtgcagctgtggagcaactggtgaaacagcacctggaaatggaccatcccaaagtcaagttattacaggaaagttacaaactaatggagatgaaaaaacttttacgaggctatggaataagagaggtaaatctcttaaacaaggaaataatgagagtggttagatacattctcaaacaagatgtcccatcttctttagaagatgctttaaaggtagcccaagcgtttatgttatctgatgatgagatctacagtctaagaattattgacctgattgatagagaacagggtgaagactgtctccttctgttgaagtctttgcctcctgctgaagctgagaaaactgcagaaagagtcatcatatgggcacgactggcattacaagaagagccagatcattctaaagagggcaaggcctggagaatgtctgtagcgaagacatccgtggacattcttaagatactatgtgacattcagaaagacaatctgcagaagaaggacgaatgtgaagaaatgttgaaactatttaaagaggttgctagcttacaggagaactttgaggtctttctttcatttgaagattatagcaatagttccctggtagcagatctccgtgagcagcacattaaagctcacgaagttgcacaggcgaaacacaaacctgggagcaccccagagcccatagctgctgaggtgaggagcccaagcatggaatcaaagctgcacagacaggcactggccctgcagatgtccaaacaagagctggaggcagagctgaccttgagagccttaaaagatgggaacatcaaaacagcactgaaaaaatgcagcgacttgtttaagtatcactgcaatgctgacactgggaaattgctatttctgacatgtcagaagctttgtcagatgttggctgataatgtcccagtgacagtgcctgtgggactgaatcttccttccatgatacatgatctagcaagccaagctgccaccatttgcagtccagattttttactagatgctttagaactatgtaaacatactttaatggctgtagagctttccagacaatgccaaatggatgactgtggaatcctcatgaaagcttcttttgggacacataaagatccatatgaagagtggtcttacagtgacttcttcagtgaagatggaattgttcttgagtcacagatggtgcttccagtgatttatgaactgatttcatctcttgtgcctctagctgaaagcaagagatatcccttggagtctaccagtttgccatactgctcccttaatgaaggagatggccttgttttacctgttataaattccatctctgccctgcttcagaatcttcaggaatctagccagtgggagctagccctaagatttgtggttggttcatttggtacctgtcttcagcactctgtgtcaaacttcatgaatgccactttgagtgaaaagttatttggagagactacattagttaaatcaaggcatgttgttatggaattgaaagaaaaagctgttatatttatcagggaaaatgctacaacactactgcacaaagtatttaattgtcgcttggtagatcttgacctggcgttgggttactgcactctcttacctcaaaaagatgtgtttgaaaatctctggaagctcatagataaagcatggcagaattacgacaaaatcttggcaatatctctggtgggctctgagctggcaagtctctatcaggaaatagaaatggggcttaagttccgtgaactcagtactgatgcccagtggggcattcgtcttggtaaacttggtatttcttttcaaccagttttcaggcaacattttctcaccaagaaagacctcattaaagctcttgtggagaatatagatatggacacaagcctcattttggaatattgcagcacatttcagttggactgcgatgcagttcttcagctcttcattgaaacgctgctccacaacacaaatgccggccaaggccagggagatgcaagcatggactctgcaaagcggcggcatcccaaactcctggccaaagcccttgagatggttcctttactgacgagcacaaaagatttggtcatcagtcttagtggaatactacataagttggatccttatgactatgaaatgattgaagttgtcttgaaagttatagaacgagctgatgaaaagataaccaatattaatattaatcaggcattgagtattctgaaacatttgaagtcatacagaagaatttctcctcccgtggatctagaatatcagtatatgttggaacatgtcataactttgccatcagctgcccaaactagactgccttttcacctgatattctttggcacagcacagaacttctggaaaattctctctacagaactcagtgaagaatctttcccaacattgctcttaatttcgaaattaatgaagttctctctggacactctgtacgtgtctacagcaaaacacgttttcgaaaaaaaactgaagccaaagctcctgaagttaacacaagctaaatcctcaacactgattaacaaggaaataactaagatcacgcagaccatcgaatcctgcttactctctatagtcaacccagagtgggctgtagctattgccatcagccttgcccaggatatccctgaaggttccttcaagatatctgctttgaaattctgcctttatttagctgagagatggctacagaatatcccatcgcaggacgaaaaacgtgaaaaagccgaggctttgttgaagaagcttcatatccagtaccggcgatcgggcacagaagctgtgctcatagcccacaagctgaacactgaggaatatttaagagtgatcggaaagccagcacatcttattgtcagtctctacgaacatcctagcatcaatcaaagaattcagaattcatctggcacagattatcctgatattcatgcagcagctaaagaaatagccgaagtcaatgaaattaatttggaaaaagtctgggacatgttgttggaaaaatggctatgcccttcaacaaaacctggtgaaaaaccatcagaattatttgaacttcaagaagatgaagccctacgaagagtgcagtatctcctcctgtctcgtccaattgattatagttcaagaatgctgtttgtatttgcaacatcaactacaaccacattaggtatgcatcagttaacttttgcccatagaactcgagctcttcagtgtctcttctatttggctgacaaggaaactatagaatctctctttaaaaaacccattgaagaagtgaaatcttatttgagatgtataacttttctggcatcatttgagactttgaatatccccatcacatatgaattattttgcagcagtcctaaagaaggaatgattaagggtctgtggaaaaaccacagccacgagtccatggcagtaagattggtgactgagctgtgtttagaatacaaaatctatgacctgcagctttggaatggactcttgcaaaagcttctgggcttcaatatgattccttatctaaggaaagttttaaaagccatctccagtatccattctttatggcaggttccctacttcagcaaagcgtggcagcgtgtgatacagataccactgctttcagcctcttgtcctttaagtcctgatcagctgtcagattgttctgagagtctcatcgctgtcctcgaatgtccagtctcaggtgatcttgacctgatcggagtcgccaggcagtatatccagttagaacttccggcttttgcattagcttgtctgatgctcatgccccactcagagaaaagacaccagcaaattaagaattttctgggttcctgtgaccctcaggttattttaaagcaattggaagagcatatgaacacgggccagctagcaggattttcacatcaaattagaagtctgattttgaataatatcatcaataagaaggagtttgggattttggcaaagaccaaatactttcaaatgttgaagatgcatgcgatgaataccaacaatatcactgagctagtgaactatttggcaaatgacttaagtttagatgaagcttcagtcttgataactgaatattcaaagcactgcgggaaacctgtgcctccagacactgctccctgtgaaattctgaagatgtttcttagtggattatcgtaaatcactgaacctttttttcaagaaggacaagaattttggagtctgctattaatggaccatatttattacagtttttaaattgtacaatctctgtattatagctatttgtctaacattaccccacatgtaataaataaaacaatatgagcataattgccccataaagaa

SEQ ID NO: 10958 - DNA, 553 bp, Homo sapiens
  source 1..553: mol_type = unassigned DNA
aacccgctcgggtccccttccacactgtgctttgttctttagctgtttgcaataatcttgctactgctcactctttgggtccacgctgtttttatgagctgtgagactcacatgaagatctgcagcttctttcctgagtggagaccacgagcccaccgagaggaaggaacaactccagacgctctgccttaagagctgtaacactcactgcgaaggtctgcagcttcactcctgagccagcgagaccacgaacccaccagaaggaagaaactcccaacacatctgaacatcagaaggaacaaactccagacgcgccaccttaagagctgtaacactcacctcgggggtccgcggcttcattcttgaaatttcttttcaaccagttttcaggcaacattttctcaccaagaaagacctcattaaagctcttgtggagaatatagatatggacacaagcctcattttggaatattgcaggcattgagtattctgaaacatttgaagtcatacagaagaatttctcctcccgtggatctagaatatcagtatatgt

SEQ ID NO: 10959 - DNA, 1250 bp, Homo sapiens
  source 1..1250: mol_type = unassigned DNA
accacgcccggctaattttttgtattttagtagagacagggtttcactgtattggccaggatggtctcccatctcttgacctcgtgatccgcccacgtcggcctcccaaagtgctgggattacagacatgagctaccgcgcccagccttgagctttatttttgacattgtaaaagaacagacaagcaggcagggcgcaatcttgtctttgacaggatctcattctgtcacccaggctggagtgcagtggcattatcatggctcactgcagccttgacctctagggcctaagtgatcctcccagcttagcctcctgagtagctgggactacaggcatgcaccaccatgcccagctaattgttttgtatttttttgtagagacaaggtttccatgttggccaagctggtctcaaactcctgacctcaagtgatccacccgcctcagcctcccacagtgctgggattataggcatgagccaaaaccctgttttctttaccaaaaatataagacattttatttgccaacagttgacttatcagaaaggtaatcagtacagaaatgctatatgttttgaagcttaattcttctgcagtaatggaactggtgttctgttgacattaacaatcaaacttttcagatgaagaggcaatggttaggatgactaagaggagtttcggacccatgtacacctcaaatctcagaatgatggctgggttgggtagtgtgaggttggaggagctatagacaaatgtttctttttgaaaaaggatactaagaaggcaagtcatgatgttgcccttactctgatacatttcagtgtagagggtttttttgctttgtttttttctttttatttctagatttcttttcaaccagttttcaggcaacattttctcaccaagaaagacctcattaaagctcttgtggagaatatagatatggacacaagcctcattttggaatattgcagcacatttcagttggactgcgatgcagttcttcagctcttcattgaaacgctgctccacaacacaaatgccggccaaggccagggagatgcaagcatggactctgcaaagcggcggcatcccaaactcctggccaaagcccttgagatggttcctttactgacgagcacaaaagatttggtcatcagtcttagtggaatactacataagttggatccttatgactatgaaatgattgaagttgtcttgaaagttatagaacgagctgatgaaaagataacc

SEQ ID NO: 10960 - DNA, 782 bp, Homo sapiens
  source 1..782: mol_type = unassigned DNA
aaaaatataagacattttatttgccaacagttgacttatcagaaaggtaatcagtacagaaatgctatatgttttgaagcttaattcttctgcagtaatggaactggtgttctgttgacattaacaatcaaacttttcagatgaagaggcaatggttaggatgactaagaggagtttcggacccatgtacacctcaaatctcagaatgatggctgggttgggtagtgtgaggttggaggagctatagacaaatgtttctttttgaaaaaggatactaagaaggcaagtcatgatgttgcccttactctgatacatttcagtgtagagggtttttttgctttgtttttttctttttatttctagatttcttttcaaccagttttcaggcaacattttctcaccaagaaagacctcattaaagctcttgtggagaatatagatatggacacaagcctcattttggaatattgcagcacatttcagttggactgcgatgcagttcttcagctcttcattgaaacgctgctccacaacacaaatgccggccaaggccagggagatgcaagcatggactctgcaaagcggcggcatcccaaactcctggccaaagcccttgagatggttcctttactgacgagcacaaaagatttggtcatcagtcttagtggaatactacataaggtgatttaaataacctctcctgctgtcgaagagtatgaagtcactacagaactaattgtgaagaattaaggaaacatttgccatgtaggaagtgaaaaagg

SEQ ID NO: 10961 - DNA, 1519 bp, Homo sapiens
  source 1..1519: mol_type = unassigned DNA
ttttttttttttttttttttttttgagatggagccttgctctgttgcccaaactggagtgcagtggtgcgatcttggctcaccgcaacctccacctcccgggttcaagcaattctcctgcctcagcttcccgagtagctgggactacagccatgcgccaccatgcctggctaatttttgtatttttagtagagatggggtttcactatgttggccaggctggtctcaaactcctgacctcgtgatctgttcaccttggcctcccaaagtgctgggattacaggtgtgagccactgcacccggcctaatatctgatttttaaaaggcaataattagctttgatgacaggtagtttgtctgattttgagactggacaatgacaaggttaaatttcaacaatggaagcatgtacccaagtgttttgtcagatactttgcatggaaatgcctgcagtttgggagactggtgtgtattgaatgcttcttttagcacatttcagttggactgcgatgcagttcttcagctcttcattgaaacgctgctccacaacacaaatgccggccaaggccagggagatgcaagcatggactctgcaaagcggcggcatcccaaactcctggccaaagcccttgagatggttcctttactgacgagcacaaaagatttggtcatcagtcttagtggaatactacataagttggatccttatgactatgaaatgattgaagttgtcttgaaagttatagaacgagctgatgaaaagataaccaatattaatattaatcaggcattgagtattctgaaacatttgaagtcatacagaagaatttctcctcccgtggatctagaatatcagtatatgttggaacatgtcataactttgccatcagctgcccaaactagactgccttttcacctgatattctttggcacagcacagaacttctggaaaattctctctacagaactcagtgaagaatctttcccaacattgctcttaatttcgaaattaatgaagttctctctggacactctgtacgtgtctacagcaaaacacgttttcgaaaaaaaactgaagccaaagctcctgaagttaacacaagctaaatcctcaacactgattaacaaggaaataactaagatcacgcagaccatcgaatcctgcttactctctatagtcaacccagagtgggctgtagctattgccatcagccttgcccaggatatccctgaaggttccttcaagatatctgctttgaaattctgcctttatttagctgagagatggctacagaatatcccatcgcaggacgaaaaacgtgaaaaagccgaggctttgttgaagaagcttcatatccagtaccggcgatcgggcacagaagctgtgctcatagcccacaagctgaacactgaggaatatttaagagtgatcggaaagccagcacatcttattgtcagtctctacgaacatcctagcatcaatcaaagaattcagaattcatctggcacagattatcctg

SEQ ID NO: 10962 - DNA, 2412 bp, Homo sapiens
  source 1..2412: mol_type = unassigned DNA
tatagtttagatgaataatgttaaagagaatactagaaaaggttttgatcctctttctgaaaacaagatggtctcaggaatggaaacttttgatggtatactattagatgattttatgacagtttaggattgggttactcttactggacaaaagttttttattttaatataggcattgagtattctgaaacatttgaagtcatacagaagaatttctcctcccgtggatctagaatatcagtatatgttggaacatgtcataactttgccatcagctgcccaaactagactgccttttcacctgatattctttggcacagcacagaacttctggaaaattctctctacagaactcagtgaagaatctttcccaacattgctcttaatttcgaaattaatgaagttctctctggacactctgtacgtgtctacagcaaaacacgttttcgaaaaaaaactgaagccaaagctcctgaagttaacacaagctaaatcctcaacactgattaacaaggaaataactaagatcacgcagaccatcgaatcctgcttactctctatagtcaacccagagtgggctgtagctattgccatcagccttgcccaggatatccctgaaggttccttcaagatatctgctttgaaattctgcctttatttagctgagagatggctacagaatatcccatcgcaggacgaaaaacgtgaaaaagccgaggctttgttgaagaagcttcatatccagtaccggcgatcgggcacagaagctgtgctcatagcccacaagctgaacactgaggaatatttaagagtgatcggaaagccagcacatcttattgtcagtctctacgaacatcctagcatcaatcaaagaattcagaattcatctggcacagattatcctgatattcatgcagcagctaaagaaatagccgaagtcaatgaaattaatttggaaaaagtctgggacatgttgttggaaaaatggctatgcccttcaacaaaacctggtgaaaaaccatcagaattatttgaacttcaagaagatgaagccctacgaagagtgcagtatctcctcctgtctcgtccaattgattatagttcaagaatgctgtttgtatttgcaacatcaactacaaccacattaggtatgcatcagttaacttttgcccatagaactcgagctcttcagtgtctcttctatttggctgacaaggaaactatagaatctctctttaaaaaacccattgaagaagtgaaatcttatttgagatgtataacttttctggcatcatttgagactttgaatatccccatcacatatgaattattttgcagcagtcctaaagaaggaatgattaagggtctgtggaaaaaccacagccacgagtccatggcagtaagattggtgactgagctgtgtttagaatacaaaatctatgacctgcagctttggaatggactcttgcaaaagcttctgggcttcaatatgattccttatctaaggaaagttttaaaagccatctccagtatccattctttatggcagagatggaggtcttgctatgttgcctaggctggtcttagaactcctgagctgaaacaatcctcctgccttggcctcccaaagtactgggattacaggttccctacttcagcaaagcgtggcagcgtgtgatacagataccactgctttcagcctcttgtcctttaagtcctgatcagctgtcagattgttctgagagtctcatcgctgtcctcgaatgtccagtctcaggtgatcttgacctgatcggagtcgccaggcagtatatccagttagaacttccggcttttgcattagcttgtctgatgctcatgccccactcagagaaaagacaccagcaaattaagaattttctgggttcctgtgaccctcaggttattttaaagcaattggaagagcatatgaacacgggccagctagcaggattttcacatcaaattagaagtctgattttgaataatatcatcaataagaaggagtttgggattttggcaaagaccaaatactttcaaatgttgaagatgcatgcgatgaataccaacaatatcactgagctagtgaactatttggcaaatgacttaagtttagatgaagcttcagtcttgataactgaatattcaaagcactgcgggaaacctgtgcctccagacactgctccctgtgaaattctgaagatgtttcttagtggattatcgtaaatcactgaacctttttttcaagaaggacaagaattttggagtctgctattaatggaccatatttattacagtttttaaattgtacaatctctgtattatagctatttgtctaacattaccccacatgtaataaataaaacaatatgagcataattgccccataaagaa

SEQ ID NO: 10963 - DNA, 616 bp, Homo sapiens
  source 1..616: mol_type = unassigned DNA
ttctagctacagaactcagtgaagaatctttcccaacattgctcttaatttcgaaattaatgaaggtaatggattaaaacattgtaagacatttctgtatcctgcaattaattctgaccccgtatagaagatttttctgctgctttcatgtaaaaccttatatgtgaatatgtgcttcagccataaccttccttttctttgaagttctctctggacactctgtacgtgtctacagcaaaacacgttttcgaaaaaaaactgaagccaaagctcctgaagttaacacaagctaaatcctcaacactgattaacaaggaaataactaagatcacgcagaccatcgaatcctgcttactctctatagtcaacccagagtgggctgtagctattgccatcagccttgcccaggatatccctgaaggttccttcaagatatctgctttgaaattctgcctttatttagctgagagatggctacagaatatcccatcgcaggacgaaaaacgtgaaaaagccgaggctttgttgaagaagcttcatatccagtaccggcgatcgggcacagaagctgtgctcatagcccacaagctgaacactgaggaatatttaagagtga

SEQ ID NO: 10964 - DNA, 624 bp, Homo sapiens
  source 1..624: mol_type = unassigned DNA
aaagtctgggacatgttgttggaaaaatggctatgcccttcaacaaaacctggtgaaaaaccatcagaattatttgaacttcaagaagatgaagccctacgaagagtgcagtatctcctcctgtctcgtccaattgattatagttcaagaatgctgtttgtatttgcaacatcaactacaaccacattaggtatgcatcagttaacttttgcccatagaactcgagctcttcagtgtctcttctatttggctgacaaggaaactatagaatctctctttaaaaaacccattgaagaagtgaacagtcctaaagaaggaatgattaagggtctgtggaaaaaccacagccacgagtccatggcagtaagattggtgactgagctgtgtttagaatacaaaatctatgacctgcagctttggaatggactcttgcaaaagcttctgggcttcaatatgattccttatctaaggaaagttttaaaagccatctccagtatccattctttatggcaggttccctacttcagcaaagcgtggcagcgtgtgatacagataccactgctttcagcctcttgtcctttaagtcctgatcagctgtcagattgttctgagagtctcatcgct

SEQ ID NO: 10965 - DNA, 1178 bp, Homo sapiens
  source 1..1178: mol_type = unassigned DNA
tgagtaaacaaatatgagtagacccatcagttaagcaaaaatcttttcataatttatgttataatttttcaatgtaaacataatatcgtatattaggttttttatctaatagattttcagagagatgaatgtttgtttagtcataaactttttcagtttttgacctttttttcctaccttttcaaagaaaccatcagaattatttgaacttcaagaagatgaagccctacgaagagtgcagtatctcctcctgtctcgtccaattgattatagttcaagaatgctgtttgtatttgcaacatcaactacaaccgtaagctctagaaacttaatccaaactcttctgtgcatctcagcttaacatttttttcctgtttatttaccatgcttgattgcattaacagatgattcagataatgctcacgtacatatgtattcaaagtctgtctcatctcctaagcaagcattgtcttgcaccatgctccatttagttctggtctctgtaacatctgcttagcgtgctgaatggtgcacctattgacagtttccactggctgtctgcattcacagtggttaactccctggtcagtccacattcctgaagccaggagccaaacaaactgtccacaaacaagtctccaccaaggcctaatctggctgcatgctctggtcagaccaccccttctgcccactaaattctagctagattgaacttgcaatttcccctaacggcaatatgacctttagcttcaggttcttgcctatagaaatgtcctctgaggcagttggagcagagagaggagaaggggatggagccagtaggcaaatgattctcagagaaaaggaagaaaaggaagtctgaggtgctgattttaaagtccgtgacaaaaaggaaaaagcctccccttatattctctacatataaagacttacgacctaaaaatggtattccatgaaaggtggctagtgcagctcacagctcagctgtgtacatgcttttctttgcagtctgccttatgtgtacttcccattaattagtattagcatgtattcaaatgggaattcacattagtatgatatacagtaatctttccgtatctgtgggaggactggttccaggacccccaaggataccaaaatctgaggacgctcaagtctttcatataaaacggtgtcat

SEQ ID NO: 10966 - DNA, 203 bp, Homo sapiens
  source 1..203: mol_type = unassigned DNA
ttcaagaatgctgtttgtatttgcaacatcaactacaaccacattaggtatgcatcagttaacttttgcccatagaactcgagctcttcagtgtctcttctatttggctgacaaggaaactatagaatctctctttaaaaaacccattgaagaagtgaaatcttatttgagatgtataacttttctggcatcatttgagactt

SEQ ID NO: 10967 - DNA, 615 bp, Homo sapiens
  source 1..615: mol_type = unassigned DNA
atgaaaacagctttgaccctttccctcttgaaggagtctcaggaatgccccttcaggggtccatggaccacatgttaagaaccactgttacacacagtgcgttccgtaactgtagagattgactttacattttaaaataatgacgttgtttatgttgcctatgttgaaactcatttacccaactacaatgtgcaggtgttcaactctccaaacctcttttggtttttcagacattaggtatgcatcagttaacttttgcccatagaactcgagctcttcagtgtctcttctatttggctgacaaggaaactatagaatctctctttaaaaaacccattgaagaagtgaacagtcctaaagaaggaatgattaagggtctgtggaaaaaccacagccacgagtccatggcagtaagattggtgactgagctgtgtttagaatacaaaatctatgacctgcagctttggaatggactcttgcaaaagcttctgggcttcaatatgattccttatctaaggaaagttttaaaagccatctccagtatccattctttatggcaggttccctacttcagcaaagcgtggcagcgtgtgatacagataccactgctttcag

SEQ ID NO: 10968 - DNA, 641 bp, Homo sapiens
  source 1..641: mol_type = unassigned DNA
atttatcttgttcaaattgatttctatctaatgttattatatattcagtgaatatatttggaagtccaaaatggacatttaaaacaaactggcctaatatttccatatggtagtttttattttaaatgtaaatgtggcctatgagaatgattcttagaaacgtttctgttttccagatcttatttgagatgtataacttttctggcatcatttgagactttgaatatccccatcacatatgaattattttgcagcagtcctaaagaaggaatgattaagggtctgtggaaaaaccacagccacgagtccatggcagtaagattggtgactgagctgtgtttagaatacaaaatctatgacctgcagctttggaatggactcttgcaaaagcttctgggcttcaatatgattccttatctaaggaaagttttaaaagccatctccagtatccattctttatggcaggttccctacttcagcaaagcgtggcagcgtgtgatacagataccactgctttcagcctcttgtcctttaagtcctgatcagctgtcagattgttctgagagtctcatcgctgtcctcgaatgtccagtctcaggtgatcttgacctgatcggagtcgccaggcagtatatccagtt

SEQ ID NO: 10969 - DNA, 1065 bp, Homo sapiens
  source 1..1065: mol_type = unassigned DNA
gcctgtaatcccagctactcaggaagctgaggagggagaatcacttgaacccgggaggtgttggttgcagtgagctaagatcatgccatcgtactccagcctgggtgacagagctagactgtttctcaaaaaaaaaaaaaaaaaaggttttgagtcttctgagaatttagaagcctatctttaggcatctgtaggctttcagacataatcatgatagcaaacagtagtccgtgttcccatgggtaaattcttttattctgtgtagagtgctgtcaaagacttgtgttactcattcctaagcatatgtcatgcaccagcactttagtgtttaaaattattgaaaacttggacaggcagatgactatggaaagctagaaaggccaatataatctagtgaatctgccagattattaactaattaatgttctctctcgaagatgtccagtctcaggtgatcttgacctgatcggagtcgccaggcagtatatccagttagaacttccggcttttgcattagcttgtctgatgctcatgccccactcagagaaaagacaccagcaaattaagaattttctgggttcctgtgaccctcaggttattttaaagcaattggaagagcatatgaacacgggccagctagcaggattttcacatcaaattagaagtctgattttgaataatatcatcaataagaaggagtttgggattttggcaaagaccaaatactttcaaatgttgaagatgcatgcgatgaataccaacaatatcactgagctagtgaactatttggcaaatgacttaagtttagatgaagcttcagtcttgataactgaatattcaaagcactgcgggaaacctgtgcctccagacactgctccctgtgaaattctgaagatgtttcttagtggattatcgtaaatcactgaacctttttttcaagaaggacaagaattttggagtctgctattaatggaccatatttattacagtttttaaattgtacaatctctgtattatagctatttgtctaacattaccccacatgtaataaataaaacaatatga

SEQ ID NO: 10970 - DNA, 2764 bp, Homo sapiens
  source 1..2764: mol_type = unassigned DNA
gcagcgactcatcctatcgataaggttcagttagccaaggtggaggatgggaaaagaatggaactgtcccagctactcaatgagatcagggcaaactatgaaaagatcctcaccagaaatcagatagagacggtgctctcaacaaggatccaggtaatgatttcatacagacaggcaccttccagaataaggagacagtccatgtctacccaattcctgtcccggcctctctgagctagaagaagacataagcaaaaaaatggacaaagatgaagaggctttgaaggcagctcaagcagaactcaaggaggcccgacgccagtggcaccacctgcaagtggaaattgaatctctccatgctgtggaaaggggccttgaaaactccctacatgccagcgagcagcattaccagatgcagctgcaagacctagagactgtgattgaaggactagaaaaagagctacaggaagtaaggcgcggcatcgaaaagcagcttcaagagcacgagatgcttctcaacacgaagatgaggctggaacaagaaatagcaacttatcgccacctcctagaaaaagaagaaatcagatattatggttgtatccaaggtgggaaaaaagacaaaaagcctaccacaagtagagttggttttgttttaccatcagccattataaatgaaatatcttttactacaaaagtcccacaaaagtatgagaatgaaaatgtagaaacagtaaccaaacaggcaatcttaaatgggagtatcgttaaggagagcactgaagctcatggcactattcagacagagaaagtggatgaagttattaaagaatgggaaggttctttctttaaagataaccctcgattgaggaaaaagtctgtttctcttcgatttgatcttcatttagcagccactgatgaagggtgtttagagactaagcaggataatctaccagatatagaagtcaggcttatcatgagaagatcatgcagtattccctctatcaaacctccatcaacagctaattaatccaaagatagtatttgacttgattggaaaatgttaggatggaccaaggtgggccataccaactccctctgtcccaaaatgtaagttattacgtatgtatggaaaatgttatgatcaatatgtggttctcttcagaagaaaaaaacaataaaggacatttctctgaatctaattatggagatagacatatatatatatatatgaatgagagggagtagcttaaaaataaaatcacaaatccagtacagtctctttctttatattctcccaatagtcttctttttcccttgaaacttcatcagagactgtaagcattaacctggtttagtaaagtctttgtaatttttttcaatggctgaatacgctaaggaaaaaagaattgtttgaataggattgtgttaagagtcacactgagttattcaccattattccatgactggttaaacctacaatgtttgttctatttttcaaaaagagcaattataaacaagtttttaaagggggactcactattcacctaatgaggattcttctttttgagataaatcatttgtatactgagaaaaatgagttattttccatgagaaattctgagcaaactatagaacacaccccagggctaatttgagataagtacaattaagttaatctacatatatctaaaaggttttttttgtaataagtatctgatttccggaagatttactttactcaaggaactttaaaggttgtatcccccaccaaaaaaagaaaaaaaatcagaaggccaactgcgcaaacaaaacatgaaaagcaaattgaaaaggtagttactatagttatcagaacagttacccaccatcccagtttttccaactgtaaagctaaatgtgattagattgtttgctataagccgtagataagatactatatgaagtattataaatatttcttgcaatcatttatgtgaactaagataacggtattgttatctaagctaagagtatttagaggatttgtttttaaatcgttcaaattgtaataaatatgggtagaaaatatatttgtgaataagtgaggtattgttgcaaagtttttaaaataacctaatttgtttaatacaggtatatttaagatcttaataaatacctgttttaagacattagaaatttataagttcttaattcttttctaagcagaaaaagtagctgagtacaactcaccatactttttcccagctaaagtatcatctaagggctatagctacgttagcattttagtacagcctttaaaatatttctctctctctctcctctctcttctcctctatctctctctccatatatacttattatatatatacatatatataatttatatatatgtatatatatatttcaaccagaaaaatgtatgttttaaccaggaaaatattatgttaaataatctttaacataatacagggatataaaatttttaattttctttcaattacttcagattccttttagtctggtttattctatttagtgaaaagggatgattttgttttgtcaaggatataacagcatgttaagtgcttattcttgcataagcatctgacctaaaatacatcctatacataaaaaatgtttcatttgatattgctaaatgctactaactttattaaagctttaaaaatgcaatcatataagctattgtactaaagttactgtactaagcaacagtgatcataataaagcaatatatctagcataa

SEQ ID NO: 10971 - DNA, 1712 bp, Homo sapiens
  source 1..1712: mol_type = unassigned DNA
atcgataaggttcagttagccaaggtggaggatgggaaaagaatggaactgtcccagctactcaatgagatcagggcaaactatgaaaagatcctcaccagaaatcagatagagacggtgctctcaacaaggatccagctagaagaagacataagcaaaaaaatggacaaagatgaagaggctttgaaggcagctcaagcagaactcaaggaggcccgacgccagtggcaccacctgcaagtggaaattgaatctctccatgctgtggaaaggggccttgaaaactccctacatgccagcgagcagcattaccagatgcagctgcaagacctagagactgtgattgaaggactagaaaaagagctacaggaagtaaggcgcggcatcgaaaagcagcttcaagagcacgagatgcttctcaacacgaagatgaggctggaacaagaaatagcaacttatcgccacctcctagaaaaagaagaaatcagatattatggttgtatccaaggtgggaaaaaagacaaaaagcctaccacaagtagagttggttttgttttaccatcagccattataaatgaaatatcttttactacaaaagtcccacaaaagtatgagaatgaaaatgtagaaacagtaaccaaacaggcaatcttaaatgggagtatcgttaaggagagcactgaagctcatggcactattcagacagagaaagtggatgaagttattaaagaatgggaaggttctttctttaaagataaccctcgattgaggaaaaagtctgtttctcttcgatttgatcttcatttagcagccactgatgaagggtgtttagagactaagcaggataatctaccagatatagaagtcaggcttatcatgagaagatcatgcagtattccctctatcaaacctccatcaacagctaattaatccaaagatagtatttgacttgattggaaaatgttaggatggaccaaggtgggccataccaactccctctgtcccaaaatgtaagttattacgtatgtatggaaaatgttatgatcaatatgtggttctcttcagaagaaaaaaacaataaaggacatttctctgaatctaattatggagatagacatatatatatatatatgaatgagagggagtagcttaaaaataaaatcacaaatccagtacagtctctttctttatattctcccaatagtcttctttttcccttgaaacttcatcagagactgtaagcattaacctggtttagtaaagtctttgtaatttttttcaatggctgaatacgctaaggaaaaaagaattgtttgaataggattgtgttaagagtcacactgagttattcaccattattccatgactggttaaacctacaatgtttgttctatttttcaaaaagagcaattataaacaagtttttaaagggggactcactattcacctaatgaggattcttctttttgagataaatcatttgtatactgagaaaaatgagttattttccatgagaaattctgagcaaactatagaacacaccccagggctaatttgagataagtacaattaagttaatctacatatatctaaaaggttttttttgtaataagtatctgatttccggaagatttactttactcaaggaactttaaaggttgtatcccccaccaaaaaaagaaaaaaaatcagaaggccaactgcgcaaacaa

SEQ ID NO: 10972 - DNA, 1116 bp, Homo sapiens
  source 1..1116: mol_type = unassigned DNA
tcctatcgataaggttcagttagccaaggtggaggatgggaaaagaatggaactgtcccagctactcaatgagatcagggcaaactatgaaaagatcctcaccagaaatcagatagagacggtgctctcaacaaggatccaggtaatgatttcatacagacaggcaccttccagaataaggagacagtccatgtctacccaattcctgtcccggcctctctgagctagaagaagacataagcaaaaaaatggacaaagatgaagaggctttgaaggcagctcaagcagaactcaaggaggcccgacgccagtggcaccacctgcaagtggaaattgaatctctccatgctgtggaaaggggccttgaaaactccctacatgccagcgagcagcattaccagatgcagctgcaagacctagagactgtgattgaaggactagaaaaagagctacaggaagtaaggcgcggcatcgaaaagcagcttcaagagcacgagatgcttctcaacacgaagatgaggctggaacaagaaatagcaacttatcgccacctcctagaaaaagaagaaatcagatattatggttgtatccaaggtgggaaaaaagacaaaaagcctaccacaagtagagttggttttgttttaccatcaggtgagtttctgacataaataaactcatttgaaaagtgatgtactatttacagggattactttataaggaaattaaatactttaaagtcgaaaaaaaacaagcaatatttgaataaaagtttgaatataatttgtgaacagtaattcaatactgtaatttaatatatcataaatgatattttcacagccattataaatgaaatatcttttactacaaaagtcccacaaaagtatgagaatgaaaatgtagaaacagtaaccaaacaggcaatcttaaatgggagtatcgttaaggagagcactgaagctcatggcactattcagtaagtaaagaaactttgactaagaaataataataaatatatgtaaagaaattaactttgcgtaatcccagtaattactcttctttgtttaaatgtttccaaacatagttttagtatactgtgatttttttttttttttttga

SEQ ID NO: 10973 - DNA, 490 bp, Homo sapiens
  source 1..490: mol_type = unassigned DNA
ttccgcgcagaccgagcagactgccgcagcgactcatcctatcgataaggttcagttagccaaggtggaggatgggaaaagaatggaactgtcccagctactcaatgagatcagggcaaactatgaaaagatcctcaccagaaatcagatagagacggtgctctcaacaaggatccaggtaatgatttcatacagacaggcaccttccagaataaggagacagtccatgtctacccaattcctgtcccggcctctctgagaagcactccttgttttttgtttgttattgttgctgttggctttcttgttagctagaagaagacataagcaaaaaaatggacaaagatgaagaggctttgaaggcagctcaagcagaactcaaggaggcccgacgccagtggcaccacctgcaagtggaaattgaatctctccatgctgtggaaaggggccttgaaaactccctacatgccagcgagcagcattaccagat

SEQ ID NO: 10974 - DNA, 1881 bp, Homo sapiens
  source 1..1881: mol_type = unassigned DNA
actcttcgtcatcacctctcctattcgcctggacaagctcatgtttgcaggagcaccatgtcttgctcgtctcgcgcctcctcctccagggctggaggcagcagctcagccagggtgtctgctggtggaagcagcttcagcagtggaagcagatgtggtctggggggcagctcggcccagggcttccgaggaggagccagcagctgcagcctgagtggggggtctagcggtgcttttgggggcagctttggagggggctttggtagctgctcagtagggggtggttttgggggagcttcaggctctgggacaggatttggtgggggttctagctttggcggggtctctggatttggcaggggttctggattctgtgggagttctagattcagcagtggtgctactggaggcttctacagctatggtggtggtatgggaggtggtgttggcgatggggggcttttctctggaggggaaaagcaaaccatgcagaacctcaatgaccgcttggccaattacctagacaaggtcagagccctggaggaggctaacactgatctggagaacaaaatcaaggagtggtatgacaaatatgggcctgggtctggagacggtggatcgggaagagattatagcaaatactattcaataattgaagatctcagaaaccagatcattgctgccactgttgaaaatgctgggatcattttgcacattgacaatgccagattggctgctgatgacttcagactgaagtatgagaacgagctgtgtctccggcagagcgtggaggctgacatcaatggcctgcggaaagtcctggatgacctgactatgacccgctctgacctggagatgcagattgagagtttcaccgaggagctagcctacctgaggaagaaccacgaggaggaaatgaagaatatgcaaggaagctctggaggggaggtgaccgtagaaatgaatgctgcgccagggaccgacctgaccaaattactgaatgacatgagggcgcagtacgaggagctggctgagcaaaaccgccgagaggctgaggagcggttcaacaagcagagcgcatcactacaagcacaaatctccactgatgctggggcagccacttctgccaagaatgagataacagaactaaaacgtaccctgcaagccctggaaattgagcttcagtcccaactggccatgaaaagctccctggagggaaccctggctgacacagaagctggctacgtggctcagctgtcagaaattcaaacgcagatcagtgccctggaggaggagatctgccagatctggggtgagactaaatgccagaacgcagagtacaagcaattgctggacatcaagacacgcctggaggtggagatcgagacctaccgccgcctgctcgatggagagggaggtggttctagttttgcagaatttggtggtagaaactcaggatctgtaaacatgggatccagggatctggtatctggtgactcaagatctggaagctgttctggtcaaggacgagattcaagcaagactagagtgactaagactatcgtagaggagttggtggatggcaaggttgtctcgtctcaagtcagcagtatttctgaggtgaaagttaaataaggaacttccagatcaacaaaagtgtctttcaaagaaaaaaaaatcaagaaggacacaagcgaagaaatggcatcaatctaggcatctttctggataatttcaggaaaagcttcagtccagaaatggatgactagccaacttttctgcatcttcttatttcctcattagaatgctcttgaaatagctgaattaacaactttgctttaattgtttctatgcttcaataaatttacttttgcaagttaa

SEQ ID NO: 10975 - DNA, 739 bp, Homo sapiens
  source 1..739: mol_type = unassigned DNA
tcactgccctctgcctcgaccttatccagccacacgccaccatgtgtcataccagctgctcctcgggctgccagccagcctgctgcgcgcccagcccctgccagccagcctgttgtgtgcccagctcctgccaggcatcctgctgtgtgcctgtgggctgccagtcctccgtgtgtgtgcccgtgagcttcaagccagccgtgtgcctgcccgtgagctgccagtcttctgtgtgtgtgcccatgagcttcaagtcagctgtgtgcgtgcccgtgagctgccagtcttctgtgtgtgtgcctgtgagctgcaggcccattgtgtgtgcagccccctcctgccagtcctccctgtgcgtgcctgtgagctgcaggcctgtcgtgtatgcggctccgtcctgccagtcctctgggtgctgccagccctcctgcaccagcgtcctctgcagacccatctcctacagtatctcttcctgctgctgagcatgaatctccagacccgctgctcccagtgcagatgaggccacacctgtacactccctggatgagtcctcagttggtcttctgcacatggtgcaggtgaaaagcatgctcagttgaaccctctgaattctggattgagaatgtgacagaatgatctggagcccttgctgaccttgcccatccccccagggaagtctggggtcccagagtcattctctgaccccatgagagccaaataaaccagctttccccatgca

SEQ ID NO: 10976 - DNA, 17726 bp, Homo sapiens
  source 1..17726: mol_type = unassigned DNA
aggcaagatgtcggtgtggagcgaggcaggagcgattgcagcaaccgtcacccccggagcccggcggcggcagcagcagcagcagcagcagcgcggggaggagacagcagccagccgcagtagccgccgcagccgcgggagcaatgcagacagcaccttgagaacgcgctaaagcactccaaaccgtggaccatgccgtgtccctgcaactgggaggggggaaaaccagattttttttgacataaaagcaagccagccaaaaatatataattttgtccttcaaggagccggtgtgtaaagagtgagcgctattttccttctcctcctcctcctctccctcctcctcctctccctcctcctctctctcctccttctcctcttctttttcctcctcctcctcctccctaagtgtacagacagcatcacatcacctggtttgcttctgagaaacagcatctctccttttcagggaccagagactcagagagagaggagacattctaatggagtccgcttgatatcccaaaataaaataataaattttggctcttgtcccctcctcccactcccaccccctcaaccctgtgtgagatgttggatttcttcttcatgagacattgttgagaagtcgcagtggttggagaggcggagggtagactacctctactcccccccctcttttttctctctgggaggaggaggaggggaagggggttgcagagcaagcgatggatgaggaaaacatgacgaaaagcgaggagcagcagcctctgagtttgcaaaaagccttacagcagtgcgaactggtccaaaacatgatagacttgagcatctccaacctggaagggcttaggaccaaatgtgctacctccaacgacctcacacaaaaagaaatccggaccctggagagcaagctggtgaagtacttcagccggcagctgtcctgcaaaaagaaggtagccttgcaggagcgcaacgcggagctggacggcttcccccagctacggcactggttccgaatcgtcgatgtgcgcaaggaggtcctggaggaaatctcccccggccagctgagcctggaggacctcttggagatgacggatgaacaggtgtgcgagactgtggagaaatacggagccaaccgggaggagtgtgcccgcctcaacgcctccctctcctgcctcaggaatgtccacatgtcaggaggcaacctttccaaacaagactggaccatccagtggcccacgacagagacggggaaggagaacaatcccgtgtgccccccggagcccaccccgtggatccgcacccatctctcccagagccccagggtcccgtccaagtgcgtccagcactattgtcacaccagccccactcccggggcccctgtgtacacccacgtggacaggcttaccgtggacgcctacccgggcttgtgcccgcccccgccactggagtcgggccaccgttccctgcccccatcgccccggcagcggcacgcggtccgcaccccgccgcgcacccccaacatcgtcaccaccgtgaccccgccgggcacgccgcccatgaggaagaagaacaagctgaagcccccggggaccccaccgccctcctcccgaaaactgatacacttgatcccgggattcaccgcgctgcatcggagcaaatcccacgagttccagctggggcaccgcgtggacgaggcccacacgcccaaagccaagaagaagagcaaacccttgaacctcaagatccacagcagcgtaggcagctgcgagaacatcccctctcagcagcgctccccgctgctgtccgagcgctccctccgctccttctttgtgggacacgcacctttcctgccttccacccctcctgttcacactgaggccaacttctctgcaaacacactgtcagtgccacgctggtccccgcagatccctcgcagagatctcggcaactccatcaagcacaggttttccaccaagtactggatgtctcagacgtgcacagtctgtgggaaagggatgctttttggcctcaagtgtaaaaactgcaagttaaagtgccacaacaaatgcaccaaagaagccccaccctgtcatcttctgatcatccaccgaggagatccagcaaggttagtccggacagagtccgttccgtgtgacatcaacaaccctctacggaagccacctcgctattcagacctgcacatcagtcagacgctccccaaaaccaacaaaatcaacaaggaccacatccctgtcccttaccagccagactccagcagcaacccctcctccacgacgtcctccacgccctcctcgccagcaccccccctccctcctagtgccacgccgccttctcccctacacccttccccacagtgcacacggcagcagaagaacttcaacctgccagcatcccactactacaaatacaagcagcagttcatcttcccagatgtggtgccggtgccggagacgccgacccgggcgccccaggtcatcctgcatccggtgacctcgaatccaatcttggaaggaaatccattacttcaaattgaagtggagccaacgtcggagaatgaagaggtccatgatgaggccgaagagtcagaggatgacttcgaggagatgaacctgtccctcctctcggcccggagcttcccacgcaaggccagccagaccagcatcttccttcaggagtgggacatcccctttgagcagctggagatcggcgagctcattggaaagggccgctttgggcaagtgtaccacggccgctggcatggcgaggtggccatccggctgattgacattgagagggacaacgaggaccagctcaaggccttcaagcgggaggtgatggcctacaggcagacacggcatgagaacgtggtgcttttcatgggtgcctgcatgagcccgcctcacctggccatcatcaccagcctctgtaagggacggacgctctattccgttgtgagggatgccaaaatcgttttggatgtcaacaaaaccaggcagattgctcaagaaattgtgaagggcatgggctacctccacgccaagggaatcctacacaaggacctcaagtcaaagaacgtcttctatgacaacggcaaagtggtcatcacggactttggactcttcagcatttctggggtgctgcaggctggcaggcgggaggacaaactgcgcatccagaatggctggctatgccacctggcaccagagatcatccgccagctgtcccccgacacagaggaggataagctccccttctccaagcactctgacgtctttgcccttggcacaatctggtatgaactccacgccagggaatggcctttcaagacccaaccagcagaggcaataatctggcaaatgggcacaggcatgaaacccaacctcagccagattggcatgggaaaagaaatctcggacattcttctcttctgctgggcctttgaacaagaagagagacctaccttcaccaagctcatggacatgctggagaaactgccaaagcgaaaccgtcgcctgtctcaccctggacatttctggaagtctgcagagctgtgacctttggacatcgggacggcgcccagctgcctgggctcccgtcacctctccctccctactctgtcctctgccagctcaggaggccagagactcagcatcagagggtaccaaccccgaccgacctgggagcactggacaactgctcggcggcctccctgcacctcagacttgagcccttttcctcgggcagggttggggacccccgagctaggactgaaccggaccagccagggtgatgcgttattgatcagtgcggcccaggggacagcactaatgagagcactgcaggctgcacgtggtgcctttgggctatgggactaggacaggagaccccacgtgggggggctcacagacggggctatgtgtgtgtgtgtctgtgtgtttgacgttgttcactcttgtttccccttgacaagcaagagccagactgtcccaatgacggggcactcctcagttctgtctgtatgtggtaggttccagctgtaccatctgggaagctaagaggagggtacagagccgagtggcagcttagtcaaggctactgagccaagatcgagcagggaaggtcgggagtggctaagctcgttcctttggaaatatctgttttcagacaccccaacccgagcctgtcatggcgtgtggcacctttgcatagagctctgaagtacagtaggaaagttagaacgtcttttgagttctgggtctctctgggggacctattcccccatttctgctgttttctcctgttctctgagagtagcatcccttttcacctcactgcccgcacctccttgccatttggaaagccaagatgacttctgaggggctccttagagctcaccgtcattcagggcaccccctgaagtctggtccctgagaatcagggctctgggcagggagttctaggacattccttttcttccctcttctctgctactcacaccagtgaagcttattcccccaccaaggtggatgcgggttcttggggtacgtccatgttgggttatgtggctgtacctatgataacacgtttgcaaaagatttccctgcctgtcacccttgaggagtcctgttgggggagcacaaagggaggatgtttgttacacttctgcgttctttgctctagcctggtgcggggtcctcaagtagcttccccatcggaagcctgtgtccctcacctgtgtgtgttccctcagtgccccaccttccctccctcctcttgatcccaacctgggccggcgactcttcctgaccatgttggggaagcccctggtgttctgtatctgtaggaaggatgccgagagcaggctgggcatgcagatgggagaggagaacctctgggtcatttgcccatgttttcaaagccctgaccccctgcatgtgacctgatacaaaagggaaatctgtccccaagcagagcaatagcaggattatctgggcagtgaacaggaagcccagggcggccacagcccctctgtgtttcctgggtactacctgggccttagttttcttgtagctactatctatccaggcatctccctcctagagggccagagagaggaactggaacttcaaaaaccctacctgatcttactttcaaaatccaaatagacctatgaggatctcttccccaccttgggtgactcccagactggttcatgctctgggggccaaacctgcttccaaaccgggaagaatggtgagatcagtcatgcttcccaggagcctggctacaggaaacccctgtgtttcccaaagggccctcctgaattgcctttccaacactcccagcttactgggactagaggactaaagaccccggcttgggctgctcctaagcagacactgctcttctggggacatctatggctcttggcttgacgacgtgtgtgtgtcttggaggcattttatatatgtttgcctgagccccagccactctggggttgctggggatggctcttgtcaatggacacctccccatcccaacacaacactctgtgtcccagccctgggcctggacttgcacctgtcttggctctgcccagcagcctactgagtgcctgaaacccaaccactcacttctcttccatcacaccaggacttcttgggtccacaggctccagtccttgtcatgttcccttgtgccaagagacaggatatgaggaagggaagaggcagccagggtctactaccctgcagctgaaatgtccacaagaactggcaccttctcactcttgcctctcttgtttccagaattaactaaaatgtccaaccacagcctttggcaaggcctagcatgatctccaacagctgatttttccattcattcatgagcaccagtttgggattaaggacagggcctgagtgatccaggggaaaacccagccctttgtggaacagggtgccttgggtccatccctgaatctgagtcacttgctcttgacttctcgatctttccccacttcactactctgtccccacctgcattggtctctgctgcagccaggccaggatcctggccttcagtgccttcctgacgcccctaccctgtcccctctacaccgccctgacttgttgagaaaccagctttaatttgcacacatttaaatccaggaagaaccaaaccgctgctttccctgctggcttccatctttattcgctgatgaggttttgggaggaggttatattcatcttacgcagggaggaaaaaaaaagaggaaagaggctgtatatttttacatcataattaccagcctcacctgcaactcattctatacaatgacacgaccaagatttgtgtgtttgcccttgtcccatcacagctgcacacaggtgccctgtacacataagtcactgactcagcagcgagttgttccagtcagtcttgcttttagcaaaccgtcatatacatgggcttcccgaggggaccagtccacagggtgaagattcaccaggaagccttggctttgcagagagaaacatctcagctttctttaaagggcatgtggatttgcacataaatttcacccaactcttccaggatacagattattcataaaaccaaggagcttccttcttggccccctgtgggaggacgtgccccttgtgtccccatccccagagccaagctggaaacccaaagtcattgcttagatccattttgtcctggtattccttttactgatcaaagagaaaattttcatcttgccatggacccccccatcctcaccccatccacttgtctccacagctaccttggattgtcagtcaatagaagcccttgactgatattgaccactagacttttgtatccagggaacctagttcttccctttttctcacctcccatgccatatacacacatcatgcccctccccacaaacacacgaaaccagccttatctcaccttccaccattcccatccccacctacagctgatcatcaaaggtacacggaggaagtagtagacacggagctcaggccaatcattatcttgagaaatctaaacccagggctgtcaggctatgccccataggccatacccagcctgccaaatggtttttacatgttttaattgaggaaaaatcaaaagaataatatttcatgacatgaaaattctataacattcaaatttcatgtcaataaacaaaatgttattggagcacagtcacctctccatttacacaaccacggctgctcctatgcaactgtgacagagccagctatttgcaacagagacgatgtggcccacacagtcaaaaacttttacaatctggccctttcctaactttgctagcctttgatagagaggattggatatggctgtcaggggaggaacaggagcctttgatagagagggttggatatggctctcaggggaggaacaggaagttggagggggagagaacttgtttcagcggaagaaggccagcttgccccaagatgcagcgggctgcctccggaagtagagaactccctgtccttggatagggtggagcagatgttgactgcttggcctgtgtgatatggaggcaattcaggccctgaaggctggaccaactccctggactttaaaactcttcgtttgctaaggggggccataataacaaaatgtcacacactgagtggcttaaacaacacgaatttattcctcacaattcttgaggctggaagtcccaagatcaaggtgtcagcagggttggtttctggtgaggcctctttctttggcttgcagacagctgccctctgatcgtgacctcacgtggcctttcctctgtgactgcacatccccagtatctcctcctcttctgataaagacaacaatcttattagattagggttccaacgctctgtgattttattcccatccccggctttctttccccacactggttctcaatcttgagtcccgaaatatgccctccctatcctcatcctgtgcctaccttcacttcacccatccatcccctgcaggctggtcttgttccactgtgccaccatatccccaagcccccctcacctccgtgaggctcctaggactgctgcagcaaaccaccacccactggggcctacaacaacagatgtatcatctctcacccatctggatgccagaagtccaaaatcaaagtgttagcagggccatgttccccctgaaatctgtaagggaatccttcctggcggcttctgaattcctggtgctttcctggtcatcattggcattccttggcttgcagctgtgtcagtccaatccctgccctcatcatctctctgtgtgtccctatcttcatatggccatcttcttataaggacacgagtcacattggattaagggcccaccctatttcagtatgacctcatcttaactaattatatctgcaaagaccctctctccaaatgaagtctcattctgaggtactaggaatgaggacttcaacatgtctttttttttttttttttttttttgttggggacaccacaacttataacaccctctaagacattttctcttgtgccttgactggtcctccactgtagaacccaggtgcccttgaagatagattccccagaattcctggtctacaaggtcaggctgttgctgtcatgcttaccaagcttgccccaatcaacacgtcccatcactgaattccaacagctctggatctcagttctgtggctgtatgggaacagcctgtgtgtaagtggcttgtctgtagcggactgtcacttgacccctgaatgtgcctcatgaccctatccaaagcagttggtgacacagcatctgattttatctatactcttgttcattgacaaaggagtggattttgatgagctacattttgctgtttccttttttggctttgcctgtgatgtggggaagttcctaggcagactcatgtggccactctccctggctcccagcctcacctcctcccgtaccacctcaccctcacctgcacacacctgcaagggaatcactttgaactccaaggggagtgacaggcagcaaatgtcagtctgggtcctggaatgtggagccgcagtgaacctctgtcctctctggtcagtgcctgactatgatattaacccaaatcccagactcccttctcgaggccctgcaatccatacccattctgttaccagtttagttttgaaaccagtagtggggcaggaggttgatggaaaatctgcggtcccagtgacctcctggacttgtcttagtagtgcctggcacatagtaagtgctcaagaaatgtttacagaatgcagacagagaggtttgctgggtaagagtaagaccctggcacagggagttagaagggcaccattggcagggctggatggtattgggattcccctttgccagaccatgttgtgggtgccatatcaaccccaatgagtttgtttgttaggtttgttgttgtggtttagagttagagtcttgctctgtcacccaggctggagtacagcgtgatcatagctcactgcagcctcgaactcctggccacaagcaatcctcccaccttagcctctcaagttgctggtactacaggtgcacaccatcatgcctggctaattttttatttgttgtacagacagggtcttgctatgttgcccgcgctggtcttgaactcctggtctcaagcaatccccctgcttcagcctcccaaagcactgggattacagggctaagccattgtgctgagccagtttgccaggtttaatatctgtgacgtatgaagcgacccattgagtcaggtggcccaggatgtctaggaggcagagtaacaatccaccctgaacagccctcattcacagagcacttactacgtgccaggctggaattcctatgatggtttggggagatcagtagtcttattctcgttccaatggggcaactgtggtacagggacagaaaccagcctccaaattgcagacccagcattttaaaaacgagtctttgggctcatccattcccaggaacccacctccaggtcaaggggttcatgtccagctgctcatggggatgttacaatcccagcctctgagacttattggcaacttggaaccaggaaagagagagaggaaaagcaggaagttgtggaagggagggtgcaggggctggcagggaccatactgggagtttgcacggaagcttgaacttatgttctcaaactgacaggctgccagcagcagcccggatttccaggaaatgtacatctgggttggcagagtccctcctgggtccctccagtatccctgctccaggcttcctatcccctccgtctctcctgctggatgttgcactgtggtcccgtgttcctgagaggcgtacatcagtgagtgctcttccctctcaggggtgggaaagggcccttccttcccactcattgggatcatgcagctcccatttcctaacaccaagaatatgaaggattcatctcatggggttgagaatggctgtcctccttccactgaggactgagctggaggagatggactctgtctagaatgtgcctgatctaaataagaccttgtttcccaagcatgtcccatagacctttcattccatggaaaactcgccggatttgcattattgaaagggtcctgggacaagcatgcattggaaatgcttaggtaaaatgaaactaatttcttgattgcaggacttatcagaacttttaagacactattgtgtggttgaatctctaaatgcctgataggaggctgttcttcccaagctttcccaggcttgtttctgaatctccaacaaggtcaacctctgtgaatgagacttgataccttacctggtactgaaggaggcaatgtcaatgtactggcccacagaaaagagctgaccactagcattcatagacactgctaggagatgagaaaggtagcttagagcccgattccatccatgtggacagtggttccatgaacaagaacaccacatctggctgatggtgtcttccaatggaggggtcaaatctgctgtgtgttggtggcttctccaacataccatggcttggaggccaatgtgaaaagtatataagatgtaacaccctcagaagggttaagttttcacctgagttttcatcttcaaccaagtcattgggatggtgatctagaaggacctctaagatctagaaggataaagatctggtccaaggagtacaaatatgtaatggatctaccaccagtgtcccctgctgtactcttggcagacatcactaatccatcacagcatgccttcccactgatcacagatgtagcttcagggcattcgagttaccacttaagatggatatgagtgaccctcccttatctcactcttctcctttcacagaagcaggatctgaggcccagagagggaagctataataaactcccctaagtcaggtcccttctaagaggcagaggtaggtttagaactcaggcctcagaaacttccagaagccaagccatttgggctgtagttggtggacagtctatcagcgctctgcagatgtttcttctcagttagggaacttggaaaatgcagaaagaaagattctgtctctaagactctgtgtatgatcctactcggtaatctgcctgcttggagaaaaatcatttatcttctgggacggcttcaccacaaggcctgaatgctatgcccagtctagtaacagctgggctggaagtcacggcatatgggggccttaaggaataacagtgtgcgtggtggtgtgcaggagagctgcaagggcttttctttcttgaggaggtttgtaaaatttctgctgttcagtctgggcttctgggaagtcagggggtgctgcatataaagggcaggaaaaggagcctgactccaattgctctttggtttcttccctgaatggaaggctcaaaatcaagtttccacccagataagatcttgaggtcctagtggaccaccagctctactcctgagctcttgaaatacctctaatcaccagctcggtggctgagagtaccttcttgtccactgcctcttcttttccttctcgtcttcacttatcccccatccaacttctgcccgataatatctcccctgtattgtaaactgaggagaaagttgcacaattgtagagatgaaaaatagctgccatgtatttagcttaaattagctcagaagaaaggctccctccctccattgagcgggcagcacttgtttatgccaacatgctatttgcatcgcgccttcttaaatttgaaagtctaatgattaaaaacaaatcttagtttttcttttccaccacttaaaaaaaaaaaaccagcttggctagttcttctagtttaaaaataccctgacctccagcactacagtgagaattttggaaaggctggtaccaggatatcaggaggaaataaatacaggccaacaataaccagaggccttttctgagtggtgggcgacaggatgaacaaggtagaagagaggtctttgtgtcctcacacagatgctggcattctgggtttgtctggaattcagtgaacctctgtcctctctgacagagatttcttcaccaaccattcattcagtgggtgatttgttgagcatctactatgtgttagaccctgggcattcagtgatgagtgatacaatgtctcacctgttctgaagcctaaagcccaatggggaagagagacaagaagcaagtcaaccacaaatatataaatttgcaactcatgtagatctatggaaagaaaactcacgggggaccagaaacatgggagagggtatactgtgggagagctgctgacaaaggtctttctgaggaggtgacatttaagtcaagatctaaaggaagagaaggataaagagatgttcattctaagccagggtttctcaacctcagtactgttgagctatttggggccagataattctttgaggtggcgactgtcctgggcattggaggatgttaagcagcttcctcaactctccccacaagataccagtagcacctggtactggtgacatccaaaaacatccccagacacaccctgactttgctgtctggaatcaatcctcataaagccccaagccttggagcacagaggctggaagcccatatggtggcatgtcaggcatggtgtcacctgagcttctctgacccccacttctgatatggcatccagtttggagtctctgttctccatgagctcccatagctgtcccatattccacaaggcattgcttctgggccacggtcctctagttccagcatagccctatttttgggtatgttggtggatttcaaaagcctccagttgacatccaaagtgtgacatccaaaaccatctccagacattgccagatgtcccctgagttgtctccaggccacgcgactaggattcaaatccagcatcctgccatctgcaaccttccatgggagaaaggaaatcagaggagaacaggaaaacacaaggaggggactccttaagtgaacattgcagggaaataggtttttaaagcactagttagcatcaccagtggtttgaaggctgtctaggtaaggagaatgtggacttgcctttcaccgtctgcacggacaggggctgaaatctccagtcattctctccatccttccacagcccttctaagaagcagatcctcttgctgagctgaaatcttgagacttgcatccggcaatcttggtgttgctttctgaggctactcagggaaagcccttctgtattccccaggaaggaaagtctcccagatagtgaagggccttttctaccttccttgcaattcccagttcactgtgaagaagagagtcaggccgggttagaatggctgtctctggtagcaatgaagcaacaacatagacagtctggacaagatgtggcagttctgtccagtcccgtgtgactgatttgggcatggagacaggcagtgggtgaggatggcctctgtaggtccagctgttttacccctagaatcaaatccctggagcttccggcagtcccaggattgggaagggtaacagagaggacgagtcgggcactgcaaaagaccagatcttggaaaattgctttgggaattgggacaccttccaagaagacagttgagttggctggggctctgccctagatggggtcaacctctccccaacacagccctgcccaggttggggcattggcagcttaagtgcgtcctggacaacaaatgtaatgtattggtcctgtaagattctagccattttcctctgcttatttttctacatgtgttacaagtaataatgtttagatgggtacatatgaacttgtgtaagttcaagtaactgctatgtagctacagcatgggcatcaaggtactctaaggtacttgccctgccacaccgaggccccctgccccggccccctttccctcctagccagccttctagggagcactgcacaccctgccccttcaaagctatctggacagtcctggctcgactggagcattaagggaggggctgtccttggtcaggcttctgcccaactgtgtgatgcataaatctttgcctggctccttcttccttcttttcggaagtctatctcctcctgagggcctctgcggtcctaacctatcaaggaatatcatagattgtactccccaccccatcaaaacacaccctgactttgcgtctggaatcaatcctcataaagccccaaggcttggagcacagaggccagaagcccatatggtggcatgtcaggcatgctgtcacatgagcttctctgactccacttccaagatggcatccaatttggagtctctgttctccatgagctcccatagctgtcccatattccacaaggcactgcttctgggccccggtcctctagtttcctcatagccctatttttgggtacattggtggatttcaaatgcctacagttgagcagccgaaggattctaagaaaattttgcttgtatttcaaaggctcatgtccccagccccattcactacaccctcagcagagcccagcgtggagcaaccttgtcccttcattccccaaatcttcattttatatagtcatttagtaaatatttgttaagtgcctcctgtgattctggaaaaaatggagaaaagtgggtgctgccttcagggtactaggagtccgatgaagagagggaggagttccagtagggtcccgaggccccacaggagctcccaacccagagaaagaccctccaggaaggattctcagaggaggagacttctgaaccctgtcttgaaatttgagtagaatggtagggaacggtgtgtcagacagaaggaacagcctatgtgtggactcagaggcaagatcatgatttattgagggtaactgcaagtggctaaaatcctgccccctggcacttgcctgcctttccctgctttccccaaagcctgattttgggaccctggagtctccatctccaaacagagggtgccctggctcagatgtggagaccttgacttctttccccagcatgctctggttcctactgttagccttggtgtcctgtgggggaagatgtctgaggagagttttgtgcttgctggagtcagaccagtactcaggccacctcaggcctgctctgcatccctctctggctctacagacctctctctctctctctctctctctctctctctctctctgtctgtctgtctctgtgtctgtctctgtctctgcctgcctccacacagtgaaggatgtgtctctatttcttagtgccctgcattgggtcctgaagtccatgggcatcttggctatagatgggttggccatgagcccttctctctaatgcatttttcattcctgttcctcttttgcttcactttccctctatcgactcttgcgacctgtgtctctgatgtctctggggcccccagttctgtcttgccataccaaaaaaccttcttcagcaaaaaacctctttctgggacagttcatatcactctatgaataggcccctgaagtgttgaggtcaaggacatgtgtgaacgtggaaatgtatttatggaaagaccctacactgagggtctctaactaaacatttcaggtatgatgggcaaaatgctggtttgttacagaaatgactgaagaagacctaggggccatagtgggccacaggccaagcctgcaatacagcctgaagtgtgggaaagaatgtatcagtcctgttgatggagtggtgtgtttgctgtctctataaatatgtcagggtttgaaagacagaaaacaaagcatctttgctgaccgccagactcccagggtatatgtggctactgcaaattagcgaggcttgtttatctgcttcaacttgactcaatttgcatttcttgagccactgtctattgtggataatgatttcatcaacactttctcagcatcagcagcccctccagagtattccttgaattttcttagctttgtgcaacccacgagcacttaatatatcactaacccttgagtttattggagggagtgaatgaaataatgaatgtcaataacgttacgcaatacctggcacacagtaggtgcttcatcaatgtggcttttcttctcaatcacccaaatgaacctcccccagaatcccacctctagggggacattcctgaaaaataagggactagaatagcgaggtggtgggtgttacccatttatttagatatttgtgtcctggtgaacatggggagggatgcccaagtgtcataaggacaccccctccccccgtctacaaggcagaggtctcttaggatgtgagagagtctctggcaagaccagcccccaccccaccaaggccctcatagaaacagaacattcttcctccctatcccaaagcagaagttgactggggcagataaggcaagtcacattacatctgtgcccttgaccatacctggaccaggcagagaagatcccagacttaggtggtcaacgtttccaccccaagcctctcatttctcgctctctttgagacttgatcttgtaccaggatccactcgacagacttaacgcatgattaatttgattgattactcttgaagttactgaccttaggaaaattcctcaattgtaaaaaggctttctctatatgtaaattatgctgttatctttttctatacacaaagtatatagacctataaatattatacatatatattatatatataaagactaattcttgtacagaccaacgcggaccgatggtccatattcttttctccatgtttgtttgtgtcgactgttgcagagtgagttgatgtaagaaggtggtttcatgttttcttttggggggccacttctttcttttcctttccgtttctatctctgtctgtctccgtctctgtctctctctttctcacttgttgccaatgtcttgttgctgagaaggaacactctattcagatgccatccaggaaagaaaggccagatggatggagggtccactgtgtatatttgtacagaatcatttataaagttttctacacttctaaaaaaagtatttctaacttgggctgttggacagtttgtgtgcctctgagccagcaagcctgttgtttcttgtgtttagtgcaatgtttagtgagaaaccaatgtctgaattatttatgccaataaaaaatttgagaatta

SEQ ID NO: 10977 - DNA, 1512 bp, Homo sapiens
  source 1..1512: mol_type = unassigned DNA
aggacttcaacataggaacttgagggggacaaaattcagcccataacatgcattgatgtataacaaaaaagcaaaaatggaaccaaatgcaagtgagtctgcgattccagcgaggaggcagcggcagcccagagccaagaagaagagcaaacccttgaacctcaagatccacagcagcgtaggcagctgcgagaacatcccctctcagcagcgctccccgctgctgtccgagcgctccctccgctccttctttgtgggacacgcacctttcctgccttccacccctcctgttcacactgaggccaacttctctgcaaacacactgtcagtgccacgctggtccccgcagatccctcgcagagatctcggcaactccatcaagcacaggttttccaccaagtactggatgtctcagacgtgcacagtctgtgggaaagggatgctttttggcctcaagtgtaaaaactgcaagttaaagtgccacaacaaatgcaccaaagaagccccaccctgtcatcttctgatcatccaccgaggagatccagcaaggttagtccggacagagtccgttccgtgtgacatcaacaaccctctacggaagccacctcgctattcagacctgcacatcagtcagacgctccccaaaaccaacaaaatcaacaaggaccacatccctgtcccttaccagccagactccagcagcaacccctcctccacgacgtcctccacgccctcctcgccagcaccccccctccctcctagtgccacgccgccttctcccctacacccttccccacagtgcacacggcagcagaagaacttcaacctgccagcatcccactactacaaatacaagcagcagttcatcttcccagatgtggtgccggtgccggagacgccgacccgggcgccccaggtcatcctgcatccggtgacctcgaatccaatcttggaaggaaatccattacttcaaattgaagtggagccaacgtcggagaatgaagaggtccatgatgaggccgaagagtcagaggatgacttcgaggagatgaacctgtccctcctctcggcccggagcttcccacgcaaggccagccagaccagcatcttccttcaggagtgggacatcccctttgagcagctggagatcggcgagctcattggaaagggccgctttgggcaagtgtaccacggccgctggcatggcgaggtggccatccggctgattgacattgagagggacaacgaggaccagctcaaggccttcaagcgggaggtgatggcctacaggcagacacggcatgagaacgtggtgcttttcatgggtgcctgcatgagcccgcctcacctggccatcatcaccaggccagtttgattgtcctaaatataacgtacaggagttggggggcctgagcacatgaagattccgtccccatcatcgagtggaagcggcttccttttatgttcaaaaagctgaatcgctttccctttataaagcacagctgaaaaggt

SEQ ID NO: 10978 - DNA, 477 bp, Homo sapiens
  source 1..477: mol_type = unassigned DNA
acctcgctattcagacctgcacatcagtcagacgctccccaaaaccaacaaaatcaacaaggaccacatccctgtcccttaccagccagactccagcagcaacccctcctccacgacgtcctccacgccctcctcgccagcaccccccctccctcctagtgccacgccgccttctcccctacacccttccccacagtgcacacggcagcagaagaacttcaacctgccaggtacctccatgcttggggagacatgaggggtgcagcgttggaggggcagagattagggagggggtgggttcatgccagagccctgatgcagcaagtctctgcaggaaagcgaatgggtcaatgaccagagaggggcaaggaagtatgtggactgacccttatcgtaccctaagcaattacccttatatcacttatttaatctttggaacagccacaaggtaagcattatcagctcattttacagatg

SEQ ID NO: 10979 - DNA, 17008 bp, Homo sapiens
  source 1..17008: mol_type = unassigned DNA
gcagcagcctctgagtttgcaaaaagccttacagcagtgcgaactggtccaaaacatgatagacttgagcatctccaacctggaagggcttaggaccaaatgtgctacctccaacgacctcacacaaaaagaaatccggaccctggagagcaagctggtgaagtacttcagccggcagctgtcctgcaaaaagaaggtagccttgcaggagcgcaacgcggagctggacggcttcccccagctacggcactggttccgaatcgtcgatgtgcgcaaggaggtcctggaggaaatctcccccggccagctgagcctggaggacctcttggagatgacggatgaacaggtgtgcgagactgtggagaaatacggagccaaccgggaggagtgtgcccgcctcaacgcctccctctcctgcctcaggaatgtccacatgtcaggaggcaacctttccaaacaagactggaccatccagtggcccacgacagagacggggaaggagaacaatcccgtgtgccccccggagcccaccccgtggatccgcacccatctctcccagagccccagggtcccgtccaagtgcgtccagcactattgtcacaccagccccactcccggggcccctgtgtacacccacgtggacaggcttaccgtggacgcctacccgggcttgtgcccgcccccgccactggagtcgggccaccgttccctgcccccatcgccccggcagcggcacgcggtccgcaccccgccgcgcacccccaacatcgtcaccaccgtgaccccgccgggcacgccgcccatgaggaagaagaacaagctgaagcccccggggaccccaccgccctcctcccgaaaactgatacacttgatcccgggattcaccgcgctgcatcggagcaaatcccacgagttccagctggggcaccgcgtggacgaggcccacacgcccaaagccaagaagaagagcaaacccttgaacctcaagatccacagcagcgtaggcagctgcgagaacatcccctctcagcagcgctccccgctgctgtccgagcgctccctccgctccttctttgtgggacacgcacctttcctgccttccacccctcctgttcacactgaggccaacttctctgcaaacacactgtcagtgccacgctggtccccgcagatccctcgcagagatctcggcaactccatcaagcacaggttttccaccaagtactggatgtctcagacgtgcacagtctgtgggaaagggatgctttttggcctcaagtgtaaaaactgcaagttaaagtgccacaacaaatgcaccaaagaagccccaccctgtcatcttctgatcatccaccgaggagatccagcaaggttagtccggacagagtccgttccgtgtgacatcaacaaccctctacggaagccacctcgctattcagacctgcacatcagtcagacgctccccaaaaccaacaaaatcaacaaggaccacatccctgtcccttaccagccagactccagcagcaacccctcctccacgacgtcctccacgccctcctcgccagcaccccccctccctcctagtgccacgccgccttctcccctacacccttccccacagtgcacacggcagcagaagaacttcaacctgccagcatcccactactacaaatacaagcagcagttcatcttcccagatgtggtgccggtgccggagacgccgacccgggcgccccaggtcatcctgcatccggtgacctcgaatccaatcttggaaggaaatccattacttcaaattgaagtggagccaacgtcggagaatgaagaggtccatgatgaggccgaagagtcagaggatgacttcgaggagatgaacctgtccctcctctcggcccggagcttcccacgcaaggccagccagaccagcatcttccttcaggagtgggacatcccctttgagcagctggagatcggcgagctcattggaaagggccgctttgggcaagtgtaccacggccgctggcatggcgaggtggccatccggctgattgacattgagagggacaacgaggaccagctcaaggccttcaagcgggaggtgatggcctacaggcagacacggcatgagaacgtggtgcttttcatgggtgcctgcatgagcccgcctcacctggccatcatcaccagcctctgtaagggacggacgctctattccgttgtgagggatgccaaaatcgttttggatgtcaacaaaaccaggcagattgctcaagaaattgtgaagggcatgggctacctccacgccaagggaatcctacacaaggacctcaagtcaaagaacgtcttctatgacaacggcaaagtggtcatcacggactttggactcttcagcatttctggggtgctgcaggctggcaggcgggaggacaaactgcgcatccagaatggctggctatgccacctggcaccagagatcatccgccagctgtcccccgacacagaggaggataagctccccttctccaagcactctgacgtctttgcccttggcacaatctggtatgaactccacgccagggaatggcctttcaagacccaaccagcagaggcaataatctggcaaatgggcacaggcatgaaacccaacctcagccagattggcatgggaaaagaaatctcggacattcttctcttctgctgggcctttgaacaagaagagagacctaccttcaccaagctcatggacatgctggagaaactgccaaagcgaaaccgtcgcctgtctcaccctggacatttctggaagtctgcagagctgtgacctttggacatcgggacggcgcccagctgcctgggctcccgtcacctctccctccctactctgtcctctgccagctcaggaggccagagactcagcatcagagggtaccaaccccgaccgacctgggagcactggacaactgctcggcggcctccctgcacctcagacttgagcccttttcctcgggcagggttggggacccccgagctaggactgaaccggaccagccagggtgatgcgttattgatcagtgcggcccaggggacagcactaatgagagcactgcaggctgcacgtggtgcctttgggctatgggactaggacaggagaccccacgtgggggggctcacagacggggctatgtgtgtgtgtgtctgtgtgtttgacgttgttcactcttgtttccccttgacaagcaagagccagactgtcccaatgacggggcactcctcagttctgtctgtatgtggtaggttccagctgtaccatctgggaagctaagaggagggtacagagccgagtggcagcttagtcaaggctactgagccaagatcgagcagggaaggtcgggagtggctaagctcgttcctttggaaatatctgttttcagacaccccaacccgagcctgtcatggcgtgtggcacctttgcatagagctctgaagtacagtaggaaagttagaacgtcttttgagttctgggtctctctgggggacctattcccccatttctgctgttttctcctgttctctgagagtagcatcccttttcacctcactgcccgcacctccttgccatttggaaagccaagatgacttctgaggggctccttagagctcaccgtcattcagggcaccccctgaagtctggtccctgagaatcagggctctgggcagggagttctaggacattccttttcttccctcttctctgctactcacaccagtgaagcttattcccccaccaaggtggatgcgggttcttggggtacgtccatgttgggttatgtggctgtacctatgataacacgtttgcaaaagatttccctgcctgtcacccttgaggagtcctgttgggggagcacaaagggaggatgtttgttacacttctgcgttctttgctctagcctggtgcggggtcctcaagtagcttccccatcggaagcctgtgtccctcacctgtgtgtgttccctcagtgccccaccttccctccctcctcttgatcccaacctgggccggcgactcttcctgaccatgttggggaagcccctggtgttctgtatctgtaggaaggatgccgagagcaggctgggcatgcagatgggagaggagaacctctgggtcatttgcccatgttttcaaagccctgaccccctgcatgtgacctgatacaaaagggaaatctgtccccaagcagagcaatagcaggattatctgggcagtgaacaggaagcccagggcggccacagcccctctgtgtttcctgggtactacctgggccttagttttcttgtagctactatctatccaggcatctccctcctagagggccagagagaggaactggaacttcaaaaaccctacctgatcttactttcaaaatccaaatagacctatgaggatctcttccccaccttgggtgactcccagactggttcatgctctgggggccaaacctgcttccaaaccgggaagaatggtgagatcagtcatgcttcccaggagcctggctacaggaaacccctgtgtttcccaaagggccctcctgaattgcctttccaacactcccagcttactgggactagaggactaaagaccccggcttgggctgctcctaagcagacactgctcttctggggacatctatggctcttggcttgacgacgtgtgtgtgtcttggaggcattttatatatgtttgcctgagccccagccactctggggttgctggggatggctcttgtcaatggacacctccccatcccaacacaacactctgtgtcccagccctgggcctggacttgcacctgtcttggctctgcccagcagcctactgagtgcctgaaacccaaccactcacttctcttccatcacaccaggacttcttgggtccacaggctccagtccttgtcatgttcccttgtgccaagagacaggatatgaggaagggaagaggcagccagggtctactaccctgcagctgaaatgtccacaagaactggcaccttctcactcttgcctctcttgtttccagaattaactaaaatgtccaaccacagcctttggcaaggcctagcatgatctccaacagctgatttttccattcattcatgagcaccagtttgggattaaggacagggcctgagtgatccaggggaaaacccagccctttgtggaacagggtgccttgggtccatccctgaatctgagtcacttgctcttgacttctcgatctttccccacttcactactctgtccccacctgcattggtctctgctgcagccaggccaggatcctggccttcagtgccttcctgacgcccctaccctgtcccctctacaccgccctgacttgttgagaaaccagctttaatttgcacacatttaaatccaggaagaaccaaaccgctgctttccctgctggcttccatctttattcgctgatgaggttttgggaggaggttatattcatcttacgcagggaggaaaaaaaaagaggaaagaggctgtatatttttacatcataattaccagcctcacctgcaactcattctatacaatgacacgaccaagatttgtgtgtttgcccttgtcccatcacagctgcacacaggtgccctgtacacataagtcactgactcagcagcgagttgttccagtcagtcttgcttttagcaaaccgtcatatacatgggcttcccgaggggaccagtccacagggtgaagattcaccaggaagccttggctttgcagagagaaacatctcagctttctttaaagggcatgtggatttgcacataaatttcacccaactcttccaggatacagattattcataaaaccaaggagcttccttcttggccccctgtgggaggacgtgccccttgtgtccccatccccagagccaagctggaaacccaaagtcattgcttagatccattttgtcctggtattccttttactgatcaaagagaaaattttcatcttgccatggacccccccatcctcaccccatccacttgtctccacagctaccttggattgtcagtcaatagaagcccttgactgatattgaccactagacttttgtatccagggaacctagttcttccctttttctcacctcccatgccatatacacacatcatgcccctccccacaaacacacgaaaccagccttatctcaccttccaccattcccatccccacctacagctgatcatcaaaggtacacggaggaagtagtagacacggagctcaggccaatcattatcttgagaaatctaaacccagggctgtcaggctatgccccataggccatacccagcctgccaaatggtttttacatgttttaattgaggaaaaatcaaaagaataatatttcatgacatgaaaattctataacattcaaatttcatgtcaataaacaaaatgttattggagcacagtcacctctccatttacacaaccacggctgctcctatgcaactgtgacagagccagctatttgcaacagagacgatgtggcccacacagtcaaaaacttttacaatctggccctttcctaactttgctagcctttgatagagaggattggatatggctgtcaggggaggaacaggagcctttgatagagagggttggatatggctctcaggggaggaacaggaagttggagggggagagaacttgtttcagcggaagaaggccagcttgccccaagatgcagcgggctgcctccggaagtagagaactccctgtccttggatagggtggagcagatgttgactgcttggcctgtgtgatatggaggcaattcaggccctgaaggctggaccaactccctggactttaaaactcttcgtttgctaaggggggccataataacaaaatgtcacacactgagtggcttaaacaacacgaatttattcctcacaattcttgaggctggaagtcccaagatcaaggtgtcagcagggttggtttctggtgaggcctctttctttggcttgcagacagctgccctctgatcgtgacctcacgtggcctttcctctgtgactgcacatccccagtatctcctcctcttctgataaagacaacaatcttattagattagggttccaacgctctgtgattttattcccatccccggctttctttccccacactggttctcaatcttgagtcccgaaatatgccctccctatcctcatcctgtgcctaccttcacttcacccatccatcccctgcaggctggtcttgttccactgtgccaccatatccccaagcccccctcacctccgtgaggctcctaggactgctgcagcaaaccaccacccactggggcctacaacaacagatgtatcatctctcacccatctggatgccagaagtccaaaatcaaagtgttagcagggccatgttccccctgaaatctgtaagggaatccttcctggcggcttctgaattcctggtgctttcctggtcatcattggcattccttggcttgcagctgtgtcagtccaatccctgccctcatcatctctctgtgtgtccctatcttcatatggccatcttcttataaggacacgagtcacattggattaagggcccaccctatttcagtatgacctcatcttaactaattatatctgcaaagaccctctctccaaatgaagtctcattctgaggtactaggaatgaggacttcaacatgtctttttttttttttttttttttttgttggggacaccacaacttataacaccctctaagacattttctcttgtgccttgactggtcctccactgtagaacccaggtgcccttgaagatagattccccagaattcctggtctacaaggtcaggctgttgctgtcatgcttaccaagcttgccccaatcaacacgtcccatcactgaattccaacagctctggatctcagttctgtggctgtatgggaacagcctgtgtgtaagtggcttgtctgtagcggactgtcacttgacccctgaatgtgcctcatgaccctatccaaagcagttggtgacacagcatctgattttatctatactcttgttcattgacaaaggagtggattttgatgagctacattttgctgtttccttttttggctttgcctgtgatgtggggaagttcctaggcagactcatgtggccactctccctggctcccagcctcacctcctcccgtaccacctcaccctcacctgcacacacctgcaagggaatcactttgaactccaaggggagtgacaggcagcaaatgtcagtctgggtcctggaatgtggagccgcagtgaacctctgtcctctctggtcagtgcctgactatgatattaacccaaatcccagactcccttctcgaggccctgcaatccatacccattctgttaccagtttagttttgaaaccagtagtggggcaggaggttgatggaaaatctgcggtcccagtgacctcctggacttgtcttagtagtgcctggcacatagtaagtgctcaagaaatgtttacagaatgcagacagagaggtttgctgggtaagagtaagaccctggcacagggagttagaagggcaccattggcagggctggatggtattgggattcccctttgccagaccatgttgtgggtgccatatcaaccccaatgagtttgtttgttaggtttgttgttgtggtttagagttagagtcttgctctgtcacccaggctggagtacagcgtgatcatagctcactgcagcctcgaactcctggccacaagcaatcctcccaccttagcctctcaagttgctggtactacaggtgcacaccatcatgcctggctaattttttatttgttgtacagacagggtcttgctatgttgcccgcgctggtcttgaactcctggtctcaagcaatccccctgcttcagcctcccaaagcactgggattacagggctaagccattgtgctgagccagtttgccaggtttaatatctgtgacgtatgaagcgacccattgagtcaggtggcccaggatgtctaggaggcagagtaacaatccaccctgaacagccctcattcacagagcacttactacgtgccaggctggaattcctatgatggtttggggagatcagtagtcttattctcgttccaatggggcaactgtggtacagggacagaaaccagcctccaaattgcagacccagcattttaaaaacgagtctttgggctcatccattcccaggaacccacctccaggtcaaggggttcatgtccagctgctcatggggatgttacaatcccagcctctgagacttattggcaacttggaaccaggaaagagagagaggaaaagcaggaagttgtggaagggagggtgcaggggctggcagggaccatactgggagtttgcacggaagcttgaacttatgttctcaaactgacaggctgccagcagcagcccggatttccaggaaatgtacatctgggttggcagagtccctcctgggtccctccagtatccctgctccaggcttcctatcccctccgtctctcctgctggatgttgcactgtggtcccgtgttcctgagaggcgtacatcagtgagtgctcttccctctcaggggtgggaaagggcccttccttcccactcattgggatcatgcagctcccatttcctaacaccaagaatatgaaggattcatctcatggggttgagaatggctgtcctccttccactgaggactgagctggaggagatggactctgtctagaatgtgcctgatctaaataagaccttgtttcccaagcatgtcccatagacctttcattccatggaaaactcgccggatttgcattattgaaagggtcctgggacaagcatgcattggaaatgcttaggtaaaatgaaactaatttcttgattgcaggacttatcagaacttttaagacactattgtgtggttgaatctctaaatgcctgataggaggctgttcttcccaagctttcccaggcttgtttctgaatctccaacaaggtcaacctctgtgaatgagacttgataccttacctggtactgaaggaggcaatgtcaatgtactggcccacagaaaagagctgaccactagcattcatagacactgctaggagatgagaaaggtagcttagagcccgattccatccatgtggacagtggttccatgaacaagaacaccacatctggctgatggtgtcttccaatggaggggtcaaatctgctgtgtgttggtggcttctccaacataccatggcttggaggccaatgtgaaaagtatataagatgtaacaccctcagaagggttaagttttcacctgagttttcatcttcaaccaagtcattgggatggtgatctagaaggacctctaagatctagaaggataaagatctggtccaaggagtacaaatatgtaatggatctaccaccagtgtcccctgctgtactcttggcagacatcactaatccatcacagcatgccttcccactgatcacagatgtagcttcagggcattcgagttaccacttaagatggatatgagtgaccctcccttatctcactcttctcctttcacagaagcaggatctgaggcccagagagggaagctataataaactcccctaagtcaggtcccttctaagaggcagaggtaggtttagaactcaggcctcagaaacttccagaagccaagccatttgggctgtagttggtggacagtctatcagcgctctgcagatgtttcttctcagttagggaacttggaaaatgcagaaagaaagattctgtctctaagactctgtgtatgatcctactcggtaatctgcctgcttggagaaaaatcatttatcttctgggacggcttcaccacaaggcctgaatgctatgcccagtctagtaacagctgggctggaagtcacggcatatgggggccttaaggaataacagtgtgcgtggtggtgtgcaggagagctgcaagggcttttctttcttgaggaggtttgtaaaatttctgctgttcagtctgggcttctgggaagtcagggggtgctgcatataaagggcaggaaaaggagcctgactccaattgctctttggtttcttccctgaatggaaggctcaaaatcaagtttccacccagataagatcttgaggtcctagtggaccaccagctctactcctgagctcttgaaatacctctaatcaccagctcggtggctgagagtaccttcttgtccactgcctcttcttttccttctcgtcttcacttatcccccatccaacttctgcccgataatatctcccctgtattgtaaactgaggagaaagttgcacaattgtagagatgaaaaatagctgccatgtatttagcttaaattagctcagaagaaaggctccctccctccattgagcgggcagcacttgtttatgccaacatgctatttgcatcgcgccttcttaaatttgaaagtctaatgattaaaaacaaatcttagtttttcttttccaccacttaaaaaaaaaaaaccagcttggctagttcttctagtttaaaaataccctgacctccagcactacagtgagaattttggaaaggctggtaccaggatatcaggaggaaataaatacaggccaacaataaccagaggccttttctgagtggtgggcgacaggatgaacaaggtagaagagaggtctttgtgtcctcacacagatgctggcattctgggtttgtctggaattcagtgaacctctgtcctctctgacagagatttcttcaccaaccattcattcagtgggtgatttgttgagcatctactatgtgttagaccctgggcattcagtgatgagtgatacaatgtctcacctgttctgaagcctaaagcccaatggggaagagagacaagaagcaagtcaaccacaaatatataaatttgcaactcatgtagatctatggaaagaaaactcacgggggaccagaaacatgggagagggtatactgtgggagagctgctgacaaaggtctttctgaggaggtgacatttaagtcaagatctaaaggaagagaaggataaagagatgttcattctaagccagggtttctcaacctcagtactgttgagctatttggggccagataattctttgaggtggcgactgtcctgggcattggaggatgttaagcagcttcctcaactctccccacaagataccagtagcacctggtactggtgacatccaaaaacatccccagacacaccctgactttgctgtctggaatcaatcctcataaagccccaagccttggagcacagaggctggaagcccatatggtggcatgtcaggcatggtgtcacctgagcttctctgacccccacttctgatatggcatccagtttggagtctctgttctccatgagctcccatagctgtcccatattccacaaggcattgcttctgggccacggtcctctagttccagcatagccctatttttgggtatgttggtggatttcaaaagcctccagttgacatccaaagtgtgacatccaaaaccatctccagacattgccagatgtcccctgagttgtctccaggccacgcgactaggattcaaatccagcatcctgccatctgcaaccttccatgggagaaaggaaatcagaggagaacaggaaaacacaaggaggggactccttaagtgaacattgcagggaaataggtttttaaagcactagttagcatcaccagtggtttgaaggctgtctaggtaaggagaatgtggacttgcctttcaccgtctgcacggacaggggctgaaatctccagtcattctctccatccttccacagcccttctaagaagcagatcctcttgctgagctgaaatcttgagacttgcatccggcaatcttggtgttgctttctgaggctactcagggaaagcccttctgtattccccaggaaggaaagtctcccagatagtgaagggccttttctaccttccttgcaattcccagttcactgtgaagaagagagtcaggccgggttagaatggctgtctctggtagcaatgaagcaacaacatagacagtctggacaagatgtggcagttctgtccagtcccgtgtgactgatttgggcatggagacaggcagtgggtgaggatggcctctgtaggtccagctgttttacccctagaatcaaatccctggagcttccggcagtcccaggattgggaagggtaacagagaggacgagtcgggcactgcaaaagaccagatcttggaaaattgctttgggaattgggacaccttccaagaagacagttgagttggctggggctctgccctagatggggtcaacctctccccaacacagccctgcccaggttggggcattggcagcttaagtgcgtcctggacaacaaatgtaatgtattggtcctgtaagattctagccattttcctctgcttatttttctacatgtgttacaagtaataatgtttagatgggtacatatgaacttgtgtaagttcaagtaactgctatgtagctacagcatgggcatcaaggtactctaaggtacttgccctgccacaccgaggccccctgccccggccccctttccctcctagccagccttctagggagcactgcacaccctgccccttcaaagctatctggacagtcctggctcgactggagcattaagggaggggctgtccttggtcaggcttctgcccaactgtgtgatgcataaatctttgcctggctccttcttccttcttttcggaagtctatctcctcctgagggcctctgcggtcctaacctatcaaggaatatcatagattgtactccccaccccatcaaaacacaccctgactttgcgtctggaatcaatcctcataaagccccaaggcttggagcacagaggccagaagcccatatggtggcatgtcaggcatgctgtcacatgagcttctctgactccacttccaagatggcatccaatttggagtctctgttctccatgagctcccatagctgtcccatattccacaaggcactgcttctgggccccggtcctctagtttcctcatagccctatttttgggtacattggtggatttcaaatgcctacagttgagcagccgaaggattctaagaaaattttgcttgtatttcaaaggctcatgtccccagccccattcactacaccctcagcagagcccagcgtggagcaaccttgtcccttcattccccaaatcttcattttatatagtcatttagtaaatatttgttaagtgcctcctgtgattctggaaaaaatggagaaaagtgggtgctgccttcagggtactaggagtccgatgaagagagggaggagttccagtagggtcccgaggccccacaggagctcccaacccagagaaagaccctccaggaaggattctcagaggaggagacttctgaaccctgtcttgaaatttgagtagaatggtagggaacggtgtgtcagacagaaggaacagcctatgtgtggactcagaggcaagatcatgatttattgagggtaactgcaagtggctaaaatcctgccccctggcacttgcctgcctttccctgctttccccaaagcctgattttgggaccctggagtctccatctccaaacagagggtgccctggctcagatgtggagaccttgacttctttccccagcatgctctggttcctactgttagccttggtgtcctgtgggggaagatgtctgaggagagttttgtgcttgctggagtcagaccagtactcaggccacctcaggcctgctctgcatccctctctggctctacagacctctctctctctctctctctctctctctctctctctctgtctgtctgtctctgtgtctgtctctgtctctgcctgcctccacacagtgaaggatgtgtctctatttcttagtgccctgcattgggtcctgaagtccatgggcatcttggctatagatgggttggccatgagcccttctctctaatgcatttttcattcctgttcctcttttgcttcactttccctctatcgactcttgcgacctgtgtctctgatgtctctggggcccccagttctgtcttgccataccaaaaaaccttcttcagcaaaaaacctctttctgggacagttcatatcactctatgaataggcccctgaagtgttgaggtcaaggacatgtgtgaacgtggaaatgtatttatggaaagaccctacactgagggtctctaactaaacatttcaggtatgatgggcaaaatgctggtttgttacagaaatgactgaagaagacctaggggccatagtgggccacaggccaagcctgcaatacagcctgaagtgtgggaaagaatgtatcagtcctgttgatggagtggtgtgtttgctgtctctataaatatgtcagggtttgaaagacagaaaacaaagcatctttgctgaccgccagactcccagggtatatgtggctactgcaaattagcgaggcttgtttatctgcttcaacttgactcaatttgcatttcttgagccactgtctattgtggataatgatttcatcaacactttctcagcatcagcagcccctccagagtattccttgaattttcttagctttgtgcaacccacgagcacttaatatatcactaacccttgagtttattggagggagtgaatgaaataatgaatgtcaataacgttacgcaatacctggcacacagtaggtgcttcatcaatgtggcttttcttctcaatcacccaaatgaacctcccccagaatcccacctctagggggacattcctgaaaaataagggactagaatagcgaggtggtgggtgttacccatttatttagatatttgtgtcctggtgaacatggggagggatgcccaagtgtcataaggacaccccctccccccgtctacaaggcagaggtctcttaggatgtgagagagtctctggcaagaccagcccccaccccaccaaggccctcatagaaacagaacattcttcctccctatcccaaagcagaagttgactggggcagataaggcaagtcacattacatctgtgcccttgaccatacctggaccaggcagagaagatcccagacttaggtggtcaacgtttccaccccaagcctctcatttctcgctctctttgagacttgatcttgtaccaggatccactcgacagacttaacgcatgattaatttgattgattactcttgaagttactgaccttaggaaaattcctcaattgtaaaaaggctttctctatatgtaaattatgctgttatctttttctatacacaaagtatatagacctataaatattatacatatatattatatatataaagactaattcttgtacagaccaacgcggaccgatggtccatattcttttctccatgtttgtttgtgtcgactgttgcagagtgagttgatgtaagaaggtggtttcatgttttcttttggggggccacttctttcttttcctttccgtttctatctctgtctgtctccgtctctgtctctctctttctcacttgttgccaatgtcttgttgctgagaaggaacactctattcagatgccatccaggaaagaaaggccagatggatggagggtccactgtgtatatttgtacagaatcatttataaagttttctacacttctaaaaaaagtatttctaacttgggctgttggacagtttgtgtgcctctgagccagcaagcctgttgtttcttgtgtttagtgcaatgtttagtgagaaaccaatgtctgaattatttatgccaataaaaaatttgagaattactgcattgcactactgccaagacaggtctgaattctattgtt

SEQ ID NO: 10980 - DNA, 5113 bp, Homo sapiens
  source 1..5113: mol_type = unassigned DNA
tcgcagacgcgctcgggcggcgggtccgaggccggcgtgcgcggaggctgggcgggcagcccgagcggtggccgcagcgcagtgcccccactcccaactcccgccccaagccgcccaccagcccccttcccctccggccggagcctgaaccgagcccggctggctgtgctgcgcggtgccgccgggaaagatggtcgtggcgctgcggtacgtgtggcctctcctcctctgcagcccctgcctgcttatccagatccccgaggaatatgaaggacaccatgtgatggagccacctgtcatcacggaacagtctccacggcgcctggttgtcttccccacagatgacatcagcctcaagtgtgaggccagtggcaagcccgaagtgcagttccgctggacgagggatggtgtccacttcaaacccaaggaagagctgggtgtgaccgtgtaccagtcgccccactctggctccttcaccatcacgggcaacaacagcaactttgctcagaggttccagggcatctaccgctgctttgccagcaataagctgggcaccgccatgtcccatgagatccggctcatggccgagggtgcccccaagtggccaaaggagacagtgaagcccgtggaggtggaggaaggggagtcagtggttctgccttgcaaccctcccccaagtgcagagcctctccggatctactggatgaacagcaagatcttgcacatcaagcaggacgagcgggtgacgatgggccagaacggcaacctctactttgccaatgtgctcacctccgacaaccactcagactacatctgccacgcccacttcccaggcaccaggaccatcattcagaaggaacccattgacctccgggtcaaggccaccaacagcatgattgacaggaagccgcgcctgctcttccccaccaactccagcagccacctggtggccttgcaggggcagccattggtcctggagtgcatcgccgagggctttcccacgcccaccatcaaatggctgcgccccagtggccccatgccagccgaccgtgtcacctaccagaaccacaacaagaccctgcagctgctgaaagtgggcgaggaggatgatggcgagtaccgctgcctggccgagaactcactgggcagtgcccggcatgcgtactatgtcaccgtggaggctgccccgtactggctgcacaagccccagagccatctatatgggccaggagagactgcccgcctggactgccaagtccagggcaggccccaaccagaggtcacctggagaatcaacgggatccctgtggaggagctggccaaagaccagaagtaccggattcagcgtggcgccctgatcctgagcaacgtgcagcccagtgacacaatggtgacccaatgtgaggcccgcaaccggcacgggctcttgctggccaatgcctacatctacgttgtccagctgccagccaagatcctgactgcggacaatcagacgtacatggctgtccagggcagcactgcctaccttctgtgcaaggccttcggagcgcctgtgcccagtgttcagtggctggacgaggatgggacaacagtgcttcaggacgaacgcttcttcccctatgccaatgggaccctgggcattcgagacctccaggccaatgacaccggacgctacttctgcctggctgccaatgaccaaaacaatgttaccatcatggctaacctgaaggttaaagatgcaactcagatcactcaggggccccgcagcacaatcgagaagaaaggttccagggtgaccttcacgtgccaggcctcctttgacccctccttgcagcccagcatcacctggcgtggggacggtcgagacctccaggagcttggggacagtgacaagtacttcatagaggatgggcgcctggtcatccacagcctggactacagcgaccagggcaactacagctgcgtggccagtaccgaactggatgtggtggagagtagggcacagctcttggtggtggggagccctgggccggtgccacggctggtgctgtccgacctgcacctgctgacgcagagccaggtgcgcgtgtcctggagtcctgcagaagaccacaatgcccccattgagaaatatgacattgaatttgaggacaaggaaatggcgcctgaaaaatggtacagtctgggcaaggttccagggaaccagacctctaccaccctcaagctgtcgccctatgtccactacacctttagggttactgccataaacaaatatggccccggggagcccagcccggtctctgagactgtggtcacacctgaggcagccccagagaagaaccctgtggatgtgaagggggaaggaaatgagaccaccaatatggtcatcacgtggaagccgctccggtggatggactggaacgccccccaggttcagtaccgcgtgcagtggcgccctcaggggacacgagggccctggcaggagcagattgtcagcgaccccttcctggtggtgtccaacacgtccaccttcgtgccctatgagatcaaagtccaggccgtcaacagccagggcaagggaccagagccccaggtcactatcggctactctggagaggactacccccaggcaatccctgagctggaaggcattgaaatcctcaactcaagtgccgtgctggtcaagtggcggccggtggacctggcccaggtcaagggccacctccgcggatacaatgtgacgtactggagggagggcagtcagaggaagcacagcaagagacatatccacaaagaccatgtggtggtgcccgccaacaccaccagtgtcatcctcagtggcttgcggccctatagctcctaccacctggaggtgcaggcctttaacgggcgaggatcggggcccgccagcgagttcaccttcagcaccccagagggagtgcctggccaccccgaggcgttgcacctggagtgccagtcgaacaccagcctgctgctgcgctggcagcccccactcagccacaacggcgtgctcaccggctacgtgctctcctaccaccccctggatgaggggggcaaggggcaactgtccttcaaccttcgggaccccgaacttcggacacacaacctgaccgatctcagcccccacctgcggtaccgcttccagcttcaggccaccaccaaagagggccctggtgaagccatcgtacgggaaggaggcactatggccttgtctgggatctcagattttggcaacatctcagccacagcgggtgaaaactacagtgtcgtctcctgggtccccaaggagggccagtgcaacttcaggttccatatcttgttcaaagccttgggagaagagaagggtggggcttccctttcgccacagtatgtcagctacaaccagagctcctacacgcagtgggacctgcagcctgacactgactacgagatccacttgtttaaggagaggatgttccggcaccaaatggctgtgaagaccaatggcacaggccgcgtgaggctccctcctgctggcttcgccactgagggctggttcatcggctttgtgagtgccatcatcctcctgctcctcgtcctgctcatcctctgcttcatcaagcgcagcaagggcggcaaatactcagtgaaggataaggaggacacccaggtggactctgaggcccgaccgatgaaagatgagaccttcggcgagtacaggtccctggagagtgacaacgaggagaaggcctttggcagcagccagccatcgctcaacggggacatcaagcccctgggcagtgacgacagcctggccgattatgggggcagcgtggatgttcagttcaacgaggatggttcgttcattggccagtacagtggcaagaaggagaaggaggcggcagggggcaatgacagctcaggggccacttcccccatcaaccctgccgtggccctagaatagtggagtccaggacaggagatgctgtgcccctggccttgggatccaggcccctccctctccagcaggcccatgggaggctggagttggggcagaggagaacttgctgcctcggatccccttcctaccacccggtccccactttattgccaaaacccagctgcaccccttcctgggcacacgctgctctgccccagcttgggcagatctcccacatgccaggggcctttgggtgctgttttgccagcccatttgggcagagaggctgtggtttgggggagaagaagtaggggtggcccgaaagggtctccgaaatgctgtctttcttgctccctgactgggggcagacatggtggggtctcctcaggaccagggttggcaccttccccctcccccagccactccccagccagcctggctgggactgggaacagaactcggtgtccccaccatctgctgtcttttctttgccatctctgctccaaccgggatgggagccgggcaaactggccgcgggggcaggggaggccatctggagagcccagagtccccccactcccagcatcgcactctggcagcaccgcctcttcccgccgcccagcccaccccatggccggctttcaggagctccatacacacgctgccttcggtacccaccacacaacatccaagtggcctccgtcactacctggctgcggggcgggcacacctcctcccactgcccactggccggcctcttccagccgcccccaccccccaggaccccttagcagccctgccctccctatcgtctgaacagttgtcttcctcagcctcctcccgcccccaccttgggaatgtaaatacaccgtgactttgaaagtttgtacccctgtccttccctttacgccactagtgtgtaggcagatgtctgagtccctaggtggtttctaggattgatagcaattagctttgatgaacccatcccaggaaaaataaaaacagacaaaaaaaaaggaaagattggttctcccagcactgctcagcagccacagcctccctgtatgcctgtgcttggtctactgataagccctctacaaaaaaacaaaagtatatatatatatgtacataatatcagaattataacaggcaaataaaacctgaaaatcaaga

SEQ ID NO: 10981 - DNA, 4655 bp, Homo sapiens
  source 1..4655: mol_type = unassigned DNA
catcggcatcgcagacgcgctcgggcggcgggtccgaggccggcgtgcgcggaggctgggcgggcagcccgagcggtggccgcagcgcagtgcccccactcccaactcccgccccaagccgcccaccagcccccttcccctccggccggagcctgaaccgagcccggctggctgtgctgcgcggtgccgccgggaaagatggtcgtggcgctgcggtacgtgtggcctctcctcctctgcagcccctgcctgcttatccagatccccgaggaattgatggagccacctgtcatcacggaacagtctccacggcgcctggttgtcttccccacagatgacatcagcctcaagtgtgaggccagtggcaagcccgaagtgcagttccgctggacgagggatggtgtccacttcaaacccaaggaagagctgggtgtgaccgtgtaccagtcgccccactctggctccttcaccatcacgggcaacaacagcaactttgctcagaggttccagggcatctaccgctgctttgccagcaataagctgggcaccgccatgtcccatgagatccggctcatggccgagggtgcccccaagtggccaaaggagacagtgaagcccgtggaggtggaggaaggggagtcagtggttctgccttgcaaccctcccccaagtgcagagcctctccggatctactggatgaacagcaagatcttgcacatcaagcaggacgagcgggtgacgatgggccagaacggcaacctctactttgccaatgtgctcacctccgacaaccactcagactacatctgccacgcccacttcccaggcaccaggaccatcattcagaaggaacccattgacctccgggtcaaggccaccaacagcatgattgacaggaagccgcgcctgctcttccccaccaactccagcagccacctggtggccttgcaggggcagccattggtcctggagtgcatcgccgagggctttcccacgcccaccatcaaatggctgcgccccagtggccccatgccagccgaccgtgtcacctaccagaaccacaacaagaccctgcagctgctgaaagtgggcgaggaggatgatggcgagtaccgctgcctggccgagaactcactgggcagtgcccggcatgcgtactatgtcaccgtggaggctgccccgtactggctgcacaagccccagagccatctatatgggccaggagagactgcccgcctggactgccaagtccagggcaggccccaaccagaggtcacctggagaatcaacgggatccctgtggaggagctggccaaagaccagaagtaccggattcagcgtggcgccctgatcctgagcaacgtgcagcccagtgacacaatggtgacccaatgtgaggcccgcaaccggcacgggctcttgctggccaatgcctacatctacgttgtccagctgccagccaagatcctgactgcggacaatcagacgtacatggctgtccagggcagcactgcctaccttctgtgcaaggccttcggagcgcctgtgcccagtgttcagtggctggacgaggatgggacaacagtgcttcaggacgaacgcttcttcccctatgccaatgggaccctgggcattcgagacctccaggccaatgacaccggacgctacttctgcctggctgccaatgaccaaaacaatgttaccatcatggctaacctgaaggttaaagatgcaactcagatcactcaggggccccgcagcacaatcgagaagaaaggttccagggtgaccttcacgtgccaggcctcctttgacccctccttgcagcccagcatcacctggcgtggggacggtcgagacctccaggagcttggggacagtgacaagtacttcatagaggatgggcgcctggtcatccacagcctggactacagcgaccagggcaactacagctgcgtggccagtaccgaactggatgtggtggagagtagggcacagctcttggtggtggggagccctgggccggtgccacggctggtgctgtccgacctgcacctgctgacgcagagccaggtgcgcgtgtcctggagtcctgcagaagaccacaatgcccccattgagaaatatgacattgaatttgaggacaaggaaatggcgcctgaaaaatggtacagtctgggcaaggttccagggaaccagacctctaccaccctcaagctgtcgccctatgtccactacacctttagggttactgccataaacaaatatggccccggggagcccagcccggtctctgagactgtggtcacacctgaggcagccccagagaagaaccctgtggatgtgaagggggaaggaaatgagaccaccaatatggtcatcacgtggaagccgctccggtggatggactggaacgccccccaggttcagtaccgcgtgcagtggcgccctcaggggacacgagggccctggcaggagcagattgtcagcgaccccttcctggtggtgtccaacacgtccaccttcgtgccctatgagatcaaagtccaggccgtcaacagccagggcaagggaccagagccccaggtcactatcggctactctggagaggactacccccaggcaatccctgagctggaaggcattgaaatcctcaactcaagtgccgtgctggtcaagtggcggccggtggacctggcccaggtcaagggccacctccgcggatacaatgtgacgtactggagggagggcagtcagaggaagcacagcaagagacatatccacaaagaccatgtggtggtgcccgccaacaccaccagtgtcatcctcagtggcttgcggccctatagctcctaccacctggaggtgcaggcctttaacgggcgaggatcggggcccgccagcgagttcaccttcagcaccccagagggagtgcctggccaccccgaggcgttgcacctggagtgccagtcgaacaccagcctgctgctgcgctggcagcccccactcagccacaacggcgtgctcaccggctacgtgctctcctaccaccccctggatgaggggggcaaggggcaactgtccttcaaccttcgggaccccgaacttcggacacacaacctgaccgatctcagcccccacctgcggtaccgcttccagcttcaggccaccaccaaagagggccctggtgaagccatcgtacgggaaggaggcactatggccttgtctgggatctcagattttggcaacatctcagccacagcgggtgaaaactacagtgtcgtctcctgggtccccaaggagggccagtgcaacttcaggttccatatcttgttcaaagccttgggagaagagaagggtggggcttccctttcgccacagtatgtcagctacaaccagagctcctacacgcagtgggacctgcagcctgacactgactacgagatccacttgtttaaggagaggatgttccggcaccaaatggctgtgaagaccaatggcacaggccgcgtgaggctccctcctgctggcttcgccactgagggctggttcatcggctttgtgagtgccatcatcctcctgctcctcgtcctgctcatcctctgcttcatcaagcgcagcaagggcggcaaatactcagtgaaggataaggaggacacccaggtggactctgaggcccgaccgatgaaagatgagaccttcggcgagtacagtgacaacgaggagaaggcctttggcagcagccagccatcgctcaacggggacatcaagcccctgggcagtgacgacagcctggccgattatgggggcagcgtggatgttcagttcaacgaggatggttcgttcattggccagtacagtggcaagaaggagaaggaggcggcagggggcaatgacagctcaggggccacttcccccatcaaccctgccgtggccctagaatagtggagtccaggacaggagatgctgtgcccctggccttgggatccaggcccctccctctccagcaggcccatgggaggctggagttggggcagaggagaacttgctgcctcggatccccttcctaccacccggtccccactttattgccaaaacccagctgcaccccttcctgggcacacgctgctctgccccagcttgggcagatctcccacatgccaggggcctttgggtgctgttttgccagcccatttgggcagagaggctgtggtttgggggagaagaagtaggggtggcccgaaagggtctccgaaatgctgtctttcttgctccctgactgggggcagacatggtggggtctcctcaggaccagggttggcaccttccccctcccccagccactccccagccagcctggctgggactgggaacagaactcggtgtccccaccatctgctgtcttttctttgccatctctgctccaaccgggatgggagccgggcaaactggccgcgggggcaggggaggccatctggagagcccagagtccccccactcccagcatcgcactctggcagcaccgcctcttcccgccgcccagcccaccccatggccggctttcaggagctccatacacacgctgccttcggtacccaccacacaacatccaagtggcctccgtcactacctggctgcggggcgggcacacctcc

SEQ ID NO: 10982 - DNA, 692 bp, Homo sapiens
  source 1..692: mol_type = unassigned DNA
gaagagaagggtggggcttccctttcgccacagtatgtcagctacaaccagagctcctacacgcagtgggacctgcagcctgacactgactacgagatccacttgtttaaggagaggatgttccggcaccaaatggctgtgaagaccaatggcacagtgaaggataaggaggacacccaggtggactctgaggcccgaccgatgaaagatgagaccttcggcgagtacagtgacaacgaggagaaggcctttggcagcagccagccatcgctcaacggggacatcaagcccctgggcagtgacgacagcctggccgattatgggggcagcgtggatgttcagttcaacgaggatggttcgttcattggccagtacagtggcaagaaggagaaggaggcggcagggggcaatgacagctcaggggccacttcccccatcaaccctgccgtggccctagaatagtggagtccaggacaggagatgctgtgcccctggccttgggatccaggcccctccctctccagcaggcccatgggaggctggagttggggcagaggagaacttgctgcctcggatccccttcctaccacccggtccccactttattgccaaaacccagctgcaccccttcctgggcacacgctgctctgccccagcttgggcagatctcccacatgccaggggcctttggg

SEQ ID NO: 10983 - DNA, 3888 bp, Homo sapiens
  source 1..3888: mol_type = unassigned DNA
cgccgggaaagatggtcgtggcgctgcggtacgtgtggcctctcctcctctgcagcccctgcctgcttatccagatccccgaggaatatgaaggacaccatgtgatggagccacctgtcatcacggaacagtctccacggcgcctggttgtcttccccacagatgacatcagcctcaagtgtgaggccagtggcaagcccgaagtgcagttccgctggacgagggatggtgtccacttcaaacccaaggaagagctgggtgtgaccgtgtaccagtcgccccactctggctccttcaccatcacgggcaacaacagcaactttgctcagaggttccagggcatctaccgctgctttgccagcaataagctgggcaccgccatgtcccatgagatccggctcatggccgagggtgcccccaagtggccaaaggagacagtgaagcccgtggaggtggaggaaggggagtcagtggttctgccttgcaaccctcccccaagtgcagagcctctccggatctactggatgaacagcaagatcttgcacatcaagcaggacgagcgggtgacgatgggccagaacggcaacctctactttgccaatgtgctcacctccgacaaccactcagactacatctgccacgcccacttcccaggcaccaggaccatcattcagaaggaacccattgacctccgggtcaaggccaccaacagcatgattgacaggaagccgcgcctgctcttccccaccaactccagcagccacctggtggccttgcaggggcagccattggtcctggagtgcatcgccgagggctttcccacgcccaccatcaaatggctgcgccccagtggccccatgccagccgaccgtgtcacctaccagaaccacaacaagaccctgcagctgctgaaagtgggcgaggaggatgatggcgagtaccgctgcctggccgagaactcactgggcagtgcccggcatgcgtactatgtcaccgtggaggctgccccgtactggctgcacaagccccagagccatctatatgggccaggagagactgcccgcctggactgccaagtccagggcaggccccaaccagaggtcacctggagaatcaacgggatccctgtggaggagctggccaaagaccagaagtaccggattcagcgtggcgccctgatcctgagcaacgtgcagcccagtgacacaatggtgacccaatgtgaggcccgcaaccggcacgggctcttgctggccaatgcctacatctacgttgtccagctgccagccaagatcctgactgcggacaatcagacgtacatggctgtccagggcagcactgcctaccttctgtgcaaggccttcggagcgcctgtgcccagtgttcagtggctggacgaggatgggacaacagtgcttcaggacgaacgcttcttcccctatgccaatgggaccctgggcattcgagacctccaggccaatgacaccggacgctacttctgcctggctgccaatgaccaaaacaatgttaccatcatggctaacctgaaggttaaagatgcaactcagatcactcaggggccccgcagcacaatcgagaagaaaggttccagggtgaccttcacgtgccaggcctcctttgacccctccttgcagcccagcatcacctggcgtggggacggtcgagacctccaggagcttggggacagtgacaagtacttcatagaggatgggcgcctggtcatccacagcctggactacagcgaccagggcaactacagctgcgtggccagtaccgaactggatgtggtggagagtagggcacagctcttggtggtggggagccctgggccggtgccacggctggtgctgtccgacctgcacctgctgacgcagagccaggtgcgcgtgtcctggagtcctgcagaagaccacaatgcccccattgagaaatatgacattgaatttgaggacaaggaaatggcgcctgaaaaatggtacagtctgggcaaggttccagggaaccagacctctaccaccctcaagctgtcgccctatgtccactacacctttagggttactgccataaacaaatatggccccggggagcccagcccggtctctgagactgtggtcacacctgaggcagccccagagaagaaccctgtggatgtgaagggggaaggaaatgagaccaccaatatggtcatcacgtggaagccgctccggtggatggactggaacgccccccaggttcagtaccgcgtgcagtggcgccctcaggggacacgagggccctggcaggagcagattgtcagcgaccccttcctggtggtgtccaacacgtccaccttcgtgccctatgagatcaaagtccaggccgtcaacagccagggcaagggaccagagccccaggtcactatcggctactctggagaggactacccccaggcaatccctgagctggaaggcattgaaatcctcaactcaagtgccgtgctggtcaagtggcggccggtggacctggcccaggtcaagggccacctccgcggatacaatgtgacgtactggagggagggcagtcagaggaagcacagcaagagacatatccacaaagaccatgtggtggtgcccgccaacaccaccagtgtcatcctcagtggcttgcggccctatagctcctaccacctggaggtgcaggcctttaacgggcgaggatcggggcccgccagcgagttcaccttcagcaccccagagggagtgcctggccaccccgaggcgttgcacctggagtgccagtcgaacaccagcctgctgctgcgctggcagcccccactcagccacaacggcgtgctcaccggctacgtgctctcctaccaccccctggatgaggggggcaaggggcaactgtccttcaaccttcgggaccccgaacttcggacacacaacctgaccgatctcagcccccacctgcggtaccgcttccagcttcaggccaccaccaaagagggccctggtgaagccatcgtacgggaaggaggcactatggccttgtctgggatctcagattttggcaacatctcagccacagcgggtgaaaactacagtgtcgtctcctgggtccccaaggagggccagtgcaacttcaggttccatatcttgttcaaagccttgggagaagagaagggtggggcttccctttcgccacagtatgtcagctacaaccagagctcctacacgcagtgggacctgcagcctgacactgactacgagatccacttgtttaaggagaggatgttccggcaccaaatggctgtgaagaccaatggcacaggccgcgtgaggctccctcctgctggcttcgccactgagggctggttcatcggctttgtgagtgccatcatcctcctgctcctcgtcctgctcatcctctgcttcatcaagcgcagcaagggcggcaaatactcagtgaaggataaggaggacacccaggtggactctgaggcccgaccgatgaaagatgagaccttcggcgagtacagtgacaacgaggagaaggcctttggcagcagccagccatcgctcaacggggacatcaagcccctgggcagtgacgacagcctggccgattatgggggcagcgtggatgttcagttcaacgaggatggttcgttcattggccagtacagtggcaagaaggagaaggaggcggcagggggcaatgacagctcaggggccacttcccccatcaaccctgccgtggccctagaatagtggagtccaggacaggagatgctgtgcccctggccttgggatccaggcccctccctctccagcaggcccatgggaggctggagttggggcagaggagaacttgctgcctcggatc

SEQ ID NO: 10984 - DNA, 608 bp, Homo sapiens
  source 1..608: mol_type = unassigned DNA
tcggctttgtgagtgccatcatcctcctgctcctcgtcctgctcatcctctgcttcatcaagcgcagcaagggcggcaaatactcaggtagcctctgagccccacgtgacgggggtggagccgagggcagagaggagcacctcgccccttccacccttctgcaaggcctcctggattccccgagctccccacaagatgacaggcgcatggtgggggcaggcagggggatcatcctcccaggccggggttggggcaacaggcaagtggtggctggaccgcagggggtgagcggtttctttcaaggcctcttgcctctgggcgctgttgagacagagtgctgggggtgcggggcgtagaggggcctggagccccgggtcaggctggggcgggagaagaagctgtccctctctgtgtctccagtgaaggataaggaggacacccaggtggactctgaggcccgaccgatgaaagatgagaccttcggcgagtacaggtccctggagagtgacaacgaggagaaggcctttggcagcagccagccatcgctcaacggggacatcaagcccctgggcagtgacgacagcctggccgattatgggggcagcgtg

SEQ ID NO: 10985 - DNA, 568 bp, Homo sapiens
  source 1..568: mol_type = unassigned DNA
atccgaattcgtcttctctgtgtgtaggggcttgggcctggcctcagggctggggtgagagcctatggctctatccaagtcactggtggtttccagacccccaggcaatccctgagctggaaggcattgaaatcctcaactcaagtgccgtgctggtcaagtggcggccggtggacctggcccaggtcaagggccacctccgcggatacaatgtgacgtactggagggagggcagtcagaggaagcacagcaagagacatatccacaaagaccatgtggtggtgcccgccaacaccaccagtgtcatcctcagtggcttgcggccctatagctcctaccacctggaggtgcaggcctttaacgggcgaggatcggggcccgccagcgagttcaccttcagcaccccagagggagtgcctggccaccccgaggcgttgcacctggagtgccagtcgaacaccagcctgctgctgcgctggcagcccccactcagccacaacggcgtgctcaccggctacgtgctctcctaccaccccctggatgaggggggcaaggggcaactgtcctt

SEQ ID NO: 10986 - DNA, 570 bp, Homo sapiens
  source 1..570: mol_type = unassigned DNA
ttgacccctccttgcagcccagcatcacctggcgtggggacggtcgagacctccaggagcttggggacagtgacaagtacttcatagaggatgggcgcctggtcatccacagcctggactacagcgaccagggcaactacagctgcgtggccagtaccgaactggatgtggtggagagtagggcacagctcttggtggtggaatatgacattgaatttgaggacaaggaaatggcgcctgaaaaatggtacagtctgggcaaggttccagggaaccagacctctaccaccctcaagctgtcgccctatgtccactacacctttagggttactgccataaacaaatatggccccggggagcccagcccggtctctgagactgtggtcacacctgaggcagccccagagaagaaccctgtggatgtgaagggggaaggaaatgagaccaccaatatggtcatcacgtggaagccgctccggtggatggactggaacgccccccaggttcagtaccgcgtgcagtggcgccctcaggggacacgagggccctggcaggagcagattgtcagcg

SEQ ID NO: 10987 - DNA, 561 bp, Homo sapiens
  source 1..561: mol_type = unassigned DNA
acttctgcctggctgccaatgaccaaaacaatgttaccatcatggctaacctgaaggttaaaggtcaggcaacccttgccacatggctggcagtgcctctgggagggagggtctgggcctctggaggacaacagagtgacttccccacgcacgcattaccctcagatgcaactcagatcactcaggggccccgcagcacaatcgagaagaaaggttccagggtgaccttcacgtgccaggcctcctttgacccctccttgcagcccagcatcacctggcgtggggacggtcgagacctccaggagcttggggacagtgacaagtacttcatagaggatgggcgcctggtcatccacagcctggactacagcgaccagggcaactacagctgcgtggccagtaccgaactggatgtggtggagagtagggcacagctcttggtggtggggagccctgggccggtgccacggctggtgctgtccgacctgcacctgctgacgcagagccaggtgcgcgtgtcctggagtcctgcagaagaccacaatgcccccattgagaaat

SEQ ID NO: 10988 - DNA, 551 bp, Homo sapiens
  source 1..551: mol_type = unassigned DNA
cgtaaaagttgggtggctgtgaccagaggcgcatctgaggcagagggcagtgtctgaaggcagagagagacacagcctggcgggggcctcagctgggagcagggaagcaagatttgcagggctcttgggggcccgaggaagccgtgcagagggtccctggctcctggcccagctgtggtcccaagtcctgccctgtctcctgaggctgttcctcccctagagctgccagccaagatcctgactgcggacaatcagacgtacatggctgtccagggcagcactgcctaccttctgtgcaaggccttcggagcgcctgtgcccagtgttcagtggctggacgaggatgggacaacagtgcttcaggacgaacgcttcttcccctatgccaatgggaccctgggcattcgagacctccaggccaatgacaccggacgctacttctgcctggctgccaatgaccaaaacaatgttaccatcatggctaacctgaaggttaaagatgcaactcagatcactcaggggccccgcagcacaatcgagaagaaaggttc

SEQ ID NO: 10989 - DNA, 655 bp, Homo sapiens
  source 1..655: mol_type = unassigned DNA
aagagcccgggcttacccagatgttagtcactaacgtccttccgttctctcgtctctcttcccccacccttcccttcccttctcccctctcccagtgcccccactcccaactcccgccccaagccgcccaccagcccccttcccctccggccggagcctgaaccgagcccggctggctgtgctgcgcggtgccgccgggaaagatggtcgtggcgctgcggtacgtgtggcctctcctcctctgcagcccctgcctgcttatccagatccccgaggaatatgaaggacaccatgtgatggagccacctgtcatcacggaacagtctccacggcgcctggttgtcttccccacagatgacatcagcctcaagtgtgaggccagtggcaagcccgaagtgcagttccgctggacgagggatggtgtccacttcaaacccaaggaagagctgggtgtgaccgtgtaccagtcgccccactctggctccttcaccatcacgggcaacaacagcaactttgctcagaggttccagggcatctaccgctgctttgccagcaataagctgggcaccgccatgtcccatgagatccggctcatggccgagggtgcccccaagtggccaaaggagacagtgaagcccgtggaggtggaggaagg

SEQ ID NO: 10990 - DNA, 576 bp, Homo sapiens
  source 1..576: mol_type = unassigned DNA
ttacccagatgttagtcactaacgtccttccgttctctcgtctctcttcccccacccttcccttcccttctcccctctcccagtgcccccactcccaactcccgccccaagccgcccaccagcccccttcccctccggccggagcctgaaccgagcccggctggctgtgctgcgcggtgccgccgggaaagatggtcgtggcgctgcggtacgtgtggcctctcctcctctgcagcccctgcctgcttatccagatccccgaggaattgatggagccacctgtcatcacggaacagtctccacggcgcctggttgtcttccccacagatgacatcagcctcaagtgtgaggccagtggcaagcccgaagtgcagttccgctggacgagggatggtgtccacttcaaacccaaggaagagctgggtgtgaccgtgtaccagtcgccccactctggctccttcaccatcacgggcaacaacagcaactttgctcagaggttccagggcatctaccgctgctttgccagcaataagctgggcaccgccatgtcccatgagatccggctcatggccgagg

SEQ ID NO: 10991 - DNA, 593 bp, Homo sapiens
  source 1..593: mol_type = unassigned DNA
agctagctcagggacttcccagggcccccaccaggctccctgtctgtcctgcaggccagagccatgcacctcacctgaggccatgggaccctctggacacagacgacgctgcttggtcccagcctccccagagcaacacgtggaggtggataagtgcccccactcccaactcccgccccaagccgcccaccagcccccttcccctccggccggagcctgaaccgagcccggctggctgtgctgcgcggtgccgccgggaaagatggtcgtggcgctgcggtacgtgtggcctctcctcctctgcagcccctgcctgcttatccagatccccgaggaatatgaaggacaccatgtgatggagccacctgtcatcacggaacagtctccacggcgcctggttgtcttccccacagatgacatcagcctcaagtgtgaggccagtggcaagcccgaagtgcagttccgctggacgagggatggtgtccacttcaaacccaaggaagagctgggtgtgaccgtgtaccagtcgccccactctggctccttcaccatcacgggcaacaacagcaactttgctcagaggttccagggca

SEQ ID NO: 10992 - DNA, 569 bp, Homo sapiens
  source 1..569: mol_type = unassigned DNA
acagccgctgctgccgcagcatcggcatcgcagacgcgctcgggcggcgggtccgaggccggcgtgcgcggaggctgggcgggcagcccgagcggtggccgcagcgcaggaactccaggcagaacctgagaactgacaggcaggtgtgcagggcacatgtgcagggcaccgctggaggttcccttctcaagtgcccccactcccaactcccgccccaagccgcccaccagcccccttcccctccggccggagcctgaaccgagcccggctggctgtgctgcgcggtgccgccgggaaagatggtcgtggcgctgcggtacgtgtggcctctcctcctctgcagcccctgcctgcttatccagatccccgaggaattgatggagccacctgtcatcacggaacagtctccacggcgcctggttgtcttccccacagatgacatcagcctcaagtgtgaggccagtggcaagcccgaagtgcagttccgctggacgagggatggtgtccacttcaaacccaaggaagagctgggtgtgaccgtgtaccagtcgccccactctggctccttc

SEQ ID NO: 10993 - DNA, 637 bp, Homo sapiens
  source 1..637: mol_type = unassigned DNA
gagtgcaacccctcccagagaagacacaccacagaaataccagctcacatacagctcactccctgcttgcagatccacaaccacacacatgcccacggacacctgcacatgcagacacatacggggatgtgcatgccatgcacaggggagctgatggggcaacaagttggtgctgggaaggcagctggcaggaaaggtgcagacagagagtagagagggaataaaaggcaacctagaggcccagccagggctatctcttccagatttctccctccaagtgcccccactcccaactcccgccccaagccgcccaccagcccccttcccctccggccggagcctgaaccgagcccggctggctgtgctgcgcggtgccgccgggaaagatggtcgtggcgctgcggtacgtgtggcctctcctcctctgcagcccctgcctgcttatccagatccccgaggaatatgaaggacaccatgtgatggagccacctgtcatcacggaacagtctccacggcgcctggttgtcttccccacagatgacatcagcctcaagtgtgaggccagtggcaagcccgaagtgcagttccgctggacgagggatggtgtccacttcaaacccaaggaagagctgggtgt

SEQ ID NO: 10994 - DNA, 556 bp, Homo sapiens
  source 1..556: mol_type = unassigned DNA
agacgcgctcgggcggcgggtccgaggccggcgtgcgcggaggctgggcgggcagcccgagcggtggccgcagcgcagtgcccccactcccaactcccgccccaagccgcccaccagcccccttcccctccggccggagcctgaaccgagcccggctggctgtgctgcgcggtgccgccgggaaagatggtcgtggcgctgcggtacgtgtggcctctcctcctctgcagcccctgcctgcttatccagatccccgaggaatatgaaggacaccatggtaagttggggaggggtgagagtgtttcccagaaggccaaggagaagggtaaggaggccctcagctgagcctgcacccccgccctcctgagtgccggggccctgctcggctctccctgagcaccatgtgcttctctcacctgtgtggggctggctttgttctgtctctgccccagcctgggtactctgtcaccctcactgttcctctctgccattctctctggtcccttctcccctgtctggggtttgtccttcttggtttctgtgtcttggcttttgt

SEQ ID NO: 10995 - DNA, 740 bp, Homo sapiens
  source 1..740: mol_type = unassigned DNA
gccgcagcatcggcatcgcagacgcgctcgggcggcgggtccgaggccggcgtgcgcggaggctgggcgggcagcccgagcggtggccgcagcgcaggacacttgaaatatacagaaaagaacaaaagaaattaagaatcgctagtgatctgatcaccaagagggaaacacgttcagcacgccccagcctccctggtttgctacaccgcgctcctaaaaggctcctccccaagttcccagctgccagctccctgctgagcatcaggaggacaatcagcgcttcaaggtggcggggtcccctgccctgcagccagtgaagagcttccctacccaggcgctcaggatcccagcgatgggcagtcgtgtactgggcagctgctcatggccagtgctcctttgggccgggctctgggctgcccatggaagagccagtgacaaactggaccagcattgtccctgtcttcgtggggtgtcacttgttttcttttttcttgatgattatctgaagggaaaagggaggcaaagagtgaggaagggcctggcctgagggctcctacagtgagcagggtgcccagattgtgcccccaatcggcctctcccaggtccgagccctttccaccactggaactacagctggcgccttccttggcatgcacctggccaggactggcaggtgagggtcgaggagacaggcctgtgtgccctaccttgatcaccaagttccctttcaaagctcgaaa

SEQ ID NO: 10996 - DNA, 5004 bp, Homo sapiens
  source 1..5004: mol_type = unassigned DNA
tgcccccactcccaactcccgccccaagccgcccaccagcccccttcccctccggccggagcctgaaccgagcccggctggctgtgctgcgcggtgccgccgggaaagatggtcgtggcgctgcggtacgtgtggcctctcctcctctgcagcccctgcctgcttatccagatccccgaggaattgatggagccacctgtcatcacggaacagtctccacggcgcctggttgtcttccccacagatgacatcagcctcaagtgtgaggccagtggcaagcccgaagtgcagttccgctggacgagggatggtgtccacttcaaacccaaggaagagctgggtgtgaccgtgtaccagtcgccccactctggctccttcaccatcacgggcaacaacagcaactttgctcagaggttccagggcatctaccgctgctttgccagcaataagctgggcaccgccatgtcccatgagatccggctcatggccgagggtgcccccaagtggccaaaggagacagtgaagcccgtggaggtggaggaaggggagtcagtggttctgccttgcaaccctcccccaagtgcagagcctctccggatctactggatgaacagcaagatcttgcacatcaagcaggacgagcgggtgacgatgggccagaacggcaacctctactttgccaatgtgctcacctccgacaaccactcagactacatctgccacgcccacttcccaggcaccaggaccatcattcagaaggaacccattgacctccgggtcaaggccaccaacagcatgattgacaggaagccgcgcctgctcttccccaccaactccagcagccacctggtggccttgcaggggcagccattggtcctggagtgcatcgccgagggctttcccacgcccaccatcaaatggctgcgccccagtggccccatgccagccgaccgtgtcacctaccagaaccacaacaagaccctgcagctgctgaaagtgggcgaggaggatgatggcgagtaccgctgcctggccgagaactcactgggcagtgcccggcatgcgtactatgtcaccgtggaggctgccccgtactggctgcacaagccccagagccatctatatgggccaggagagactgcccgcctggactgccaagtccagggcaggccccaaccagaggtcacctggagaatcaacgggatccctgtggaggagctggccaaagaccagaagtaccggattcagcgtggcgccctgatcctgagcaacgtgcagcccagtgacacaatggtgacccaatgtgaggcccgcaaccggcacgggctcttgctggccaatgcctacatctacgttgtccagctgccagccaagatcctgactgcggacaatcagacgtacatggctgtccagggcagcactgcctaccttctgtgcaaggccttcggagcgcctgtgcccagtgttcagtggctggacgaggatgggacaacagtgcttcaggacgaacgcttcttcccctatgccaatgggaccctgggcattcgagacctccaggccaatgacaccggacgctacttctgcctggctgccaatgaccaaaacaatgttaccatcatggctaacctgaaggttaaagatgcaactcagatcactcaggggccccgcagcacaatcgagaagaaaggttccagggtgaccttcacgtgccaggcctcctttgacccctccttgcagcccagcatcacctggcgtggggacggtcgagacctccaggagcttggggacagtgacaagtacttcatagaggatgggcgcctggtcatccacagcctggactacagcgaccagggcaactacagctgcgtggccagtaccgaactggatgtggtggagagtagggcacagctcttggtggtggggagccctgggccggtgccacggctggtgctgtccgacctgcacctgctgacgcagagccaggtgcgcgtgtcctggagtcctgcagaagaccacaatgcccccattgagaaatatgacattgaatttgaggacaaggaaatggcgcctgaaaaatggtacagtctgggcaaggttccagggaaccagacctctaccaccctcaagctgtcgccctatgtccactacacctttagggttactgccataaacaaatatggccccggggagcccagcccggtctctgagactgtggtcacacctgaggcagccccagagaagaaccctgtggatgtgaagggggaaggaaatgagaccaccaatatggtcatcacgtggaagccgctccggtggatggactggaacgccccccaggttcagtaccgcgtgcagtggcgccctcaggggacacgagggccctggcaggagcagattgtcagcgaccccttcctggtggtgtccaacacgtccaccttcgtgccctatgagatcaaagtccaggccgtcaacagccagggcaagggaccagagccccaggtcactatcggctactctggagaggactacccccaggcaatccctgagctggaaggcattgaaatcctcaactcaagtgccgtgctggtcaagtggcggccggtggacctggcccaggtcaagggccacctccgcggatacaatgtgacgtactggagggagggcagtcagaggaagcacagcaagagacatatccacaaagaccatgtggtggtgcccgccaacaccaccagtgtcatcctcagtggcttgcggccctatagctcctaccacctggaggtgcaggcctttaacgggcgaggatcggggcccgccagcgagttcaccttcagcaccccagagggagtgcctggccaccccgaggcgttgcacctggagtgccagtcgaacaccagcctgctgctgcgctggcagcccccactcagccacaacggcgtgctcaccggctacgtgctctcctaccaccccctggatgaggggggcaaggggcaactgtccttcaaccttcgggaccccgaacttcggacacacaacctgaccgatctcagcccccacctgcggtaccgcttccagcttcaggccaccaccaaagagggccctggtgaagccatcgtacgggaaggaggcactatggccttgtctgggatctcagattttggcaacatctcagccacagcgggtgaaaactacagtgtcgtctcctgggtccccaaggagggccagtgcaacttcaggttccatatcttgttcaaagccttgggagaagagaagggtggggcttccctttcgccacagtatgtcagctacaaccagagctcctacacgcagtgggacctgcagcctgacactgactacgagatccacttgtttaaggagaggatgttccggcaccaaatggctgtgaagaccaatggcacaggccgcgtgaggctccctcctgctggcttcgccactgagggctggttcatcggctttgtgagtgccatcatcctcctgctcctcgtcctgctcatcctctgcttcatcaagcgcagcaagggcggcaaatactcagtgaaggataaggaggacacccaggtggactctgaggcccgaccgatgaaagatgagaccttcggcgagtacagtgacaacgaggagaaggcctttggcagcagccagccatcgctcaacggggacatcaagcccctgggcagtgacgacagcctggccgattatgggggcagcgtggatgttcagttcaacgaggatggttcgttcattggccagtacagtggcaagaaggagaaggaggcggcagggggcaatgacagctcaggggccacttcccccatcaaccctgccgtggccctagaatagtggagtccaggacaggagatgctgtgcccctggccttgggatccaggcccctccctctccagcaggcccatgggaggctggagttggggcagaggagaacttgctgcctcggatccccttcctaccacccggtccccactttattgccaaaacccagctgcaccccttcctgggcacacgctgctctgccccagcttgggcagatctcccacatgccaggggcctttgggtgctgttttgccagcccatttgggcagagaggctgtggtttgggggagaagaagtaggggtggcccgaaagggtctccgaaatgctgtctttcttgctccctgactgggggcagacatggtggggtctcctcaggaccagggttggcaccttccccctcccccagccactccccagccagcctggctgggactgggaacagaactcggtgtccccaccatctgctgtcttttctttgccatctctgctccaaccgggatgggagccgggcaaactggccgcgggggcaggggaggccatctggagagcccagagtccccccactcccagcatcgcactctggcagcaccgcctcttcccgccgcccagcccaccccatggccggctttcaggagctccatacacacgctgccttcggtacccaccacacaacatccaagtggcctccgtcactacctggctgcggggcgggcacacctcctcccactgcccactggccggcctcttccagccgcccccaccccccaggaccccttagcagccctgccctccctatcgtctgaacagttgtcttcctcagcctcctcccgcccccaccttgggaatgtaaatacaccgtgactttgaaagtttgtacccctgtccttccctttacgccactagtgtgtaggcagatgtctgagtccctaggtggtttctaggattgatagcaattagctttgatgaacccatcccaggaaaaataaaaacagacaaaaaaaaaggaaagattggttctcccagcactgctcagcagccacagcctccctgtatgcctgtgcttggtctactgataagccctctacaaaaaaacaaaagtatatatatatatgtacataatatcagaattataacaggcaaataaaacctgaaaatcaaga

SEQ ID NO: 10997 - DNA, 462 bp, Homo sapiens
  source 1..462: mol_type = unassigned DNA
ggctcagtattcacagggaaagctgtgaggggcaacttcctgggagctaaggctactaaaaggtagaagccacagtactcatctgcagagggcttacagcctcagcaaggaccttgtggctttgtaacaacaatcagccataacaagtttacttgtggaaaagaaaaggtgtagcactttcagaagaggctatcaaagaaaagagatgaacttggaagcaagagatacgcagatgagaaaaccaaggcacagaggtgttatgtgatcacacagctagtaagtgctaaacatgagatttgcacctggcagattggtgccagaagtcgtctcttaactgctattctgtactgcctctgtcttttgaaaaagacaatgagaaccctggaaaagtgacaaggaagataaagacaactatcaaaggaatgggaaaacagcataacatttaaaagaaaagatttttgt

SEQ ID NO: 10998 - DNA, 1527 bp, Homo sapiens
  source 1..1527: mol_type = unassigned DNA
cgccccccggacgtggctggttagcgtcccgccctcctcccgcggagtcagtgggtgagggtcgggcttgaagccatagctgcgggaccgtactcgtctcccccgacgcagaccatggagagcgcgctggcggtgccccggctgcccccgcatgatccagggacgccggtgctgtcggtggtggacatgcacacgggcggcgagcccttgcgtatcgtgctggcggggtgtccggaggtgtctgggcccaccctgctggccaagcggcgctacatgcgccagcaccttgaccacgtgcggcgacggctcatgttcgagccccgagggcaccgggacatgtacggggcggtcctagtcccgagcgagctgccggacgcgcatctgggcgtcctgttcctgcacaacgagggctacagctccatgtgcggccacgcagtgctggcgctgggccgcttcgctttggacttcgggcttgtgccggcgccccctgcgggcacccgcgaggcccgcgtcaatatccactgcccctgcgggctggtgaccgccttcgtggcatgcgaggacggccgcagccacggaccggtgcgcttccacagcgtcccggccttcgtgctggccacagatctcatggtggatgttcctggacatggaaaggtgatggtggacattgcatatggcggtgcattttatgcatttgttactgctgaaaagttaggactagacatttgttctgcaaagaccagggaccttgtggatgcagcgagtgcagtgacagaggcagtgaaagctcagtttaaaattaatcatcctgatagtgaagaccttgcctttttatatggaactatattaacagatggaaaagatgcttataccaaggaaccaaccaccaacatttgtgtttttgcagatgaacaggttgacagaagtcccactggctcaggagtgacagcccgaattgccttacagtatcacaaagggcttctggaactgaaccagatgagagccttcaaaagcagtgcaactggctcagtattcacagggaaagctgtgagggaagcgaaatgtggtgattttaaagctgttatagtggaagtatcaggacaagcccattacacgggtacagcaagctttataatagaagatgacgacccattgagggatggatttcttctcaagtgacttcttccatgattttaagggctttctttttaaagtaatcattatccttaaggactgttttctctaaattatatgaaaacaaataaattatacatataaactaactctcattctttgtaaaatactaccctgtggctaaatataaagtcattatacctcgtatttgcaactgtatttgtataaatatcacttatgtctagcatacaaaatgccagaaattcagagtctttttctagtgattaacgtatcaggtaaaattaaaacagtagttacttttaaaatattgctctatagtaattactattaatatcatattttgtattaaaggctcttcgaataatatgtgga

SEQ ID NO: 10999 - DNA, 476 bp, Homo sapiens
  source 1..476: mol_type = unassigned DNA
gtgtttttgcagatgaacaggttgacagaagtcccactggctcaggagtgacagcccgaattgccttacagtatcacaaagggcttctggaactgaaccagatgagagccttcaaaagcagtgcaactggctcagtattcacagggaaagctgtgagggagctgttatgagaagaatctgggattgcaatgtccccccaaatagagagggagccgagagaccaaagaatgactcagacaagtccaggaagcgaaatgtggtgattttaaagctgttatagtggaagtatcaggacaagcccattacacgggtacagcaagctttataatagaagatgacgacccattgagggatggatttcttctcaagtgacttcttccatgattttaagggctttctttttaaagtaatcattatccttaaggactgttttctctaaattatatgaaaacaaataaattatacatataaactaa

SEQ ID NO: 11000 - DNA, 729 bp, Homo sapiens
  source 1..729: mol_type = unassigned DNA
gtttccttaaggatctctacatcatatagtgatctgaaacatgtgaaaccatttatgttgtatgcaaaaatttggaacatactgtcttcaaaatctgaaatggaacataaaaataacaacatacatttattggatacttcactgtgcatcagtttccaagctaagcacttgatacatgccatctcatttaatcctcacaagaatcctacaaggtcagtactgtgctgttattatcgtttttcaatagatgataaaacggagaattggagaagttaggtaatttaccagaggttagttagtgagtagcagatccaggtcatgaaggtgggtctctgaacagaccacatgctgttaagcattatattatattgctgtcagacaaagcaaaaggtcaatgaggctttatattataggagctgttatgagaagaatctgggattgcaatgtccccccaaatagagagggagccgagagaccaaagaatgactcagacaagtccaggaagcgaaatgtggtgattttaaagctgttatagtggaagtatcaggacaagcccattacacgggtacagcaagctttataatagaagatgacgacccattgagggatggatttcttctcaagtgacttcttccatgattttaagggctttctttttaaagtaatcattatccttaaggactgttttctctaaattatatgaaaacaaataaattatacatataaact

SEQ ID NO: 11001 - DNA, 612 bp, Homo sapiens
  source 1..612: mol_type = unassigned DNA
aaattttaaatgtgctaacagctaagtaatgaatcttatctcagtagtaaatgaaatctactacagaatgatctacattcagtaaattattctactcataaagagtcctttaacatagcaaacaatctatcctaatatagctgtttttaagatttggtgtttctgaatattagagtttccttaaggatctctacatcatatagtgatctgaaacatgtgaaaccatttatgttgtatgcaaaaatttggaacatactgtcttcaaaatctgaaatggaacataaaaataacaacatacatttattggatacttcactgtgcatcagtttccaagctaagcacttgatacatgccatctcatttaatcctcacaagaatcctacaaggaagcgaaatgtggtgattttaaagctgttatagtggaagtatcaggacaagcccattacacgggtacagcaagctttataatagaagatgacgacccattgagggatggatttcttctcaagtgacttcttccatgattttaagggctttctttttaaagtaatcattatccttaaggactgttttctctaaattatatgaaaacaaataaattatacatataaa

SEQ ID NO: 11002 - DNA, 689 bp, Homo sapiens
  source 1..689: mol_type = unassigned DNA
tttttttgttttattttataatagtgttttatttgatataataggatgtgaaagccctgaaaagttgtggaacatcaaatttttgtaatggaataaaattttaaatgtgctaacagctaagtaatgaatcttatctcagtagtaaatgaaatctactacagaatgatctacattcagtaaattattctactcataaagagtcctttaacatagcaaacaatctatcctaatatagctgtttttaagatttggtgtttctgaatattagagtttccttaaggatctctacatcatatagtgatctgaaacatgtgaaaccatttatgttgtatgcaaaaatttggaacatactgtcttcaaaatctgaaatggaacataaaaataacaacatacatttattggatacttcactgtgcatcagtttccaagctaagcacttgatacatgccatctcatttaatcctcacaagaatcctacaaggagctgttatgagaagaatctgggattgcaatgtccccccaaatagagagggagccgagagaccaaagaatgactcagacaagtccaggaagcgaaatgtggtgattttaaagctgttatagtggaagtatcaggacaagcccattacacgggtacagcaagctttataatagaagatgacgacccattgagggatggatttcttctc

SEQ ID NO: 11003 - DNA, 700 bp, Homo sapiens
  source 1..700: mol_type = unassigned DNA
agaaaggtaaatcactgccaacgtgtgtcagcagccttgcgtatttggtgcgtgtaatttcgattttccctgactcccatccgcctgtggttttgggagacccttgaggagcgaggaattgcgtgttaccctgactcagcgcctccctctgcactggtgaggcattcctagagatttcaccggtggataaagcaagatctcatggtggatgttcctggacatggaaaggtgatggtggacattgcatatggcggtgcattttatgcatttgttactgctgaaaagttaggactagacatttgttctgcaaagaccagggaccttgtggatgcagcgagtgcagtgacagaggcagtgaaagctcagtttaaaattaatcatcctgatagtgaagaccttgcctttttatatggaactatattaacagatggaaaagatgcttataccaaggaaccaaccaccaacatttgtgtttttgcagatgaacaggttgacagaagtcccactggctcaggagtgacagcccgaattgccttacagtatcacaaagggcttctggaactgaaccagatgagagccttcaaaagcagtgcaactggctcagtattcacagggaaagctgtgagggagctgttatgagaagaatctgggattgcaatgtccccccaaatagagagggagccgagagaccaaagaatga

SEQ ID NO: 11004 - DNA, 758 bp, Homo sapiens
  source 1..758: mol_type = unassigned DNA
gcggccacgcagtgctggcgctgggccgcttcgctttggacttcgggcttgtgccggcgccccctgcgggcacccgcgaggcccgcgtcaatatccactgcccctgcgggctggtgaccgccttcgtggcatgcgaggacggccgcagccacggaccggtgcgcttccacagcgtcccggccttcgtgctggccacaggtaatgggcgggacctttccagcccagggcagagctgcaaccgggacgcgactaactacattaacggtttttctgggctggaactctggcaactaacctactccgcgaaaccttgcaattaatagaaagatctcatggtggatgttcctggacatggaaaggtgatggtggacattgcatatggcggtgcattttatgcatttgttactgctgaaaagttaggactagacatttgttctgcaaagaccagggaccttgtggatgcagcgagtgcagtgacagaggcagtgaaagctcagtttaaaattaatcatcctgatagtgaagaccttgcctttttatatggaactatattaacagatggaaaagatgcttataccaaggaaccaaccaccaacatttgtgtttttgcagatgaacaggttgacagaagtcccactggctcaggagtgacagcccgaattgccttacagtatcacaaagggcttctggaactgaaccagatgagagccttcaaaagcagtgcaactggctcagtattcacagggaaagctgtgagg

SEQ ID NO: 11005 - DNA, 1355 bp, Homo sapiens
  source 1..1355: mol_type = unassigned DNA
agcgtcccgccctcctcccgcggagtcagtgggtgagggtcgggcttgaagccatagctgcgggaccgtactcgtctcccccgacgcagaccatggagagcgcgctggcggtgccccggctgcccccgcatgatccagggacgccggtgctgtcggtggtggacatgcacacgggcggcgagcccttgcgtatcgtgctggcggggtgtccggaggtgtctgggcccaccctgctggccaagcggcgctacatgcgccagcaccttgaccacgtgcggcgacggctcatgttcgagccccgagggcaccgggacatgtacggggcggtcctagtcccgagcgagctgccggacgcgcatctgggcgtcctgttcctgcacaacgagggctacagctccatgtgcggccacgcagtgctggcgctgggccgcttcgctttggacttcgggcttgtgccggcgccccctgcgggcacccgcgaggcccgcgtcaatatccactgcccctgcgggctggtgaccgccttcgtggcatgcgaggacggccgcagccacggaccggtgcgcttccacagcgtcccggccttcgtgctggccacaggtaatgggcgggacctttccagcccagggcagagctgcaaccgggacgcgactaactacattaacggtttttctgggctggaactctggcaactaacctactccgcgaaaccttgcaattaatagaaagatctcatggtggatgttcctggacatggaaaggtgatggtggacattgcatatggcggtgcattttatgcatttgttactgctgaaaagttaggactagacatttgttctgcaaagaccagggaccttgtggatgcagcgagtgcagtgacagaggcagtgaaagctcaggtcagtaatactctgccttcataaccaattcccttctctgtggcatggaggaaatatacattattatgtctataaagaaaattaaatgatgtttaaattattaatagtactaagaatagggtacttattaaaatcttaggctctagagcaagcttgtcccacccgtggcctgtgagccacatgcagcccaggatggctttgaatgtggcccaacacaaattttgtaaactttcttaaaacattatgagtttttttgcaatttttttttagctcatcagctctcgttagtgttagtgtatcttatgtgtggcccaagacaattcttctcccagtgtggcccagagaagccaaaagattggacattcctgctctagagcaaaactatctatgagttctagctttaccactggtaacgtatataaccttgggcaagttacgtaacctccatatgcctca

SEQ ID NO: 11006 - DNA, 3296 bp, Homo sapiens
  source 1..3296: mol_type = unassigned DNA
gaatggcgggagcaggcacggaaccggcttttcctccttcctgcagcgtgattggcccgcggctcagggaggcgaccaatgagtgctctcgcggagagcgacggggcaggccaatatggcttcctgcacctggtgacgcttggcgaaactgaggtctcatggagaagccccggagtattgaggagaccccatcttcagaaccaatggaggaagaggaagatgacgacttggagctgtttggtggctatgatagtttccggagttataacagcagtgtgggcagtgagagcagctcctatctggaggagtcaagtgaagcagaaaatgaggatcgggaagcaggggaactgccgacctccccgctgcatttgctcagccctgggactcctcgctccttggatggcagtggttctgagccagctgtctgtgagatgtgtggtatcgtgggtacaagggaagccttcttctccaagaccaagaggttctgcagcgtctcctgctccaggagctactcctccaactccaagaaagccagtatcttggctaggttacagggaaaaccaccgaccaaaaaagccaaagtcctgcacaaggctgcctggtctgccaaaattggagccttcctccactctcaagggacaggacagctggcagatgggacaccaacaggacaagacgctctggtcttgggcttcgactgggggaagttcctgaaggatcacagttacaaggctgctcccgtcagctgtttcaagcacgtcccactctatgaccagtgggaggatgtgatgaaagggatgaaggtggaggtgctcaacagtgatgctgtgctccccagccgggtgtactggatcgcctctgtcatccagacagcagggtatcgggtgctgcttcggtatgaaggctttgaaaatgacgccagccatgacttctggtgcaacctgggaacagtggatgtccaccccattggctggtgtgccatcaacagcaagatcctagtgcccccacggaccatccatgccaagttcaccgactggaagggctacctcatgaaacggctggtgggctccaggacgcttcccgtggatttccacatcaagatggtggagagcatgaagtacccctttaggcagggcatgcggctggaagtggtggacaagtcccaggtgtcacgcactcgcatggctgtggtggacacagtaatcgggggtcgcctacggctcctctacgaggatggtgacagtgacgacgacttctggtgccacatgtggagccccctgatccacccagtgggttggtcacgacgtgtgggccacggcatcaagatgtcagagaggcgaagtgacatggcccatcaccccaccttccggaagatctactgtgatgccgttccttacctcttcaagaaggtacgagcagtctacacagaaggcggttggtttgaggaagggatgaagctggaggccattgaccccctgaatctgggcaacatctgcgtggcaactgtctgtaaggttctcctggatggatacctgatgatctgtgtggacggggggccctccacagatggcttggactggttctgctaccatgcctcttcccacgccatcttcccggccaccttctgtcagaagaatgacattgagctcacaccgccaaaaggttatgaggcacagactttcaactgggagaactacttggagaagaccaagtcgaaagccgctccatcgagactctttaacatggattgcccaaaccatggcttcaaggtgggcatgaagctggaggccgtggacctgatggagccccggctcatctgtgtggccacggtgaaacgagtggtgcatcggctcctcagcatccactttgacggctgggacagcgagtacgaccagtgggtggactgcgagtccccagacatctaccccgtcggctggtgtgagctcaccggctaccagctccagcctcctgtggccgcagaaccggccacaccgctgaaggccaaagaggccacaaagaagaaaaagaaacagtttgggaagaaaaggaaaagaatcccgcccactaagacgcgacccctcagacaggggtccaagaagcccctgctggaggacgaccctcagggtgccaggaagatctcgtcggagcctgttcctggcgagatcattgctgtgcgtgtgaaggaagagcatctagacgtggcctcgcccgacaaggcttcaagtccagagctgcctgtctccgtcgagaacatcaagcaggaaacagacgactgagccttcctgcctccagcctggcttctagctggaagccagcccagcgtttctctaccaccaccaccatgcctccacctgactttggcttggagactgatcctctctgtgtaaattctgcccggtgctgtgaaggctggacggtggaggacctgctggggtctcctgggacccgcctgttgcttctgccctcccctgtggaaaggtctatatgacgggccgcctgaggccccagaactcgtctgtgaaccaccttttccagccagagttcccaaagctggaacgctagctgcctgctcttccttaagatggcctccccccgacccgccacggccctcagttgccagggatggggccaccactgtcacactgtggaatacaagacagtgaactctgtctgcctgaacgagccatgtaaattaagttctagagcagctctctgagcaggataaggtcccctgacagtgagttgtgtggtgggggcagcctctgcctcaaaaattcaccaagcagaatgcctctcagcctcatgtgttggtcctctgctcctcctagctccccagggatgttggggacccagcttgtctcggcagctaagaagcagtgaccaggatgtggattttggcgacctgtgtggtggccttgagctgctttctgtgtttgtgaggactgactcccatttcctaaaggaaatgcccccggggaggacattgggaggaagatggcctgagtgtgcactttggctctgctacctgctcctgaagccccgctaaaaataattcatccaagattcctttgtagttaaagggtccagttctgactggagcctctagagagctgggcttgtatgttcttttggccttttgttcctacctaaatgaagaaaccatgcctggaggggccgtgaacacagaaccctcaagacaaggatgacagagctggaggacacatctagctgccattgcaacctcactgggctccccagactctgtgtgtgagaaattaaaccccctgcttgcttga

SEQ ID NO: 11007 - DNA, 2432 bp, Homo sapiens
  source 1..2432: mol_type = unassigned DNA
aatgagtgctctcgcggagagcgacggggcaggccaatatggcttcctgcacctggtgacgcttggcgaaactgaggtctcatggagaagccccggagtattgaggagaccccatcttcagaaccaatggaggaagaggaagatgacgacttggagctgtttggtggctatgatagtttccggagttataacagcagtgtgggcagtgagagcagctcctatctggaggagtcaagtgaagcagaaaatgaggatcgggaagcaggggaactgccgacctccccgctgcatttgctcagccctgggactcctcgctccttggatggcagtggttctgagccaggtggtcatatcgggtgagtcatgtgctaagttctcttcccagctgtctgtgagatgtgtggtatcgtgggtacaagggaagccttcttctccaagaccaagaggttctgcagcgtctcctgctccaggagctactcctccaactccaagaaagccagtatcttggctaggttacagggaaaaccaccgaccaaaaaagccaaagtcctgcacaaggctgcctggtctgccaaaattggagccttcctccactctcaagggacaggacagctggcagatgggacaccaacaggacaagacgctctggtcttgggcttcgactgggggaagttcctgaaggatcacagttacaaggctgctcccgtcagctgtttcaagcacgtcccactctatgaccagtgggaggatgtgatgaaagggatgaaggtggaggtgctcaacagtgatgctgtgctccccagccgggtgtactggatcgcctctgtcatccagacagcagggtatcgggtgctgcttcggtatgaaggctttgaaaatgacgccagccatgacttctggtgcaacctgggaacagtggatgtccaccccattggctggtgtgccatcaacagcaagatcctagtgcccccacggaccatccatgccaagttcaccgactggaagggctacctcatgaaacggctggtgggctccaggacgcttcccgtggatttccacatcaagatggtggagagcatgaagtacccctttaggcagggcatgcggctggaagtggtggacaagtcccaggtgtcacgcactcgcatggctgtggtggacacagtaatcgggggtcgcctacggctcctctacgaggatggtgacagtgacgacgacttctggtgccacatgtggagccccctgatccacccagtgggttggtcacgacgtgtgggccacggcatcaagatgtcagagaggcgaagtgacatggcccatcaccccaccttccggaagatctactgtgatgccgttccttacctcttcaagaaggtacgagcagtctacacagaaggcggttggtttgaggaagggatgaagctggaggccattgaccccctgaatctgggcaacatctgcgtggcaactgtctgtaaggttctcctggatggatacctgatgatctgtgtggacggggggccctccacagatggcttggactggttctgctaccatgcctcttcccacgccatcttcccggccaccttctgtcagaagaatgacattgagctcacaccgccaaaaggttatgaggcacagactttcaactgggagaactacttggagaagaccaagtcgaaagccgctccatcgagactctttaacatggattgcccaaaccatggcttcaaggtgggcatgaagctggaggccgtggacctgatggagccccggctcatctgtgtggccacggtgaaacgagtggtgcatcggctcctcagcatccactttgacggctgggacagcgagtacgaccagtgggtggactgcgagtccccagacatctaccccgtcggctggtgtgagctcaccggctaccagctccagcctcctgtggccgcaggtgtgggctctcgtggccctaagaggctctgactttctttcctcttcttttttccttcttcccccgcccctgtgcccatctccgttctttggcatgaggtggagatgtctcatggaccactttaagtagagagtgagccccgtcacccagcccctgctcctgacttctctgtctccctttccctctggcctgcagagctccttccttcatcttgcccactctgtcatatgttcgtgcccttgtgcacccaggtaaactacccaggtccctctgagcagccctggtaacaagggtgggaagaagggacagctgttctccggcccctcctccagccccgccctctcctcattgcccaggtttggcttcctgtcttggggtgtctcgtgtgggagggtggatggggtctcgggatgcgcctgtgccctgtgtcctcccagggaccctcttctcatctctttcacccttgtctttcaacaacagaaccggc

SEQ ID NO: 11008 - DNA, 751 bp, Homo sapiens
  source 1..751: mol_type = unassigned DNA
gcgacggggcaggccaatatggcttcctgcacctggtgacgcttggcgaaactgaggtctcatggagaagccccggagtattgagacggagtcttgctctgtcacctaggctggagtgcagtggcgcgatctcggctcactgcaacctccgtctcccgggttcaagcaattctgtctccatctcccatgttcctgggattacaggagaccccatcttcagaaccaatggaggaagaggaagatgacgacttggagctgtttggtggctatgatagtttccggagttataacagcagtgtgggcagtgagagcagctcctatctggaggagtcaagtgaagcagaaaatgaggatcgggaagcaggggaactgccgacctccccgctgcatttgctcagccctgggactcctcgctccttggatggcagtggttctgagccagctgtctgtgagatgtgtggtatcgtgggtacaagggaagccttcttctccaagaccaagaggttctgcagcgtctcctgctccaggagctactcctccaactccaagaaagccagtatcttggctaggttacagggaaaaccaccgaccaaaaaagccaaagtcctgcacaaggctgcctggtctgccaaaattggagccttcctccactctcaagggacaggacagctggcagatgggacaccaacaggacaagacgctctggtcttgggcttcgactgggggaagttcctgaaggatcacagttaca

SEQ ID NO: 11009 - DNA, 3055 bp, Homo sapiens
  source 1..3055: mol_type = unassigned DNA
ggcaggccaatatggcttcctgcacctggtgacgcttggcgaaactgaggtctcatggagaagccccggagtattgaggagaccccatcttcagaaccaatggaggaagaggaagatgacgacttggagctgtttggtggctatgatagtttccggagttataacagcagtgtgggcagtgagagcagctcctatctggaggagtcaagtgaagcagaaaatgaggatcgggaagcaggggaactgccgacctccccgctgcatttgctcagccctgggactcctcgctccttggatggcagtggttctgagccagctgtctgtgagatgtgtggtatcgtgggtacaagggaagccttcttctccaagaccaagaggttctgcagcgtctcctgctccaggagctactcctccaactccaagaaagccagtatcttggctaggttacagggaaaaccaccgaccaaaaaagccaaagtcctgcacaaggctgcctggtctgccaaaattggagccttcctccactctcaagggacaggacagctggcagatgggacaccaacaggacaagacgctctggtcttgggcttcgactgggggaagttcctgaaggatcacagttacaaggctgctcccgtcagctgtttcaagcacgtcccactctatgaccagtgggaggatgtgatgaaagggatgaaggtggaggtgctcaacagtgatgctgtgctccccagccgggtgtactggatcgcctctgtcatccagacagcagggtatcgggtgctgcttcggtatgaaggctttgaaaatgacgccagccatgacttctggtgcaacctgggaacagtggatgtccaccccattggctggtgtgccatcaacagcaagatcctagtgcccccacggaccatccatgccaagttcaccgactggaagggctacctcatgaaacggctggtgggctccaggacgcttcccgtggatttccacatcaagatggtggagagcatgaagtacccctttaggcagggcatgcggctggaagtggtggacaagtcccaggtgtcacgcactcgcatggctgtggtggacacagtaatcgggggtcgcctacggctcctctacgaggatggtgacagtgacgacgacttctggtgccacatgtggagccccctgatccacccagtgggttggtcacgacgtgtgggccacggcatcaagatgtcagagaggcgaagtgacatggcccatcaccccaccttccggaagatctactgtgatgccgttccttacctcttcaagaaggtacgagcagtctacacagaaggcggttggtttgaggaagggatgaagctggaggccattgaccccctgaatctgggcaacatctgcgtggcaactgtctgtaaggttctcctggatggatacctgatgatctgtgtggacggggggccctccacagatggcttggactggttctgctaccatgcctcttcccacgccatcttcccggccaccttctgtcagaagaatgacattgagctcacaccgccaaaaggttatgaggcacagactttcaactgggagaactacttggagaagaccaagtcgaaagccgctccatcgagactctttaacatggattgcccaaaccatggcttcaaggtgggcatgaagctggaggccgtggacctgatggagccccggctcatctgtgtggccacggtgaaacgagtggtgcatcggctcctcagcatccactttgacggctgggacagcgagtacgaccagtgggtggactgcgagtccccagacatctaccccgtcggctggtgtgagctcaccggctaccagctccagcctcctgtggccgcaggtgtgggctctcgtggccctaagaggctctgactttctttcctcttcttttttccttcttcccccgcccctgtgcccatctccgttctttggcatgaggtggagatgtctcatggaccactttaagtagagagtgagccccgtcacccagcccctgctcctgacttctctgtctccctttccctctggcctgcagagctccttccttcatcttgcccactctgtcatatgttcgtgcccttgtgcacccaggtaaactacccaggtccctctgagcagccctggtaacaagggtgggaagaagggacagctgttctccggcccctcctccagccccgccctctcctcattgcccaggtttggcttcctgtcttggggtgtctcgtgtgggagggtggatggggtctcgggatgcgcctgtgccctgtgtcctcccagggaccctcttctcatctctttcacccttgtctttcaacaacagaaccggccacaccgctgaaggccaaagaggccacaaagaagaaaaagaaacagtttgggaagaaaaggaaaagaatcccgcccactaagacgcgacccctcagacaggggtccaagaagcccctgctggaggacgaccctcagggtgccaggaagatctcgtcggagcctgttcctggcgagatcattgctgtgcgtgtgaaggaagagcatctagacgtggcctcgcccgacaaggcttcaagtccagagctgcctgtctccgtcgagaacatcaagcaggaaacagacgactgagccttcctgcctccagcctggcttctagctggaagccagcccagcgtttctctaccaccaccaccatgcctccacctgactttggcttggagactgatcctctctgtgtaaattctgcccggtgctgtgaaggctggacggtggaggacctgctggggtctcctgggacccgcctgttgcttctgccctcccctgtggaaaggtctatatgacgggccgcctgaggccccagaactcgtctgtgaaccaccttttccagccagagttcccaaagctggaacgctagctgcctgctcttccttaagatggcctccccccgacccgccacggccctcagttgccagggatggggccaccactgtcacactgtggaatacaagacagtgaactctgtctgcctgaa

SEQ ID NO: 11010 - DNA, 531 bp, Homo sapiens
  source 1..531: mol_type = unassigned DNA
aggccaatatggcttcctgcacctggtgacgcttggcgaaactgaggtctcatggagaagccccggagtattgagagatggggtgtggctgtgttgccaaggctggtctcaaactcctgggttcaagcaatccacctgcctcagcctcccaaagtgctgggattacagatgtgaaccaccgtacccaggctcttcacacgttttctgttacatgctgggagaccccatcttcagaaccaatggaggaagaggaagatgacgacttggagctgtttggtggctatgatagtttccggagttataacagcagtgtgggcagtgagagcagctcctatctggaggagtcaagtgaagcagaaaatgaggatcgggaagcaggggaactgccgacctccccgctgcatttgctcagccctgggactcctcgctccttggatggcagtggttctgagccaggtgccttcagagtgtcccctgaggatggagaggagatagaagattatagaggaagaggggggtggatataggcta

SEQ ID NO: 11011 - DNA, 5875 bp, Homo sapiens
  source 1..5875: mol_type = unassigned DNA
tggcttcctgcacctggtgacgcttggcgaaactgaggtctcatggagaagccccggagtattgaggagaccccatcttcagaaccaatggaggaagaggaagatgacgacttggagctgtttggtggctatgatagtttccggagttataacagcagtgtgggcagtgagagcagctcctatctggaggagtcaagtgaagcagaaaatgaggatcgggaagcaggggaactgccgacctccccgctgcatttgctcagccctgggactcctcgctccttggatggcagtggttctgagccagctgtctgtgagatgtgtggtatcgtgggtacaagggaagccttcttctccaagaccaagaggttctgcagcgtctcctgctccaggagctactcctccaactccaagaaagccagtatcttggctaggttacagggaaaaccaccgaccaaaaaagccaaagtcctgcacaaggctgcctggtctgccaaaattggagccttcctccactctcaagggacaggacagctggcagatgggacaccaacaggacaagacgctctggtcttgggcttcgactgggggaagttcctgaaggatcacagttacaaggctgctcccgtcagctgtttcaagcacgtgagtgccctggagctgagggagggaggccggggagccgggcctggagctgctcctccacctgcttcaccagggcggcttcaggctggacagtgacagtggggaggtctgggcaggagacggatggcgttaccactcgctccatttcatgtttatgtcaaaaaaatcctcctacaaacacttctatcacctgcttggcttcactcccggtctgaagcccttcagtttatttacatgatggaacttggtgctagctgatgtcgaagggtctttgcagtctgaaacccttctctcctttctcccccatttgcagcattttcccatggaaagcagggtgcttctgtagctggcctgggccccgtgggccccgagaggcagatgtggatgctcctggagccacttctgtaaaaggctcctcgatgcggatcatgtaaaagccagaacgaagggcaaggcccttaggggcggggcttgagcgcaagaaccgaatatccagcagctgtgacgtgtggagcctgcaggccgggagagcagagcccacaacagcactcttgttttgtcttcacaccacgtccctaagctccgggaaatccaggaggaggcctctttagtcttgaggaagtagggagtcttttacccagagtaagccacttcctctcctcctttcagaactgccactgaactctggggagtgccctgaacaatgacagctgcttcttgactcagctaactcactcctctcgtctctgaatggctaatgaaggtgcacctccttcctgctggagggggagcctcttttttgccctgaattctctaatagtttcagcattttcatttccagggagttgcatcatccttgtgtctaacacatataatccaatttgctttgtaaaaagcctgcccctgcgtgcctgggctagcgcaactgtgtccgggttctgtgatgaactaaactcaagtgaccagggagatggaatgggatacctcaactggctgaagccagggctgagaataaaaaaggtgaatttggccaggcgcagtggcttacccctataatcccagcactttgggaggccgaggcgggtggatcacctgaggtgaggagttcgagaccagcctggccaacatggtgaaaccccatctctactaaaaatacaaaaattagctggaagtggtggcaggcacctgtaatcccagctacttgggaggccgagacaggagaatcccttgaacctgagaggcggaggttgtaatgagctgagattgcgccactgcactccagcctgggtgacggagcaagactctaaaaaaagtgattctcccaaaggagaatcaaaagtaccattggcaggaaagtgaggattaggtactgggaaggcaactgaaacagtccagtgctgtcctggggcactttattttattttatttattttttcgatatgggagtttcactcttgttgcccagagctggagtgcaatggcactatctcagctcacagcagcctccccctcccaggttcaagcgattctcctgcctcagcctccggagtagctgggattacaggcatgtgccaccaccacgcccggctaattttgtatttttagtagagacatggattctccatgttggtcaggctggtctcgaactcccagcctcaggtgatccgcccgtctcggcctcccaaagtgctgggattacaggcgtgagccaccatgcctggccccctggagcatttcagtaggaggggaggtagagagtaaacttgcaggtggatggctgtgtgtaaacaagggggtcataatgcccacagcccaggtttgtatgatgattgaaggaaagtatatttgtgctaatatcagcgccctgccattgctcgggctggcacagggacgaagggatcgaggctcaccaaggcatcatgtgcccaaaatgatacagtaagaaaccagtcctataaagattttaggactcggttctgtctgactctgggtctctagccatcaccctgcatcccaccacctccacctctactcccggcttagctcttcaaggacaggagacctcatctctttatctctagtagctggttctgcacacagtgggtgatgtgaaaagttgaggtgcaaacgaggacttgactgaggccgtgaggcagtctgtctcccctgctagcacagttagctcactctctcggtacactctcatcgccacacaggtcccactctatgaccagtgggaggatgtgatgaaagggatgaaggtggaggtgctcaacagtgatgctgtgctccccagccgggtgtactggatcgcctctgtcatccagacagcagggtatcgggtgctgcttcggtatgaaggctttgaaaatgacgccagccatgacttctggtgcaacctgggaacagtggatgtccaccccattggctggtgtgccatcaacagcaagatcctagtgcccccacggaccatccatgccaagttcaccgactggaagggctacctcatgaaacggctggtgggctccaggacgcttcccgtggatttccacatcaagatggtggagagcatgaagtacccctttaggcagggcatgcggctggaagtggtggacaagtcccaggtgtcacgcactcgcatggctgtggtggacacagtaatcgggggtcgcctacggctcctctacgaggatggtgacagtgacgacgacttctggtgccacatgtggagccccctgatccacccagtgggttggtcacgacgtgtgggccacggcatcaagatgtcagagaggcgaagtgacatggcccatcaccccaccttccggaagatctactgtgatgccgttccttacctcttcaagaaggtacgagcagtctacacagaaggcggttggtttgaggaagggatgaagctggaggccattgaccccctgaatctgggcaacatctgcgtggcaactgtctgtaaggttctcctggatggatacctgatgatctgtgtggacggggggccctccacagatggcttggactggttctgctaccatgcctcttcccacgccatcttcccggccaccttctgtcagaagaatgacattgagctcacaccgccaaaaggttatgaggcacagactttcaactgggagaactacttggagaagaccaagtcgaaagccgctccatcgagactctttaacatggattgcccaaaccatggcttcaaggtgggcatgaagctggaggccgtggacctgatggagccccggctcatctgtgtggccacggtgaaacgagtggtgcatcggctcctcagcatccactttgacggctgggacagcgagtacgaccagtgggtggactgcgagtccccagacatctaccccgtcggctggtgtgagctcaccggctaccagctccagcctcctgtggccgcaggtgtgggctctcgtggccctaagaggctctgactttctttcctcttcttttttccttcttcccccgcccctgtgcccatctccgttctttggcatgaggtggagatgtctcatggaccactttaagtagagagtgagccccgtcacccagcccctgctcctgacttctctgtctccctttccctctggcctgcagagctccttccttcatcttgcccactctgtcatatgttcgtgcccttgtgcacccaggtaaactacccaggtccctctgagcagccctggtaacaagggtgggaagaagggacagctgttctccggcccctcctccagccccgccctctcctcattgcccaggtttggcttcctgtcttggggtgtctcgtgtgggagggtggatggggtctcgggatgcgcctgtgccctgtgtcctcccagggaccctcttctcatctctttcacccttgtctttcaacaacagaaccggccacaccgctgaaggccaaagaggccacaaagaagaaaaagaaacagtttgggaagaaaaggaaaagaatcccgcccactaagacgcgacccctcagacaggggtccaagaagcccctgctggaggacgaccctcagggtgccaggaagatctcgtcggagcctgttcctggcgagatcattgctgtgcgtgtgaaggaagagcatctagacgtggcctcgcccgacaaggcttcaagtccagagctgcctgtctccgtcgagaacatcaagcaggaaacagacgactgagccttcctgcctccagcctggcttctagctggaagccagcccagcgtttctctaccaccaccaccatgcctccacctgactttggcttggagactgatcctctctgtgtaaattctgcccggtgctgtgaaggctggacggtggaggacctgctggggtctcctgggacccgcctgttgcttctgccctcccctgtggaaaggtctatatgacgggccgcctgaggccccagaactcgtctgtgaaccaccttttccagccagagttcccaaagctggaacgctagctgcctgctcttccttaagatggcctccccccgacccgccacggccctcagttgccagggatggggccaccactgtcacactgtggaatacaagacagtgaactctgtctgcctgaacgagccatgtaaattaagttctagagcagctctctgagcaggataaggtcccctgacagtgagttgtgtggtgggggcagcctctgcctcaaaaattcaccaagcagaatgcctctcagcctcatgtgttggtcctctgctcctcctagctccccagggatgttggggacccagcttgtctcggcagctaagaagcagtgaccaggatgtggattttggcgacctgtgtggtggccttgagctgctttctgtgtttgtgaggactgactcccatttcctaaaggaaatgcccccggggaggacattgggaggaagatggcctgagtgtgcactttggctctgctacctgctcctgaagccccgctaaaaataattcatccaagattcctttgtagttaaagggtccagttctgactggagcctctagagagctgggcttgtatgttcttttggccttttgttcctacctaaatgaagaaaccatgcctggaggggccgtgaacacagaaccctcaagacaaggatgacagagctggaggacacatctagctgccattgcaacctcactgggctccccagactctgtgtgtgagaaattaaaccccctgcttgcttg

SEQ ID NO: 11012 - DNA, 3282 bp, Homo sapiens
  source 1..3282: mol_type = unassigned DNA
cttcctgcacctggtgacgcttggcgaaactgaggtctcatggagaagccccggagtattgaggagaccccatcttcagaaccaatggaggaagaggaagatgacgacttggagctgtttggtggctatgatagtttccggagttataacagcagtgtgggcagtgagagcagctcctatctggaggagtcaagtgaagcagaaaatgaggatcgggaagcaggggaactgccgacctccccgctgcatttgctcagccctgggactcctcgctccttggatggcagtggttctgagccagctgtctgtgagatgtgtggtatcgtgggtacaagggaagccttcttctccaagaccaagaggttctgcagcgtctcctgctccaggagctactcctccaactccaagaaagccagtatcttggctaggttacagggaaaaccaccgaccaaaaaagccaaagtcctgcacaaggctgcctggtctgccaaaattggagccttcctccactctcaagggacaggacagctggcagatgggacaccaacaggacaagacgctctggtcttgggcttcgactgggggaagttcctgaaggatcacagttacaaggctgctcccgtcagctgtttcaagcacgtcccactctatgaccagtgggaggatgtgatgaaagggatgaaggtggaggtgctcaacagtgatgctgtgctccccagccgggtgtactggatcgcctctgtcatccagacagcagggtatcgggtgctgcttcggtatgaaggctttgaaaatgacgccagccatgacttctggtgcaacctgggaacagtggatgtccaccccattggctggtgtgccatcaacagcaagatcctagtgcccccacggaccatccatgccaagttcaccgactggaagggctacctcatgaaacggctggtgggctccaggacgcttcccgtggatttccacatcaagatggtggagagcatgaagtacccctttaggcagggcatgcggctggaagtggtggacaagtcccaggtgtcacgcactcgcatggctgtggtggacacagtaatcgggggtcgcctacggctcctctacgaggatggtgacagtgacgacgacttctggtgccacatgtggagccccctgatccacccagtgggttggtcacgacgtgtgggccacggcatcaagatgtcagagaggcgaagtgacatggcccatcaccccaccttccggaagatctactgtgatgccgttccttacctcttcaagaaggtacgagcagtctacacagaaggcggttggtttgaggaagggatgaagctggaggccattgaccccctgaatctgggcaacatctgcgtggcaactgtctgtaaggttctcctggatggatacctgatgatctgtgtggacggggggccctccacagatggcttggactggttctgctaccatgcctcttcccacgccatcttcccggccaccttctgtcagaagaatgacattgagctcacaccgccaaaaggttatgaggcacagactttcaactgggagaactacttggagaagaccaagtcgaaagccgctccatcgagactctttaacatggattgcccaaaccatggcttcaaggtgggcatgaagctggaggccgtggacctgatggagccccggctcatctgtgtggccacggtgaaacgagtggtgcatcggctcctcagcatccactttgacggctgggacagcgagtacgaccagtgggtggactgcgagtccccagacatctaccccgtcggctggtgtgagctcaccggctaccagctccagcctcctgtggccgcaggtaaactacccaggtccctctgagcagccctggtaacaagggtgggaagaagggacagctgttctccggcccctcctccagccccgccctctcctcattgcccagaaccggccacaccgctgaaggccaaagaggccacaaagaagaaaaagaaacagtttgggaagaaaaggaaaagaatcccgcccactaagacgcgacccctcagacaggggtccaagaagcccctgctggaggacgaccctcagggtgccaggaagatctcgtcggagcctgttcctggcgagatcattgctgtgcgtgtgaaggaagagcatctagacgtggcctcgcccgacaaggcttcaagtccagagctgcctgtctccgtcgagaacatcaagcaggaaacagacgactgagccttcctgcctccagcctggcttctagctggaagccagcccagcgtttctctaccaccaccaccatgcctccacctgactttggcttggagactgatcctctctgtgtaaattctgcccggtgctgtgaaggctggacggtggaggacctgctggggtctcctgggacccgcctgttgcttctgccctcccctgtggaaaggtctatatgacgggccgcctgaggccccagaactcgtctgtgaaccaccttttccagccagagttcccaaagctggaacgctagctgcctgctcttccttaagatggcctccccccgacccgccacggccctcagttgccagggatggggccaccactgtcacactgtggaatacaagacagtgaactctgtctgcctgaacgagccatgtaaattaagttctagagcagctctctgagcaggataaggtcccctgacagtgagttgtgtggtgggggcagcctctgcctcaaaaattcaccaagcagaatgcctctcagcctcatgtgttggtcctctgctcctcctagctccccagggatgttggggacccagcttgtctcggcagctaagaagcagtgaccaggatgtggattttggcgacctgtgtggtggccttgagctgctttctgtgtttgtgaggactgactcccatttcctaaaggaaatgcccccggggaggacattgggaggaagatggcctgagtgtgcactttggctctgctacctgctcctgaagccccgctaaaaataattcatccaagattcctttgtagttaaagggtccagttctgactggagcctctagagagctgggcttgtatgttcttttggccttttgttcctacctaaatgaagaaaccatgcctggaggggccgtgaacacagaaccctcaagacaaggatgacagagctggaggacacatctagctgccattgcaacctcactgggctccccagactctgtgtgtgagaaattaaaccccctgcttgcttga

SEQ ID NO: 11013 - DNA, 864 bp, Homo sapiens
  source 1..864: mol_type = unassigned DNA
gagaccccatcttcagaaccaatggaggaagaggaagatgacgacttggagctgtttggtggctatgatagtttccggagttataacagcagtgtgggcagtgagagcagctcctatctggaggagtcaagtgaagcagaaaatgaggatcgggaagcaggggaactgccgacctccccgctgcatttgctcagccctgggactcctcgctccttggatggcagtggttctgagccagggaaaaccaccgaccaaaaaagccaaagtcctgcacaaggctgcctggtctgccaaaattggagccttcctccactctcaagggacaggacagctggcagatgggacaccaacaggacaagacgctctggtcttgggcttcgactgggggaagttcctgaaggatcacagttacaaggctgctcccgtcagctgtttcaagcacgtcccactctatgaccagtgggaggatgtgatgaaagggatgaaggtggaggtgctcaacagtgatgctgtgctccccagccgggtgtactggatcgcctctgtcatccagacagcagggtatcgggtgctgcttcggtatgaaggctttgaaaatgacgccagccatgacttctggtgcaacctgggaacagtggatgtccaccccattggctggtgtgccatcaacagcaagatcctagtgcccccacggaccatccatgccaagttcaccgactggaagggctacctcatgaaacggctggtgggctccaggacgcttcccgtggatttccacatcaaggtcggcagtgagcccttaactgatgtgcctccttccgctcttccatttttctgcatcctgcatgccactcactggagcat

SEQ ID NO: 11014 - DNA, 946 bp, Homo sapiens
  source 1..946: mol_type = unassigned DNA
gagaccccatcttcagaaccaatggaggaagaggaagatgacgacttggagctgtttggtggctatgatagtttccggagttataacagcagtgtgggcagtgagagcagctcctatctggaggagtcaagtgaagcagaaaatgaggatcgggaagcaggggaactgccgacctccccgctgcatttgctcagccctgggactcctcgctccttggatggcagtggttctgagccagctgtctgtgagatgtgtggtatcgtgggtacaagggaagccttcttctccaagaccaagaggttctgcagcgtctcctgctccaggagctactcctccaactccaagaaagccagtatcttggctaggttacagggaaaaccaccgaccaaaaaagccaaagtcctgcacaaggctgcctggtctgccaaaattggagccttcctccactctcaagggacaggacagctggcagatgggacaccaacaggacaagacgctctggtcttgggcttcgactgggggaagttcctgaaggatcacagttacaaggctgctcccgtcagctgtttcaagcacggtatcgggtgctgcttcggtatgaaggctttgaaaatgacgccagccatgacttctggtgcaacctgggaacagtggatgtccaccccattggctggtgtgccatcaacagcaagatcctagtgcccccacggaccatccatgccaagttcaccgactggaagggctacctcatgaaacggctggtgggctccaggacgcttcccgtggatttccacatcaagatggtggagagcatgaagtacccctttaggcagggcatgcggctggaagtggtggacaagtcccaggtgtcacgcactcgcatggctgtggtggacacagtaatcgggggtcgcctacggctcctctacgaggatggtgacagtga

SEQ ID NO: 11015 - DNA, 3716 bp, Homo sapiens
  source 1..3716: mol_type = unassigned DNA
aggcgcgagcttcctgcgcctgctcagcagcctgaggccgcggccgggtgccctcctgccctcctggccatccagggattgggtgtcagtggcctgttgcacattgtcacttctacaagtgactaacaccgtcaggataatctaaaactacgaatactacctgactccacaagggtacggtgtattctccagttttagcatctgccttaaaaattacctcagagttaagcactgctggggacttatttctactcttggcaggaggagaaaaggaaatgacatcagaggtgctttgctaaagatcacaggaactgcagctgtggccttcctatttcgcagttttccccttaaatctttacacagattcccatcagagtacagtaaaacaaaaattaaatagaattcatatatttgaaatccttggcatcaattcactccaggaatccaagacagtactcaactgaaggggaagcaagcacaagggagatttctgggacactgatactgttccgtttcttcatctgaatgctgcttatgggccttgttcaatttgtgaaaattcatgactttgtacatttatgggtttcactttgtagctcaggctggtcttgaactgctgggctcaaactatcgtcctgcctcagtctcctgagtggatgggattataagcacacaccaccgtccctggcataaaatagttttttaattcacaagatttaataggtagattaaaagaagaggtaagacaaaattaaaagaggtaagacaagagaaggaaaagtcagactgacagattataagttcctatggtacacagtccccttagattggaagaaaggagctaagagggtaaggaagcttggttgccagttttttataactggcagcctggtgatattgggtgtggtagctgagatgtcccaattgtagtcacaaggcctaaaaaagcagatctttacaaatgtttaaaaatactagctcaatgtaaataagcatgaatgttcttgacctccttactgtgccctgaatgtgccaaccacactctcattccaccatctttgctcctgcaatgctgtttgcctgcaggccttcctgccaggagcttgctccttctctctgtccactctggatataacagcccttgcccttctccactttacgctctcttccctttctcttcttgtacctttattttcctgcatagcacccatgattatctgatctatttttttccctttttttttcattctggtgcccaggctggagtgcagtggcacaatattggcttactgcagcctcagcttccctggctcaagccatctgcccaccttagcctcccgagtagctgggactgcaggtgcacgccaccatacccgggaaatttttgtactttttttgtagagacagggtcttgctatgttgcccaagctggtcttgaactcctgagctcaagcaatccacacaccttgacctcccaaagtgctgggattacaggcatgagccactgcacccagcctgatctattatttatttaccagtaccttccctactggaatgaaagctccatgagaacagagtctgttttgttcactgctataccccttgtgccaagaacactgtctgacatataacagtaactggaatatttaatgaatgaatgaatgaatctaggtatatgatggtgggatgaggaaataaagagatagaaaatgtcagtactgtataggtttcagggacaatgaattatcaatacaatgatatattgcctgaatttcagcatatcttagtaactgccttaaagttacagaaggactgagataatctgttagaatgtgaacaataagagcacctacctcacagtatccacataaattgtttagtgcagtgcctggcacagagtaaatgctcaacagttgttagttatgattaagtctgaatagtaactcacacactaaagtaaaattgaggatttgaaacagaaatcaggatttccgttcctcctttgttaaaactaggcacagtattcaacagtctaatcaatttctaaaagtaccatttaaaactgaggtatttagtaaatggtttatagactacttagctctgtaactgaaataaattattctccaaacacggctttcctcaatgagcttaatgaatgttttctgtttaccattattgatgcttttacaaatatctcctatgcctccagaatgatctcggtgccagtgagtcactacaatttcctggattgctgtgttaaattcagttagagcctgctttaaacagctgatgtattctggaattgctggttctccagtgtcaatgaggattctcctgaaaattaaatggaagataatcacacaattggaacactgcgttgacattagcattattttgcacacagataatttacattaaagaaactgcaaaaattattttacttttaacatgcacaaaaaccagctacatcacttcagcttaactacagtaatctcaccctaagaaagttttctgagaaaaattagagctaaatataagtctgaacaaggaataatagcagtcatcttgaacatttacatagcaattaaaataaacatggcaccattccaaggactttacatattttaccaattacattcctcgtaacaactgtttaaagtagatattttatcattatatttagaagtaacttgcccaggttactctacagataaatggcagaaacagctttcaaacccaggtattctgatgccagaatatgtgcttttatctatctgcctttgagatctcatatctcagtatatttcaaaagttttatagatatgaaagattttgattcaatggcacccctaaagaaactagtctttggcactagatatacaacttatcactgaagttttatattagcaccctgacacatgaaaatgaaggctttagtgaagcatgggaaaaacatctgagctattttctttctttacttagacaaccccattagctgtattttttgcttgtggttctgaatcttccttatattttgtttgcccttcctcacgattttatgaggtggcctttctctgtgaagttttgctgaactaaagacatgggggtgacatgttcctcaagatccaattcttttttttttgagacagggtcttgctctgtcacccaggctggagtgcagtgttgcgatctcagctcattgcagccttgacctcctgggcacaagcgattctcccacatctacttcctgagtagctgggactacaggtatgtgccaccatgcccggctcatttttgtattttttgtagagatggtgtttcgtcatattgcccaggctggtctcttaactcctggggtcaagcaatcctcccacctcagcctcccaaagtgctgggattacaggcgttgagccaccatgcccagctcaagatccaattcacaaacttcttcactcatactgtttcacagtaacacctcaataattcaggctggctgacagattagccttgatgaaaagtctgagttattcattaattgatcaataactgtttatggattacctaatatgtgctacaaatttgtttcttgcagtaagcaggacacaacaaccctgcttacattcaactgttggtgagaaggggaactgcatatgactggaaataaacaataaaagtaacataccatagaaagcattttgcaaagcattaaaattaaa

SEQ ID NO: 11016 - DNA, 790 bp, Homo sapiens
  source 1..790: mol_type = unassigned DNA
gcgcctgctcagcagcctgaggccgcggccgggtgccctcctgccctcctggccatccagggattgggtgtcagtggcctgttgcacattgtcacttctacaagtgactaacaccgtcaggataatctaaaactacgaatactacctgactccacaagggtacggtgtattctccagttttagcatctgccttaaaaattacctcagagttaagcactgctggggacttatttctactcttgttttccttctaacaggtccctcagctgtaggtctgttggagtttgctggaggtccactccagatgctgtttgcctgggtatcagcagtggaggctgcagaacagcaaatattgcagaacagtaaatattgctgcctgatccttccctctggaagcttcgtcccagaaggccacctgcctatatgaggattctaccttccctgctaccagccacttcactaactttttctggagagatgacttcaaaatactcaaagtcgcaagataaatacacagaaacgattaacgttgcacagagttgacccagtcattctgtaaattgctgcagaaaaattggatttatttattatatattttacacaaattagaaagaaagcaaagttatttagtaaggtaactatatttgtccagaatcttcctgtgacagtcttcttctgggaacagactttgctcactccagccacaggggtagctgggctaaatgcagtacctaatgtttccttgaccacagggactggtctaaggaatgggtaatgagccagtataaat

SEQ ID NO: 11017 - DNA, 817 bp, Homo sapiens
  source 1..817: mol_type = unassigned DNA
cagcctgaggccgcggccgggtgccctcctgccctcctggccatccagggattgggtgtcagtggcctgttgcacattgtcacttctacaagtgactaacaccgtcaggataatctaaaactacgaatactacctgactccacaagggtacggtgtattctccagttttagcatctgccttaaaaattacctcagagttaagcactgctggggacttatttctactcttggcaggaggagaaaaggaaatgacatcagaggtgctttgctaaagatcacaggaactgcagctgtggccttcctatttcgcagattcccatcagagtacagtaaaacaaaaattaaatagaattcatatatttgaaatccttggcatcaattcactccaggaatccaagacagtactcaactgaaggggaagcaagcacaagggagatttctgggacactgatactgttccgtttcttcatctgaatgctgcttatgggccttgttcaatttgtgaaaattcatgactttgtacatttatgttaatttcccagacaccctacagtgaggggtgacttatgactgaattgacagccaatgcaacagaagacttggtccatgaaaacctcccatgcaatatcccttccatgctcttttctacctgctggattgatcgagctgagcatgcaaccttgaaaaaaaaagccttcaggagggtagagtcacaagatggaaggagcatacatcattacttgcagagggccactggctaactgggaacctttttgggactgtatgggaccaagaaataaatttatttcctatttga

SEQ ID NO: 11018 - DNA, 784 bp, Homo sapiens
  source 1..784: mol_type = unassigned DNA
gtcacttctacaagtgactaacaccgtcaggataatctaaaactacgaatactacctgactccacaagggtacggtgtattctccagttttagcatctgccttaaaaattacctcagagttaagcactgctggggacttatttctactcttgttttccttctaacaggtccctcagctgtaggtctgttggagtttgctggaggtccactccagatgctgtttgcctgggtatcagcagtggaggctgcagaacagcaaatattgcagaacagtaaatattgctgcctgatccttccctctggaagcttcgtcccagaaggccacctgcctatatgagttctagatccctgaggaatcgccacactgacttccacaatggttgaactagtttacagtcccagcaacagtgtaaaagtgttcctatttctccacatcctctccagcacctgttgtttcctgactttttaatgatcgccattctaactggtgtgagatggtatctcattgtggttaagagcttctgcacagcaaaagaaactaccatcagagtgaacaggcaacctacagaatgggagaaaatttttgcaatctactcatctgacaaagggctaatatccagaatctacaatgaactccaacaaatttacaagaaaaaaacaaccccatcaaaagtgggcaaaggatatgaacagacactctcaaaagaagacatttatgcagccaaaagacacaagaaaaaatgctcatcatcactggccatcagagaaacgcaaatcagaaaaa

SEQ ID NO: 11019 - DNA, 793 bp, Homo sapiens
  source 1..793: mol_type = unassigned DNA
taaaataggaaacaaaatcatcaggagtggagatagtgtgatgacatttgagaagagaatggaggaaaactgtggaggaatggggaccaggctggtctcagaatcctggcctcaagcaatcctcttgccttggcatcccaaaatgctgggattacagggatgagctatcccaccagggacccctcaggcagattgatttcttatgtgtgttcagctctggaggccacattccaacacctgttgtttcctgactttttaatgatcgccattctaactggtgtgagatggtatctcattgtggttaagagcttctgcacagcaaaagaaactaccatcagagtgaacaggcaacctacagaatgggagaaaatttttgcaatctactcatctgacaaagggctaatatccagaatctacaatgaactccaacaaatttacaagaaaaaaacaaccccatcaaaagtgggcaaaggatatgaacagacactctcaaaagaagacatttatgcagccaaaagacacaagaaaaaatgctcatcatcactggccatcagagaaacgcaaatcagaaaaagactctttaatctatttttttctctctagttaaacattttaagacagagccgttttttataaattctaccctatataagaaacttaacatgcatttatttcctttttcctttcctccaattttcagtttttgttgacaaaactgattataatacttttaaagtatgacaggtattttatttcaaaaattcttatttacatttatattgttttgtaacta

SEQ ID NO: 11020 - DNA, 9657 bp, Homo sapiens
  source 1..9657: mol_type = unassigned DNA
cggggccagggcagcgcggactcgcgtcccgtggagcgttccaggcgggcgcgcggctttctccccagacccaccgagtggcggcggaggcgagatgcgcgggggcgtgctcctggtcttgctgctgtgtgtcgccgcgcagtgccggcagagaggcctgtttcctgccattctcaatcttgccagcaatgctcacatcagcaccaatgccacctgtggcgagaaggggccggagatgttctgcaaacttgtggagcatgtgccaggtcggcccgtccgaaacccacagtgccggatctgtgatggcaacagcgcaaaccccagagaacgccatccaatatcacatgccatagatggcaccaataactggtggcaaagtcccagcattcagaatgggagagaatatcactgggtcacaatcactctggacttaagacaggtctttcaagttgcatatgtcatcattaaagctgccaatgcccctcgacctggaaactggattttggagcgttctctggatggcaccacgttcagcccctggcagtattatgcagtcagcgactcagagtgtttgtctcgttacaatataactccaagacgagggccacccacctacagggctgatgatgaagtgatctgcacctcctattattccagattggtgccacttgagcatggagagattcatacatcactcatcaatggcagaccaagcgctgacgatctttcacccaagttgttggaattcacttctgcacgatatattcgccttcgcttgcaacgcattagaacgctcaatgcagatctcatgacccttagccaccgggaacctaaagaactggatcctattgttaccagacgctattattattcaataaaggacatttctgttggaggcatgtgtatctgctatggccatgctagtagctgcccatgggatgaaactacaaagaaactgcagtgtcaatgtgagcataatacttgcggggagagctgtaacaggtgctgtcctgggtaccatcagcagccctggaggccgggaaccgtgtcctccggcaatacatgtgaagcatgtaattgtcacaataaagccaaagactgttactatgatgaaagtgttgcaaagcagaagaaaagtttgaatactgctggacagttcagaggaggaggggtttgcataaattgcttgcagaacaccatgggaatcaactgtgaaacctgtattgatggatattatagaccacacaaagtgtctccttatgaggatgagccttgccgcccctgtaattgtgaccctgtggggtccctcagttctgtctgtattaaggatgacctccattctgacttacacaatgggaagcagccaggtcagtgcccatgtaaggaaggttatacaggagaaaaatgtgatcgctgccaacttggctataaggattacccgacctgtgtctcctgtgggtgcaacccagtgggcagtgccagtgatgagccctgcacagggccctgtgtttgtaaggaaaacgttgaggggaaggcctgtgatcgctgcaagccaggattctataacttgaaggaaaaaaacccccggggctgctccgagtgcttctgctttggcgtttctgatgtctgcagcagcctctcttggcctgttggtcaggtaaacagtatgtccgggtggctggtcaccgacttgatcagtcccaggaagatcccgtctcagcaagatgcactaggcgggcgccatcaggtcagcatcaacaacaccgcggtcatgcagagactggctcccaagtactactgggcagcccccgaggcctaccttggaaataagctgactgcgtttggcggattcctgaaatacacggtgtcctacgatattccggtagagacggtagacagtaacctcatgtcgcatgctgacgtcatcattaagggaaacggactcactttaagcacacaggctgagggtctgtcattgcagccttatgaagagtacctaaacgtggttagacttgtgcctgaaaacttccaagattttcacagcaaaaggcagattgatcgtgaccagctgatgactgtccttgccaatgtgacacatcttttgatcagagccaactacaattctgcaaaaatggctctttacaggttggagtccgtctctctggacatagccagctctaatgccatcgacctggtggtggccgctgatgtggagcactgtgaatgtccgcaaggctacacagggacctcctgtgagtcgtgcctctctggctattaccgcgtggatggaatactctttggaggaatttgtcaaccctgtgaatgccacggccatgcagctgagtgtaatgttcacggcgtttgcattgcgtgtgcgcacaacaccaccggcgtccactgtgagcagtgcttgcccggcttctacggggagccttcccgagggacacctggggactgccagccctgcgcctgccctctcaccatagcctccaacaatttcagccccacctgccacctcaatgatggagatgaagtggtctgtgactggtgtgccccgggctactcaggagcttggtgtgagagatgtgcagatggttactatggaaacccaacagtgcctggcgaatcttgtgttccctgtgactgcagcggcaacgtggacccctcggaggctggtcactgtgactcagtcaccggggagtgcctgaagtgcctggggaacacagatggcgcccactgtgaaaggtgtgctgacgggttctatggggacgctgtgacagccaagaactgccgcgcctgtgaatgccatgtgaaaggctcccattctgccgtgtgccatcttgagaccgggctctgtgactgcaaaccaaacgtgactggacagcagtgtgaccagtgcttgcatggctattatgggctggactcaggccatggctgccggccctgcaactgcagcgtggcaggctccgtgtcagatggctgcacggatgaaggccagtgtcactgtgtcccaggtgtggcagggaaaaggtgtgacaggtgtgcccatggcttctacgcctaccaggatggtagctgtacaccctgtgactgcccacacactcagaatacctgcgacccagaaactggagagtgtgtctgcccccctcacacacagggtgtgaagtgtgaagaatgtgaggatgggcactggggctacgatgcggaggtggggtgccaggcctgcaattgcagtctcgtggggtcgactcatcatcggtgcgatgtggtcaccggccattgccagtgcaagtcaaaatttggtggccgggcctgcgatcagtgttccttgggttacagagactttcccgactgtgttccctgtgactgtgacctgagggggacgtcgggggacgcctgcaacctggagcagggtctctgcggctgtgtggaggaaaccggggcctgcccttgcaaggaaaatgtctttggtcctcagtgcaacgaatgtcgagagggcaccttcgctctccgcgcagacaaccccctgggctgcagcccgtgcttctgctccgggctgtcccacctctgctcagagctggaggactacgtgaggaccccagtaacgctgggctccgatcagcctcttctgcgtgtggtttctcagagtaacttgaggggcacgaccgagggggtttactaccaggcccccgacttcctgctggatgccgccaccgtccggcagcacatccgtgcagagccgttttactggcggctgccgcagcagttccaaggagaccagctcatggcctatggtggcaaactgaagtacagcgtggccttctattctttggatggcgtcggcacctccaattttgagcctcaagttctcatcaaaggtggtcggatcagaaagcaagtcatttacatggatgcaccagccccagagaatggagtgagacaggaacaagaagtagcaatgagagagaatttttggaaatattttaactctgtttctgaaaaacctgtcacgcgagaggattttatgtctgtcctcagcgatattgagtacatcctcatcaaggcatcgtatggtcaaggattacagcagagcagaatctcagacatttcaatggaggttggcagaaaggctgaaaagctgcacccagaagaagaggttgcatctcttttagagaattgtgtctgtcctcctggcactgtgggattctcatgtcaggactgcgcccctgggtaccacagagggaagctcccagcagggagtgacaggggaccacgccctctggttgctccttgtgttccctgcagttgcaacaaccacagtgacacctgtgaccccaacaccgggaagtgtctgaactgtggcgataacacagcaggtgaccattgtgatgtgtgtacttctggctactacgggaaggtgactggctcagcaagtgactgtgctctgtgtgcctgtcctcacagccctcctgccagttttagtcccacttgtgtcttggaaggggaccacgatttccgttgtgacgcctgtctcctgggctatgaaggaaaacactgtgaaaggtgctcctcaagctattatgggaaccctcaaacaccaggtggcagttgccagaagtgtgactgcaacccgcacggctctgtccacggtgactgtgaccgcacatctgggcagtgcgtttgcaggctgggggcctcggggctccggtgcgatgagtgtgaaccgaggcacattctgatggaaacagattgtgtttcctgtgatgatgagtgtgtaggtgtgctgctgaatgacttggatgagattggtgatgccgttctttctctgaacctcactggcattatccctgtcccatatggaattttgtcaaacctggaaaatacaactaaatatctccaggaatctttattaaaagaaaatatgcaaaaggacctgggaaaaattaagcttgaaggtgttgcagaagaaacggacaacctgcaaaagaagctcactaggatgttagcgagtacccaaaaggtgaatagggcaactgagagaatcttcaaggagagtcaagacctggccatagccattgagaggctgcagatgagcatcacagaaattatggaaaagacaactttaaatcagactttggatgaagatttcctactacccaattctactcttcagaacatgcaacagaatggtacatctttgctagaaatcatgcagataagagacttcacacagttgcaccaaaatgccacccttgaactcaaggctgctgaagatttattgtcacaaattcaggaaaattaccagaagccgctggaagaattggaggtattgaaagaagcagcaagccacgtcctttcaaagcacaacaatgaactaaaggcggctgaggcgctcgtgagggaagctgaggcaaagatgcaggaaagcaaccacctgctgctcatggtcaatgctaatctgagagaattcagtgataaaaagctgcatgttcaagaagaacaaaatctgacctcagagctcattgtccaaggaagaggattgatagatgctgctgctgcacaaacagatgctgtacaagatgctctagagcacttagaggatcaccaggataagctacttttatggtctgccaaaatcaggcaccacatagatgacctggtcatgcacatgtcccaaaggaacgcagtcgacctggtctacagagctgaggaccatgccgctgagttccagagactagcagatgttctgtacagtggccttgaaaacatcagaaatgtgtccctgaatgccaccagtgcagcctatgtccattacaacatccagagcctgattgaagaatcggaggaactggccagagatgctcacaggactgtgactgagacgagcctgctctcagaatcccttgtttctaacgggaaagcggccgtgcagcgcagctccagatttctaaaagaaggcaacaacctcagcaggaagcttccaggtattgcattggaactgagtgaattgagaaataagacaaacagatttcaagagaatgctgttgaaattaccaggcaaaccaatgaatcactcttgatacttagagcaattcctaaaggtataagagacaagggagccaaaaccaaagagctggccacgtctgcaagccagagcgcggtgagcacgctgagggacgtggcggggctgagccaggagctgctgaacacatctgccagcctgtccagggtcaacaccacattacgagagacacaccagcttctgcaggactccaccatggccactctgttggctggaagaaaagtcaaagacgtggaaattcaagccaaccttttgtttgatcggttgaagcctttgaagatgttagaggagaatctgagcagaaacctatcagaaattaaactgttgatcagccaggcccgcaaacaagcagcttctattaaagtcgccgtgtctgcagacagagattgcatccgggcctaccagcctcagatttcctctaccaactacaataccttaacactaaatgttaagacacaggaacccgataatcttctcttctacctcggtagcagcaccgcttctgatttccttgcagtggagatgcggcgagggagagtggccttcctgtgggacctgggctccgggtccacacgcttggagtttccagactttcccattgatgacaacagatggcacagtatccatgtagccagatttggaaacattggttcactgagtgtaaaggaaatgagctcaaatcaaaagtcaccaacaaaaacaagtaaatcccctgggacagctaatgttctggatgtaaacaattcaacactcatgtttgttggaggtcttggaggacaaatcaagaaatctcctgctgtgaaggttactcattttaaaggctgcttgggggaggccttcctgaatggaaaatccataggcctatggaactatattgaaagggaaggcaagtgccgtgggtgcttcggaagctcccagaatgaagacccttccttccattttgacgggagtgggtactctgtcgtggagaagtcacttccggctaccgtgacccagataatcatgctttttaataccttttcacctaatggacttcttctctacctgggttcatacggcacaaaagactttttatccatcgagctgtttcgtggcagagtgaaggttatgactgacctgggttcaggacccattacccttttgacagacagacgttataacaatggaacctggtacaaaattgccttccagcgaaaccggaagcaaggagtgctagcagttatcgatgcctataacaccagtaataaagaaaccaagcagggcgagactccgggagcatcttctgacctcaaccgcctagacaaggacccgatttatgtgggtggattaccaaggtcaagagttgtaaggagaggtgtcaccaccaaaagctttgtgggctgcatcaagaacctggaaatatccagatcaacctttgacttactcagaaattcctatggagtgagaaaaggctgtttactggagcccatccggagtgttagcttcctgaaaggcggctacattgaattgccacccaaatctttgtcaccagaatcagaatggctggtaacatttgccaccacgaacagcagtggcatcatcctggctgccctcggcggggatgtggagaagcggggtgatcgtgaggaagcacacgtgcccttcttttccgtcatgctgatcggaggcaacattgaggtacatgtcaatcctggggatgggacaggcctgagaaaagctctcctgcacgctcccacgggtacctgcagtgatggacaagcgcattccatctccttggtcaggaatcggagaattatcactgtccaattggatgagaacaatcctgtggaaatgaagttgggcacattagtagaaagcaggacgataaatgtgtccaatctgtacgtcgggggaattccagagggagaggggacgtcactgctcacaatgagaagatcgttccatggctgtatcaaaaacctgatcttcaatttggaacttttggatttcaacagtgcagttggccatgagcaagtcgacctggacacctgctggctgtcagaaaggcctaagctggctcccgatgcagaggacagcaagctcttgccagagccccgggcttttccagaacagtgtgtggtggatgcagctctggagtacgttcccggcgctcaccagtttggtctcacacaaaacagccatttcatcttgccttttaatcagtcggctgtcagaaagaagctctcggttgagctaagcatccgcacgttcgcctccagcggcctgatttactacatggctcatcagaaccaagcagactacgctgtgctccagctgcacgggggccgcctccacttcatgtttgaccttggcaaaggcagaacaaaggtctctcaccctgcactgctcagtgatggcaagtggcacacggtcaagacagactatgttaaaagaaaaggcttcataactgtcgacggccgagagtctcccatggtgactgtggtgggagatggaaccatgctggatgtggagggtttgttctacctaggaggcctgccctcccagtaccaggccaggaaaattggaaatatcacccacagcatccctgcctgcattggggatgtgacggttaacagcaaacagctggacaaggacagcccggtgtctgccttcacggtgaacaggtgctacgcagtggcccaggaaggaacatactttgacggaagcggatatgcagctcttgtcaaagagggctacaaagtccagtcagatgtgaacatcacactggagtttcgaacctcctcgcagaatggcgtcctcctggggatcagcactgccaaagtggatgccattggactagagcttgtggacggcaaggtcttgttccatgtcaacaatggtgctggcaggataacagctgcatatgagcccaaaaccgccactgtgctctgtgatggaaaatggcacactcttcaagctaacaaaagcaaacaccgtatcactctgattgttgacgggaacgcagttggcgctgaaagtccacacacccagtctacctcagtggacaccaacaatcccatttatgttggtggctatcctgctggtgtgaagcaaaaatgcctgcgcagccagacctcgttccgcgggtgtttgaggaagctagctctgattaagagcccgcaggtgcagtcctttgacttcagcagagcgttcgaactgcacggagttttccttcattcctgtcctgggaccgagtcctgaacttcaagcagaatcctcagttggaatcattgctaatattttgaggagaagtgtatgtgtgaattaagaatctcttcagttcatatttcatttccaactcaggttaagtgtttctggggagagatgttgtgtttacgttacactaaaaccacatgtgcaacaaatacctccattaaatggtctaaaatgtaaattgaattccctggctctctttttaaacgtatttttaaaaaaatctttatacacattgaatgttctgttgattacttgatagtattttatgtttttcattttgagctttttaaaaaagtatcaatacagatgataacagatca

SEQ ID NO: 11021 - DNA, 2306 bp, Homo sapiens
  source 1..2306: mol_type = unassigned DNA
acggcccaatccatagattgtaggccccaacacccaggccgcgcattgggctgatgtataatatgcttttggcagagcttctataaggactcattatcaatttacatttagccaggaaagcatgaaaataagtacttcatgtaaagccattgtgcacatatttgttgctttaaaaaaaaaaaaagattcaattcattaggaaaagccagttctggccaaatattttgaatggcagccattgctatttttcatgttctccccttttgctttctctgtttccctggtttaaagtgtgcactctaataatttagaagatggcagaagcattcaagagcaggaccttctgagcagggcgaggctttgagttcggggcagttttcatggtagcatctgcctgtgctgaagcagaaaacagcatctgggacccccatgacttgggcactcttaggacagcccgcagatggttgcgtggggttcaggggcccttcccgcctggctcctcttgtctgcatcctgccctgtcagtgtggacctaggttcacactctgaggccctgcaaaacatgtcacctgtgggcacctccagttttccagtgcctggtccgcagctcgtctcggcagctgcatccttagggccattcccaaaacctcgggtcacggcgggggcctagggggacagcaaggcctttgccccttaagcctgatgaaaatttgtaggagagacttcagtgtccttatgaatttcagtgaagccgagtgggattaaggtgacagacagaagctctaagtgctttcttcagggagataaagcgctggcgagtgcatcatttaaaccgaagatggagtgagcgccaacaggcactggtggttgttgctgttctaatgggattgcttcgtagatggcccttcatggcggaacacgcgtgtgtcagtggggttcgggctgcgggtggcggctgagtgtccctgtgtgtctcttacaggaacagtgtgtggtggatgcagctctggagtacgttcccggcgctcaccagtttggtctcacacaaaacagccatttcatcttgccttttaatcagtcggctgtcagaaagaagctctcggttgagctaagcatccgcacgttcgcctccagcggcctgatttactacatggctcatcagaaccaagcagactacgctgtgctccagctgcacgggggccgcctccacttcatgtttgaccttggcaaaggcagaacaaaggtctctcaccctgcactgctcagtgatggcaagtggcacacggtcaagacagactatgttaaaagaaaaggcttcataactgtcgacggccgagagtctcccatggtgactgtggtgggagatggaaccatgctggatgtggagggtttgttctacctaggaggcctgccctcccagtaccaggccaggaaaattggaaatatcacccacagcatccctgcctgcattggggatgtgacggttaacagcaaacagctggacaaggacagcccggtgtctgccttcacggtgaacaggtgctacgcagtggcccaggaaggaacatactttgacggaagcggatatgcagctcttgtcaaagagggctacaaagtccagtcagatgtgaacatcacactggagtttcgaacctcctcgcagaatggcgtcctcctggggatcagcactgccaaagtggatgccattggactagagcttgtggacggcaaggtcttgttccatgtcaacaatggtgctggcaggataacagctgcatatgagcccaaaaccgccactgtgctctgtgatggaaaatggcacactcttcaagctaacaaaagcaaacaccgtatcactctgattgttgacgggaacgcagttggcgctgaaagtccacacacccagtctacctcagtggacaccaacaatcccatttatgttggtggctatcctgctggtgtgaagcaaaaatgcctgcgcagccagacctcgttccgcgggtgtttgaggaagctagctctgattaagagcccgcaggtgcagtcctttgacttcagcagagcgttcgaactgcacggagttttccttcattcctgtcctgggaccgagtcctgaacttcaagcagaatcctcagttggaatcattgctaatattttgaggagaagtgtatgtgtgaattaagaatctcttcagttcatatttcatttccaactcaggttaagtgtttctggggagagatgttgtgtttacgttacactaaaaccacatgtgcaacaaatacctccattaaatggtctaaaatgt

SEQ ID NO: 11022 - DNA, 2825 bp, Homo sapiens
  source 1..2825: mol_type = unassigned DNA
attgtagaacctttagaaaaatatagaagaacaccaagtagaaactagccttctagtctttatagatatcaattcaacatttgttattaaatttcgagctcaaataatatgtcttgttctgggttcactgtgaccaccgtgacattgtttgaattccatccatgggaatttcatgttcttgtttgcatctcatgggctggtgatttctgtctttcagtcttttggttttattttttagaacgggccccttgtcagtctcaatgaaaaagatacgaggagattccacttctcttactgaattgtggattttggtaacaacagatgacatttcatttatattagtgtagtgttctagaaagccttcgtgggcatttttggtttcgtagccgatagacctctggctgtggggccagatccagttttctcagtttgactttagaaggtttcagccatccctgacttgaagggaaagggaaacctgggataaagctataacctggggaactgtgttctcttttttacagaaagactttttatccatcgagctgtttcgtggcagagtgaaggttatgactgacctgggttcaggacccattacccttttgacagacagacgttataacaatggaacctggtacaaaattgccttccagcgaaaccggaagcaaggagtgctagcagttatcgatgcctataacaccagtaataaagaaaccaagcagggcgagactccgggagcatcttctgacctcaaccgcctagacaaggacccgatttatgtgggtggattaccaaggtcaagagttgtaaggagaggtgtcaccaccaaaagctttgtgggctgcatcaagaacctggaaatatccagatcaacctttgacttactcagaaattcctatggagtgagaaaaggctgtttactggagaatcagaatggctggtaacatttgccaccacgaacagcagtggcatcatcctggctgccctcggcggggatgtggagaagcggggtgatcgtgaggaagcacacgtgcccttcttttccgtcatgctgatcggaggcaacattgaggtacatgtcaatcctggggatgggacaggcctgagaaaagctctcctgcacgctcccacgggtacctgcagtgatggacaagcgcattccatctccttggtcaggaatcggagaattatcactgtccaattggatgagaacaatcctgtggaaatgaagttgggcacattagtagaaagcaggacgataaatgtgtccaatctgtacgtcgggggaattccagagggagaggggacgtcactgctcacaatgagaagatcgttccatggctgtatcaaaaacctgatcttcaatttggaacttttggatttcaacagtgcagttggccatgagcaagtcgacctggacacctgctggctgtcagaaaggcctaagctggctcccgatgcagaggacagcaagctcttgccagagccccgggcttttccagaacagtgtgtggtggatgcagctctggagtacgttcccggcgctcaccagtttggtctcacacaaaacagccatttcatcttgccttttaatcagtcggctgtcagaaagaagctctcggttgagctaagcatccgcacgttcgcctccagcggcctgatttactacatggctcatcagaaccaagcagactacgctgtgctccagctgcacgggggccgcctccacttcatgtttgaccttggcaaaggcagaacaaaggtctctcaccctgcactgctcagtgatggcaagtggcacacggtcaagacagactatgttaaaagaaaaggcttcataactgtcgacggccgagagtctcccatggtgactgtggtgggagatggaaccatgctggatgtggagggtttgttctacctaggaggcctgccctcccagtaccaggccaggaaaattggaaatatcacccacagcatccctgcctgcattggggatgtgacggttaacagcaaacagctggacaaggacagcccggtgtctgccttcacggtgaacaggtgctacgcagtggcccaggaaggaacatactttgacggaagcggatatgcagctcttgtcaaagagggctacaaagtccagtcagatgtgaacatcacactggagtttcgaacctcctcgcagaatggcgtcctcctggggatcagcactgccaaagtggatgccattggactagagcttgtggacggcaaggtcttgttccatgtcaacaatggtgctggcaggataacagctgcatatgagcccaaaaccgccactgtgctctgtgatggaaaatggcacactcttcaagctaacaaaagcaaacaccgtatcactctgattgttgacgggaacgcagttggcgctgaaagtccacacacccagtctacctcagtggacaccaacaatcccatttatgttggtggctatcctgctggtgtgaagcaaaaatgcctgcgcagccagacctcgttccgcgggtgtttgaggaagctagctctgattaagagcccgcaggtgcagtcctttgacttcagcagagcgttcgaactgcacggagttttccttcattcctgtcctgggaccgagtcctgaacttcaagcagaatcctcagttggaatcattgctaatattttgaggagaagtgtatgtgtgaattaagaatctcttcagttcatatttcatttccaactcaggttaagtgtttctggggagagatgttgtgtttacgttacactaaaaccacatgtgcaacaaatacctccattaaatggtctaaaatgt

SEQ ID NO: 11023 - DNA, 10374 bp, Homo sapiens
  source 1..10374: mol_type = unassigned DNA
gctttctccccagacccaccgagtggcggcggaggcgagatgcgcgggggcgtgctcctggtcttgctgctgtgtgtcgccgcgcagtgccggcagagaggcctgtttcctgccattctcaatcttgccagcaatgctcacatcagcaccaatgccacctgtggcgagaaggggccggagatgttctgcaaacttgtggagcatgtgccaggtcggcccgtccgaaacccacagtgccggatctgtgatggcaacagcgcaaaccccagagaacgccatccaatatcacatgccatagatggcaccaataactggtggcaaagtcccagcattcagaatgggagagaatatcactgggtcacaatcactctggacttaagacaggtctttcaagttgcatatgtcatcattaaagctgccaatgcccctcgacctggaaactggattttggagcgttctctggatggcaccacgttcagcccctggcagtattatgcagtcagcgactcagagtgtttgtctcgttacaatataactccaagacgagggccacccacctacagggctgatgatgaagtgatctgcacctcctattattccagattggtgccacttgagcatggagagattcatacatcactcatcaatggcagaccaagcgctgacgatctttcacccaagttgttggaattcacttctgcacgatatattcgccttcgcttgcaacgcattagaacgctcaatgcagatctcatgacccttagccaccgggaacctaaagaactggatcctattgttaccagacgctattattattcaataaaggacatttctgttggaggcatgtgtatctgctatggccatgctagtagctgcccatgggatgaaactacaaagaaactgcagtgtcaatgtgagcataatacttgcggggagagctgtaacaggtgctgtcctgggtaccatcagcagccctggaggccgggaaccgtgtcctccggcaatacatgtgaagcatgtaattgtcacaataaagccaaagactgttactatgatgaaagtgttgcaaagcagaagaaaagtttgaatactgctggacagttcagaggaggaggggtttgcataaattgcttgcagaacaccatgggaatcaactgtgaaacctgtattgatggatattatagaccacacaaagtaagagtatttctttgccattgctgatcttcatcatcttccccaggtggaaaagagactttgtcaagtcttaacctctgtattggagacttttgtaatatttcatttatatccttgttatgccagtagtgtttttatatatatatttcctactctatcctgcttttcttgctcaaaataagatgtcagtcattgttatttatcttgaattcaggggtccattagctatgtaatcctgggtcataatactaactacagatgtgaaaattcagctataactaaagcagctgtctcttgcctgtaggagatgttcagccaatcttttttttttaatttttattttttgagacggagtctcgctctgtcgccaggctggagtgcagtggtgcgatctcggctcactgcaacctccacctcccgggttcaagcgattctcctgcctcagcctcccgagtagctgggattacaggcatgttccaccacacccagctaatttttgtatttttagtagagacagggtttcaccatgtcggccaggatggtctcaatcccttgaccttgtggtccgcctgccttggcctcccagagtgctgggattacagatgtgagccaccacgcctggccgtgttcagccaatctttaattgacttgatatgtagttcttacatgagtccttgtggtgtcctggttataacgtggctctgagagacagcagcgcgaggggggctggagagcagggataatagaaaaagatgacactttgctaagggtactaactactgccaccatcaaaaagatgtttgggcttcctggcttgggatcatcttatcttcctcaaacctaacccccacccccatgcacaaaatcatcgtaatagtcccatcttgagtaaaaagccaataccttcttatttatactattgccaacattgctgttatttctagtaagagaatccagggcaacctctgcctttcaggtgtctccttatgaggatgagccttgccgcccctgtaattgtgaccctgtggggtccctcagttctgtctgtattaaggatgacctccattctgacttacacaatgggaagcagccaggtcagtgcccatgtaaggaaggttatacaggagaaaaatgtgatcgctgccaacttggctataaggattacccgacctgtgtctcctgtgggtgcaacccagtgggcagtgccagtgatgagccctgcacagggccctgtgtttgtaaggaaaacgttgaggggaaggcctgtgatcgctgcaagccaggattctataacttgaaggaaaaaaacccccggggctgctccgagtgcttctgctttggcgtttctgatgtctgcagcagcctctcttggcctgttggtcaggtaaacagtatgtccgggtggctggtcaccgacttgatcagtcccaggaagatcccgtctcagcaagatgcactaggcgggcgccatcaggtcagcatcaacaacaccgcggtcatgcagagactggctcccaagtactactgggcagcccccgaggcctaccttggaaataagctgactgcgtttggcggattcctgaaatacacggtgtcctacgatattccggtagagacggtagacagtaacctcatgtcgcatgctgacgtcatcattaagggaaacggactcactttaagcacacaggctgagggtctgtcattgcagccttatgaagagtacctaaacgtggttagacttgtgcctgaaaacttccaagattttcacagcaaaaggcagattgatcgtgaccagctgatgactgtccttgccaatgtgacacatcttttgatcagagccaactacaattctgcaaaaatggctctttacaggttggagtccgtctctctggacatagccagctctaatgccatcgacctggtggtggccgctgatgtggagcactgtgaatgtccgcaaggctacacagggacctcctgtgagtcgtgcctctctggctattaccgcgtggatggaatactctttggaggaatttgtcaaccctgtgaatgccacggccatgcagctgagtgtaatgttcacggcgtttgcattgcgtgtgcgcacaacaccaccggcgtccactgtgagcagtgcttgcccggcttctacggggagccttcccgagggacacctggggactgccagccctgcgcctgccctctcaccatagcctccaacaatttcagccccacctgccacctcaatgatggagatgaagtggtctgtgactggtgtgccccgggctactcaggagcttggtgtgagagatgtgcagatggttactatggaaacccaacagtgcctggcgaatcttgtgttccctgtgactgcagcggcaacgtggacccctcggaggctggtcactgtgactcagtcaccggggagtgcctgaagtgcctggggaacacagatggcgcccactgtgaaaggtgtgctgacgggttctatggggacgctgtgacagccaagaactgccgcgcctgtgaatgccatgtgaaaggctcccattctgccgtgtgccatcttgagaccgggctctgtgactgcaaaccaaacgtgactggacagcagtgtgaccagtgcttgcatggctattatgggctggactcaggccatggctgccggccctgcaactgcagcgtggcaggctccgtgtcagatggctgcacggatgaaggccagtgtcactgtgtcccaggtgtggcagggaaaaggtgtgacaggtgtgcccatggcttctacgcctaccaggatggtagctgtacaccctgtgactgcccacacactcagaatacctgcgacccagaaactggagagtgtgtctgcccccctcacacacagggtgtgaagtgtgaagaatgtgaggatgggcactggggctacgatgcggaggtggggtgccaggcctgcaattgcagtctcgtggggtcgactcatcatcggtgcgatgtggtcaccggccattgccagtgcaagtcaaaatttggtggccgggcctgcgatcagtgttccttgggttacagagactttcccgactgtgttccctgtgactgtgacctgagggggacgtcgggggacgcctgcaacctggagcagggtctctgcggctgtgtggaggaaaccggggcctgcccttgcaaggaaaatgtctttggtcctcagtgcaacgaatgtcgagagggcaccttcgctctccgcgcagacaaccccctgggctgcagcccgtgcttctgctccgggctgtcccacctctgctcagagctggaggactacgtgaggaccccagtaacgctgggctccgatcagcctcttctgcgtgtggtttctcagagtaacttgaggggcacgaccgagggggtttactaccaggcccccgacttcctgctggatgccgccaccgtccggcagcacatccgtgcagagccgttttactggcggctgccgcagcagttccaaggagaccagctcatggcctatggtggcaaactgaagtacagcgtggccttctattctttggatggcgtcggcacctccaattttgagcctcaagttctcatcaaaggtggtcggatcagaaagcaagtcatttacatggatgcaccagccccagagaatggagtgagacaggaacaagaagtagcaatgagagagaatttttggaaatattttaactctgtttctgaaaaacctgtcacgcgagaggattttatgtctgtcctcagcgatattgagtacatcctcatcaaggcatcgtatggtcaaggattacagcagagcagaatctcagacatttcaatggaggttggcagaaaggctgaaaagctgcacccagaagaagaggttgcatctcttttagagaattgtgtctgtcctcctggcactgtgggattctcatgtcaggactgcgcccctgggtaccacagagggaagctcccagcagggagtgacaggggaccacgccctctggttgctccttgtgttccctgcagttgcaacaaccacagtgacacctgtgaccccaacaccgggaagtgtctgaactgtggcgataacacagcaggtgaccattgtgatgtgtgtacttctggctactacgggaaggtgactggctcagcaagtgactgtgctctgtgtgcctgtcctcacagccctcctgccagttttagtcccacttgtgtcttggaaggggaccacgatttccgttgtgacgcctgtctcctgggctatgaaggaaaacactgtgaaaggtgctcctcaagctattatgggaaccctcaaacaccaggtggcagttgccagaagtgtgactgcaacccgcacggctctgtccacggtgactgtgaccgcacatctgggcagtgcgtttgcaggctgggggcctcggggctccggtgcgatgagtgtgaaccgaggcacattctgatggaaacagattgtgtttcctgtgatgatgagtgtgtaggtgtgctgctgaatgacttggatgagattggtgatgccgttctttctctgaacctcactggcattatccctgtcccatatggaattttgtcaaacctggaaaatacaactaaatatctccaggaatctttattaaaagaaaatatgcaaaaggacctgggaaaaattaagcttgaaggtgttgcagaagaaacggacaacctgcaaaagaagctcactaggatgttagcgagtacccaaaaggtgaatagggcaactgagagaatcttcaaggagagtcaagacctggccatagccattgagaggctgcagatgagcatcacagaaattatggaaaagacaactttaaatcagactttggatgaagatttcctactacccaattctactcttcagaacatgcaacagaatggtacatctttgctagaaatcatgcagataagagacttcacacagttgcaccaaaatgccacccttgaactcaaggctgctgaagatttattgtcacaaattcaggaaaattaccagaagccgctggaagaattggaggtattgaaagaagcagcaagccacgtcctttcaaagcacaacaatgaactaaaggcggctgaggcgctcgtgagggaagctgaggcaaagatgcaggaaagcaaccacctgctgctcatggtcaatgctaatctgagagaattcagtgataaaaagctgcatgttcaagaagaacaaaatctgacctcagagctcattgtccaaggaagaggattgatagatgctgctgctgcacaaacagatgctgtacaagatgctctagagcacttagaggatcaccaggataagctacttttatggtctgccaaaatcaggcaccacatagatgacctggtcatgcacatgtcccaaaggaacgcagtcgacctggtctacagagctgaggaccatgccgctgagttccagagactagcagatgttctgtacagtggccttgaaaacatcagaaatgtgtccctgaatgccaccagtgcagcctatgtccattacaacatccagagcctgattgaagaatcggaggaactggccagagatgctcacaggactgtgactgagacgagcctgctctcagaatcccttgtttctaacgggaaagcggccgtgcagcgcagctccagatttctaaaagaaggcaacaacctcagcaggaagcttccaggtattgcattggaactgagtgaattgagaaataagacaaacagatttcaagagaatgctgttgaaattaccaggcaaaccaatgaatcactcttgatacttagagcaattcctaaaggtataagagacaagggagccaaaaccaaagagctggccacgtctgcaagccagagcgcggtgagcacgctgagggacgtggcggggctgagccaggagctgctgaacacatctgccagcctgtccagggtcaacaccacattacgagagacacaccagcttctgcaggactccaccatggccactctgttggctggaagaaaagtcaaagacgtggaaattcaagccaaccttttgtttgatcggttgaagcctttgaagatgttagaggagaatctgagcagaaacctatcagaaattaaactgttgatcagccaggcccgcaaacaagcagcttctattaaagtcgccgtgtctgcagacagagattgcatccgggcctaccagcctcagatttcctctaccaactacaataccttaacactaaatgttaagacacaggaacccgataatcttctcttctacctcggtagcagcaccgcttctgatttccttgcagtggagatgcggcgagggagagtggccttcctgtgggacctgggctccgggtccacacgcttggagtttccagactttcccattgatgacaacagatggcacagtatccatgtagccagatttggaaacattggttcactgagtgtaaaggaaatgagctcaaatcaaaagtcaccaacaaaaacaagtaaatcccctgggacagctaatgttctggatgtaaacaattcaacactcatgtttgttggaggtcttggaggacaaatcaagaaatctcctgctgtgaaggttactcattttaaaggctgcttgggggaggccttcctgaatggaaaatccataggcctatggaactatattgaaagggaaggcaagtgccgtgggtgcttcggaagctcccagaatgaagacccttccttccattttgacgggagtgggtactctgtcgtggagaagtcacttccggctaccgtgacccagataatcatgctttttaataccttttcacctaatggacttcttctctacctgggttcatacggcacaaaagactttttatccatcgagctgtttcgtggcagagtgaaggttatgactgacctgggttcaggacccattacccttttgacagacagacgttataacaatggaacctggtacaaaattgccttccagcgaaaccggaagcaaggagtgctagcagttatcgatgcctataacaccagtaataaagaaaccaagcagggcgagactccgggagcatcttctgacctcaaccgcctagacaaggacccgatttatgtgggtggattaccaaggtcaagagttgtaaggagaggtgtcaccaccaaaagctttgtgggctgcatcaagaacctggaaatatccagatcaacctttgacttactcagaaattcctatggagtgagaaaaggctgtttactggagcccatccggagtgttagcttcctgaaaggcggctacattgaattgccacccaaatctttgtcaccagaatcagaatggctggtaacatttgccaccacgaacagcagtggcatcatcctggctgccctcggcggggatgtggagaagcggggtgatcgtgaggaagcacacgtgcccttcttttccgtcatgctgatcggaggcaacattgaggtacatgtcaatcctggggatgggacaggcctgagaaaagctctcctgcacgctcccacgggtacctgcagtgatggacaagcgcattccatctccttggtcaggaatcggagaattatcactgtccaattggatgagaacaatcctgtggaaatgaagttgggcacattagtagaaagcaggacgataaatgtgtccaatctgtacgtcgggggaattccagagggagaggggacgtcactgctcacaatgagaagatcgttccatggctgtatcaaaaacctgatcttcaatttggaacttttggatttcaacagtgcagttggccatgagcaagtcgacctggacacctgctggctgtcagaaaggcctaagctggctcccgatgcagaggacagcaagctcttgccagagccccgggcttttccagaacagtgtgtggtggatgcagctctggagtacgttcccggcgctcaccagtttggtctcacacaaaacagccatttcatcttgccttttaatcagtcggctgtcagaaagaagctctcggttgagctaagcatccgcacgttcgcctccagcggcctgatttactacatggctcatcagaaccaagcagactacgctgtgctccagctgcacgggggccgcctccacttcatgtttgaccttggcaaaggcagaacaaaggtctctcaccctgcactgctcagtgatggcaagtggcacacggtcaagacagactatgttaaaagaaaaggcttcataactgtcgacggccgagagtctcccatggtgactgtggtgggagatggaaccatgctggatgtggagggtttgttctacctaggaggcctgccctcccagtaccaggccaggaaaattggaaatatcacccacagcatccctgcctgcattggggatgtgacggttaacagcaaacagctggacaaggacagcccggtgtctgccttcacggtgaacaggtgctacgcagtggcccaggaaggaacatactttgacggaagcggatatgcagctcttgtcaaagagggctacaaagtccagtcagatgtgaacatcacactggagtttcgaacctcctcgcagaatggcgtcctcctggggatcagcactgccaaagtggatgccattggactagagcttgtggacggcaaggtcttgttccatgtcaacaatggtgctggcaggataacagctgcatatgagcccaaaaccgccactgtgctctgtgatggaaaatggcacactcttcaagctaacaaaagcaaacaccgtatcactctgattgttgacgggaacgcagttggcgctgaaagtccacacacccagtctacctcagtggacaccaacaatcccatttatgttggtggctatcctgctggtgtgaagcaaaaatgcctgcgcagccagacctcgttccgcgggtgtttgaggaagctagctctgattaagagcccgcaggtgcagtcctttgacttcagcagagcgttcgaactgcacggagttttccttcattcctgtcctgggaccgagtcctgaacttcaagcagaatcctcagttggaatcattgctaatattttgaggagaagtgtatgtgtgaattaagaatctcttcagttcatatttcatttccaactcaggttaagtgtttctggggagagatgttgtg

SEQ ID NO: 11024 - DNA, 4577 bp, Homo sapiens
  source 1..4577: mol_type = unassigned DNA
gatctttttttttttttttgtagttgagctgaaattcatataacctaaaatcgaccatttcatagtgaacaattcagcagcgtttagtgcattcacaatgttacgaggccacctttcctatctagttgcaaacattttcatcactcaaaagcctatgccattaattagtcactccccattctcctctctccccactcctggcaaccaccaatttgctttccggctgtatagatggatttactattctggatattttgtacaaatggaatcatatgatgatgtcttgcatctttcacttagcatgtctttgaagttcatccccattggagcatggatcagtacttcattcctttttatggctgagtaatattccactgtatatacataccacagtgtgttcatcagttacttcatggatgaactttggggcatttctgccttttagctattatgaataaatgctgctatgaacatatgtggataagtatttgtttgagtccctgtcttcagttcttctgggtgtatacttaggagtggaatcactggttatatgataattctatgtttaactttttgaggaactgccaaacttcttctccattagtcttagtaaggttaccttcaaatcaaagtgtgcttactaagtcagcaaaaaggaatgatattagccattgctagcaagggtattgtgagatactcacgttccaattcttctagtgtataaactacctcttttcaatgtgtcgaaaaaaaattaaaagctttaaacattttcacatccttcaaatgtttaattctacttttcataatgttggaaacaacatcacaggcaaaacaattaaacattcacatgtatggtaataaaaagttggaaaatactttaaatttcattgataaaaagacaaattacaatatatctacttattggtatctaatgtagcaataaaccataaatatgaggcaatgcagaatggaaatgtttgaaatcttcagcaataatagcataatgcagaatataaattatatgaacagagattagaaagtaacatacaaaatgtaacattgtgacagctgaagagattcttaaggaattgctctactcacttgatgttaatcttctcacgttatcttcataagatgaaagttttctaaatcatatagtaatgtgttttgtctgggaaattctctatgcaacctccccagcccttcttttccgtcatgctgatcggaggcaacattgaggtacatgtcaatcctggggatgggacaggcctgagaaaagctctcctgcacgctcccacgggtacctgcagtgatggacaagcgcattccatctccttggtcaggaatcggagaattatcactgtccaattggatgagaacaatcctgtggaaatgaagttgggcacattagtagaaagcaggacgataaatgtgtccaatctgtacgtcgggggaattccagagggagaggggacgtcactgctcacaatgagaagatcgttccatggctgtatcaaaaacctgatcttcaatttggaacttttggatttcaacagtgcagttggccatgagcaagtcgacctggacacctgctggctgtcagaaaggcctaagctggctcccgatgcagaggacagcaagctcttgccagagccccgggcttttccagtaggagcggcttcctttactatcagtcaggtccagtcagcaaaggagggcctaggacagagggagttaaaatggggccttgctgtaaaggtgcctgcgaaagctggagctggagctggagctggagctgtgctaaaaatcagagcggggacagggagggaaagggtgcctcaagcaactcagatgacacggcccaatccatagattgtaggccccaacacccaggccgcgcattgggctgatgtataatatgcttttggcagagcttctataaggactcattatcaatttacatttagccaggaaagcatgaaaataagtacttcatgtaaagccattgtgcacatatttgttgctttaaaaaaaaaaaaagattcaattcattaggaaaagccagttctggccaaatattttgaatggcagccattgctatttttcatgttctccccttttgctttctctgtttccctggtttaaagtgtgcactctaataatttagaagatggcagaagcattcaagagcaggaccttctgagcagggcgaggctttgagttcggggcagttttcatggtagcatctgcctgtgctgaagcagaaaacagcatctgggacccccatgacttgggcactcttaggacagcccgcagatggttgcgtggggttcaggggcccttcccgcctggctcctcttgtctgcatcctgccctgtcagtgtggacctaggttcacactctgaggccctgcaaaacatgtcacctgtgggcacctccagttttccagtgcctggtccgcagctcgtctcggcagctgcatccttagggccattcccaaaacctcgggtcacggcgggggcctagggggacagcaaggcctttgccccttaagcctgatgaaaatttgtaggagagacttcagtgtccttatgaatttcagtgaagccgagtgggattaaggtgacagacagaagctctaagtgctttcttcagggagataaagcgctggcgagtgcatcatttaaaccgaagatggagtgagcgccaacaggcactggtggttgttgctgttctaatgggattgcttcgtagatggcccttcatggcggaacacgcgtgtgtcagtggggttcgggctgcgggtggcggctgagtgtccctgtgtgtctcttacaggaacagtgtgtggtggatgcagctctggagtacgttcccggcgctcaccagtttggtctcacacaaaacagccatttcatcttgccttttaatcagtcggctgtcagaaagaagtaggtatcattctaacatccttatgcggcgtctcattgctagatgtatgggggtgttctgcagccacagagtcttttccaaaagaacctgcttttattttatgatgaagtgcttgatttgcaaccaaatggcaaagagaaggaattcagtgttggtgcaaatcacaacgctttcatggtggttcactggggagtctgtggtttctgccttttcccttctggagagtggctggcttcccctttctgtgtgcatgtaaggaagcgtgtgggcatctaaattaagtctcctggatctattattgtctggactttcaaccccattccactttaagcattccctagtctgatgtctttgtctacccaaactcttacactgtggtggccaaaatcccgagtgccacacccacccctctctgcaccttctggccctcatacctgcctgtccctgggacccttctgccaagggaagatctcaaggcctggagcttggggctcccggactccatgttgctcctctctcctcctgaggtcctccagctcacctgccaggcttgcctgcagtctctgccatgccctgcccgtcttgttgtcattggctgtgccaccctgtcatacccccttagacctgggctcctgtctgtcttctgcagctcctgccatcactctctgtgaattcaacagctgcctaacacctgacctttctgtgctcaaactgtgatctgtggaaggtctttccctgctccctcctcagccagcctcttccgtggccatacccttgacttcttcacaggtatccatccctctcacagtctcgactttaaaagcctcctattagcacacccctttcttcttgtctccactctgtgcctccccactcctgcagtttctcagctgcatggagacctctaagccgctagccctaatgccctcccaccactatctcccctcttctctagccccaaatcacaattcatcccccagataggttccaggccagtgttacaggtgtcctctgcaaaatcccctaaccctttctctctcccactcctgcgagcccaggtaaaagccaacattccgccttctctgtgccagaacccacacgggagaccaaggccaaggagatggatgtctccttcctagctggtttgagctggatatcatagccgtcaatctcagatggagcctccaaacgacatggggagccagtgcattgctctaatatgttcatggtttttattctccatgactacttcctcatagctgctcttagctcagagccctgtgcaccgcagtccctcttcccaccccagctgatgacttgcctcgttgagaagaaagagctccttcatccgtccaccaccaaaaagaccagcccctgcttttgttcctgaccctctatctcttctgctaccacagatgaagggtacttgttcctagcaaagcccacccagccagccccagcttgtcctctggatcccatccgccctctcctcctaggacatgcacagcagccactcctcacagaccagcacacagatgccgctgtcaccccatcgtcagcagtgacagcaagagcagcaaactattgtgctggaggttgacacaaagatttttacacagatg

SEQ ID NO: 11025 - DNA, 655 bp, Homo sapiens
  source 1..655: mol_type = unassigned DNA
ccagatccagttttctcagtttgactttagaaggtttcagccatccctgacttgaagggaaagggaaacctgggataaagctataacctggggaactgtgttctcttttttacagaaagactttttatccatcgagctgtttcgtggcagagtgaaggttatgactgacctgggttcaggacccattacccttttgacagacagacgttataacaatggaacctggtacaaaattgccttccagcgaaaccggaagcaaggagtgctagcagttatcgatgcctataacaccagtaataaagaaaccaagcagggcgagactccgggagcatcttctgacctcaaccgcctagacaaggacccgatttatgtgggtggattaccaaggtcaagagttgtaagaacgtctaaatcctgttaccgtgcaatatttggagaccctacttgctgtcatacttcatctccctctctctagacattttagagaagtagatctcttttaaggcaaaaggaaaaaaaaaaaaagaaatcatgctttctgcagacttttctggattctcctttgtgtggttagactgaataatgtatgtgcaagttgaaagaccagcatcaagaagtggaatgaaatggcacaggacacacaatggaatccttg

SEQ ID NO: 11026 - DNA, 536 bp, Homo sapiens
  source 1..536: mol_type = unassigned DNA
actgagatgatctttaagatcctgcccagttgttactcattctaggattccacttcataactgaaaggaaatccagtgattacaaactggcttttttctaatgtggctctctcaaaatttggatctgttagattgaagctcccagagagaagttttgtgcacttggagaatgtattttgcttggtcagcttatatattggttatgtttgtttgcttgtttgcattagaaatctcctgctgtgaaggttactcattttaaaggctgcttgggggaggccttcctgaatggaaaatccataggcctatggaactatattgaaagggaaggcaagtgccgtgggtgcttcggaagctcccagaatgaagacccttccttccattttgacgggagtgggtactctgtcgtggagaagtcacttccggctaccgtgacccagataatcatgctttttaataccttttcacctaatggacttcttctctacctgggttcatacggcacaaaagactttttatccatcgagctgtttcgtggc

SEQ ID NO: 11027 - DNA, 541 bp, Homo sapiens
  source 1..541: mol_type = unassigned DNA
gggaagcagccaggtcagtgcccatgtaaggaaggttatacaggagaaaaatgtgatcgctgccaacttggctataaggattacccgacctgtgtctcctgtgggtgcaacccagtgggcagtgccagtgatgagccctgcacagggccctgtgtttgtaaggaaaacgttgaggggaaggcctgtgatcgctgcaagccaggattctataacttgaaggaaaaaaacccccggggctgctccgagtgcttctgctttggcgtttctgatgtctgcagcagcctctcttggcctgttggtcaggtgggaggcgccatctgcgcggcgggatttaatgagcaggtcgtattgcacaagcttggcacgagctgtgtgaggaggaaatgaggatgacttcccgtgacaccactctcatcgctatgcaatgatactgacgtgggtcaaaggcagccgtctgcctctcaagattctttataggtcatgtgcttactcccacacacatttctctatggaaaaaacaggatgatgtggcactagagaa

SEQ ID NO: 11028 - DNA, 1310 bp, Homo sapiens
  source 1..1310: mol_type = unassigned DNA
agataatcatgctttttaataccttttcacctaatggacttcttctctacctgggttcatacggcacaaaagactttttatccatcgagctgtttcgtggcagagtgaaggttatgactgacctgggttcaggacccattacccttttgacagacagacgttataacaatggaacctggtacaaaattgccttccagcgaaaccggaagcaaggagtgctagcagttatcgatgcctataacaccagtaataaagaaaccaagcagggcgagactccgggagcatcttctgacctcaaccgcctagacaaggacccgatttatgtgggtggattaccaaggtcaagagttgtaaggagaggtgtcaccaccaaaagctttgtgggctgcatcaagaacctggaaatatccagatcaacctttgacttactcagaaattcctatggagtgagaaaaggctgtttactggagcccatccggagtgttagcttcctgaaaggcggctacattgaattgccacccaaatctttgtcaccagaatcagaatggctggtaacatttgccaccacgaacagcagtggcatcatcctggctgccctcggcggggatgtggagaagcggggtgatcgtgaggaagcacacgtgcccttcttttccgtcatgctgatcggaggcaacattgaggtacatgtcaatcctggggatgggacaggcctgagaaaagctctcctgcacgctcccacgggtacctgcagtgatggacaagcgcattccatctccttggtcaggaatcggagaattatcactgtccaattggatgagaacaatcctgtggaaatgaagttgggcacattagtagaaagcaggacgataaatgtgtccaatctgtacgtcgggggaattccagagggagaggggacgtcactgctcacaatgagaagatcgttccatggctgtatcaaaaacctgatcttcaatttggaacttttggatttcaacagtgcagttggcatgagcaagtcgacctggacacctgctggctgtcagaaaggcctaagctggctcccgatgcagaggacaaagctcttgccagagccccgggcttttccagtaggagcggcttcctttactatcagtcaggtccagtcagcaaaggagggcctaggacagagggagttaaaatggggccttgctgtaaaggtgcctgcgaaagctggagctggagctggagctggagctgtgctaaaaatcagagcggggacagggagggaaagggtgcctcaagcaactcagatgacacggcccaatcca

SEQ ID NO: 11029 - DNA, 9640 bp, Homo sapiens
  source 1..9640: mol_type = unassigned DNA
cagcgactcctctggctcccgagaagtggatccggtcgcggccactacgatgccgggagccgccggggtcctcctccttctgctgctctccggaggcctcgggggcgtacaggcgcagcggccgcagcagcagcggcagtcacaggcacatcagcaaagaggtttattccctgctgtcctgaatcttgcttctaatgctcttatcacgaccaatgcaacatgtggagaaaaaggacctgaaatgtactgcaaattggtagaacatgtccctgggcagcctgtgaggaacccgcagtgtcgaatctgcaatcaaaacagcagcaatccaaaccagagacacccgattacaaatgctattgatggaaagaacacttggtggcagagtcccagtattaagaatggaatcgaataccattatgtgacaattaccctggatttacagcaggtgttccagatcgcgtatgtgattgtgaaggcagctaactccccccggcctggaaactggattttggaacgctctcttgatgatgttgaatacaagccctggcagtatcatgctgtgacagacacggagtgcctaacgctttacaatatttatccccgcactgggccaccgtcatatgccaaagatgatgaggtcatctgcacttcattttactccaagatacaccccttagaaaatggagagattcacatctctttaatcaatgggagaccaagtgccgatgatccttctccagaactgctagaatttacctccgctcgctatattcgcctgagatttcagaggatccgcacactgaatgctgacttgatgatgtttgctcacaaagacccaagagaaattgaccccattgtcaccagaagatattactactcggtcaaggatatttcagttggagggatgtgcatctgctatggtcatgccagggcttgtccacttgatccagcgacaaataaatctcgctgtgagtgtgagcataacacatgtggcgatagctgtgatcagtgctgtccaggattccatcagaaaccctggagagctggaacttttctaactaaaactgaatgtgaagcatgcaattgtcatggaaaagctgaagaatgctattatgatgaaaatgttgccagaagaaatctgagtttgaatatacgtggaaagtacattggagggggtgtctgcattaattgtacccaaaacactgctggtataaactgcgagacatgtactgatggcttcttcagacccaaaggggtatctccaaattatccaaggccatgccagccatgtcattgcgatccaattggttccttaaatgaagtctgtgtcaaggatgagaaacatgctcgacgaggtttggcacctggatcctgtcattgcaaaactggttttggaggtgtgagctgtgatcggtgtgccaggggctacactggctacccggactgcaaagcctgtaactgcagtgggttagggagcaaaaatgaggatccttgttttggcccctgtatctgcaaggaaaatgttgaaggaggagactgtagtcgttgcaaatccggcttcttcaatttgcaagaggataattggaaaggctgcgatgagtgtttctgttcaggggtttcaaacagatgtcagagttcctactggacctatggcaaaatacaagatatgagtggctggtatctgactgaccttcctggccgcattcgagtggctccccagcaggacgacttggactcacctcagcagatcagcatcagtaacgcggaggcccggcaagccctgccgcacagctactactggagcgcgccggctccctatctgggaaacaaactcccagcagtaggaggacagttgacatttaccatatcatatgaccttgaagaagaggaagaagatacagaacgtgttctccagcttatgattatcttagagggtaatgacttgagcatcagcacagcccaagatgaggtgtacctgcacccatctgaagaacatactaatgtattgttacttaaagaagaatcatttaccatacatggcacacattttccagtccgtagaaaggaatttatgacagtgcttgcgaatttgaagagagtcctcctacaaatcacatacagctttgggatggatgccatcttcaggttgagctctgttaaccttgaatccgctgtctcctatcctactgatggaagcattgcagcagctgtagaagtgtgtcagtgcccaccagggtatactggctcctcttgtgaatcttgttggcctaggcacaggcgagttaacggcactatttttggtggcatctgtgagccatgtcagtgctttggtcatgcggagtcctgtgatgacgtcactggagaatgcctgaactgtaaggatcacacaggtggcccatattgtgataaatgtcttcctggtttctatggcgagcctactaaaggaacctctgaagactgtcaaccctgtgcctgtccactcaatatcccatccaataactttagcccaacgtgccatttagaccggagtcttggattgatctgtgatggatgccctgtcgggtacacaggaccacgctgtgagaggtgtgcagaaggctattttggacaaccctctgtacctggaggatcatgtcagccatgccaatgcaatgacaaccttgacttctccatccctggcagctgtgacagcttgtctggctcctgtctgatatgtaaaccaggtacaacaggccggtactgtgagctctgtgctgatggatattttggagatgcagttgatgcgaagaactgtcagccctgtcgctgtaatgccggtggctctttctctgaggtttgccacagtcaaactggacagtgtgagtgcagagccaacgttcagggtcagagatgtgacaaatgcaaggctgggacctttggcctacaatcagcaaggggctgtgttccctgcaactgcaattcttttgggtctaagtcattcgactgtgaagagagtggacaatgttggtgccaacctggagtcacagggaagaaatgtgaccgctgtgcccacggctatttcaacttccaagaaggaggctgcacagcttgtgaatgttctcatctgggtaataattgtgacccaaagactgggcgatgcatttgccctcccaataccattggagagaaatgttctaaatgtgcacccaatacctggggccacagcattaccactggttgtaaggcttgtaactgcagcacagtgggatccttggatttccaatgcaatgtaaatacaggccaatgcaactgtcatccaaaattctctggtgcaaaatgtacagagtgcagtcgaggtcactggaactaccctcgctgcaatctctgtgactgcttcctccctgggacagatgccacaacctgtgattcagagactaaaaaatgctcctgtagtgatcaaactgggcagtgcacttgtaaggtgaatgtggaaggcatccactgtgacagatgccggcctggcaaattcggactcgatgccaagaatccacttggctgcagcagctgctattgcttcggcactactacccagtgctctgaagcaaaaggactgatccggacgtgggtgactctgaaggctgagcagaccattctacccctggtagatgaggctctgcagcacacgaccaccaagggcattgtttttcaacatccagagattgttgcccacatggacctgatgagagaagatctccatttggaacctttttattggaaacttccagaacaatttgaaggaaagaagttgatggcctatgggggcaaactcaagtatgcaatctatttcgaggctcgggaagaaacaggtttctctacatataatcctcaagtgatcattcgaggtgggacacctactcatgctagaattatcgtcaggcatatggctgctcctctgattggccaattgacaaggcatgaaattgaaatgacagagaaagaatggaaatattatggggatgatcctcgagtccatagaactgtgacccgagaagacttcttggatatactatatgatattcattacattcttatcaaagctacttatggaaatttcatgcgacaaagcaggatttctgaaatctcaatggaggtagctgaacaaggacgtggaacaacaatgactcctccagctgacttgattgaaaaatgtgattgtcccctgggctattctggcctgtcctgtgaggcatgcttgccgggattttatcgactgcgttctcaaccaggtggccgcacccctggaccaaccctgggcacctgtgttccatgtcaatgtaatggacacagcagcctgtgtgaccctgaaacatcgatatgccagaattgtcaacatcacactgctggtgacttctgtgaacgatgtgctcttggatactatggaattgtcaagggattgccaaatgactgtcagcaatgtgcctgccctctgatttcttccagtaacaatttcagcccctcttgtgtcgcagaaggacttgacgactaccgctgcacggcttgtccacggggatatgaaggccagtactgtgaaaggtgtgcccctggctatactggcagtccaggcaaccctggaggctcctgccaagaatgtgagtgtgatccctatggctcactgcctgtgccctgtgaccctgtcacaggattctgcacgtgccgacctggagccacgggaaggaagtgtgacggctgcaagcactggcatgcacgcgagggctgggagtgtgttttttgtggagatgagtgcactggccttcttctcggtgacttggctcgcctggagcagatggtcatgagcatcaacctcactggtccgctgcctgcgccatataaaatgctgtatggtcttgaaaatatgactcaggagctaaagcacttgctgtcacctcagcgggccccagagaggcttattcagctggcagagggcaatctgaatacactcgtgaccgaaatgaacgagctgctgaccagggctaccaaagtgacagcagatggcgagcagaccggacaggatgctgagaggaccaacacaagagcaaagtccctgggagaattcattaaggagcttgcccgggatgcagaagctgtaaatgaaaaagctataaaactaaatgaaactctaggaactcgagacgaggcctttgagagaaatttggaagggcttcagaaagagattgaccagatgattaaagaactgaggaggaaaaatctagagacacaaaaggaaattgctgaagatgagttggtagctgcagaagcccttctgaaaaaagtgaagaagctgtttggagagtcccggggggaaaatgaagaaatggagaaggatctccgggaaaaactggctgactacaaaaacaaagttgatgatgcttgggaccttttgagagaagccacagataaaatcagagaagctaatcgcctatttgcagtaaatcagaaaaacatgactgcattggagaaaaagaaggaggctgttgaaagcggcaaacgacaaattgagaacactttaaaagagggcaatgacatactcgatgaagccaaccgtcttgcagatgaaatcaactccatcatagactatgttgaagacatccaaactaaattgccacctatgtctgaggagcttaatgataaaatagatgacctctcccaagaaataaaggacaggaagcttgctgagaaggtgtcccaggctgagagccacgcagctcagttgaatgactcatctgctgtccttgatggaatccttgatgaggctaaaaacatctccttcaatgccactgcagccttcaaagcttacagcaatattaaggactatattgatgaagctgagaaagttgccaaagaagccaaagatcttgcacatgaagctacaaaactggcaacaggtcctcggggtttattaaaggaagatgccaaaggctgtcttcagaaaagcttcaggattcttaacgaagccaagaagttagcaaatgatgtaaaagaaaatgaagaccatctaaatggcttaaaaaccaggatagaaaatgctgatgctagaaatggggatctcttgagaactttgaatgacactttgggaaagttatcagctattccaaatgatacagctgctaaactgcaagctgttaaggacaaagccagacaagccaacgacacagctaaagatgtactggcacagattacagagctccaccagaacctcgatggcctgaagaagaattacaataaactagcagacagcgtcgccaaaacgaatgctgtggttaaagatccttccaagaacaaaatcattgccgatgcagatgccactgtcaaaaatttagaacaggaagctgaccggctaatagataaactcaaacccatcaaggaacttgaggataacctaaagaaaaacatctctgagataaaggaattgataaaccaagctcggaaacaagccaattctatcaaagtatctgtgtcttcaggaggtgactgcattcgaacatacaaaccagaaatcaagaaaggaagttacaataatattgttgtcaacgtaaagacagctgttgctgataacctcctcttttatcttggaagtgccaaatttattgactttctggctatagaaatgcgtaaaggcaaagtcagcttcctctgggatgttggatctggagttggacgtgtagagtacccagatttgactattgatgactcatattggtaccgtatcgtagcatcaagaactgggagaaatggaactatttctgtgagagccctggatggacccaaagccagcattgtgcccagcacacaccattcgacgtctcctccagggtacacgattctagatgtggatgcaaatgcaatgctgtttgttggtggcctgactgggaaattaaagaaggctgatgctgtacgtgtgattacattcactggctgcatgggagaaacatactttgacaacaaacctataggtttgtggaatttccgagaaaaagaaggtgactgcaaaggatgcactgtcagtcctcaggtggaagatagtgaggggactattcaatttgatggagaaggttatgcattggtcagccgtcccattcgctggtaccccaacatctccactgtcatgttcaagttcagaacattttcttcgagtgctcttctgatgtatcttgccacacgagacctgagagatttcatgagtgtggagctcactgatgggcacataaaagtcagttacgatctgggctcaggaatggcttccgttgtcagcaatcaaaaccataatgatgggaaatggaaatcattcactctgtcaagaattcaaaaacaagccaatatatcaattgtagatatagatactaatcaggaggagaatatagcaacttcgtcttctggaaacaactttggtcttgacttgaaagcagatgacaaaatatattttggtggcctgccaacgctgagaaacttgagtatgaaagcaaggccagaagtaaatctgaagaaatattccggctgcctcaaagatattgaaatttcaagaactccgtacaatatactcagtagtcccgattatgttggtgttaccaaaggatgttccctggagaatgtttacacagttagctttcctaagcctggttttgtggagctctcccctgtgccaattgatgtaggaacagaaatcaacctgtcattcagcaccaagaatgagtccggcatcattcttttgggaagtggagggacaccagcaccacctaggagaaaacgaaggcagactggacaggcctattatgcaatactcctcaacaggggccgtctggaagtgcatctctccacaggggcacgaacaatgaggaaaattgtgatcagaccagagccgaatctgtttcatgatggaagagaacattccgttcatgtagagcgaactagaggcatctttacagttcaagtggatgaaaacagaagatacatgcaaaacctgacagttgaacagcctatcgaagttaaaaagcttttcgttgggggtgctccacctgaatttcaaccttccccactcagaaatattcctccttttgaaggctgcatatggaatcttgttattaactctgtccccatggactttgcaaggcctgtgtccttcaaaaatgctgacattggtcgctgtgcccatcagaaactccgtgaagatgaagatggagcagctccagctgaaatagttatccagcctgagccagttcccaccccagcctttcctacgcccaccccagttctgacacatggtccttgtgctgcagaatcagaaccagctcttttgatagggagcaagcagttcgggctttcaagaaacagtcacattgcaattgcatttgatgacaccaaagttaaaaaccgtctcacaattgagttggaagtaagaaccgaagctgaatccggcttgcttttttacatggctcgcatcaatcatgctgattttgcaacagttcagctgagaaatggattgccctacttcagctatgacttggggagtggggacacccacaccatgatccccaccaaaatcaatgatggccagtggcacaagattaagataatgagaagtaagcaagaaggaattctttatgtagatggggcttccaacagaaccatcagtcccaaaaaagccgacatcctggatgtcgtgggaatgctgtatgttggtgggttacccatcaactacactacccgaagaattggtccagtgacctatagcattgatggctgcgtcaggaatctccacatggcagaggcccctgccgatctggaacaacccacctccagcttccatgttgggacatgttttgcaaatgctcagaggggaacatattttgacggaaccggttttgccaaagcagttggtggattcaaagtgggattggaccttcttgtagaatttgaattccgcacaactacaacgactggagttcttctggggatcagtagtcaaaaaatggatggaatgggtattgaaatgattgatgaaaagttgatgtttcatgtggacaatggtgcgggcagattcactgctgtctatgatgctggggttccagggcatttgtgtgatggacaatggcataaagtcactgccaacaagatcaaacaccgcattgagctcacagtcgatgggaaccaggtggaagcccaaagcccaaacccagcatctacatcagctgacacaaatgaccctgtgtttgttggaggcttcccagatgacctcaagcagtttggcctaacaaccagtattccgttccgaggttgcatcagatccctgaagctcaccaaaggcacaggcaagccactggaggttaattttgccaaggccctggaactgaggggcgttcaacctgtatcatgcccagccaactaataaaaataagtgtaaccccaggaagagtctgtcaaaacaagtatatcaagtaaaacaaacaaatatattttacctatatatgttaattaaactaatttgtgcatgtacatagaattctttctgtattcagatggtgctaattcagactccagactgaattttaattcaagttctttctcaagtctataaataatattaaactgattatttcattctaaataa

SEQ ID NO: 11030 - DNA, 288 bp, Homo sapiens
  source 1..288: mol_type = unassigned DNA
cggccgcagcagcagcggcagtcacaggcacatcagcaaagaggcatagtaccaattctgtgtcaggcattttattcactttgtttcaactgttcttgagatcccggaggattaggactattgcagttataagtctataactgaggaaaggaagcttatctggacaggaagatatttagagtatgatataaagacagtctctttttaaaaacagcattttaaaggtttattccctgctgtcctgaatcttgcttctaatgctcttatcacgaccaatgcaacatgtgg

SEQ ID NO: 11031 - DNA, 571 bp, Homo sapiens
  source 1..571: mol_type = unassigned DNA
ttttctgaaattctcgtctcaggaaaccaccgacactcttagcaaggaagctgaacctcctgggttttgccaacacatttttccatagtttggtaaagaaagaaacctcaaaattctacatgtggttttacttctttataaagtcaagtaagagggtactttaggactgaggtttccatccaagtactccggttttctctccagatatgaacatctttacagttcaagtggatgaaaacagaagatacatgcaaaacctgacagttgaacagcctatcgaagttaaaaagcttttcgttgggggtgctccacctgaatttcaaccttccccactcagaaatattcctccttttgaaggctgcatatggaatcttgttattaactctgtccccatggactttgcaaggcctgtgtccttcaaaaatgctgacattggtcgctgtgcccatcagaaactccgtgaagatgaagatggagcagctccagctgaaatagttatccagcctgagccagttcccaccccagcctttcctacgcccaccccagttctgacacatggtccttgtgctgc

SEQ ID NO: 11032 - DNA, 373 bp, Homo sapiens
  source 1..373: mol_type = unassigned DNA
aacctcctgggttttgccaacacatttttccatagtttggtaaagaaagaaacctcaaaacatctttacagttcaagtggatgaaaacagaagatacatgcaaaacctgacagttgaacagcctatcgaagttaaaaagcttttcgttgggggtgctccacctgaatttcaaccttccccactcagaaatattcctccttttgaaggctgcatatggaatcttgttattaactctgtccccatggactttgcaaggcctgtgtccttcaaaaatgctgacattggtcgctgtgcccatcagaaactccgtgaagatgaagatggagcagctccagctgaaatagttatccagcctgagccagttcccacccca

SEQ ID NO: 11033 - DNA, 9687 bp, Homo sapiens
  source 1..9687: mol_type = unassigned DNA
ttccccagcagctgctgctcgctcagctcacaagccaaggccaggggacagggcggcagcgactcctctggctcccgagaagtggatccggtcgcggccactacgatgccgggagccgccggggtcctcctccttctgctgctctccggaggcctcgggggcgtacaggcgcagcggccgcagcagcagcggcagtcacaggcacatcagcaaagaggtttattccctgctgtcctgaatcttgcttctaatgctcttatcacgaccaatgcaacatgtggagaaaaaggacctgaaatgtactgcaaattggtagaacatgtccctgggcagcctgtgaggaacccgcagtgtcgaatctgcaatcaaaacagcagcaatccaaaccagagacacccgattacaaatgctattgatggaaagaacacttggtggcagagtcccagtattaagaatggaatcgaataccattatgtgacaattaccctggatttacagcaggtgttccagatcgcgtatgtgattgtgaaggcagctaactccccccggcctggaaactggattttggaacgctctcttgatgatgttgaatacaagccctggcagtatcatgctgtgacagacacggagtgcctaacgctttacaatatttatccccgcactgggccaccgtcatatgccaaagatgatgaggtcatctgcacttcattttactccaagatacaccccttagaaaatggagagattcacatctctttaatcaatgggagaccaagtgccgatgatccttctccagaactgctagaatttacctccgctcgctatattcgcctgagatttcagaggatccgcacactgaatgctgacttgatgatgtttgctcacaaagacccaagagaaattgaccccattgtcaccagaagatattactactcggtcaaggatatttcagttggagggatgtgcatctgctatggtcatgccagggcttgtccacttgatccagcgacaaataaatctcgctgtgagtgtgagcataacacatgtggcgatagctgtgatcagtgctgtccaggattccatcagaaaccctggagagctggaacttttctaactaaaactgaatgtgaagcatgcaattgtcatggaaaagctgaagaatgctattatgatgaaaatgttgccagaagaaatctgagtttgaatatacgtggaaagtacattggagggggtgtctgcattaattgtacccaaaacactgctggtataaactgcgagacatgtactgatggcttcttcagacccaaaggggtatctccaaattatccaaggccatgccagccatgtcattgcgatccaattggttccttaaatgaagtctgtgtcaaggatgagaaacatgctcgacgaggtttggcacctggatcctgtcattgcaaaactggttttggaggtgtgagctgtgatcggtgtgccaggggctacactggctacccggactgcaaagcctgtaactgcagtgggttagggagcaaaaatgaggatccttgttttggcccctgtatctgcaaggaaaatgttgaaggaggagactgtagtcgttgcaaatccggcttcttcaatttgcaagaggataattggaaaggctgcgatgagtgtttctgttcaggggtttcaaacagatgtcagagttcctactggacctatggcaaaatacaagatatgagtggctggtatctgactgaccttcctggccgcattcgagtggctccccagcaggacgacttggactcacctcagcagatcagcatcagtaacgcggaggcccggcaagccctgccgcacagctactactggagcgcgccggctccctatctgggaaacaaactcccagcagtaggaggacagttgacatttaccatatcatatgaccttgaagaagaggaagaagatacagaacgtgttctccagcttatgattatcttagagggtaatgacttgagcatcagcacagcccaagatgaggtgtacctgcacccatctgaagaacatactaatgtattgttacttaaagaagaatcatttaccatacatggcacacattttccagtccgtagaaaggaatttatgacagtgcttgcgaatttgaagagagtcctcctacaaatcacatacagctttgggatggatgccatcttcaggttgagctctgttaaccttgaatccgctgtctcctatcctactgatggaagcattgcagcagctgtagaagtgtgtcagtgcccaccagggtatactggctcctcttgtgaatcttgttggcctaggcacaggcgagttaacggcactatttttggtggcatctgtgagccatgtcagtgctttggtcatgcggagtcctgtgatgacgtcactggagaatgcctgaactgtaaggatcacacaggtggcccatattgtgataaatgtcttcctggtttctatggcgagcctactaaaggaacctctgaagactgtcaaccctgtgcctgtccactcaatatcccatccaataactttagcccaacgtgccatttagaccggagtcttggattgatctgtgatggatgccctgtcgggtacacaggaccacgctgtgagaggtgtgcagaaggctattttggacaaccctctgtacctggaggatcatgtcagccatgccaatgcaatgacaaccttgacttctccatccctggcagctgtgacagcttgtctggctcctgtctgatatgtaaaccaggtacaacaggccggtactgtgagctctgtgctgatggatattttggagatgcagttgatgcgaagaactgtcagccctgtcgctgtaatgccggtggctctttctctgaggtttgccacagtcaaactggacagtgtgagtgcagagccaacgttcagggtcagagatgtgacaaatgcaaggctgggacctttggcctacaatcagcaaggggctgtgttccctgcaactgcaattcttttgggtctaagtcattcgactgtgaagagagtggacaatgttggtgccaacctggagtcacagggaagaaatgtgaccgctgtgcccacggctatttcaacttccaagaaggaggctgcacagcttgtgaatgttctcatctgggtaataattgtgacccaaagactgggcgatgcatttgccctcccaataccattggagagaaatgttctaaatgtgcacccaatacctggggccacagcattaccactggttgtaaggcttgtaactgcagcacagtgggatccttggatttccaatgcaatgtaaatacaggccaatgcaactgtcatccaaaattctctggtgcaaaatgtacagagtgcagtcgaggtcactggaactaccctcgctgcaatctctgtgactgcttcctccctgggacagatgccacaacctgtgattcagagactaaaaaatgctcctgtagtgatcaaactgggcagtgcacttgtaaggtgaatgtggaaggcatccactgtgacagatgccggcctggcaaattcggactcgatgccaagaatccacttggctgcagcagctgctattgcttcggcactactacccagtgctctgaagcaaaaggactgatccggacgtgggtgactctgaaggctgagcagaccattctacccctggtagatgaggctctgcagcacacgaccaccaagggcattgtttttcaacatccagagattgttgcccacatggacctgatgagagaagatctccatttggaacctttttattggaaacttccagaacaatttgaaggaaagaagttgatggcctatgggggcaaactcaagtatgcaatctatttcgaggctcgggaagaaacaggtttctctacatataatcctcaagtgatcattcgaggtgggacacctactcatgctagaattatcgtcaggcatatggctgctcctctgattggccaattgacaaggcatgaaattgaaatgacagagaaagaatggaaatattatggggatgatcctcgagtccatagaactgtgacccgagaagacttcttggatatactatatgatattcattacattcttatcaaagctacttatggaaatttcatgcgacaaagcaggatttctgaaatctcaatggaggtagctgaacaaggacgtggaacaacaatgactcctccagctgacttgattgaaaaatgtgattgtcccctgggctattctggcctgtcctgtgaggcatgcttgccgggattttatcgactgcgttctcaaccaggtggccgcacccctggaccaaccctgggcacctgtgttccatgtcaatgtaatggacacagcagcctgtgtgaccctgaaacatcgatatgccagaattgtcaacatcacactgctggtgacttctgtgaacgatgtgctcttggatactatggaattgtcaagggattgccaaatgactgtcagcaatgtgcctgccctctgatttcttccagtaacaatttcagcccctcttgtgtcgcagaaggacttgacgactaccgctgcacggcttgtccacggggatatgaaggccagtactgtgaaaggtgtgcccctggctatactggcagtccaggcaaccctggaggctcctgccaagaatgtgagtgtgatccctatggctcactgcctgtgccctgtgaccctgtcacaggattctgcacgtgccgacctggagccacgggaaggaagtgtgacggctgcaagcactggcatgcacgcgagggctgggagtgtgttttttgtggagatgagtgcactggccttcttctcggtgacttggctcgcctggagcagatggtcatgagcatcaacctcactggtccgctgcctgcgccatataaaatgctgtatggtcttgaaaatatgactcaggagctaaagcacttgctgtcacctcagcgggccccagagaggcttattcagctggcagagggcaatctgaatacactcgtgaccgaaatgaacgagctgctgaccagggctaccaaagtgacagcagatggcgagcagaccggacaggatgctgagaggaccaacacaagagcaaagtccctgggagaattcattaaggagcttgcccgggatgcagaagctgtaaatgaaaaagctataaaactaaatgaaactctaggaactcgagacgaggcctttgagagaaatttggaagggcttcagaaagagattgaccagatgattaaagaactgaggaggaaaaatctagagacacaaaaggaaattgctgaagatgagttggtagctgcagaagcccttctgaaaaaagtgaagaagctgtttggagagtcccggggggaaaatgaagaaatggagaaggatctccgggaaaaactggctgactacaaaaacaaagttgatgatgcttgggaccttttgagagaagccacagataaaatcagagaagctaatcgcctatttgcagtaaatcagaaaaacatgactgcattggagaaaaagaaggaggctgttgaaagcggcaaacgacaaattgagaacactttaaaagagggcaatgacatactcgatgaagccaaccgtcttgcagatgaaatcaactccatcatagactatgttgaagacatccaaactaaattgccacctatgtctgaggagcttaatgataaaatagatgacctctcccaagaaataaaggacaggaagcttgctgagaaggtgtcccaggctgagagccacgcagctcagttgaatgactcatctgctgtccttgatggaatccttgatgaggctaaaaacatctccttcaatgccactgcagccttcaaagcttacagcaatattaaggactatattgatgaagctgagaaagttgccaaagaagccaaagatcttgcacatgaagctacaaaactggcaacaggtcctcggggtttattaaaggaagatgccaaaggctgtcttcagaaaagcttcaggattcttaacgaagccaagaagttagcaaatgatgtaaaagaaaatgaagaccatctaaatggcttaaaaaccaggatagaaaatgctgatgctagaaatggggatctcttgagaactttgaatgacactttgggaaagttatcagctattccaaatgatacagctgctaaactgcaagctgttaaggacaaagccagacaagccaacgacacagctaaagatgtactggcacagattacagagctccaccagaacctcgatggcctgaagaagaattacaataaactagcagacagcgtcgccaaaacgaatgctgtggttaaagatccttccaagaacacagttgccgatgcagatgccactgtcaaaaatttagaacaggaagctgaccggctaatagataaactcaaacccatcaaggaacttgaggataacctaaagaaaaacatctctgagataaaggaattgataaaccaagctcggaaacaagccaattctatcaaagtatctgtgtcttcaggaggtgactgcattcgaacatacaaaccagaaatcaagaaaggaagttacaataatattgttgtcaacgtaaagacagctgttgctgataacctcctcttttatcttggaagtgccaaatttattgactttctggctatagaaatgcgtaaaggcaaagtcagcttcctctgggatgttggatctggagttggacgtgtagagtacccagatttgactattgatgactcatattggtaccgtatcgtagcatcaagaactgggagaaatggaactatttctgtgagagccctggatggacccaaagccagcattgtgcccagcacacaccattcgacgtctcctccagggtacacgattctagatgtggatgcaaatgcaatgctgtttgttggtggcctgactgggaaattaaagaaggctgatgctgtacgtgtgattacattcactggctgcatgggagaaacatactttgacaacaaacctataggtttgtggaatttccgagaaaaagaaggtgactgcaaaggatgcactgtcagtcctcaggtggaagatagtgaggggactattcaatttgatggagaaggttatgcattggtcagccgtcccattcgctggtaccccaacatctccactgtcatgttcaagttcagaacattttcttcgagtgctcttctgatgtatcttgccacacgagacctgagagatttcatgagtgtggagctcactgatgggcacataaaagtcagttacgatctgggctcaggaatggcttccgttgtcagcaatcaaaaccataatgatgggaaatggaaatcattcactctgtcaagaattcaaaaacaagccaatatatcaattgtagatatagatactaatcaggaggagaatatagcaacttcgtcttctggaaacaactttggtcttgacttgaaagcagatgacaaaatatattttggtggcctgccaacgctgagaaacttgagtatgaaagcaaggccagaagtaaatctgaagaaatattccggctgcctcaaagatattgaaatttcaagaactccgtacaatatactcagtagtcccgattatgttggtgttaccaaaggatgttccctggagaatgtttacacagttagctttcctaagcctggttttgtggagctctcccctgtgccaattgatgtaggaacagaaatcaacctgtcattcagcaccaagaatgagtccggcatcattcttttgggaagtggagggacaccagcaccacctaggagaaaacgaaggcagactggacaggcctattatgcaatactcctcaacaggggccgtctggaagtgcatctctccacaggggcacgaacaatgaggaaaattgtgatcagaccagagccgaatctgtttcatgatggaagagaacattccgttcatgtagagcgaactagaggcatctttacagttcaagtggatgaaaacagaagatacatgcaaaacctgacagttgaacagcctatcgaagttaaaaagcttttcgttgggggtgctccacctgaatttcaaccttccccactcagaaatattcctccttttgaaggctgcatatggaatcttgttattaactctgtccccatggactttgcaaggcctgtgtccttcaaaaatgctgacattggtcgctgtgcccatcagaaactccgtgaagatgaagatggagcagctccagctgaaatagttatccagcctgagccagttcccaccccagcctttcctacgcccaccccagttctgacacatggtccttgtgctgcagaatcagaaccagctcttttgatagggagcaagcagttcgggctttcaagaaacagtcacattgcaattgcatttgatgacaccaaagttaaaaaccgtctcacaattgagttggaagtaagaaccgaagctgaatccggcttgcttttttacatggctcgcatcaatcatgctgattttgcaacagttcagctgagaaatggattgccctacttcagctatgacttggggagtggggacacccacaccatgatccccaccaaaatcaatgatggccagtggcacaagattaagataatgagaagtaagcaagaaggaattctttatgtagatggggcttccaacagaaccatcagtcccaaaaaagccgacatcctggatgtcgtgggaatgctgtatgttggtgggttacccatcaactacactacccgaagaattggtccagtgacctatagcattgatggctgcgtcaggaatctccacatggcagaggcccctgccgatctggaacaacccacctccagcttccatgttgggacatgttttgcaaatgctcagaggggaacatattttgacggaaccggttttgccaaagcagttggtggattcaaagtgggattggaccttcttgtagaatttgaattccgcacaactacaacgactggagttcttctggggatcagtagtcaaaaaatggatggaatgggtattgaaatgattgatgaaaagttgatgtttcatgtggacaatggtgcgggcagattcactgctgtctatgatgctggggttccagggcatttgtgtgatggacaatggcataaagtcactgccaacaagatcaaacaccgcattgagctcacagtcgatgggaaccaggtggaagcccaaagcccaaacccagcatctacatcagctgacacaaatgaccctgtgtttgttggaggcttcccagatgacctcaagcagtttggcctaacaaccagtattccgttccgaggttgcatcagatccctgaagctcaccaaaggcacaggcaagccactggaggttaattttgccaaggccctggaactgaggggcgttcaacctgtatcatgcccagccaactaataaaaataagtgtaaccccaggaagagtctgtcaaaacaagtatatcaagtaaaacaaacaaatatattttacctatatatgttaattaaactaatttgtgcatgtacatagaattctttctgtattcagatggtgctaattcagactccagactgaattttaattcaagttctttctcaagtctataaataatattaaactgattatttcattct

SEQ ID NO: 11034 - DNA, 9678 bp, Homo sapiens
  source 1..9678: mol_type = unassigned DNA
ttccccagcagctgctgctcgctcagctcacaagccaaggccaggggacagggcggcagcgactcctctggctcccgagaagtggatccggtcgcggccactacgatgccgggagccgccggggtcctcctccttctgctgctctccggaggcctcgggggcgtacaggcgcagcggccgcagcagcagcggcagtcacaggcacatcagcaaagaggtttattccctgctgtcctgaatcttgcttctaatgctcttatcacgaccaatgcaacatgtggagaaaaaggacctgaaatgtactgcaaattggtagaacatgtccctgggcagcctgtgaggaacccgcagtgtcgaatctgcaatcaaaacagcagcaatccaaaccagagacacccgattacaaatgctattgatggaaagaacacttggtggcagagtcccagtattaagaatggaatcgaataccattatgtgacaattaccctggatttacagcaggtgttccagatcgcgtatgtgattgtgaaggcagctaactccccccggcctggaaactggattttggaacgctctcttgatgatgttgaatacaagccctggcagtatcatgctgtgacagacacggagtgcctaacgctttacaatatttatccccgcactgggccaccgtcatatgccaaagatgatgaggtcatctgcacttcattttactccaagatacaccccttagaaaatggagagattcacatctctttaatcaatgggagaccaagtgccgatgatccttctccagaactgctagaatttacctccgctcgctatattcgcctgagatttcagaggatccgcacactgaatgctgacttgatgatgtttgctcacaaagacccaagagaaattgaccccattgtcaccagaagatattactactcggtcaaggatatttcagttggagggatgtgcatctgctatggtcatgccagggcttgtccacttgatccagcgacaaataaatctcgctgtgagtgtgagcataacacatgtggcgatagctgtgatcagtgctgtccaggattccatcagaaaccctggagagctggaacttttctaactaaaactgaatgtgaagcatgcaattgtcatggaaaagctgaagaatgctattatgatgaaaatgttgccagaagaaatctgagtttgaatatacgtggaaagtacattggagggggtgtctgcattaattgtacccaaaacactgctggtataaactgcgagacatgtactgatggcttcttcagacccaaaggggtatctccaaattatccaaggccatgccagccatgtcattgcgatccaattggttccttaaatgaagtctgtgtcaaggatgagaaacatgctcgacgaggtttggcacctggatcctgtcattgcaaaactggttttggaggtgtgagctgtgatcggtgtgccaggggctacactggctacccggactgcaaagcctgtaactgcagtgggttagggagcaaaaatgaggatccttgttttggcccctgtatctgcaaggaaaatgttgaaggaggagactgtagtcgttgcaaatccggcttcttcaatttgcaagaggataattggaaaggctgcgatgagtgtttctgttcaggggtttcaaacagatgtcagagttcctactggacctatggcaaaatacaagatatgagtggctggtatctgactgaccttcctggccgcattcgagtggctccccagcaggacgacttggactcacctcagcagatcagcatcagtaacgcggaggcccggcaagccctgccgcacagctactactggagcgcgccggctccctatctgggaaacaaactcccagcagtaggaggacagttgacatttaccatatcatatgaccttgaagaagaggaagaagatacagaacgtgttctccagcttatgattatcttagagggtaatgacttgagcatcagcacagcccaagatgaggtgtacctgcacccatctgaagaacatactaatgtattgttacttaaagaagaatcatttaccatacatggcacacattttccagtccgtagaaaggaatttatgacagtgcttgcgaatttgaagagagtcctcctacaaatcacatacagctttgggatggatgccatcttcaggttgagctctgttaaccttgaatccgctgtctcctatcctactgatggaagcattgcagcagctgtagaagtgtgtcagtgcccaccagggtatactggctcctcttgtgaatcttgttggcctaggcacaggcgagttaacggcactatttttggtggcatctgtgagccatgtcagtgctttggtcatgcggagtcctgtgatgacgtcactggagaatgcctgaactgtaaggatcacacaggtggcccatattgtgataaatgtcttcctggtttctatggcgagcctactaaaggaacctctgaagactgtcaaccctgtgcctgtccactcaatatcccatccaataactttagcccaacgtgccatttagaccggagtcttggattgatctgtgatggatgccctgtcgggtacacaggaccacgctgtgagaggtgtgcagaaggctattttggacaaccctctgtacctggaggatcatgtcagccatgccaatgcaatgacaaccttgacttctccatccctggcagctgtgacagcttgtctggctcctgtctgatatgtaaaccaggtacaacaggccggtactgtgagctctgtgctgatggatattttggagatgcagttgatgcgaagaactgtcagccctgtcgctgtaatgccggtggctctttctctgaggtttgccacagtcaaactggacagtgtgagtgcagagccaacgttcagggtcagagatgtgacaaatgcaaggctgggacctttggcctacaatcagcaaggggctgtgttccctgcaactgcaattcttttgggtctaagtcattcgactgtgaagagagtggacaatgttggtgccaacctggagtcacagggaagaaatgtgaccgctgtgcccacggctatttcaacttccaagaaggaggctgcacagcttgtgaatgttctcatctgggtaataattgtgacccaaagactgggcgatgcatttgccctcccaataccattggagagaaatgttctaaatgtgcacccaatacctggggccacagcattaccactggttgtaaggcttgtaactgcagcacagtgggatccttggatttccaatgcaatgtaaatacaggccaatgcaactgtcatccaaaattctctggtgcaaaatgtacagagtgcagtcgaggtcactggaactaccctcgctgcaatctctgtgactgcttcctccctgggacagatgccacaacctgtgattcagagactaaaaaatgctcctgtagtgatcaaactgggcagtgcacttgtaaggtgaatgtggaaggcatccactgtgacagatgccggcctggcaaattcggactcgatgccaagaatccacttggctgcagcagctgctattgcttcggcactactacccagtgctctgaagcaaaaggactgatccggacgtgggtgactctgaaggctgagcagaccattctacccctggtagatgaggctctgcagcacacgaccaccaagggcattgtttttcaacatccagagattgttgcccacatggacctgatgagagaagatctccatttggaacctttttattggaaacttccagaacaatttgaaggaaagaagttgatggcctatgggggcaaactcaagtatgcaatctatttcgaggctcgggaagaaacaggtttctctacatataatcctcaagtgatcattcgaggtgggacacctactcatgctagaattatcgtcaggcatatggctgctcctctgattggccaattgacaaggcatgaaattgaaatgacagagaaagaatggaaatattatggggatgatcctcgagtccatagaactgtgacccgagaagacttcttggatatactatatgatattcattacattcttatcaaagctacttatggaaatttcatgcgacaaagcaggatttctgaaatctcaatggaggtagctgaacaaggacgtggaacaacaatgactcctccagctgacttgattgaaaaatgtgattgtcccctgggctattctggcctgtcctgtgaggcatgcttgccgggattttatcgactgcgttctcaaccaggtggccgcacccctggaccaaccctgggcacctgtgttccatgtcaatgtaatggacacagcagcctgtgtgaccctgaaacatcgatatgccagaattgtcaacatcacactgctggtgacttctgtgaacgatgtgctcttggatactatggaattgtcaagggattgccaaatgactgtcagcaatgtgcctgccctctgatttcttccagtaacaatttcagcccctcttgtgtcgcagaaggacttgacgactaccgctgcacggcttgtccacggggatatgaaggccagtactgtgaaaggtgtgcccctggctatactggcagtccaggcaaccctggaggctcctgccaagaatgtgagtgtgatccctatggctcactgcctgtgccctgtgaccctgtcacaggattctgcacgtgccgacctggagccacgggaaggaagtgtgacggctgcaagcactggcatgcacgcgagggctgggagtgtgttttttgtggagatgagtgcactggccttcttctcggtgacttggctcgcctggagcagatggtcatgagcatcaacctcactggtccgctgcctgcgccatataaaatgctgtatggtcttgaaaatatgactcaggagctaaagcacttgctgtcacctcagcgggccccagagaggcttattcagctggcagagggcaatctgaatacactcgtgaccgaaatgaacgagctgctgaccagggctaccaaagtgacagcagatggcgagcagaccggacaggatgctgagaggaccaacacaagagcaaagtccctgggagaattcattaaggagcttgcccgggatgcagaagctgtaaatgaaaaagctataaaactaaatgaaactctaggaactcgagacgaggcctttgagagaaatttggaagggcttcagaaagagattgaccagatgattaaagaactgaggaggaaaaatctagagacacaaaaggaaattgctgaagatgagttggtagctgcagaagcccttctgaaaaaagtgaagaagctgtttggagagtcccggggggaaaatgaagaaatggagaaggatctccgggaaaaactggctgactacaaaaacaaagttgatgatgcttgggaccttttgagagaagccacagataaaatcagagaagctaatcgcctatttgcagtaaatcagaaaaacatgactgcattggagaaaaagaaggaggctgttgaaagcggcaaacgacaaattgagaacactttaaaagagggcaatgacatactcgatgaagccaaccgtcttgcagatgaaatcaactccatcatagactatgttgaagacatccaaactaaattgccacctatgtctgaggagcttaatgataaaatagatgacctctcccaagaaataaaggacaggaagcttgctgagaaggtgtcccaggctgagagccacgcagctcagttgaatgactcatctgctgtccttgatggaatccttgatgaggctaaaaacatctccttcaatgccactgcagccttcaaagcttacagcaatattaaggactatattgatgaagctgagaaagttgccaaagaagccaaagatcttgcacatgaagctacaaaactggcaacaggtcctcggggtttattaaaggaagatgccaaaggctgtcttcagaaaagcttcaggattcttaacgaagccaagaagttagcaaatgatgtaaaagaaaatgaagaccatctaaatggcttaaaaaccaggatagaaaatgctgatgctagaaatggggatctcttgagaactttgaatgacactttgggaaagttatcagctattccaaatgatacagctgctaaactgcaagctgttaaggacaaagccagacaagccaacgacacagctaaagatgtactggcacagattacagagctccaccagaacctcgatggcctgaagaagaattacaataaactagcagacagcgtcgccaaaacgaatgctgtggttaaagatccttccaagaacaatgcagttgccgatgcagatgccactgtcaaaaatttagaacaggaagctgaccggctaatagataaactcaaacccatcaaggaacttgaggataacctaaagaaaaacatctctgagataaaggaattgataaaccaagctcggaaacaagccaattctatcaaagtatctgtgtcttcaggaggtgactgcattcgaacatacaaaccagaaatcaagaaaggaagttacaataatattgttgtcaacgtaaagacagctgttgctgataacctcctcttttatcttggaagtgccaaatttattgactttctggctatagaaatgcgtaaaggcaaagtcagcttcctctgggatgttggatctggagttggacgtgtagagtacccagatttgactattgatgactcatattggtaccgtatcgtagcatcaagaactgggagaaatggaactatttctgtgagagccctggatggacccaaagccagcattgtgcccagcacacaccattcgacgtctcctccagggtacacgattctagatgtggatgcaaatgcaatgctgtttgttggtggcctgactgggaaattaaagaaggctgatgctgtacgtgtgattacattcactggctgcatgggagaaacatactttgacaacaaacctataggtttgtggaatttccgagaaaaagaaggtgactgcaaaggatgcactgtcagtcctcaggtggaagatagtgaggggactattcaatttgatggagaaggttatgcattggtcagccgtcccattcgctggtaccccaacatctccactgtcatgttcaagttcagaacattttcttcgagtgctcttctgatgtatcttgccacacgagacctgagagatttcatgagtgtggagctcactgatgggcacataaaagtcagttacgatctgggctcaggaatggcttccgttgtcagcaatcaaaaccataatgatgggaaatggaaatcattcactctgtcaagaattcaaaaacaagccaatatatcaattgtagatatagatactaatcaggaggagaatatagcaacttcgtcttctggaaacaactttggtcttgacttgaaagcagatgacaaaatatattttggtggcctgccaacgctgagaaacttgaggccagaagtaaatctgaagaaatattccggctgcctcaaagatattgaaatttcaagaactccgtacaatatactcagtagtcccgattatgttggtgttaccaaaggatgttccctggagaatgtttacacagttagctttcctaagcctggttttgtggagctctcccctgtgccaattgatgtaggaacagaaatcaacctgtcattcagcaccaagaatgagtccggcatcattcttttgggaagtggagggacaccagcaccacctaggagaaaacgaaggcagactggacaggcctattatgcaatactcctcaacaggggccgtctggaagtgcatctctccacaggggcacgaacaatgaggaaaattgtgatcagaccagagccgaatctgtttcatgatggaagagaacattccgttcatgtagagcgaactagaggcatctttacagttcaagtggatgaaaacagaagatacatgcaaaacctgacagttgaacagcctatcgaagttaaaaagcttttcgttgggggtgctccacctgaatttcaaccttccccactcagaaatattcctccttttgaaggctgcatatggaatcttgttattaactctgtccccatggactttgcaaggcctgtgtccttcaaaaatgctgacattggtcgctgtgcccatcagaaactccgtgaagatgaagatggagcagctccagctgaaatagttatccagcctgagccagttcccaccccagcctttcctacgcccaccccagttctgacacatggtccttgtgctgcagaatcagaaccagctcttttgatagggagcaagcagttcgggctttcaagaaacagtcacattgcaattgcatttgatgacaccaaagttaaaaaccgtctcacaattgagttggaagtaagaaccgaagctgaatccggcttgcttttttacatggctcgcatcaatcatgctgattttgcaacagttcagctgagaaatggattgccctacttcagctatgacttggggagtggggacacccacaccatgatccccaccaaaatcaatgatggccagtggcacaagattaagataatgagaagtaagcaagaaggaattctttatgtagatggggcttccaacagaaccatcagtcccaaaaaagccgacatcctggatgtcgtgggaatgctgtatgttggtgggttacccatcaactacactacccgaagaattggtccagtgacctatagcattgatggctgcgtcaggaatctccacatggcagaggcccctgccgatctggaacaacccacctccagcttccatgttgggacatgttttgcaaatgctcagaggggaacatattttgacggaaccggttttgccaaagcagttggtggattcaaagtgggattggaccttcttgtagaatttgaattccgcacaactacaacgactggagttcttctggggatcagtagtcaaaaaatggatggaatgggtattgaaatgattgatgaaaagttgatgtttcatgtggacaatggtgcgggcagattcactgctgtctatgatgctggggttccagggcatttgtgtgatggacaatggcataaagtcactgccaacaagatcaaacaccgcattgagctcacagtcgatgggaaccaggtggaagcccaaagcccaaacccagcatctacatcagctgacacaaatgaccctgtgtttgttggaggcttcccagatgacctcaagcagtttggcctaacaaccagtattccgttccgaggttgcatcagatccctgaagctcaccaaaggcacaggcaagccactggaggttaattttgccaaggccctggaactgaggggcgttcaacctgtatcatgcccagccaactaataaaaataagtgtaaccccaggaagagtctgtcaaaacaagtatatcaagtaaaacaaacaaatatattttacctatatatgttaattaaactaatttgtgcatgtacatagaattctttctgtattcagatggtgctaattcagactccagactgaattttaattcaagttctttctcaagtctataaataatattaaactgattatttcattct

SEQ ID NO: 11035 - DNA, 10661 bp, Homo sapiens
  source 1..10661: mol_type = unassigned DNA
gagcgctgtcagttcctgatccggctggtgcccgctccagccgcggcaggttccagagctgagaggccacccccacgccgcgggcttccagcgcgtggagcaaggggagcggccccggcgccgcccatatccccggctgcgctagtcctggcgctgcaggtccgggaggcgcaggcggagagcggcggtgcccccgagcccctctgcggacggctcaggcgggaggaccccgcgcggctggatggcggcggccgcgcggcctcggggtcgggcactggggccagtactgccgccgacgccgctgctcctgctggtactgcgggtgctgccagcctgcggggcgaccgctcgggatcccggggccgcggccgggctcagccttcacccgacttacttcaacctggccgaggcggcgaggatttgggccaccgccacctgcggggagaggggacccggcgaggggaggccccagcccgagctctactgcaagttggtcgggggccccaccgccccaggcagcggccacaccatccagggccagttctgtgactattgcaattctgaagaccccaggaaagcacatcctgtcaccaatgccatcgatggatctgaacgttggtggcaaagccctcccctgtcctcaggcacacagtacaacagagtcaacctcaccttggatctggggcagctcttccatgtggcctatattttaatcaaatttgcaaattctcctcgccctgatctttgggtcttggaaagatctgtagactttggaagcacctactcaccatggcaatattttgctcattctaaagtagactgtttaaaagaatttgggcgggaggcaaatatggctgtcacccgggatgatgatgtactttgtgttactgaatattcccgtattgtacctttggaaaatggtgaggttgtggtgtccttgataaacggtcgtccaggtgcaaaaaattttactttctctcacaccctgagggagtttaccaaggcaacaaacatccgcttgcgttttcttagaaccaatacgcttcttggacacctcatctccaaagcccagcgagatccaactgtcactcggcggtattattacagcataaaggacatcagcattggtgggcagtgtgtttgcaatggccatgctgaagtgtgcaatataaacaatcctgaaaaactgtttcggtgtgaatgccagcaccacacctgtggggagacgtgtgatcgctgctgcacagggtacaatcagaggcgctggcggcccgccgcttgggagcagagccacgagtgtgaagcatgcaactgccacggccatgccagcaactgttactatgatccagatgttgagcggcagcaggcaagcttgaatacccagggcatctatgctggtggaggggtctgcattaactgtcagcacaacacagctggagtaaactgtgaacagtgtgctaagggctattaccgcccttatggggttccagtggatgcccctgatggctgcatcccctgcagctgtgaccctgagcatgcggatggctgtgaacagggttcaggccgctgtcactgcaagccaaatttccacggagacaactgtgagaagtgtgcaattggatactacaatttcccattttgcttgagaattcccatttttcctgtttctacaccaagttcagaagatccagtagctggagatataaaagggtgtgactgtaatctggaaggtgttctccctgaaatatgtgatgcccacggacggtgcctgtgccgccctggggttgagggccctcgatgtgatacctgccgctctggtttctactcattccctatttgccaagcctgctggtgttcagcccttggatcctaccagatgccctgcagctcagtgactggacagtgtgaatgtcggccaggagttacaggacagcggtgtgacaggtgtctctcaggagcttatgatttcccccactgccaaggttccagcagtgcttgtgacccagctggtaccatcaactccaatttggggtattgccaatgcaagcttcatgttgaaggtcctacttgtagccgctgcaaactgttatattggaatctggacaaagaaaaccccagtggatgttcagaatgcaagtgccataaggcgggaacagtgagtggaactggagagtgtaggcagggagatggtgactgtcactgcaagtcccatgtgggtggcgattcctgcgacacctgtgaagatggatattttgctttggaaaagagcaattactttgggtgtcaagggtgtcagtgtgacattggtggggcattgtcctccatgtgcagtgggccctcgggagtgtgccagtgccgagagcatgtcgtgggaaaggtgtgccagcggcctgaaaacaactactatttcccagatttgcatcatatgaagtatgagattgaagacggcagcacacctaatgggagagaccttcgatttggatttgatccgctggcatttcctgagtttagctggagaggatatgcccaaatgacctcagtacagaatgatgtaagaataacattgaatgtagggaagtcaagtggctccttgtttcgtgttattctgagatacgttaaccctggaactgaagcagtatctggccatataactatttatccatcctggggtgctgctcaaagcaaagagatcatcttcctgccgagtaaggagccagcctttgtcactgtccctggaaatggttttgcagacccattttcaatcacaccaggaatatgggttgcttgtattaaggcagaaggagtccttctggattacctggtgctgctccccagggactactatgaagcctctgtactgcagctgccagtcacagaaccatgtgcctacgcaggacctccccaagaaaattgcttactctaccagcatttgccagtgaccagattcccctgtaccctggcttgtgaggccagacacttcctgcttgatggggagccaagacccgtggcagtgaggcagcccacacctgcacaccctgtcatggtggacctcagcgggagagaggtggaattgcatctgcggctgcgcatcccacaggttggccactacgtggttgtggtcgagtattccacggaggcagctcagctgtttgtggttgatgtgaatgtgaagagctccgggtctgttctggcaggccaggtgaacatttacagctgcaactacagtgttctctgccggagtgctgtgattgatcacatgagccgcatcgccatgtatgagctattggcagatgcagacattcagctcaagggacacatggcccgattccttctgcatcaagtttgtatcatacctattgaagaattctcagctgagtatgtgagaccacaagtccactgcattgccagttatgggcgatttgtcaatcaaagtgccacctgtgtctccttggcccatgaaactcctccaacagcattaattttggatgttctaagtggcaggcctttccctcacctgccccagcagtcgtcaccttctgttgatgttcttcctggggtcaccttgaaggcaccgcagaatcaagtgaccctgagaggacgtgtaccacacctgggccgatacgtctttgtcatccatttttaccaagcagcgcacccgacgtttcccgcgcaggtgtcggtggatggcgggtggccacgggcaggctccttccatgcctctttttgcccccatgtgcttggctgccgggatcaagtgattgccgaaggccagattgagtttgacatctcagagcctgaagtggccgcaactgtgaaggttccagaaggaaagtccttggttttggtccgtgttctagtggtgcctgcagaaaactatgactaccaaatacttcacaaaaaatccatggacaagtcactcgagtttatcaccaattgtggaaaaaacagcttttaccttgacccccagacagcctccagattctgtaagaattccgccaggtccctggtggccttttaccacaagggcgccctgccttgtgagtgccaccccactggggccaccggccctcactgcagccctgagggtgggcagtgcccatgccagcccaacgtcatcgggcggcagtgcacccgctgtgcaacaggccactacggattcccacgctgcaagccgtgcagctgtggtcggcgcctttgtgaagagatgacggggcagtgccgctgccctccccgcacggtcaggccccagtgtgaggtgtgtgagacacactcattcagcttccaccccatggccggctgcgaaggctgcaactgttccaggaggggcaccatcgaggctgccatgccggagtgtgaccgggacagcgggcagtgcagatgcaagcccagaatcacagggcggcagtgtgaccgatgtgcttccgggttttaccgctttcctgagtgtgttccctgcaattgcaacagagatgggactgagccaggagtgtgtgacccagggaccggggcttgcctctgcaaggaaaatgtagaaggcacagagtgtaatgtgtgtcgagaaggctcattccatttggacccagccaatctcaagggttgtaccagctgtttctgttttggagtaaataatcaatgtcacagctcacataagcgaaggactaagtttgtggatatgctgggctggcacctggagacagcagacagagtggacatccctgtctctttcaacccaggcagcaacagtatggtggcggatctccaggagctgcccgcaaccatccacagcgcgtcctgggtcgcacccacctcctacctgggggacaaggtttcttcatatggtggttacctcacttaccaagccaagtcctttggcttgcctggcgacatggttcttctggaaaagaagccggatgtacagctcactggtcagcacatgtccatcatctatgaggagacaaacaccccacggccagaccggctgcatcatggacgagtgcacgtggtcgagggaaacttcagacatgccagcagccgtgccccagtgtctagggaggagctgatgacagtgctgtctagactggcagatgtgcgcatccaaggcctctacttcacagagactcaaaggctcaccctgagcgaggtggggctagaggaagcctctgacacaggaagtgggcgcatagcacttgctgtggaaatctgtgcctgcccccctgcctacgctggtgactcttgtcagggttgtagccctggatactatcgggatcataaaggcttgtataccggacggtgtgttccctgcaattgcaacggacattcaaatcaatgccaggatggctcaggcatatgtgttaactgtcagcacaacaccgcgggagagcactgtgaacgctgccaggagggctactatggcaacgccgtccacggatcctgcagggcctgcccatgtcctcacactaacagctttgccactggctgtgtggtgaatgggggagacgtgcggtgctcctgcaaagctgggtacacaggaacacagtgtgaaaggtgtgcaccgggatatttcgggaatccccagaaattcggaggtagctgccaaccatgcagttgtaacagcaatggccagctgggcagctgtcatcccctgactggagactgcataaaccaagaacccaaagatagcagccctgcagaagaatgtgatgattgcgacagctgtgtgatgaccctcctgaacgacctggccaccatgggcgagcagctccgcctggtcaagtctcagctgcagggcctgagtgccagcgcagggcttctggagcagatgaggcacatggagacccaggccaaggacctgaggaatcagttgctcaactaccgttctgccatttcaaatcatggatcaaaaatagaaggcctggaaagagaactgactgatttgaatcaagaatttgagactttgcaagaaaaggctcaagtaaattccagaaaagcacaaacattaaacaacaatgttaatcgggcaacacaaagcgcaaaagaactggatgtgaagattaaaaatgtcatccggaatgtgcacattcttttaaagcagatctctgggacagatggagagggaaacaacgtgccttcaggtgacttttccagagagtgggctgaagcccagcgcatgatgagggaactgcggaacaggaactttggaaagcacctcagagaagcagaagctgataaaagggagtcgcagctcttgctgaaccggataaggacctggcagaaaacccaccagggggagaacaatgggcttgctaacagtatccgggattctttaaatgaatacgaagccaaactcagtgaccttcgtgctcggctgcaggaggcagctgcccaagccaagcaggcaaatggcttgaaccaagaaaacgagagagctttgggagccattcagagacaagtgaaagaaataaattccctgcagagtgatttcaccaagtatctaaccactgcagactcatctttgttgcaaaccaacattgcgctgcagctgatggagaaaagccagaaggaatatgaaaaattagctgccagtttaaatgaagcaagacaagaactaagtgacaaagtaagagaactttccagatctgctggcaaaacatcccttgtggaggaggcagaaaagcacgcgcggtccttacaagagctggcaaagcagctggaagagatcaagagaaacgccagcggggatgagctggtgcgctgtgctgtggatgccgccaccgcctacgagaacatcctcaatgccatcaaagcggccgaggacgcagccaacagggctgccagtgcatctgaatctgccctccagacagtgataaaggaagatctgccaagaaaagctaaaaccctgagttccaacagtgataaactgttaaatgaagccaagatgacacaaaagaagctaaagcaagaagtcagtccagctctcaacaacctacagcaaaccctgaatattgtgacagttcagaaagaagtgatagacaccaatctcacaactctccgagatggtcttcatgggatacagagaggtgatattgatgctatgatcagtagtgcaaagagcatggtcagaaaggccaacgacatcacagatgaggttctggatgggctcaaccccatccagacagatgtggaaagaattaaggacacctatgggaggacacagaacgaagacttcaaaaaggctctgactgatgcagataactcggtgaataagttaaccaacaaactacctgatctttggcgcaagattgaaagtatcaaccaacagctgttgcccttgggaaacatctctgacaacatggacagaatacgagaactaattcagcaggccagagatgctgccagtaaggttgctgtccccatgaggttcaatggtaaatctggagtcgaagtccgactgccaaatgacctggaagatttgaaaggatatacatctctgtccttgtttctccaaaggcccaactcaagagaaaatgggggtactgagaatatgtttgtgatgtaccttggaaataaagatgcctcccgggactacatcggcatggcagttgtggatggccagctcacctgtgtctacaacctgggggaccgtgaggctgaactccaagtggaccagatcttgaccaagagtgagactaaggaggcagttatggatcgggtgaaatttcagagaatttatcagtttgcaaggcttaattacaccaaaggagccacatccagtaaaccagaaacacccggagtctatgacatggatggtagaaatagcaatacactccttaatttggatcctgaaaatgttgtattttatgttggaggttacccacctgattttaaacttcccagtcgactaagtttccctccatacaaaggttgtattgaattagatgacctcaatgaaaatgttctgagcttgtacaacttcaaaaaaacattcaatctcaacacaactgaagtggagccttgtagaaggaggaaggaagagtcagacaaaaattattttgaaggtacgggctatgctcgagttccaactcaaccacatgctcccatcccaacctttggacagacaattcagaccaccgtggatagaggcttgctgttctttgcagaaaacggggatcgcttcatatctctaaatatagaagatggcaagctcatggtgagatacaaactgaattcagagctaccaaaagagagaggagttggagacgccataaacaacggcagagaccattcgattcagatcaaaattggaaaactccaaaagcgtatgtggataaatgtggacgttcaaaacactataattgatggtgaagtatttgatttcagcacatattatctgggaggaattccaattgcaatcagggaaagatttaacatttctacgcctgctttccgaggctgcatgaaaaatttgaagaaaaccagtggtgtcgttagattgaatgatactgtgggagtaaccaaaaagtgctcggaagactggaagcttgtgcgatctgcctcattctccagaggaggacaattgagtttcactgatttgggcttaccacctactgaccacctccaggcctcatttggatttcagacctttcaacccagtggcatattattagatcatcagacatggacaaggaacctgcaggtcactctggaagatggttacattgaattgagcaccagcgatagcggcggcccaatttttaaatctccacagacgtatatggatggtttactgcattatgtatctgtaataagcgacaactctggactacggcttctcatcgatgaccagcttctgagaaatagcaaaaggctaaaacacatttcaagttcccggcagtctctgcgtctgggcgggagcaattttgagggttgtattagcaatgtttttgtccagaggttatcactgagtcctgaagtcctagatttgaccagtaactctctcaagagagatgtgtccctgggaggctgcagtttaaacaaaccaccttttctaatgttgcttaaaggttctaccaggtttaacaagaccaagacttttcgtatcaaccagctgttgcaggacacaccagtggcctccccaaggagcgtgaaggtgtggcaagatgcttgctcaccacttcccaagacccaggccaatcatggagccctccagtttggggacattcccaccagccacttgctattcaagcttcctcaggagctgctgaaacccaggtcacagtttgctgtggacatgcagacaacatcctccagaggactggtgtttcacacgggcactaagaactcctttatggctctttatctttcaaaaggacgtctggtctttgcactggggacagatgggaaaaaattgaggatcaaaagcaaggagaaatgcaatgatgggaaatggcacacggtggtgtttggccatgatggggaaaaggggcgcttggttgtggatggactgagggcccgggagggaagtttgcctggaaactccaccatcagcatcagagcgccagtttacctgggatcacctccatcagggaaaccaaagagcctccccacaaacagctttgtgggatgcctgaagaactttcagctggattcaaaacccttgtataccccttcttcaagcttcggggtgtcttcctgcttgggtggtcctttggagaaaggcatttatttctctgaagaaggaggtcatgtcgtcttggctcactctgtattgttggggccagaatttaagcttgttttcagcatccgcccaagaagtctcactgggatcctaatacacatcggaagtcagcccgggaagcacttatgtgtttacctggaggcaggaaaggtcacggcctctatggacagtggggcaggtgggacctcaacgtcggtcacaccaaagcagtctctgtgtgatggacagtggcactcggtggcagtcaccataaaacaacacatcctgcacctggaactggacacagacagtagctacacagctggacagatccccttcccacctgccagcactcaagagccactacaccttggaggtgctccagccaatttgacgacactgaggatccctgtgtggaaatcattctttggctgtctgaggaatattcatgtcaatcacatccctgtccctgtcactgaagccttggaagtccaggggcctgtcagtctgaatggttgtcctgaccagtaacccaagcctatttcacagcaaggaaattcaccttcaaaagcactgattacccaatgcacctccctccccagctcgagatcattcttcactcaggacacaaaccagacaggtttaatagcgaatctaattttgaattctgaccatggatacccatcactttggcattcagtgctacatgtgtattttatataaaaatcccatttcttgaagataaaaaaattgttattcaaattgttatgcacagaatgtttttggtaatattaatttccactaaaaaattaaatgtcttttaagaaacattcttttccacttgttaaaaaaattaaatatattttaaagcactttaagaatatgaaactttcatatatgttaaaggattataatttatggaattaaaaaatgcagtgtagtccttaaa

SEQ ID NO: 11036 - DNA, 1815 bp, Homo sapiens
  source 1..1815: mol_type = unassigned DNA
gcaggtccgggaggcgcaggcggagagcggcggtgcccccgagcccctctgcggacggctcaggcgggaggaccccgcgcggctggatggcggcggccgcgcggcctcggggtcgggcactggggccagtactgccgccgacgccgctgctcctgctggtactgcgggtgctgccagcctgcggggcgaccgctcgggatcccggggccgcggccgggctcagccttcacccgacttacttcaacctggccgaggcggcgaggatttgggccaccgccacctgcggggagaggggacccggcgaggggaggccccagcccgagctctactgcaagttggtcgggggccccaccgccccaggcagcggccacaccatccagggccagttctgtgactattgcaattctgaagaccccaggaaagcacatcctgtcaccaatgccatcgatggatctgaacgttggtggcaaagccctcccctgtcctcaggcacacagtacaacagagtcaacctcaccttggatctggggcagctcttccatgtggcctatattttaatcaaatttgcaaattctcctcgccctgatctttgggtcttggaaagatctgtagactttggaagcacctactcaccatggcaatattttgctcattctaaagtagactgtttaaaagaatttgggcgggaggcaaatatggctgtcacccgggatgatgatgtactttgtgttactgaatattcccgtattgtacctttggaaaatggtgaggttgtggtgtccttgataaacggtcgtccaggtgcaaaaaattttactttctctcacaccctgagggagtttaccaaggcaacaaacatccgcttgcgttttcttagaaccaatacgcttcttggacacctcatctccaaagcccagcgagatccaactgtcactcggcggtattattacagcataaaggacatcagcattggtgggcagtgtgtttgcaatggccatgctgaagtgtgcaatataaacaatcctgaaaaactgtttcggtgtgaatgccagcaccacacctgtggggagacgtgtgatcgctgctgcacagggtacaatcagaggcgctggcggcccgccgcttgggagcagagccacgagtgtgaagcatgcaactgccacggccatgccagcaactgttactatgatccagatgttgagcggcagcaggcaagcttgaatacccagggcatctatgctggtggaggggtctgcattaactgtcagcacaacacagctggagtaaactgtgaacagtgtgctaagggctattaccgcccttatggggttccagtggatgcccctgatggctgcatcccctgcagctgtgaccctgagcatgcggatggctgtgaacagggttcaggccgctgtcactgcaagccaaatttccacggagacaactgtgagaagtgtgcaattggatactacaatttcccattttgcttgagaattcccatttttcctgtttctacaccaagttcagaagatccagtagctggagatataaaagggtgtgactgtaatctggaaggtgttctccctgaaatatgtgatgcccacggacggtgcctgtgccgccctggggttgagggccctcgatgtgatacctgccgctctggtttctactcattccctatttgccaaggacccagtgaaaaggtggccatctacaagccagaaagcaggccctcagcagaaactgaaccagccagcacctggatcttggacttcccagcctccagaactggagaaataaatttctattgtttaa

SEQ ID NO: 11037 - DNA, 9834 bp, Homo sapiens
  source 1..9834: mol_type = unassigned DNA
atggcggcggccgcgcggcctcggggtcgggcactggggccagtactgccgccgacgccgctgctcctgctggtactgcgggtgctgccagcctgcggggcgaccgctcgggatcccggggccgcggccgggctcagccttcacccgacttacttcaacctggccgaggcggcgaggatttgggccaccgccacctgcggggagaggggacccggcgaggggaggccccagcccgagctctactgcaagttggtcgggggccccaccgccccaggcagcggccacaccatccagggccagttctgtgactattgcaattctgaagaccccaggaaagcacatcctgtcaccaatgccatcgatggatctgaacgttggtggcaaagccctcccctgtcctcaggcacacagtacaacagagtcaacctcaccttggatctggggcagctcttccatgtggcctatattttaatcaaatttgcaaattctcctcgccctgatctttgggtcttggaaagatctgtagactttggaagcacctactcaccatggcaatattttgctcattctaaagtagactgtttaaaagaatttgggcgggaggcaaatatggctgtcacccgggatgatgatgtactttgtgttactgaatattcccgtattgtacctttggaaaatggtgaggttgtggtgtccttgataaacggtcgtccaggtgcaaaaaattttactttctctcacaccctgagggagtttaccaaggcaacaaacatccgcttgcgttttcttagaaccaatacgcttcttggacacctcatctccaaagcccagcgagatccaactgtcactcggcggtattattacagcataaaggacatcagcattggtgggcagtgtgtttgcaatggccatgctgaagtgtgcaatataaacaatcctgaaaaactgtttcggtgtgaatgccagcaccacacctgtggggagacgtgtgatcgctgctgcacagggtacaatcagaggcgctggcggcccgccgcttgggagcagagccacgagtgtgaagcatgcaactgccacggccatgccagcaactgttactatgatccagatgttgagcggcagcaggcaagcttgaatacccagggcatctatgctggtggaggggtctgcattaactgtcagcacaacacagctggagtaaactgtgaacagtgtgctaagggctattaccgcccttatggggttccagtggatgcccctgatggctgcatcccctgcagctgtgaccctgagcatgcggatggctgtgaacagggttcaggccgctgtcactgcaagccaaatttccacggagacaactgtgagaagtgtgcaattggatactacaatttcccattttgcttgagaattcccatttttcctgtttctacaccaagttcagaagatccagtagctggagatataaaagggtgtgactgtaatctggaaggtgttctccctgaaatatgtgatgcccacggacggtgcctgtgccgccctggggttgagggccctcgatgtgatacctgccgctctggtttctactcattccctatttgccaagcctgctggtgttcagcccttggatcctaccagatgccctgcagctcagtgactggacagtgtgaatgtcggccaggagttacaggacagcggtgtgacaggtgtctctcaggagcttatgatttcccccactgccaaggttccagcagtgcttgtgacccagctggtaccatcaactccaatttggggtattgccaatgcaagcttcatgttgaaggtcctacttgtagccgctgcaaactgttatattggaatctggacaaagaaaaccccagtggatgttcagaatgcaagtgccataaggcgggaacagtgagtggaactggagagtgtaggcagggagatggtgactgtcactgcaagtcccatgtgggtggcgattcctgcgacacctgtgaagatggatattttgctttggaaaagagcaattactttgggtgtcaagggtgtcagtgtgacattggtggggcattgtcctccatgtgcagtgggccctcgggagtgtgccagtgccgagagcatgtcgtgggaaaggtgtgccagcggcctgaaaacaactactatttcccagatttgcatcatatgaagtatgagattgaagacggcagcacacctaatgggagagaccttcgatttggatttgatccgctggcatttcctgagtttagctggagaggatatgcccaaatgacctcagtacagaatgatgtaagaataacattgaatgtagggaagtcaagtggctccttgtttcgtgttattctgagatacgttaaccctggaactgaagcagtatctggccatataactatttatccatcctggggtgctgctcaaagcaaagagatcatcttcctgccgagtaaggagccagcctttgtcactgtccctggaaatggttttgcagacccattttcaatcacaccaggaatatgggttgcttgtattaaggcagaaggagtccttctggattacctggtgctgctccccagggactactatgaagcctctgtactgcagctgccagtcacagaaccatgtgcctacgcaggacctccccaagaaaattgcttactctaccagcatttgccagtgaccagattcccctgtaccctggcttgtgaggccagacacttcctgcttgatggggagccaagacccgtggcagtgaggcagcccacacctgcacaccctgtcatggtggacctcagcgggagagaggtggaattgcatctgcggctgcgcatcccacaggttggccactacgtggttgtggtcgagtattccacggaggcagctcagctgtttgtggttgatgtgaatgtgaagagctccgggtctgttctggcaggccaggtgaacatttacagctgcaactacagtgttctctgccggagtgctgtgattgatcacatgagccgcatcgccatgtatgagctattggcagatgcagacattcagctcaagggacacatggcccgattccttctgcatcaagtttgtatcatacctattgaagaattctcagctgagtatgtgagaccacaagtccactgcattgccagttatgggcgatttgtcaatcaaagtgccacctgtgtctccttggcccatgaaactcctccaacagcattaattttggatgttctaagtggcaggcctttccctcacctgccccagcagtcgtcaccttctgttgatgttcttcctggggtcaccttgaaggcaccgcagaatcaagtgaccctgagaggacgtgtaccacacctgggccgatacgtctttgtcatccatttttaccaagcagcgcacccgacgtttcccgcgcaggtgtcggtggatggcgggtggccacgggcaggctccttccatgcctctttttgcccccatgtgcttggctgccgggatcaagtgattgccgaaggccagattgagtttgacatctcagagcctgaagtggccgcaactgtgaaggttccagaaggaaagtccttggttttggtccgtgttctagtggtgcctgcagaaaactatgactaccaaatacttcacaaaaaatccatggacaagtcactcgagtttatcaccaattgtggaaaaaacagcttttaccttgacccccagacagcctccagattctgtaagaattccgccaggtccctggtggccttttaccacaagggcgccctgccttgtgagtgccaccccactggggccaccggccctcactgcagccctgagggtgggcagtgcccatgccagcccaacgtcatcgggcggcagtgcacccgctgtgcaacaggccactacggattcccacgctgcaagccgtgcagctgtggtcggcgcctttgtgaagagatgacggggcagtgccgctgccctccccgcacggtcaggccccagtgtgaggtgtgtgagacacactcattcagcttccaccccatggccggctgcgaaggctgcaactgttccaggaggggcaccatcgaggctgccatgccggagtgtgaccgggacagcgggcagtgcagatgcaagcccagaatcacagggcggcagtgtgaccgatgtgcttccgggttttaccgctttcctgagtgtgttccctgcaattgcaacagagatgggactgagccaggagtgtgtgacccagggaccggggcttgcctctgcaaggaaaatgtagaaggcacagagtgtaatgtgtgtcgagaaggctcattccatttggacccagccaatctcaagggttgtaccagctgtttctgttttggagtaaataatcaatgtcacagctcacataagcgaaggactaagtttgtggatatgctgggctggcacctggagacagcagacagagtggacatccctgtctctttcaacccaggcagcaacagtatggtggcggatctccaggagctgcccgcaaccatccacagcgcgtcctgggtcgcacccacctcctacctgggggacaaggtttcttcatatggtggttacctcacttaccaagccaagtcctttggcttgcctggcgacatggttcttctggaaaagaagccggatgtacagctcactggtcagcacatgtccatcatctatgaggagacaaacaccccacggccagaccggctgcatcatggacgagtgcacgtggtcgagggaaacttcagacatgccagcagccgtgccccagtgtctagggaggagctgatgacagtgctgtctagactggcagatgtgcgcatccaaggcctctacttcacagagactcaaaggctcaccctgagcgaggtggggctagaggaagcctctgacacaggaagtgggcgcatagcacttgctgtggaaatctgtgcctgcccccctgcctacgctggtgactcttgtcagggttgtagccctggatactatcgggatcataaaggcttgtataccggacggtgtgttccctgcaattgcaacggacattcaaatcaatgccaggatggctcaggcatatgtgttaactgtcagcacaacaccgcgggagagcactgtgaacgctgccaggagggctactatggcaacgccgtccacggatcctgcagggcctgcccatgtcctcacactaacagctttgccactggctgtgtggtgaatgggggagacgtgcggtgctcctgcaaagctgggtacacaggaacacagtgtgaaaggtgtgcaccgggatatttcgggaatccccagaaattcggaggtagctgccaaccatgcagttgtaacagcaatggccagctgggcagctgtcatcccctgactggagactgcataaaccaagaacccaaagatagcagccctgcagaagaatgtgatgattgcgacagctgtgtgatgaccctcctgaacgacctggccaccatgggcgagcagctccgcctggtcaagtctcagctgcagggcctgagtgccagcgcagggcttctggagcagatgaggcacatggagacccaggccaaggacctgaggaatcagttgctcaactaccgttctgccatttcaaatcatggatcaaaaatagaaggcctggaaagagaactgactgatttgaatcaagaatttgagactttgcaagaaaaggctcaagtaaattccagaaaagcacaaacattaaacaacaatgttaatcgggcaacacaaagcgcaaaagaactggatgtgaagattaaaaatgtcatccggaatgtgcacatgctgaaccggataaggacctggcagaaaacccaccagggggagaacaatgggcttgctaacagtatccgggattctttaaatgaatacgaagccaaactcagtgaccttcgtgctcggctgcaggaggcagctgcccaagccaagcaggcaaatggcttgaaccaagaaaacgagagagctttgggagccattcagagacaagtgaaagaaataaattccctgcagagtgatttcaccaagtatctaaccactgcagactcatctttgttgcaaaccaacattgcgctgcagctgatggagaaaagccagaaggaatatgaaaaattagctgccagtttaaatgaagcaagacaagaactaagtgacaaagtaagagaactttccagatctgctggcaaaacatcccttgtggaggaggcagaaaagcacgcgcggtccttacaagagctggcaaagcagctggaagagatcaagagaaacgccagcggggatgagctggtgcgctgtgctgtggatgccgccaccgcctacgagaacatcctcaatgccatcaaagcggccgaggacgcagccaacagggctgccagtgcatctgaatctgccctccagacagtgataaaggaagatctgccaagaaaagctaaaaccctgagttccaacagtgataaactgttaaatgaagccaagatgacacaaaagaagctaaagcaagaagtcagtccagctctcaacaacctacagcaaaccctgaatattgtgacagttcagaaagaagtgatagacaccaatctcacaactctccgagatggtcttcatgggatacagagaggtgatattgatgctatgatcagtagtgcaaagagcatggtcagaaaggccaacgacatcacagatgaggttctggatgggctcaaccccatccagacagatgtggaaagaattaaggacacctatgggaggacacagaacgaagacttcaaaaaggctctgactgatgcagataactcggtgaataagttaaccaacaaactacctgatctttggcgcaagattgaaagtatcaaccaacagctgttgcccttgggaaacatctctgacaacatggacagaatacgagaactaattcagcaggccagagatgctgccagtaaggttgctgtccccatgaggttcaatggtaaatctggagtcgaagtccgactgccaaatgacctggaagatttgaaaggatatacatctctgtccttgtttctccaaaggcccaactcaagagaaaatgggggtactgagaatatgtttgtgatgtaccttggaaataaagatgcctcccgggactacatcggcatggcagttgtggatggccagctcacctgtgtctacaacctgggggaccgtgaggctgaactccaagtggaccagatcttgaccaagagtgagactaaggaggcagttatggatcgggtgaaatttcagagaatttatcagtttgcaaggcttaattacaccaaaggagccacatccagtaaaccagaaacacccggagtctatgacatggatggtagaaatagcaatacactccttaatttggatcctgaaaatgttgtattttatgttggaggttacccacctgattttaaacttcccagtcgactaagtttccctccatacaaaggttgtattgaattagatgacctcaatgaaaatgttctgagcttgtacaacttcaaaaaaacattcaatctcaacacaactgaagtggagccttgtagaaggaggaaggaagagtcagacaaaaattattttgaaggtacgggctatgctcgagttccaactcaaccacatgctcccatcccaacctttggacagacaattcagaccaccgtggatagaggcttgctgttctttgcagaaaacggggatcgcttcatatctctaaatatagaagatggcaagctcatggtgagatacaaactgaattcagagctaccaaaagagagaggagttggagacgccataaacaacggcagagaccattcgattcagatcaaaattggaaaactccaaaagcgtatgtggataaatgtggacgttcaaaacactataattgatggtgaagtatttgatttcagcacatattatctgggaggaattccaattgcaatcagggaaagatttaacatttctacgcctgctttccgaggctgcatgaaaaatttgaagaaaaccagtggtgtcgttagattgaatgatactgtgggagtaaccaaaaagtgctcggaagactggaagcttgtgcgatctgcctcattctccagaggaggacaattgagtttcactgatttgggcttaccacctactgaccacctccaggcctcatttggatttcagacctttcaacccagtggcatattattagatcatcagacatggacaaggaacctgcaggtcactctggaagatggttacattgaattgagcaccagcgatagcggcggcccaatttttaaatctccacagacgtatatggatggtttactgcattatgtatctgtaataagcgacaactctggactacggcttctcatcgatgaccagcttctgagaaatagcaaaaggctaaaacacatttcaagttcccggcagtctctgcgtctgggcgggagcaattttgagggttgtattagcaatgtttttgtccagaggttatcactgagtcctgaagtcctagatttgaccagtaactctctcaagagagatgtgtccctgggaggctgcagtttaaacaaaccaccttttctaatgttgcttaaaggttctaccaggtttaacaagaccaagacttttcgtatcaaccagctgttgcaggacacaccagtggcctccccaaggagcgtgaaggtgtggcaagatgcttgctcaccacttcccaagacccaggccaatcatggagccctccagtttggggacattcccaccagccacttgctattcaagcttcctcaggagctgctgaaacccaggtcacagtttgctgtggacatgcagacaacatcctccagaggactggtgtttcacacgggcactaagaactcctttatggctctttatctttcaaaaggacgtctggtctttgcactggggacagatgggaaaaaattgaggatcaaaagcaaggagaaatgcaatgatgggaaatggcacacggtggtgtttggccatgatggggaaaaggggcgcttggttgtggatggactgagggcccgggagggaagtttgcctggaaactccaccatcagcatcagagcgccagtttacctgggatcacctccatcagggaaaccaaagagcctccccacaaacagctttgtgggatgcctgaagaactttcagctggattcaaaacccttgtataccccttcttcaagcttcggggtgtcttcctgcttgggtggtcctttggagaaaggcatttatttctctgaagaaggaggtcatgtcgtcttggctcactctgtattgttggggccagaatttaagcttgttttcagcatccgcccaagaagtctcactgggatcctaatacacatcggaagtcagcccgggaagcacttatgtgtttacctggaggcaggaaaggtcacggcctctatggacagtggggcaggtgggacctcaacgtcggtcacaccaaagcagtctctgtgtgatggacagtggcactcggtggcagtcaccataaaacaacacatcctgcacctggaactggacacagacagtagctacacagctggacagatccccttcccacctgccagcactcaagagccactacaccttggaggtgctccagccaatttgacgacactgaggatccctgtgtggaaatcattctttggctgtctgaggaatattcatgtcaatcacatccctgtccctgtcactgaagccttggaagtccaggggcctgtcagtctgaatggttgtcctgaccagtaa

SEQ ID NO: 11038 - DNA, 557 bp, Homo sapiens
  source 1..557: mol_type = unassigned DNA
acccgtggcagtgaggcagcccacacctgcacaccctgtcatggtggacctcagcgggagagaggtggaattgcatctgcggctgcgcatcccacaggttggccactacgtggttgtggtcgagtattccacggaggcagctcagctgtttgtggttgatgtgaatgtgaagagctccgggtctgttctggcaggccaggtgaacatttacagctgcaactacagtgttctctgccggagtgctgtgattgatcacatgagccgcatcgccatgtatgagctattggcagatgcagacattcagctcaagggacacatggcccgattccttctggtatgcttctgttttgcccattgaattttagaagcattttgctgatatctatattttttgaagcttattaaaattttggctggggttgtattactcctataatctgtgaagaattgccagtttaatgtttattcttcccatctagaacctgacttgcctcttcatttgtttgagcattttttgatatggcctaataaaatttagtcatatttaagcacctctc

SEQ ID NO: 11039 - DNA, 590 bp, Homo sapiens
  source 1..590: mol_type = unassigned DNA
ggcaggccaggtgaacatttacagctgcaactacaggtgcgatgcaatgaactcactgctctcacctcaaaggctgtgtcaagtacctgggtgcatagcacaaggaaaaagactcattctcagtaatgttagggggtgcacacctacctttgcaacacaccttcagaactggggataattaatgtttgatgattgtcaagtggaaaaaaaaattaacaaaggacttcaaaatttgccctgatgaagttcttctcttccaagagcactaactgacaagggcttattaaaaatggttttgtttgcataatatttcaagatgtgtgcaaatgttcagagcatgctgtaattaaagaatcagcacaaggggtgtttccacatgaaattaattgtatactaaatgggactggaagtcagagttccttgaaacagcagatggagcactgcagtaaacccatccagttcttggccatggccttgaacattgtattactactactttcatgttgctttttgtcaaacccaagatgacctgaagcaatggacatcttccctgttgtgaaaatgaaaacaaataaacaaataaacaaaaa

SEQ ID NO: 11040 - DNA, 5671 bp, Homo sapiens
  source 1..5671: mol_type = unassigned DNA
aattacagagcggtgcgcttacctgcgggactgttatgtgcgctctggcacaggctgactcatgtgtgaagtttaaaggtggggcccctgccgcagacagccttcctcacctgagtcaggcaggcccgggcactgagcaggaagggcaggtataagaggaagaggcagaggttcctgcgcagccagcggacgtccaggaaccgggatgcctccagcagtgaggcggtcagcctgcagcatgggatggctgtggatctttggggcagccctggggcagtgtctgggctacagttcacagcagcaaagggtgccatttcttcagcctcccggtcaaagtcaactgcaagcgagttatgtggagtttagacccagccagggttgtagccctggatactatcgggatcataaaggcttgtataccggacggtgtgttccctgcaattgcaacggacattcaaatcaatgccaggatggctcaggcatatgtgttaactgtcagcacaacaccgcgggagagcactgtgaacgctgccaggagggctactatggcaacgccgtccacggatcctgcagggcctgcccatgtcctcacactaacagctttgccactggctgtgtggtgaatgggggagacgtgcggtgctcctgcaaagctgggtacacaggaacacagtgtgaaaggtgtgcaccgggatatttcgggaatccccagaaattcggaggtagctgccaaccatgcagttgtaacagcaatggccagctgggcagctgtcatcccctgactggagactgcataaaccaagaacccaaagatagcagccctgcagaagaatgtgatgattgcgacagctgtgtgatgaccctcctgaacgacctggccaccatgggcgagcagctccgcctggtcaagtctcagctgcagggcctgagtgccagcgcagggcttctggagcagatgaggcacatggagacccaggccaaggacctgaggaatcagttgctcaactaccgttctgccatttcaaatcatggatcaaaaatagaaggcctggaaagagaactgactgatttgaatcaagaatttgagactttgcaagaaaaggctcaagtaaattccagaaaagcacaaacattaaacaacaatgttaatcgggcaacacaaagcgcaaaagaactggatgtgaagattaaaaatgtcatccggaatgtgcacattcttttaaagcagatctctgggacagatggagagggaaacaacgtgccttcaggtgacttttccagagagtgggctgaagcccagcgcatgatgagggaactgcggaacaggaactttggaaagcacctcagagaagcagaagctgataaaagggagtcgcagctcttgctgaaccggataaggacctggcagaaaacccaccagggggagaacaatgggcttgctaacagtatccgggattctttaaatgaatacgaagccaaactcagtgaccttcgtgctcggctgcaggaggcagctgcccaagccaagcaggcaaatggcttgaaccaagaaaacgagagagctttgggagccattcagagacaagtgaaagaaataaattccctgcagagtgatttcaccaagtatctaaccactgcagactcatctttgttgcaaaccaacattgcgctgcagctgatggagaaaagccagaaggaatatgaaaaattagctgccagtttaaatgaagcaagacaagaactaagtgacaaagtaagagaactttccagatctgctggcaaaacatcccttgtggaggaggcagaaaagcacgcgcggtccttacaagagctggcaaagcagctggaagagatcaagagaaacgccagcggggatgagctggtgcgctgtgctgtggatgccgccaccgcctacgagaacatcctcaatgccatcaaagcggccgaggacgcagccaacagggctgccagtgcatctgaatctgccctccagacagtgataaaggaagatctgccaagaaaagctaaaaccctgagttccaacagtgataaactgttaaatgaagccaagatgacacaaaagaagctaaagcaagaagtcagtccagctctcaacaacctacagcaaaccctgaatattgtgacagttcagaaagaagtgatagacaccaatctcacaactctccgagatggtcttcatgggatacagagaggtgatattgatgctatgatcagtagtgcaaagagcatggtcagaaaggccaacgacatcacagatgaggttctggatgggctcaaccccatccagacagatgtggaaagaattaaggacacctatgggaggacacagaacgaagacttcaaaaaggctctgactgatgcagataactcggtgaataagttaaccaacaaactacctgatctttggcgcaagattgaaagtatcaaccaacagctgttgcccttgggaaacatctctgacaacatggacagaatacgagaactaattcagcaggccagagatgctgccagtaaggttgctgtccccatgaggttcaatggtaaatctggagtcgaagtccgactgccaaatgacctggaagatttgaaaggatatacatctctgtccttgtttctccaaaggcccaactcaagagaaaatgggggtactgagaatatgtttgtgatgtaccttggaaataaagatgcctcccgggactacatcggcatggcagttgtggatggccagctcacctgtgtctacaacctgggggaccgtgaggctgaactccaagtggaccagatcttgaccaagagtgagactaaggaggcagttatggatcgggtgaaatttcagagaatttatcagtttgcaaggcttaattacaccaaaggagccacatccagtaaaccagaaacacccggagtctatgacatggatggtagaaatagcaatacactccttaatttggatcctgaaaatgttgtattttatgttggaggttacccacctgattttaaacttcccagtcgactaagtttccctccatacaaaggttgtattgaattagatgacctcaatgaaaatgttctgagcttgtacaacttcaaaaaaacattcaatctcaacacaactgaagtggagccttgtagaaggaggaaggaagagtcagacaaaaattattttgaaggtacgggctatgctcgagttccaactcaaccacatgctcccatcccaacctttggacagacaattcagaccaccgtggatagaggcttgctgttctttgcagaaaacggggatcgcttcatatctctaaatatagaagatggcaagctcatggtgagatacaaactgaattcagagctaccaaaagagagaggagttggagacgccataaacaacggcagagaccattcgattcagatcaaaattggaaaactccaaaagcgtatgtggataaatgtggacgttcaaaacactataattgatggtgaagtatttgatttcagcacatattatctgggaggaattccaattgcaatcagggaaagatttaacatttctacgcctgctttccgaggctgcatgaaaaatttgaagaaaaccagtggtgtcgttagattgaatgatactgtgggagtaaccaaaaagtgctcggaagactggaagcttgtgcgatctgcctcattctccagaggaggacaattgagtttcactgatttgggcttaccacctactgaccacctccaggcctcatttggatttcagacctttcaacccagtggcatattattagatcatcagacatggacaaggaacctgcaggtcactctggaagatggttacattgaattgagcaccagcgatagcggcggcccaatttttaaatctccacagacgtatatggatggtttactgcattatgtatctgtaataagcgacaactctggactacggcttctcatcgatgaccagcttctgagaaatagcaaaaggctaaaacacatttcaagttcccggcagtctctgcgtctgggcgggagcaattttgagggttgtattagcaatgtttttgtccagaggttatcactgagtcctgaagtcctagatttgaccagtaactctctcaagagagatgtgtccctgggaggctgcagtttaaacaaaccaccttttctaatgttgcttaaaggttctaccaggtttaacaagaccaagacttttcgtatcaaccagctgttgcaggacacaccagtggcctccccaaggagcgtgaaggtgtggcaagatgcttgctcaccacttcccaagacccaggccaatcatggagccctccagtttggggacattcccaccagccacttgctattcaagcttcctcaggagctgctgaaacccaggtcacagtttgctgtggacatgcagacaacatcctccagaggactggtgtttcacacgggcactaagaactcctttatggctctttatctttcaaaaggacgtctggtctttgcactggggacagatgggaaaaaattgaggatcaaaagcaaggagaaatgcaatgatgggaaatggcacacggtggtgtttggccatgatggggaaaaggggcgcttggttgtggatggactgagggcccgggagggaagtttgcctggaaactccaccatcagcatcagagcgccagtttacctgggatcacctccatcagggaaaccaaagagcctccccacaaacagctttgtgggatgcctgaagaactttcagctggattcaaaacccttgtataccccttcttcaagcttcggggtgtcttcctgcttgggtggtcctttggagaaaggcatttatttctctgaagaaggaggtcatgtcgtcttggctcactctgtattgttggggccagaatttaagcttgttttcagcatccgcccaagaagtctcactgggatcctaatacacatcggaagtcagcccgggaagcacttatgtgtttacctggaggcaggaaaggtcacggcctctatggacagtggggcaggtgggacctcaacgtcggtcacaccaaagcagtctctgtgtgatggacagtggcactcggtggcagtcaccataaaacaacacatcctgcacctggaactggacacagacagtagctacacagctggacagatccccttcccacctgccagcactcaagagccactacaccttggaggtgctccagccaatttgacgacactgaggatccctgtgtggaaatcattctttggctgtctgaggaatattcatgtcaatcacatccctgtccctgtcactgaagccttggaagtccaggggcctgtcagtctgaatggttgtcctgaccagtaacccaagcctatttcacagcaaggaaattcaccttcaaaagcactgattacccaatgcacctccctccccagctcgagatcattcttcactcaggacacaaaccagacaggtttaatagcgaatctaattttgaattctgaccatggatacccatcactttggcattcagtgctacatgtgtattttatataaaaatcccatttcttgaagataaaaaaattgttattcaaattgttatgcacagaatgtttttggtaatattaatttccactaaaaaattaaatgtctttt

SEQ ID NO: 11041 - DNA, 5007 bp, Homo sapiens
  source 1..5007: mol_type = unassigned DNA
atgcctccagcagtgaggcggtcagcctgcagcatgggatggctgtggatctttggggcagccctggggcagtgtctgggctacagttcacagcagcaaagggtgccatttcttcagcctcccggtcaaagtcaactgcaagcgagttatgtggagtttagacccagccagggttgtagccctggatactatcgggatcataaaggcttgtataccggacggtgtgttccctgcaattgcaacggacattcaaatcaatgccaggatggctcaggcatatgtgttaactgtcagcacaacaccgcgggagagcactgtgaacgctgccaggagggctactatggcaacgccgtccacggatcctgcagggcctgcccatgtcctcacactaacagctttgccactggctgtgtggtgaatgggggagacgtgcggtgctcctgcaaagctgggtacacaggaacacagtgtgaaaggtgtgcaccgggatatttcgggaatccccagaaattcggaggtagctgccaaccatgcagttgtaacagcaatggccagctgggcagctgtcatcccctgactggagactgcataaaccaagaacccaaagatagcagccctgcagaagaatgtgatgattgcgacagctgtgtgatgaccctcctgaacgacctggccaccatgggcgagcagctccgcctggtcaagtctcagctgcagggcctgagtgccagcgcagggcttctggagcagatgaggcacatggagacccaggccaaggacctgaggaatcagttgctcaactaccgttctgccatttcaaatcatggatcaaaaatagaaggcctggaaagagaactgactgatttgaatcaagaatttgagactttgcaagaaaaggctcaagtaaattccagaaaagcacaaacattaaacaacaatgttaatcgggcaacacaaagcgcaaaagaactggatgtgaagattaaaaatgtcatccggaatgtgcacatgctgaaccggataaggacctggcagaaaacccaccagggggagaacaatgggcttgctaacagtatccgggattctttaaatgaatacgaagccaaactcagtgaccttcgtgctcggctgcaggaggcagctgcccaagccaagcaggcaaatggcttgaaccaagaaaacgagagagctttgggagccattcagagacaagtgaaagaaataaattccctgcagagtgatttcaccaagtatctaaccactgcagactcatctttgttgcaaaccaacattgcgctgcagctgatggagaaaagccagaaggaatatgaaaaattagctgccagtttaaatgaagcaagacaagaactaagtgacaaagtaagagaactttccagatctgctggcaaaacatcccttgtggaggaggcagaaaagcacgcgcggtccttacaagagctggcaaagcagctggaagagatcaagagaaacgccagcggggatgagctggtgcgctgtgctgtggatgccgccaccgcctacgagaacatcctcaatgccatcaaagcggccgaggacgcagccaacagggctgccagtgcatctgaatctgccctccagacagtgataaaggaagatctgccaagaaaagctaaaaccctgagttccaacagtgataaactgttaaatgaagccaagatgacacaaaagaagctaaagcaagaagtcagtccagctctcaacaacctacagcaaaccctgaatattgtgacagttcagaaagaagtgatagacaccaatctcacaactctccgagatggtcttcatgggatacagagaggtgatattgatgctatgatcagtagtgcaaagagcatggtcagaaaggccaacgacatcacagatgaggttctggatgggctcaaccccatccagacagatgtggaaagaattaaggacacctatgggaggacacagaacgaagacttcaaaaaggctctgactgatgcagataactcggtgaataagttaaccaacaaactacctgatctttggcgcaagattgaaagtatcaaccaacagctgttgcccttgggaaacatctctgacaacatggacagaatacgagaactaattcagcaggccagagatgctgccagtaaggttgctgtccccatgaggttcaatggtaaatctggagtcgaagtccgactgccaaatgacctggaagatttgaaaggatatacatctctgtccttgtttctccaaaggcccaactcaagagaaaatgggggtactgagaatatgtttgtgatgtaccttggaaataaagatgcctcccgggactacatcggcatggcagttgtggatggccagctcacctgtgtctacaacctgggggaccgtgaggctgaactccaagtggaccagatcttgaccaagagtgagactaaggaggcagttatggatcgggtgaaatttcagagaatttatcagtttgcaaggcttaattacaccaaaggagccacatccagtaaaccagaaacacccggagtctatgacatggatggtagaaatagcaatacactccttaatttggatcctgaaaatgttgtattttatgttggaggttacccacctgattttaaacttcccagtcgactaagtttccctccatacaaaggttgtattgaattagatgacctcaatgaaaatgttctgagcttgtacaacttcaaaaaaacattcaatctcaacacaactgaagtggagccttgtagaaggaggaaggaagagtcagacaaaaattattttgaaggtacgggctatgctcgagttccaactcaaccacatgctcccatcccaacctttggacagacaattcagaccaccgtggatagaggcttgctgttctttgcagaaaacggggatcgcttcatatctctaaatatagaagatggcaagctcatggtgagatacaaactgaattcagagctaccaaaagagagaggagttggagacgccataaacaacggcagagaccattcgattcagatcaaaattggaaaactccaaaagcgtatgtggataaatgtggacgttcaaaacactataattgatggtgaagtatttgatttcagcacatattatctgggaggaattccaattgcaatcagggaaagatttaacatttctacgcctgctttccgaggctgcatgaaaaatttgaagaaaaccagtggtgtcgttagattgaatgatactgtgggagtaaccaaaaagtgctcggaagactggaagcttgtgcgatctgcctcattctccagaggaggacaattgagtttcactgatttgggcttaccacctactgaccacctccaggcctcatttggatttcagacctttcaacccagtggcatattattagatcatcagacatggacaaggaacctgcaggtcactctggaagatggttacattgaattgagcaccagcgatagcggcggcccaatttttaaatctccacagacgtatatggatggtttactgcattatgtatctgtaataagcgacaactctggactacggcttctcatcgatgaccagcttctgagaaatagcaaaaggctaaaacacatttcaagttcccggcagtctctgcgtctgggcgggagcaattttgagggttgtattagcaatgtttttgtccagaggttatcactgagtcctgaagtcctagatttgaccagtaactctctcaagagagatgtgtccctgggaggctgcagtttaaacaaaccaccttttctaatgttgcttaaaggttctaccaggtttaacaagaccaagacttttcgtatcaaccagctgttgcaggacacaccagtggcctccccaaggagcgtgaaggtgtggcaagatgcttgctcaccacttcccaagacccaggccaatcatggagccctccagtttggggacattcccaccagccacttgctattcaagcttcctcaggagctgctgaaacccaggtcacagtttgctgtggacatgcagacaacatcctccagaggactggtgtttcacacgggcactaagaactcctttatggctctttatctttcaaaaggacgtctggtctttgcactggggacagatgggaaaaaattgaggatcaaaagcaaggagaaatgcaatgatgggaaatggcacacggtggtgtttggccatgatggggaaaaggggcgcttggttgtggatggactgagggcccgggagggaagtttgcctggaaactccaccatcagcatcagagcgccagtttacctgggatcacctccatcagggaaaccaaagagcctccccacaaacagctttgtgggatgcctgaagaactttcagctggattcaaaacccttgtataccccttcttcaagcttcggggtgtcttcctgcttgggtggtcctttggagaaaggcatttatttctctgaagaaggaggtcatgtcgtcttggctcactctgtattgttggggccagaatttaagcttgttttcagcatccgcccaagaagtctcactgggatcctaatacacatcggaagtcagcccgggaagcacttatgtgtttacctggaggcaggaaaggtcacggcctctatggacagtggggcaggtgggacctcaacgtcggtcacaccaaagcagtctctgtgtgatggacagtggcactcggtggcagtcaccataaaacaacacatcctgcacctggaactggacacagacagtagctacacagctggacagatccccttcccacctgccagcactcaagagccactacaccttggaggtgctccagccaatttgacgacactgaggatccctgtgtggaaatcattctttggctgtctgaggaatattcatgtcaatcacatccctgtccctgtcactgaagccttggaagtccaggggcctgtcagtctgaatggttgtcctgaccagtaa

SEQ ID NO: 11042 - DNA, 3494 bp, Homo sapiens
  source 1..3494: mol_type = unassigned DNA
ctttgccactggctgtgtggtgaatgggggagacgtgcggtgctcctgcaaagctgggtacacaggaacacagtgtgaaaggtgtgcaccgggatatttcgggaatccccagaaattcggaggtagctgccaaccatgcagttgtaacagcaatggccagctgggcagctgtcatcccctgactggagactgcataaaccaagaacccaaagatagcagccctgcagaagaatgtgatgattgcgacagctgtgtgatgaccctcctgaacgacctggccaccatgggcgagcagctccgcctggtcaagtctcagctgcagggcctgagtgccagcgcagggcttctggagcagatgaggcacatggagacccaggccaaggacctgaggaatcagttgctcaactaccgttctgccatttcaaatcatggatcaaaaatagaaggcctggaaagagaactgactgatttgaatcaagaatttgagactttgcaagaaaaggctcaagtaaattccagaaaagcacaaacattaaacaacaatgttaatcgggcaacacaaagcgcaaaagaactggatgtgaagattaaaaatgtcatccggaatgtgcacattcttttaaagcagatctctgggacagatggagagggaaacaacgtgccttcaggtgacttttccagagagtgggctgaagcccagcgcatgatgagggaactgcggaacaggaactttggaaagcacctcagagaagcagaagctgataaaagggagtcgcagctcttgctgaaccggataaggacctggcagaaaacccaccagggggagaacaatgggcttgctaacagtatccgggattctttaaatgaatacgaagccaaactcagtgaccttcgtgctcggctgcaggaggcagctgcccaagccaagcaggcaaatggcttgaaccaagaaaacgagagagctttgggagccattcagagacaagtgaaagaaataaattccctgcagagtgatttcaccaagtatctaaccactgcagactcatctttgttgcaaaccaacattgcgctgcagctgatggagaaaagccagaaggaatatgaaaaattagctgccagtttaaatgaagcaagacaagaactaagtgacaaagtaagagaactttccagatctgctggcaaaacatcccttgtggaggaggcagaaaagcacgcgcggtccttacaagagctggcaaagcagctggaagagatcaagagaaacgccagcggggatgagctggtgcgctgtgctgtggatgccgccaccgcctacgagaacatcctcaatgccatcaaagcggccgaggacgcagccaacagggctgccagtgcatctgaatctgccctccagacagtgataaaggaagatctgccaagaaaagctaaaaccctgagttccaacagtgataaactgttaaatgaagccaagatgacacaaaagaagctaaagcaagaagtcagtccagctctcaacaacctacagcaaaccctgaatattgtgacagttcagaaagaagtgatagacaccaatctcacaactctccgagatggtcttcatgggatacagagaggtgatattgatgctatgatcagtagtgcaaagagcatggtcagaaaggccaacgacatcacagatgaggttctggatgggctcaaccccatccagacagatgtggaaagaattaaggacacctatgggaggacacagaacgaagacttcaaaaaggctctgactgatgcagataactcggtgaataagttaaccaacaaactacctgatctttggcgcaagattgaaagtatcaaccaacagctgttgcccttgggaaacatctctgacaacatggacagaatacgagaactaattcagcaggccagagatgctgccagtaaggttgctgtccccatgaggttcaatggtaaatctggagtcgaagtccgactgccaaatgacctggaagatttgaaaggatatacatctctgtccttgtttctccaaaggcccaactcaagagaaaatgggggtactgagaatatgtttgtgatgtaccttggaaataaagatgcctcccgggactacatcggcatggcagttgtggatggccagctcacctgtgtctacaacctgggggaccgtgaggctgaactccaagtggaccagatcttgaccaagagtgagactaaggaggcagttatggatcgggtgaaatttcagagaatttatcagtttgcaaggcttaattacaccaaaggagccacatccagtaaaccagaaacacccggagtctatgacatggatggtagaaatagcaatacactccttaatttggatcctgaaaatgttgtattttatgttggaggttacccacctgattttaaacttcccagtcgactaagtttccctccatacaaaggttgtattgaattagatgacctcaatgaaaatgttctgagcttgtacaacttcaaaaaaacattcaatctcaacacaactgaagtggagccttgtagaaggaggaaggaagagtcagacaaaaattattttgaaggtacgggctatgctcgagttccaactcaaccacatgctcccatcccaacctttggacagacaattcagaccaccgtggatagaggcttgctgttctttgcagaaaacggggatcgcttcatatctctaaatatagaagatggcaagctcatggtgagatacaaactgaattcagagctaccaaaagagagaggagttggagacgccataaacaacggcagagaccattcgattcagatcaaaattggaaaactccaaaagcgtatgtggataaatgtggacgttcaaaacactataattgatggtgaagtatttgatttcagcacatattatctgggaggaattccaattgcaatcagggaaagatttaacatttctacgcctgctttccgaggctgcatgaaaaatttgaagaaaaccagtggtgtcgttagattgaatgatactgtgggagtaaccaaaaagtgctcggaagactggaagcttgtgcgatctgcctcattctccagaggaggacaattgagtttcactgatttgggcttaccacctactgaccacctccaggcctcatttggatttcagacctttcaacccagtggcatattattagatcatcagacatggacaaggaacctgcaggtcactctggaagatggttacattgaattgagcaccagcgatagcggcggcccaatttttaaatctccacagacgtatatggatggtttactgcattatgtatctgtaataagcgacaactctgggctgaggcaagagggttgcttgaggccaagagttcgagaccagtcttggaaacacagtgaaaccatgtctctacgaaaactaaaataaaataaaatgtaaataaataaaattttaaaaataaatcagttggatggataaa

SEQ ID NO: 11043 - DNA, 4921 bp, Homo sapiens
  source 1..4921: mol_type = unassigned DNA
ctcagttgcaatatgaggctgttcagctacaagagctctgagttccctgtggttctgttggacgagattctttgaatagattcttaatgattccttcattcaagtagccatatgcactgcttttagtgttgtcaggttaactgcaggtttttaaaaaactgtatttattatagaatctggaaattaatcagaatcagttgctcaactaccgttctgccatttcaaatcatggatcaaaaatagaaggcctggaaagagaactgactgatttgaatcaagaatttgagactttgcaagaaaaggctcaagtaaattccagaaaagcacaaacattaaacaacaatgttaatcgggcaacacaaagcgcaaaagaactggatgtgaagattaaaaatgtcatccggaatgtgcacattcttttaaagcagatctctgggacagatggagagggaaacaacgtgccttcaggtgacttttccagagagtgggctgaagcccagcgcatgatgagggaactgcggaacaggaactttggaaagcacctcagagaagcagaagctgataaaagggagtcgcagctcttgctgaaccggataaggacctggcagaaaacccaccagggggagaacaatgggcttgctaacagtatccgggattctttaaatgaatacgaagccaaactcagtgaccttcgtgctcggctgcaggaggcagctgcccaagccaagcaggcaaatggcttgaaccaagaaaacgagagagctttgggagccattcagagacaagtgaaagaaataaattccctgcagagtgatttcaccaagtatctaaccactgcagactcatctttgttgcaaaccaacattgcgctgcagctgatggagaaaagccagaaggaatatgaaaaattagctgccagtttaaatgaagcaagacaagaactaagtgacaaagtaagagaactttccagatctgctggcaaaacatcccttgtggaggaggcagaaaagcacgcgcggtccttacaagagctggcaaagcagctggaagagatcaagagaaacgccagcggggatgagctggtgcgctgtgctgtggatgccgccaccgcctacgagaacatcctcaatgccatcaaagcggccgaggacgcagccaacagggctgccagtgcatctgaatctgccctccagacagtgataaaggaagatctgccaagaaaagctaaaaccctgagttccaacagtgataaactgttaaatgaagccaagatgacacaaaagaagctaaagcaagaagtcagtccagctctcaacaacctacagcaaaccctgaatattgtgacagttcagaaagaagtgatagacaccaatctcacaactctccgagatggtcttcatgggatacagagaggtgatattgatgctatgatcagtagtgcaaagagcatggtcagaaaggccaacgacatcacagatgaggttctggatgggctcaaccccatccagacagatgtggaaagaattaaggacacctatgggaggacacagaacgaagacttcaaaaaggctctgactgatgcagataactcggtgaataagttaaccaacaaactacctgatctttggcgcaagattgaaagtatcaaccaacagctgttgcccttgggaaacatctctgacaacatggacagaatacgagaactaattcagcaggccagagatgctgccagtaaggttgctgtccccatgaggttcaatggtaaatctggagtcgaagtccgactgccaaatgacctggaagatttgaaaggatatacatctctgtccttgtttctccaaaggcccaactcaagagaaaatgggggtactgagaatatgtttgtgatgtaccttggaaataaagatgcctcccgggactacatcggcatggcagttgtggatggccagctcacctgtgtctacaacctgggggaccgtgaggctgaactccaagtggaccagatcttgaccaagagtgagactaaggaggcagttatggatcgggtgaaatttcagagaatttatcagtttgcaaggcttaattacaccaaaggagccacatccagtaaaccagaaacacccggagtctatgacatggatggtagaaatagcaatacactccttaatttggatcctgaaaatgttgtattttatgttggaggttacccacctgattttaaacttcccagtcgactaagtttccctccatacaaaggttgtattgaattagatgacctcaatgaaaatgttctgagcttgtacaacttcaaaaaaacattcaatctcaacacaactgaagtggagccttgtagaaggaggaaggaagagtcagacaaaaattattttgaaggtacgggctatgctcgagttccaactcaaccacatgctcccatcccaacctttggacagacaattcagaccaccgtggatagaggcttgctgttctttgcagaaaacggggatcgcttcatatctctaaatatagaagatggcaagctcatggtgagatacaaactgaattcagagctaccaaaagagagaggagttggagacgccataaacaacggcagagaccattcgattcagatcaaaattggaaaactccaaaagcgtatgtggataaatgtggacgttcaaaacactataattgatggtgaagtatttgatttcagcacatattatctgggaggaattccaattgcaatcagggaaagatttaacatttctacgcctgctttccgaggctgcatgaaaaatttgaagaaaaccagtggtgtcgttagattgaatgatactgtgggagtaaccaaaaagtgctcggaagactggaagcttgtgcgatctgcctcattctccagaggaggacaattgagtttcactgatttgggcttaccacctactgaccacctccaggcctcatttggatttcagacctttcaacccagtggcatattattagatcatcagacatggacaaggaacctgcaggtcactctggaagatggttacattgaattgagcaccagcgatagcggcggcccaatttttaaatctccacagacgtatatggatggtttactgcattatgtatctgtaataagcgacaactctggactacggcttctcatcgatgaccagcttctgagaaatagcaaaaggctaaaacacatttcaagttcccggcagtctctgcgtctgggcgggagcaattttgagggttgtattagcaatgtttttgtccagaggttatcactgagtcctgaagtcctagatttgaccagtaactctctcaagagagatgtgtccctgggaggctgcagtttaaacaaaccaccttttctaatgttgcttaaaggttctaccaggtttaacaagaccaagacttttcgtatcaaccagctgttgcaggacacaccagtggcctccccaaggagcgtgaaggtgtggcaagatgcttgctcaccacttcccaagacccaggccaatcatggagccctccagtttggggacattcccaccagccacttgctattcaagcttcctcaggagctgctgaaacccaggtcacagtttgctgtggacatgcagacaacatcctccagaggactggtgtttcacacgggcactaagaactcctttatggctctttatctttcaaaaggacgtctggtctttgcactggggacagatgggaaaaaattgaggatcaaaagcaaggagaaatgcaatgatgggaaatggcacacggtggtgtttggccatgatggggaaaaggggcgcttggttgtggatggactgagggcccgggagggaagtttgcctggaaactccaccatcagcatcagagcgccagtttacctgggatcacctccatcagggaaaccaaagagcctccccacaaacagctttgtgggatgcctgaagaactttcagctggattcaaaacccttgtataccccttcttcaagcttcggggtgtcttcctgcttgggtggtcctttggagaaaggcatttatttctctgaagaaggaggtcatgtcgtcttggctcactctgtattgttggggccagaatttaagcttgttttcagcatccgcccaagaagtctcactgggatcctaatacacatcggaagtcagcccgggaagcacttatgtgtttacctggaggcaggaaaggtcacggcctctatggacagtggggcaggtgggacctcaacgtcggtcacaccaaagcagtctctgtgtgatggacagtggcactcggtggcagtcaccataaaacaacacatcctgcacctggaactggacacagacagtagctacacagctggacagatccccttcccacctgccagcactcaagagccactacaccttggaggtgctccagccaatttgacgacactgaggatccctgtgtggaaatcattctttggctgtctgaggaatattcatgtcaatcacatccctgtccctgtcactgaagccttggaagtccaggggcctgtcagtctgaatggttgtcctgaccagtaacccaagcctatttcacagcaaggaaattcaccttcaaaagcactgattacccaatgcacctccctccccagctcgagatcattcttcactcaggacacaaaccagacaggtttaatagcgaatctaattttgaattctgaccatggatacccatcactttggcattcagtgctacatgtgtattttatataaaaatcccatttcttgaagataaaaaaattgttattcaaattgttatgcacagaatgtttttggtaatattaatttccactaaaaaattaaatgtcttttaagaaacattcttttccacttgttaaaaaaattaaatatattttaaagca

SEQ ID NO: 11044 - DNA, 637 bp, Homo sapiens
  source 1..637: mol_type = unassigned DNA
gaatcagttgctcaactaccgttctgccatttcaaatcatggatcaaaaatagaaggcctggaaagagaactgactgatttgaatcaagaatttgagactttgcaagaaaaggctcaagtaaattccagaaaagcacaaacattaaacaacaatgttaatcgggcaacacaaagcgcaaaagaactggatgtgaagattaaaaatgtcatccggaatgtgcacattcttttaaagcagatctctgggacagatggagagggaaacaacgtgccttcaggtgacttttccagagagtgggctgaagcccagcgcatgatgagggaactgcggaacaggaactttggaaagcacctcagagaagcagaagctgataaaagggagtcgcagctctgtaagaatgctcccaaattcttgcatccagtccattctaattgatttgaaacacaacgtgcagagtgcaatgtagagttccccgttataggtggaaggcctcatggtttcagcgaatattactgttagagcatcacgtggtgaaaattggtagcccccaggagtcccaggttaccaacgggctgtagaatataacagcttaccatcatgcaaagaaaaaaaaaaagttcttctaaaagttagata

SEQ ID NO: 11045 - DNA, 771 bp, Homo sapiens
  source 1..771: mol_type = unassigned DNA
cttgtgcgatctgcctcattctccagaggaggacaattgagtttcactgatttgggcttaccacctactgaccacctccaggcctcatttggatttcagacctttcaacccagtggcatattattagatcatcagacatggacaaggaacctgcaggtcactctggaagatggttacattgaattgagcaccagcgatagcggcggcccaatttttaaatctccacagacgtatatggatggtttactgcattatgtatctgtaataagcgacaactctgggtgagtggaataatacttctgtcagagctgtgagtgagttttactctctttcgtttaatggaattttctggtgtctttttgcaaaatatttgtccttgataccaaaaatacttcactaataagtcttgtccttcttcctttttccatatcaatttcttcataaaaaaataaactgccacacatggtggctcatgtctgtaatcccaacaactaagaaggctgaggcaagagggttgcttgaggccaagagttcgagaccagtcttggaaacacagtgaaaccatgtctctacgaaaactaaaataaaataaaatgtaaataaataaaattttaaaaataaatcagttggatggataaattgtggtgtattcaaatggaatgctatatagcaatgagaaagaaggatctagaactatatgtaatgacatgaatgaccctcacaaacataatgtggaaaacattgagtcacacataaaagttcatctcatat

SEQ ID NO: 11046 - DNA, 473 bp, Homo sapiens
  source 1..473: mol_type = unassigned DNA
atggatggtttactgcattatgtatctgtaataagcgacaactctggactacggcttctcatcgatgaccagcttctgagaaatagcaaaaggctaaaacacatttcaagttcccggcagtctctgcgtctgggcgggagcaattttgagggttgtattagcaatgtttttgtccagaggtaggtgatcctctctttgtgggtaactgatgagaacggcctgcccatgggaagggtatctctttggtccagttaacaaagtcagctttgtcaacatgtgctgcacgagacccgcataccacagtctttcaaaatgccatctttggcaagatacacccattaaaaaacccataaaaaactcctgggcccggcctccttttggaggagcagcgttagcatgtaaccttggaaaagacctaattaaaattaacttcagattatggcccggaaaagtattcactggaattttattgc

SEQ ID NO: 11047 - DNA, 462 bp, Homo sapiens
  source 1..462: mol_type = unassigned DNA
tggatggactgagggcccgggagggaagtttgcctggaaactccaccatcagcatcagagcgccagtttacctgggatcacctccatcagggaaaccaaaggtgcaggttgagacgcaggccctgaaagggtgaagatagagcttctctgccacttcctaaacctgaatctattggcttctcctccagggaatgcaaaaacgtaggttttaggttatagacagagattttttggttaacataatgtgtttcaaattacagtaatttgtgccattttcaccatctttgccataaggtaaaacattggcttaactgttttctctccatcaaactatttattttaaatgtgcttctatgggatctttttatctctcccataaatggaaacccaatattctttaccataaataatagataaccctgagaaataaacatttgaaaaccaaacactgttaatatcaaa

SEQ ID NO: 11048 - DNA, 554 bp, Homo sapiens
  source 1..554: mol_type = unassigned DNA
tttctctgaagaaggaggtcatgtcgtcttggctcactctgtattgttggggccagaatttaagcttgttttcagcatccgcccaagaagtctcactgggatcctaatacacatcggaagtcagcccgggaagcacttatgtgtttacctggaggcaggaaaggtcacggcctctatggacagtggggcaggtgggacctcaacgtcggtcacaccaaagcagtctctgtgtgatggacagtggcactcggtggcagccaatttgacgacactgaggatccctgtgtggaaatcattctttggctgtctgaggaatattcatgtcaatcacatccctgtccctgtcactgaagccttggaagtccaggggcctgtcagtctgaatggttgtcctgaccagtaacccaagcctatttcacagcaaggaaattcaccttcaaaagcactgattacccaatgcacctccctccccagctcgagatcattcttcactcaggacacaaaccagacaggtttaatagcgaatctaattttgaattctgaccatggatacc

SEQ ID NO: 11049 - DNA, 6547 bp, Homo sapiens
  source 1..6547: mol_type = unassigned DNA
gaatattcttctggagcccttggaggggctccaaactgagaggggagggaagaccgcagggaaaggcggacctcagtgtctgaaaagccagcttagagtgggagggcctgggagtagaaggtaaaaagggagtggtgagaatgaatgtgagaaggaagccaggacagcgcagtccccagtcccgaacggccagggagaggaggtggcctagcgctggcggggctcaccccaatccgtctgccttttgatgccgtactctgctggttgcgcagccacctcgggatactgcacacggagaggagggaaaataagcgaggcaccgccgcaccacgcgggagacctacggagacccacagcgcccgagccctggaagagcactactggatgtcagcggagaaatggctttgagctcagcctggcgctcggttctgcctctgtggctcctctggagcgctgcctgctcccgcgccgcgtccggggacgacaacgcttttccttttgacattgaagggagctcagcggttggcaggcaagacccgcctgagacgagcgaaccccgcgtggctctgggacgcctgccgcctgcggccgagaaatgcaatgctggattctttcacaccctgtcgggagaatgtgtgccctgcgactgtaatggcaattccaacgagtgtttggacggctcaggatactgtgtgcactgccagcggaacacaacaggagagcactgtgaaaagtgtctggatggttatatcggagattccatcaggggagcaccccaattctgccagccgtgcccctgtcccctgccccacttggccaattttgcagaatcctgctataggaaaaatggagctgttcggtgcatttgtaacgaaaattatgctggacctaactgtgaaagatgtgctcccggttactatggaaaccccttactcattggaagcacctgtaagaaatgtgactgcagtggaaattcagatcccaacctgatctttgaagattgtgatgaagtcactggccagtgtaggaattgcttacgcaacaccaccggattcaagtgtgaacgttgcgctcctggctactatggggacgccaggatagccaagaactgtgcagtgtgcaactgcgggggaggcccatgtgacagtgtaaccggagaatgcttggaagaaggttttgaaccccctacaggcatggactgcccaaccataagctgtgataagtgcgtctgggacctgactgatgacctgcggttagcagcgctctccatcgaggaaggcaaatccggggtgctgagcgtatcctctggggccgccgctcataggcacgtgaatgaaatcaacgccaccatctacctcctcaaaacaaaattgtcagaaagagaaaaccaatacgccctaagaaagatacaaatcaacaatgctgagaacacgatgaaaagccttctgtctgacgtagaggaattagttgaaaaggaaaatcaagcctccagaaaaggacaacttgttcagaaggaaagcatggacaccattaaccacgcaagtcagctggtagagcaagcccatgatatgagggataaaatccaagagatcaacaacaagatgctctattatggggaagagcatgaacttagccccaaggaaatctctgagaagctggtgttggcccagaagatgcttgaagagattagaagccgtcaaccatttttcacccaacgggagctcgtggatgaggaggcagatgaggcttacgaactactgagccaggctgagagctggcagcggctgcacaatgagacccgcactctgtttcctgtcgtcctggagcagctggatgactacaatgctaagttgtcagatctccaggaagcacttgaccaggcccttaactatgtcagggatgccgaagacatgaacagggccacagcagccaggcagcgggaccatgagaaacaacaggaaagagtgagggaacaaatggaagtggtgaacatgtctctgagcacatctgcggactctctgacaacacctcgtctaactctttcagaacttgatgatataataaagaatgcgtcagggatttatgcagaaatagatggagccaaaagtgaactacaagtaaaactatctaacctaagtaacctcagccatgatttagtccaagaagctattgaccatgcacaggaccttcaacaagaagctaatgaattgagcaggaagttgcacagttcagatatgaacgggctggtacagaaggctttggatgcatcaaatgtctatgaaaatattgttaattatgttagtgaagccaatgaaacagcagaatttgctttgaacaccactgaccgaatttatgatgcggtgagtgggattgatactcaaatcatttaccataaagatgaaagtgagaacctcctcaatcaagccagagaactgcaagcaaaggcagagtctagcagtgatgaagcagtggctgacactagcaggcgtgtgggtggagccctagcaaggaaaagtgcccttaaaaccagactcagtgatgccgttaagcaactacaagcagcagagagaggggatgcccagcagcgcctggggcagtctagactgatcaccgaggaagccaacaggacgacgatggaggtgcagcaggccactgcccccatggccaacaatctaaccaactggtcacagaatcttcaacattttgactcttctgcttacaacactgcagtgaactctgctagggatgcagtaagaaatctgaccgaggttgtccctcagctcctggatcagcttcgtacggttgagcagaagcgacctgcaagcaacgtttctgccagcatccagaggatccgagagctcattgctcagaccagaagtgttgccagcaagatccaagtctccatgatgtttgatggccagtcagctgtggaagtgcactcgagaaccagtatggatgacttaaaggccttcacgtctctgagcctgtacatgaaaccccctgtgaagcggccggaactgaccgagactgcagatcagtttatcctgtacctcggaagcaaaaacgccaaaaaagagtatatgggtcttgcaatcaaaaatgataatctggtatacgtctataatttgggaactaaagatgtggagattcccctggactccaagcccgtcagttcctggcctgcttacttcagcattgtcaagattgaaagggtgggaaaacatggaaaggtgtttttaacagtcccgagtctaagtagcacagcagaggaaaagttcattaaaaagggggaattttcgggagatgactctctgctggacctggaccctgaggacacagtgttttatgttggtggagtgccttccaacttcaagctccctaccagcttaaacctgcctggctttgttggctgcctggaactggccactttgaataatgatgtgatcagcttgtacaactttaagcacatctataatatggacccctccacatcagtgccatgtgcccgagataagctggccttcactcagagtcgggctgccagttacttcttcgatggctccggttatgccgtggtgagagacatcacaaggagagggaaatttggtcaggtgactcgctttgacatagaagttcgaacaccagctgacaacggccttattctcctgatggtcaatggaagtatgtttttcagactggaaatgcgcaatggttacctacatgtgttctatgattttggattcagcggtggccctgtgcatcttgaagatacgttaaagaaagctcaaattaatgatgcaaaataccatgagatctcaatcatttaccacaatgataagaaaatgatcttggtagttgacagaaggcatgtcaagagcatggataatgaaaagatgaaaataccttttacagatatatacattggaggagctcctccagaaatcttacaatccagggccctcagagcacaccttcccctagatatcaacttcagaggatgcatgaagggcttccagttccaaaagaaggacttcaatttactggagcagacagaaaccctgggagttggttatggatgcccagaagactcacttatatctcgcagagcatatttcaatggacagagcttcattgcttcaattcagaaaatatctttctttgatggctttgaaggaggttttaatttccgaacattacaaccaaatgggttactattctattatgcttcagggtcagacgtgttctccatctcactggataatggtactgtcatcatggatgtaaagggaatcaaagttcagtcagtagataagcagtacaatgatgggctgtcccacttcgtcattagctctgtctcacccacaagatatgaactgatagtagataaaagcagagttgggagtaagaatcctaccaaagggaaaatagaacagacacaagcaagtgaaaagaagttttacttcggtggctcaccaatcagtgctcagtatgctaatttcactggctgcataagtaatgcctactttaccagggtggatagagatgtggaggttgaagatttccaacggtatactgaaaaggtccacacttctctttatgagtgtcccattgagtcttcaccattgtttctcctccataaaaaaggaaaaaatttatccaagcctaaagcaagtcagaataaaaagggagggaaaagtaaagatgcaccttcatgggatcctgttgctctgaaactcccagagcggaatactccaagaaactctcattgccacctttccaacagccctagagcaatagagcacgcctatcaatatggaggaacagccaacagccgccaagagtttgaacacttaaaaggagattttggtgccaaatctcagttttccattcgtctgagaactcgttcctcccatggcatgatcttctatgtctcagatcaagaagagaatgacttcatgactctatttttggcccatggccgcttggtttacatgtttaatgttggtcacaaaaaactgaagattagaagccaggagaaatacaatgatggcctgtggcatgatgtgatatttattcgagaaaggagcagtggccgactggtaattgatggtctccgagtcctagaagaaagtcttcctcctactgaagctacctggaaaatcaagggtcccatttatttgggaggtgtggctcctggaaaggctgtgaaaaatgttcagattaactccatctacagttttagtggctgtctcagcaatctccagctcaatggggcctccatcacctctgcttctcagacattcagtgtgaccccttgctttgaaggccccatggaaacaggaacttacttttcaacagaaggaggatacgtggttctagatgaatctttcaatattggattgaagtttgaaattgcatttgaagtccgtcccagaagcagttccggaaccctggtccacggccacagtgtcaatggggagtacctaaatgttcacatgaaaaatggacaggtcatagtgaaagtcaataatggcatcagagatttttccacctcagttacacccaagcagagtctctgtgatggcagatggcacagaattacagttattagagattctaatgtggttcagttggatgtggactctgaagtgaaccatgtggttggacccctgaatccaaaaccaattgatcacagggagcctgtgtttgttggaggtgttccagaatctctactgacaccacgcttggcccccagcaaacccttcacaggctgcatacgccactttgtgattgatggacacccagtgagcttcagtaaagcagccctggtcagcggcgccgtaagcatcaactcctgtccagcagcctgacatgacagagcacagctgcccaaatacaaagttctttagagcactgaaagaaacacaaagccagccaggaggaacagtaactcttccttcgggtggaagctttcatcgagttgaacaggacttaaacgaatcatcagggaccggatatttcttatttctcatttggattcttaaccttgaatccaaagtgtctgcaatggacaacaattgaaggagtggcaaacttacttgtattgagagcacacgcaattcctactggtgaaattactgtttctgtttctaataaaatagaagggattccaaataaacacttgcacacatttttgaagtgcggctagattctcagattcacctttcttccagggaagataactttcaatctatataaaaatctctgtcctaaaactacctttctttattttgaagagacttactaacttacatataatctaaattagatgatagatttgtttttagcccttttgtttggtctatcagtataagaagaatattttaggtttatagctgaagttatcaaggtttaataaagtaaatttctaacagaatactagaaaaatgcagtataatttaattttttctaaataagaaacacaggaaatcaactactttttccccttccttatctccttaaaagaaaaataaaattgtacatgaga

SEQ ID NO: 11050 - DNA, 6438 bp, Homo sapiens
  source 1..6438: mol_type = unassigned DNA
ttcttctggagcccttggaggggctccaaactgagaggggagggaagaccgcagggaaaggcggacctcagtgtctgaaaagccagcttagagtgggagggcctgggagtagaaggtaaaaagggagtggtgagaatgaatgtgagaaggaagccaggacagcgcagtccccagtcccgaacggccagggagaggaggtggcctagcgctggcggggctcaccccaatccgtctgccttttgatgccgtactgtaagctccgtccatctctgctggttgcgcagccacctcgggatactgcacacggagaggagggaaaataagcgaggcaccgccgcaccacgcgggagacctacggagacccacagcgcccgagccctggaagagcactactggatgtcagcggagaaatggctttgagctcagcctggcgctcggttctgcctctgtggctcctctggagcgctgcctgctcccgcgccgcgtccggggacgacaacgcttttccttttgacattgaagggagctcagcggttggcaggcaagacccgcctgagacgagcgaaccccgcgtggctctgggacgcctgccgcctgcggccgagaaatgcaatgctggattctttcacaccctgtcgggagaatgtgtgccctgcgactgtaatggcaattccaacgagtgtttggacggctcaggatactgtgtgcactgccagcggaacacaacaggagagcactgtgaaaagtgtctggatggttatatcggagattccatcaggggagcaccccaattctgccagccgtgcccctgtcccctgccccacttggccaattttgcagaatcctgctataggaaaaatggagctgttcggtgcatttgtaacgaaaattatgctggacctaactgtgaaagatgtgctcccggttactatggaaaccccttactcattggaagcacctgtaagaaatgtgactgcagtggaaattcagatcccaacctgatctttgaagattgtgatgaagtcactggccagtgtaggaattgcttacgcaacaccaccggattcaagtgtgaacgttgcgctcctggctactatggggacgccaggatagccaagaactgtgcagtgtgcaactgcgggggaggcccatgtgacagtgtaaccggagaatgcttggaagaaggttttgaaccccctacaggctgtgataagtgcgtctgggacctgactgatgacctgcggttagcagcgctctccatcgaggaaggcaaatccggggtgctgagcgtatcctctggggccgccgctcataggcacgtgaatgaaatcaacgccaccatctacctcctcaaaacaaaattgtcagaaagagaaaaccaatacgccctaagaaagatacaaatcaacaatgctgagaacacgatgaaaagccttctgtctgacgtagaggaattagttgaaaaggaaaatcaagcctccagaaaaggacaacttgttcagaaggaaagcatggacaccattaaccacgcaagtcagctggtagagcaagcccatgatatgagggataaaatccaagagatcaacaacaagatgctctattatggggaagagcatgaacttagccccaaggaaatctctgagaagctggtgttggcccagaagatgcttgaagagattagaagccgtcaaccatttttcacccaacgggagctcgtggatgaggaggcagatgaggcttacgaactactgagccaggctgagagctggcagcggctgcacaatgagacccgcactctgtttcctgtcgtcctggagcagctggatgactacaatgctaagttgtcagatctccaggaagcacttgaccaggcccttaactatgtcagggatgccgaagacatgaacagggccacagcagccaggcagcgggaccatgagaaacaacaggaaagagtgagggaacaaatggaagtggtgaacatgtctctgagcacatctgcggactctctgacaacacctcgtctaactctttcagaacttgatgatataataaagaatgcgtcagggatttatgcagaaatagatggagccaaaagtgaactacaagtaaaactatctaacctaagtaacctcagccatgatttagtccaagaagctattgaccatgcacaggaccttcaacaagaagctaatgaattgagcaggaagttgcacagttcagatatgaacgggctggtacagaaggctttggatgcatcaaatgtctatgaaaatattgttaattatgttagtgaagccaatgaaacagcagaatttgctttgaacaccactgaccgaatttatgatgcggtgagtgggattgatactcaaatcatttaccataaagatgaaagtgagaacctcctcaatcaagccagagaactgcaagcaaaggcagagtctagcagtgatgaagcagtggctgacactagcaggcgtgtgggtggagccctagcaaggaaaagtgcccttaaaaccagactcagtgatgccgttaagcaactacaagcagcagagagaggggatgcccagcagcgcctggggcagtctagactgatcaccgaggaagccaacaggacgacgatggaggtgcagcaggccactgcccccatggccaacaatctaaccaactggtcacagaatcttcaacattttgactcttctgcttacaacactgcagtgaactctgctagggatgcagtaagaaatctgaccgaggttgtccctcagctcctggatcagcttcgtacggttgagcagaagcgacctgcaagcaacgtttctgccagcatccagaggatccgagagctcattgctcagaccagaagtgttgccagcaagatccaagtctccatgatgtttgatggccagtcagctgtggaagtgcactcgagaaccagtatggatgacttaaaggccttcacgtctctgagcctgtacatgaaaccccctgtgaagcggccggaactgaccgagactgcagatcagtttatcctgtacctcggaagcaaaaacgccaaaaaagagtatatgggtcttgcaatcaaaaatgataatctggtatacgtctataatttgggaactaaagatgtggagattcccctggactccaagcccgtcagttcctggcctgcttacttcagcattgtcaagattgaaagggtgggaaaacatggaaaggtgtttttaacagtcccgagtctaagtagcacagcagaggaaaagttcattaaaaagggggaattttcgggagatgactctctgctggacctggaccctgaggacacagtgttttatgttggtggagtgccttccaacttcaagctccctaccagcttaaacctgcctggctttgttggctgcctggaactggccactttgaataatgatgtgatcagcttgtacaactttaagcacatctataatatggacccctccacatcagtgccatgtgcccgagataagctggccttcactcagagtcgggctgccagttacttcttcgatggctccggttatgccgtggtgagagacatcacaaggagagggaaatttggtcaggtgactcgctttgacatagaagttcgaacaccagctgacaacggccttattctcctgatggtcaatggaagtatgtttttcagactggaaatgcgcaatggttacctacatgtgttctatgattttggattcagcggtggccctgtgcatcttgaagatacgttaaagaaagctcaaattaatgatgcaaaataccatgagatctcaatcatttaccacaatgataagaaaatgatcttggtagttgacagaaggcatgtcaagagcatggataatgaaaagatgaaaataccttttacagatatatacattggaggagctcctccagaaatcttacaatccagggccctcagagcacaccttcccctagatatcaacttcagaggatgcatgaagggcttccagttccaaaagaaggacttcaatttactggagcagacagaaaccctgggagttggttatggatgcccagaagactcacttatatctcgcagagcatatttcaatggacagagcttcattgcttcaattcagaaaatatctttctttgatggctttgaaggaggttttaatttccgaacattacaaccaaatgggttactattctattatgcttcagggtcagacgtgttctccatctcactggataatggtactgtcatcatggatgtaaagggaatcaaagttcagtcagtagataagcagtacaatgatgggctgtcccacttcgtcattagctctgtctcacccacaagatatgaactgatagtagataaaagcagagttgggagtaagaatcctaccaaagggaaaatagaacagacacaagcaagtgaaaagaagttttacttcggtggctcaccaatcagtgctcagtatgctaatttcactggctgcataagtaatgcctactttaccagggtggatagagatgtggaggttgaagatttccaacggtatactgaaaaggtccacacttctctttatgagtgtcccattgagtcttcaccattgtttctcctccataaaaaaggaaaaaatttatccaagcctaaagcaagtcagaataaaaagggagggaaaagtaaagatgcaccttcatgggatcctgttgctctgaaactcccagagcggaatactccaagaaactctcattgccacctttccaacagccctagagcaatagagcacgcctatcaatatggaggaacagccaacagccgccaagagtttgaacacttaaaaggagattttggtgccaaatctcagttttccattcgtctgagaactcgttcctcccatggcatgatcttctatgtctcagatcaagaagagaatgacttcatgactctatttttggcccatggccgcttggtttacatgtttaatgttggtcacaaaaaactgaagattagaagccaggagaaatacaatgatggcctgtggcatgatgtgatatttattcgagaaaggagcagtggccgactggtaattgatggtctccgagtcctagaagaaagtcttcctcctactgaagctacctggaaaatcaagggtcccatttatttgggaggtgtggctcctggaaaggctgtgaaaaatgttcagattaactccatctacagttttagtggctgtctcagcaatctccagctcaatggggcctccatcacctctgcttctcagacattcagtgtgaccccttgctttgaaggccccatggaaacaggaacttacttttcaacagaaggaggatacgtggttctagatgaatctttcaatattggattgaagtttgaaattgcatttgaagtccgtcccagaagcagttccggaaccctggtccacggccacagtgtcaatggggagtacctaaatgttcacatgaaaaatggacaggtcatagtgaaagtcaataatggcatcagagatttttccacctcagttacacccaagcagagtctctgtgatggcagatggcacagaattacagttattagagattctaatgtggttcagttggatgtggactctgaagtgaaccatgtggttggacccctgaatccaaaaccaattgatcacagggagcctgtgtttgttggaggtgttccagaatctctactgacaccacgcttggcccccagcaaacccttcacaggctgcatacgccactttgtgattgatggacacccagtgagcttcagtaaagcagccctggtcagcggcgccgtaagcatcaactcctgtccagcagcctgacatgacagagcacagctgcccaaatacaaagttctttagagcactgaaagaaacacaaagccagccaggaggaacagtaactcttccttcgggtggaagctttcatcgagttgaacaggacttaaacgaatcatcagggaccggatatttcttatttctcatttggattcttaaccttgaatccaaagtgtctgcaatggacaacaattgaaggagtggcaaacttacttgtattgagagcacacgcaattcctactggtgaaattactgtttctgtttctaataaaatagaagggattccaaataaacacttgcacacatttttgaagtgcggctagattctcagattcacctttcttccagggaagataactttcaatctatataaaaatctctgtcctaaaactacctttctttattttgaagagacttactaacttacatataatctaaattagatgatagatttgtttttagcccttttgtttggtctatcagtataagaagaatattttaggtttatagctgaagttatcaaggtttaataaagtaaatttctaacagaatactagaaaaa

SEQ ID NO: 11051 - DNA, 6297 bp, Homo sapiens
  source 1..6297: mol_type = unassigned DNA
agaaggtaaaaagggagtggtgagaatgaatgtgagaaggaagccaggacagcgcagtccccagtcccgaacggccagggagaggaggtggcctagcgctggcggggctcaccccaatccgtctgccttttgatgccgtactctgctggttgcgcagccacctcgggatactgcacacggagaggagggaaaataagcgaggcaccgccgcaccacgcgggagacctacggagacccacagcgcccgagccctggaagagcactactggatgtcagcggagaaatggctttgagctcagcctggcgctcggttctgcctctgtggctcctctggagcgctgcctgctcccgcgccgcgtccggggacgacaacgcttttccttttgacattgaagggagctcagcggttggcaggcaagacccgcctgagacgagcgaaccccgcgtggctctgggacgcctgccgcctgcggccgagaaatgcaatgctggattctttcacaccctgtcgggagaatgtgtgccctgcgactgtaatggcaattccaacgagtgtttggacggctcaggatactgtgtgcactgccagcggaacacaacaggagagcactgtgaaaagtgtctggatggttatatcggagattccatcaggggagcaccccaattctgccagccgtgcccctgtcccctgccccacttggccaattttgcagaatcctgctataggaaaaatggagctgttcggtgcatttgtaacgaaaattatgctggacctaactgtgaaagatgtgctcccggttactatggaaaccccttactcattggaagcacctgtaagaaatgtgactgcagtggaaattcagatcccaacctgatctttgaagattgtgatgaagtcactggccagtgtaggaattgcttacgcaacaccaccggattcaagtgtgaacgttgcgctcctggctactatggggacgccaggatagccaagaactgtgcagtgtgcaactgcgggggaggcccatgtgacagtgtaaccggagaatgcttggaagaaggttttgaaccccctacaggctgtgataagtgcgtctgggacctgactgatgacctgcggttagcagcgctctccatcgaggaaggcaaatccggggtgctgagcgtatcctctggggccgccgctcataggcacgtgaatgaaatcaacgccaccatctacctcctcaaaacaaaattgtcagaaagagaaaaccaatacgccctaagaaagatacaaatcaacaatgctgagaacacgatgaaaagccttctgtctgacgtagaggaattagttgaaaaggaaaatcaagcctccagaaaaggacaacttgttcagaaggaaagcatggacaccattaaccacgcaagtcagctggtagagcaagcccatgatatgagggataaaatccaagagatcaacaacaagatgctctattatggggaagagcatgaacttagccccaaggaaatctctgagaagctggtgttggcccagaagatgcttgaagagattagaagccgtcaaccatttttcacccaacgggagctcgtggatgaggaggcagatgaggcttacgaactactgagccaggctgagagctggcagcggctgcacaatgagacccgcactctgtttcctgtcgtcctggagcagctggatgactacaatgctaagttgtcagatctccaggaagcacttgaccaggcccttaactatgtcagggatgccgaagacatgaacagggccacagcagccaggcagcgggaccatgagaaacaacaggaaagagtgagggaacaaatggaagtggtgaacatgtctctgagcacatctgcggactctctgacaacacctcgtctaactctttcagaacttgatgatataataaagaatgcgtcagggatttatgcagaaatagatggagccaaaagtgaactacaagtaaaactatctaacctaagtaacctcagccatgatttagtccaagaagctattgaccatgcacaggaccttcaacaagaagctaatgaattgagcaggaagttgcacagttcagatatgaacgggctggtacagaaggctttggatgcatcaaatgtctatgaaaatattgttaattatgttagtgaagccaatgaaacagcagaatttgctttgaacaccactgaccgaatttatgatgcggtgagtgggattgatactcaaatcatttaccataaagatgaaagtgagaacctcctcaatcaagccagagaactgcaagcaaaggcagagtctagcagtgatgaagcagtggctgacactagcaggcgtgtgggtggagccctagcaaggaaaagtgcccttaaaaccagactcagtgatgccgttaagcaactacaagcagcagagagaggggatgcccagcagcgcctggggcagtctagactgatcaccgaggaagccaacaggacgacgatggaggtgcagcaggccactgcccccatggccaacaatctaaccaactggtcacagaatcttcaacattttgactcttctgcttacaacactgcagtgaactctgctagggatgcagtaagaaatctgaccgaggttgtccctcagctcctggatcagcttcgtacggttgagcagaagcgacctgcaagcaacgtttctgccagcatccagaggatccgagagctcattgctcagaccagaagtgttgccagcaagatccaagtctccatgatgtttgatggccagtcagctgtggaagtgcactcgagaaccagtatggatgacttaaaggccttcacgtctctgagcctgtacatgaaaccccctgtgaagcggccggaactgaccgagactgcagatcagtttatcctgtacctcggaagcaaaaacgccaaaaaagagtatatgggtcttgcaatcaaaaatgataatctggtatacgtctataatttgggaactaaagatgtggagattcccctggactccaagcccgtcagttcctggcctgcttacttcagcattgtcaagattgaaagggtgggaaaacatggaaaggtgtttttaacagtcccgagtctaagtagcacagcagaggaaaagttcattaaaaagggggaattttcgggagatgactctctgctggacctggaccctgaggacacagtgttttatgttggtggagtgccttccaacttcaagctccctaccagcttaaacctgcctggctttgttggctgcctggaactggccactttgaataatgatgtgatcagcttgtacaactttaagcacatctataatatggacccctccacatcagtgccatgtgcccgagataagctggccttcactcagagtcgggctgccagttacttcttcgatggctccggttatgccgtggtgagagacatcacaaggagagggaaatttggtcaggtgactcgctttgacatagaagttcgaacaccagctgacaacggccttattctcctgatggtcaatggaagtatgtttttcagactggaaatgcgcaatggttacctacatgtgttctatgattttggattcagcggtggccctgtgcatcttgaagatacgttaaagaaagctcaaattaatgatgcaaaataccatgagatctcaatcatttaccacaatgataagaaaatgatcttggtagttgacagaaggcatgtcaagagcatggataatgaaaagatgaaaataccttttacagatatatacattggaggagctcctccagaaatcttacaatccagggccctcagagcacaccttcccctagatatcaacttcagaggatgcatgaagggcttccagttccaaaagaaggacttcaatttactggagcagacagaaaccctgggagttggttatggatgcccagaagactcacttatatctcgcagagcatatttcaatggacagagcttcattgcttcaattcagaaaatatctttctttgatggctttgaaggaggttttaatttccgaacattacaaccaaatgggttactattctattatgcttcagggtcagacgtgttctccatctcactggataatggtactgtcatcatggatgtaaagggaatcaaagttcagtcagtagataagcagtacaatgatgggctgtcccacttcgtcattagctctgtctcacccacaagatatgaactgatagtagataaaagcagagttgggagtaagaatcctaccaaagggaaaatagaacagacacaagcaagtgaaaagaagttttacttcggtggctcaccaatcagtgctcagtatgctaatttcactggctgcataagtaatgcctactttaccagggtggatagagatgtggaggttgaagatttccaacggtatactgaaaaggtccacacttctctttatgagtgtcccattgagtcttcaccattgtttctcctccataaaaaaggaaaaaatttatccaagcctaaagcaagtcagaataaaaagggagggaaaagtaaagatgcaccttcatgggatcctgttgctctgaaactcccagagcggaatactccaagaaactctcattgccacctttccaacagccctagagcaatagagcacgcctatcaatatggaggaacagccaacagccgccaagagtttgaacacttaaaaggagattttggtgccaaatctcagttttccattcgtctgagaactcgttcctcccatggcatgatcttctatgtctcagatcaagaagagaatgacttcatgactctatttttggcccatggccgcttggtttacatgtttaatgttggtcacaaaaaactgaagattagaagccaggagaaatacaatgatggcctgtggcatgatgtgatatttattcgagaaaggagcagtggccgactggtaattgatggtctccgagtcctagaagaaagtcttcctcctactgaagctacctggaaaatcaagggtcccatttatttgggaggtgtggctcctggaaaggctgtgaaaaatgttcagattaactccatctacagttttagtggctgtctcagcaatctccagctcaatggggcctccatcacctctgcttctcagacattcagtgtgaccccttgctttgaaggccccatggaaacaggaacttacttttcaacagaaggaggatacgtggttctagatgaatctttcaatattggattgaagtttgaaattgcatttgaagtccgtcccagaagcagttccggaaccctggtccacggccacagtgtcaatggggagtacctaaatgttcacatgaaaaatggacaggtcatagtgaaagtcaataatggcatcagagatttttccacctcagttacacccaagcagagtctctgtgatggcagatggcacagaattacagttattagagattctaatgtggttcagttggatgtggactctgaagtgaaccatgtggttggacccctgaatccaaaaccaattgatcacagggagcctgtgtttgttggaggtgttccagaatctctactgacaccacgcttggcccccagcaaacccttcacaggctgcatacgccactttgtgattgatggacacccagtgagcttcagtaaagcagccctggtcagcggcgccgtaagcatcaactcctgtccagcagcctgacatgacagagcacagctgcccaaatacaaagttctttagagcactgaaagaaacacaaagccagccaggaggaacagtaactcttccttcgggtggaagctttcatcgagttgaacaggacttaaacgaatcatcagggaccggatatttcttatttctcatttggattcttaaccttgaatccaaagtgtctgcaatggacaacaattgaaggagtggcaaacttacttgtattgagagcacacgcaattcctactggtgaaattactgtttctgtttctaataaaatagaagggattccaaataaacacttgcacacatttttgaagtgcggctagattctcagattcacctttcttccagggaagataactttcaatctatataaaaatctctgtcctaaaactacctttctttattttgaagagacttactaacttacatataatctaaattagatgatagatttgtttttagcccttttgtttggtctatcagtataagaagaatattttaggtttatagctgaagttatcaaggtttaataaagtaaatttctaaca

SEQ ID NO: 11052 - DNA, 5983 bp, Homo sapiens
  source 1..5983: mol_type = unassigned DNA
agtcccgaacggccagggagaggaggtggcctagcgctggcggggctcaccccaatccgtctgccttttgatgccgtactgtaagctccgtccatctgtaggttcttgagccagaacctctgcgggaaggagaaaaagtgaaagagggagagggagagggagagagagggggagaaggggagagagagagagggagagagaggctggaactctcccttactctcgcactttccctttatttcctaagctgctggttgcgcagccacctcgggatactgcacacggagaggagggaaaataagcgaggcaccgccgcaccacgcgggagacctacggagacccacagcgcccgagccctggaagagcactactggatgtcagcggagaaatggctttgagctcagcctggcgctcggttctgcctctgtggctcctctggagcgctgcctgctcccgcgccgcgtccggggacgacaacgcttttccttttgacattgaagggagctcagcggttggcaggcaagacccgcctgagacgagcgaaccccgcgtggctctgggacgcctgccgcctgcggccgagaaatgcaatgctggattctttcacaccctgtcgggagaatgtgtgccctgcgactgtaatggcaattccaacgagtgtttggacggctcaggatactgtgtgcactgccagcggaacacaacaggagagcactgtgaaaagtgtctggatggttatatcggagattccatcaggggagcaccccaattctgccagccgtgcccctgtcccctgccccacttggccaattttgcagaatcctgctataggaaaaatggagctgttcggtgcatttgtaacgaaaattatgctggacctaactgtgaaagatgtgctcccggttactatggaaaccccttactcattggaagcacctgtaagaaatgtgactgcagtggaaattcagatcccaacctgatctttgaagattgtgatgaagtcactggccagtgtaggaattgcttacgcaacaccaccggattcaagtgtgaacgttgcgctcctggctactatggggacgccaggatagccaagaactgtgcagtgtgcaactgcgggggaggcccatgtgacagtgtaaccggagaatgcttggaagaaggttttgaaccccctacaggctgtgataagtgcgtctgggacctgactgatgacctgcggttagcagcgctctccatcgaggaaggcaaatccggggtgctgagcgtatcctctggggccgccgctcataggcacgtgaatgaaatcaacgccaccatctacctcctcaaaacaaaattgtcagaaagagaaaaccaatacgccctaagaaagatacaaatcaacaatgctgagaacacgatgaaaagccttctgtctgacgtagaggaattagttgaaaaggaaaatcaagcctccagaaaaggacaacttgttcagaaggaaagcatggacaccattaaccacgcaagtcagctggtagagcaagcccatgatatgagggataaaatccaagagatcaacaacaagatgctctattatggggaagagcatgaacttagccccaaggaaatctctgagaagctggtgttggcccagaagatgcttgaagagattagaagccgtcaaccatttttcacccaacgggagctcgtggatgaggaggcagatgaggcttacgaactactgagccaggctgagagctggcagcggctgcacaatgagacccgcactctgtttcctgtcgtcctggagcagctggatgactacaatgctaagttgtcagatctccaggaagcacttgaccaggcccttaactatgtcagggatgccgaagacatgaacagggccacagcagccaggcagcgggaccatgagaaacaacaggaaagagtgagggaacaaatggaagtggtgaacatgtctctgagcacatctgcggactctctgacaacacctcgtctaactctttcagaacttgatgatataataaagaatgcgtcagggatttatgcagaaatagatggagccaaaagtgaactacaagtaaaactatctaacctaagtaacctcagccatgatttagtccaagaagctattgaccatgcacaggaccttcaacaagaagctaatgaattgagcaggaagttgcacagttcagatatgaacgggctggtacagaaggctttggatgcatcaaatgtctatgaaaatattgttaattatgttagtgaagccaatgaaacagcagaatttgctttgaacaccactgaccgaatttatgatgcggtgagtgggattgatactcaaatcatttaccataaagatgaaagtgagaacctcctcaatcaagccagagaactgcaagcaaaggcagagtctagcagtgatgaagcagtggctgacactagcaggcgtgtgggtggagccctagcaaggaaaagtgcccttaaaaccagactcagtgatgccgttaagcaactacaagcagcagagagaggggatgcccagcagcgcctggggcagtctagactgatcaccgaggaagccaacaggacgacgatggaggtgcagcaggccactgcccccatggccaacaatctaaccaactggtcacagaatcttcaacattttgactcttctgcttacaacactgcagtgaactctgctagggatgcagtaagaaatctgaccgaggttgtccctcagctcctggatcagcttcgtacggttgagcagaagcgacctgcaagcaacgtttctgccagcatccagaggatccgagagctcattgctcagaccagaagtgttgccagcaagatccaagtctccatgatgtttgatggccagtcagctgtggaagtgcactcgagaaccagtatggatgacttaaaggccttcacgtctctgagcctgtacatgaaaccccctgtgaagcggccggaactgaccgagactgcagatcagtttatcctgtacctcggaagcaaaaacgccaaaaaagagtatatgggtcttgcaatcaaaaatgataatctggtatacgtctataatttgggaactaaagatgtggagattcccctggactccaagcccgtcagttcctggcctgcttacttcagcattgtcaagattgaaagggtgggaaaacatggaaaggtgtttttaacagtcccgagtctaagtagcacagcagaggaaaagttcattaaaaagggggaattttcgggagatgactctctgctggacctggaccctgaggacacagtgttttatgttggtggagtgccttccaacttcaagctccctaccagcttaaacctgcctggctttgttggctgcctggaactggccactttgaataatgatgtgatcagcttgtacaactttaagcacatctataatatggacccctccacatcagtgccatgtgcccgagataagctggccttcactcagagtcgggctgccagttacttcttcgatggctccggttatgccgtggtgagagacatcacaaggagagggaaatttggtcaggtgactcgctttgacatagaagttcgaacaccagctgacaacggccttattctcctgatggtcaatggaagtatgtttttcagactggaaatgcgcaatggttacctacatgtgttctatgattttggattcagcggtggccctgtgcatcttgaagatacgttaaagaaagctcaaattaatgatgcaaaataccatgagatctcaatcatttaccacaatgataagaaaatgatcttggtagttgacagaaggcatgtcaagagcatggataatgaaaagatgaaaataccttttacagatatatacattggaggagctcctccagaaatcttacaatccagggccctcagagcacaccttcccctagatatcaacttcagaggatgcatgaagggcttccagttccaaaagaaggacttcaatttactggagcagacagaaaccctgggagttggttatggatgcccagaagactcacttatatctcgcagagcatatttcaatggacagagcttcattgcttcaattcagaaaatatctttctttgatggctttgaaggaggttttaatttccgaacattacaaccaaatgggttactattctattatgcttcagggtcagacgtgttctccatctcactggataatggtactgtcatcatggatgtaaagggaatcaaagttcagtcagtagataagcagtacaatgatgggctgtcccacttcgtcattagctctgtctcacccacaagatatgaactgatagtagataaaagcagagttgggagtaagaatcctaccaaagggaaaatagaacagacacaagcaagtgaaaagaagttttacttcggtggctcaccaatcagtgctcagtatgctaatttcactggctgcataagtaatgcctactttaccagggtggatagagatgtggaggttgaagatttccaacggtatactgaaaaggtccacacttctctttatgagtgtcccattgagtcttcaccattgtttctcctccataaaaaaggaaaaaatttatccaagcctaaagcaagtcagaataaaaagggagggaaaagtaaagatgcaccttcatgggatcctgttgctctgaaactcccagagcggaatactccaagaaactctcattgccacctttccaacagccctagagcaatagagcacgcctatcaatatggaggaacagccaacagccgccaagagtttgaacacttaaaaggagattttggtgccaaatctcagttttccattcgtctgagaactcgttcctcccatggcatgatcttctatgtctcagatcaagaagagaatgacttcatgactctatttttggcccatggccgcttggtttacatgtttaatgttggtcacaaaaaactgaagattagaagccaggagaaatacaatgatggcctgtggcatgatgtgatatttattcgagaaaggagcagtggccgactggtaattgatggtctccgagtcctagaagaaagtcttcctcctactgaagctacctggaaaatcaagggtcccatttatttgggaggtgtggctcctggaaaggctgtgaaaaatgttcagattaactccatctacagttttagtggctgtctcagcaatctccagctcaatggggcctccatcacctctgcttctcagacattcagtgtgaccccttgctttgaaggccccatggaaacaggaacttacttttcaacagaaggaggatacgtggttctagatgaatctttcaatattggattgaagtttgaaattgcatttgaagtccgtcccagaagcagttccggaaccctggtccacggccacagtgtcaatggggagtacctaaatgttcacatgaaaaatggacaggtcatagtgaaagtcaataatggcatcagagatttttccacctcagttacacccaagcagagtctctgtgatggcagatggcacagaattacagttattagagattctaatgtggttcagttggatgtggactctgaagtgaaccatgtggttggacccctgaatccaaaaccaattgatcacagggagcctgtgtttgttggaggtgttccagaatctctactgacaccacgcttggcccccagcaaacccttcacaggctgcatacgccactttgtgattgatggacacccagtgagcttcagtaaagcagccctggtcagcggcgccgtaagcatcaactcctgtccagcagcctgacatgacagagcacagctgcccaaatacaaagttctttagagcactgaaagaaacacaaagccagccaggaggaacagtaactcttccttcgggtggaagctttcatcgagttgaacaggacttaaacgaatcatcagggaccgg

SEQ ID NO: 11053 - DNA, 694 bp, Homo sapiens
  source 1..694: mol_type = unassigned DNA
gggaaaatagaacagacacaagcaagtgaaaagaagttttacttcggtggctcaccaatcagtgctcagtatgctaatttcactggctgcataagtaatgcctactttaccagggtggatagagatgtggaggttgaagatttccaacggtatactgaaaaggtccacacttctctttatgagtgtcccattgagtcttcaccattgtttctcctccataaaaaaggaaaaaatttatccaagcctaaagcaagtcagaataaaaagggagggaaaagtaaagatgcaccttcatgggatcctgttgctctgaaactcccagagcggaatactccaagaaactctcattgccacctttccaacagccctagagcaatagagcacgcctatcaatatggaggaacagccaacagccgccaagagtttgaacacttaaaaggagattttggtgccaagtaaagtaacacactatactcctagactcctaatgacatggctgggctccatctttgtttgtcacatgtcatcgttttttcccatctttcctttctgtgccaccttaatcctattatgttatcaccaaaataaacactaaatagtacatgatttatgctatcaaaagaattatattctctgtgactttccaattgtaaggttcataaaacagtattcttccaggatactgtatttgatc

SEQ ID NO: 11054 - DNA, 579 bp, Homo sapiens
  source 1..579: mol_type = unassigned DNA
cttttcattaaccacatgttccatttcaatttcatgagaaaacctgcttatccaacctagagtgggtcaaggtaaaatgctagctctgtggtatgtaaagaagcctttttcttttgcagatatgaactgatagtagataaaagcagagttgggagtaagaatcctaccaaagggaaaatagaacagacacaagcaagtgaaaagaagttttacttcggtggctcaccaatcagtgctcagtatgctaatttcactggctgcataagtaatgcctactttaccagggtggatagagatgtggaggttgaagatttccaacggtatactgaaaaggtccacacttctctttatgagtgtcccattgagtcttcaccattgtttctcctccataaaaaaggaaaaaatttatccaagcctaaagcaagtcagaataaaaagggagggaaaagtaaagatgcaccttcatgggatcctgttgctctgaaactcccagagcggaatactccaagaaactctcattgccacctttccaacagccctagagcaatagagcacgcctatcaatatggaggaacagcc

SEQ ID NO: 11055 - DNA, 587 bp, Homo sapiens
  source 1..587: mol_type = unassigned DNA
cactcagagtcgggctgccagttacttcttcgatggctccggttatgccgtggtgagagacatcacaaggagagggaaatttggtcaggtgactcgctttgacatagaagttcgaacaccagctgacaacggccttattctcctgatggtcaatggaagtatgtttttcagactggaaatgcgcaatggttacctacatgtgttctatgattttggattcagcggtggccctgtgcatcttgaagatacgttaaagaaagctcaaattaatgatgcaaaataccatgaggtacaaatcattgtagtttggttggttttgtttttgttctttatacttagatctgttgatctaatcaggcagtcaaatgagacaggcaggatggtaaataaactgagaactttcatatctaaagagcaactgaaggaccctcatcttctcaaccctaggaaaacatttactttaaaacattggatgtatttttcctgttgatgttccaatttaaaagtcactgaaagattccttttaattgcttaattaaccagaaggcttctattaatcttaaatatctcaattggtattcctacag

SEQ ID NO: 11056 - DNA, 1054 bp, Homo sapiens
  source 1..1054: mol_type = unassigned DNA
taaagaatgcgtcagggatttatgcagaaatagatggagccaaaagtgaactacaagtaaaactatctaacctaagtaacctcagccatgatttagtccaagaagctattgaccatgcacaggaccttcaacaagaagctaatgaattgagcaggaagttgcacagttcagatatgaacgggctggtacagaaggctttggatgcatcaaatgtctatgaaaatattgttaattatgttagtgaagccaatgaaacagcagaatttgctttgaacaccactgaccgaatttatgatgcggtgagtgggattgatactcaaatcatttaccataaagatgaaagtgagaacctcctcaatcaagccagagaactgcaagcaaaggcagagtctagcagtgatgaagcagtggctgacactagcaggcgtgtgggtggagccctagcaaggaaaagtgcccttaaaaccagactcagtgatgccgttaagcaactacaagcagcagagagaggtaagcatcagagagaattgaagtctcatctgttgattcactggagtgtaaggtaaaccttcaaggaaggattaggggatgcccagcagcgcctggggcagtctagactgatcaccgaggaagccaacaggacgacgatggaggtgcagcaggccactgcccccatggccaacaatctaaccaactggtcacagaatcttcaacattttgactcttctgcttacaacactgcagtgaactctgctagggatgcagtaagaaatctgaccgaggttgtccctcagctcctggatcagcttcgtacggttgagcagaagcgacctgcaagcaacgtttctgccagcatccagaggatccgagagctcattgctcagaccagaagtgttgccagcaagatccaagtctccatgatgtttgatggccagtcagctgtggaagtgcactcgagaaccagtatggatgacttaaaggccttcacgtctctgagcctgtacatgaaaccccctgtgaagcggccggaactgaccgagactgcagatcagtt

SEQ ID NO: 11057 - DNA, 2725 bp, Homo sapiens
  source 1..2725: mol_type = unassigned DNA
ttttaaagagctgagccaaaaaagcaacagacaaggcaagtgggcattcgaccaaatgccagactaaagaacttctcttcctcttaaatataacccatagatcagtccttcaaatcccaaaagtaagtacatgtcgcccatgctgtgcatacagggtggtgtcctagccttgaatcatttctgtgctcttagatcacattctgtccttcaccacgcacacaaaaacacacacatacacacagacgcccacacaaaccctttcttcagaggccacatttgagttgggcattatttttgacaaatactgtgtgagatctctgaaacagaatctcccaagttgagagaatggaatcagcttctcggagaagagctccattcacgctgagccaaatctgcttgagcagttatttgtacacaagtgccatcaatgttgatgggaatttggaatgaagcactgaaaacagcatgttaggccagtgagaataatccttgaaatctctgtggtaattcaatttcagcagtggttggaccacccaggagccactggaagcatggtgcatttcaaggtctgcctattttttcaacaattttctctttgaaactttaagctcttcagtcagcacaatgtcaaaatgataagcagacatgggcaattttctagtccagcaacttgagatacagtaaaaatttgaagaataaattacatatgaaaggcagttggttgggactgaactgtgactgatgatataggaatagcaccagattttatagcattctgtcattctaaaactggccatcaagtgaagtaacttaggaatggaaaaccaaacattgtatgtcctaactgatacgtgggagctaagctatgaggacgcagaggcataagaatgatacaatggactttggggacttgcagggaagagtggagtggggagggataaaagactacaaatatggtgcagtgtatactgctcgggtgatgggtgcaccaaagtctaacaaatcaccactaaagaacttactcatgtaaccaaataccacctataccccaataacttacggaaaaattaaaaaattttttaaaagtaaaactggccatcacattacctttcatgcattatttttgggatgatttcatgtgttatagaactttcacatgccaggaagatttacgtttaggaaatacattatgcccacccacccctatctgtgcttatacaacattcttttctcatacatttaatctagcctttatacggattatttgtaggaaaatcaagcctccagaaaaggacaacttgttcagaaggaaagcatggacaccattaaccacgcaagtcagctggtagagcaagcccatgatatgagggataaaatccaagagatcaacaacaagatgctctattatggggaagagcatgaacttagccccaaggaaatctctgagaagctggtgttggcccagaagatgcttgaagagattagaagccgtcaaccatttttcacccaacgggagctcgtggatgaggaggcagatgaggcttacgaactactgagccaggctgagagctggcagcggctgcacaatgagacccgcactctgtttcctgtcgtcctggagcagctggatgactacaatgctaagttgtcagatctccaggaagcacttgaccaggcccttaactatgtcagggatgccgaagacatgaacagggccacagcagccaggcagcgggaccatgaggtacagcggacactcaccatcaatgcatttcagcatcagcagtgtgatggtacaccaagaaggggctgttgatataaatttttttaaaatattggtatagttaaatacttatattttaaaatattggtgtgttttttggtgctataaattactaacttgtgtgttcctaaaatcaagttgaaactaggataattgtctagttcttgctttgataagaacgcagtagttctgatgcttgtgtccatgtgtatgggtctgttattcttgcaagtgggtaagcaatgcatagctttttttatactgagagcactagaaggccaaagcatctcaaaaccatgggttctgggtatgcataatttttggaaaggcacgataagcaaatctcacagtctggctggtcagcagctgcagggataaggagactaattgccaaggccatgcaaatgcaaagaggaaggtgaggaggattcccagatgtgatcatagcttgcaaagatggtcatctcatggggccagaattcgtgcatgcccacacctacaaagctgagaactggtagtggtcatgtgtccgcttcaagcaatgcatgtattcacagccgccagcatcaagaggggccatcttttgataggatgacacatgcatgttcaaacatattttaaaagattagggagaaaagaatactgtgaacaaatagaaaccaattatgagcaaattcacgaattcggttatgtactattgtggctggcaaaagccacttaaactaggctctctagcctgattttcagccatcattacccctcactaagaatccttgtaaaatttcttccgtaaaagttaattacactcatcaccactgtttgctaatgggagcaaacccctagccaatattttttagaataatatggttgggataactttttttttttttttttgctaaatgaatgcatgattatcttatacaataaaagtataacacaaaa

SEQ ID NO: 11058 - DNA, 729 bp, Homo sapiens
  source 1..729: mol_type = unassigned DNA
aagcacctgtaagaaatgtgactgcagtggaaattcagatcccaacctgatctttgaagattgtgatgaagtcactggccagtgtaggaattgcttacgcaacaccaccggattcaagtgtgaacgttgcgctcctggctactatggggacgccaggatagccaagaactgtgcagtgtgcaactgcgggggaggcccatgtgacagtgtaaccggagaatgcttggaagaaggttttgaaccccctacaggctgtgataagtgcgtctgggacctgactgatgacctgcggttagcagcgctctccatcgaggaaggcaaatccggggtgctgagcgtatcctctggggccgccgctcataggcacgtgaatgaaatcaacgccaccatctacctcctcaaaacaaaattgtcagaaagagaaaaccaatacgccctaagaaagatacaaatcaacaatgctgagaacacgatgaaaagccttctgtctgacgtagaggaattagttgaaaagcactggaacaagccaagaagaagactggaattgcaggaaggagtataatgactcagaagacagtgtccattcagagagcccacagtttatgaagggactgatgaccacattgccgctgcacagtgggctctgtgactacaggagccttgctctgtagggaggggattacccttctccaataaaaagcctctgggcatgtgtttgttataatacca

SEQ ID NO: 11059 - DNA, 672 bp, Homo sapiens
  source 1..672: mol_type = unassigned DNA
tgatctttgaagattgtgatgaagtcactggccagtgtaggaattgcttacgcaacaccaccggattcaagtgtgaacgttgcgctcctggctactatggggacgccaggatagccaagaactgtgcagtgtgcaactgcgggggaggcccatgtgacagtgtaaccggagaatgcttggaagaaggttttgaaccccctacaggcatggactgcccaaccataagctgtgataagtgcgtctgggacctgactgatgacctgcggttagcagcgctctccatcgaggaaggcaaatccggggtgctgagcgtatcctctggggccgccgctcataggcacgtgaatgaaatcaacgccaccatctacctcctcaaaacaaaattgtcagaaagagaaaaccaatacgccctaagaaagatacaaatcaacaatgctgagaacacgatgaaaagccttctgtctgacgtagaggaattagttgaaaagcactggaacaagccaagaagaagactggaattgcaggaaggagtataatgactcagaagacagtgtccattcagagagcccacagtttatgaagggactgatgaccacattgccgctgcacagtgggctctgtgactacaggagccttgctctgtagggaggggattacccttctccaataaaa

SEQ ID NO: 11060 - DNA, 1330 bp, Homo sapiens
  source 1..1330: mol_type = unassigned DNA
aatccgtctgccttttgatgccgtactgtaagctccgtccatctgtaggttcttgagccagaacctctgcgggaaggagaaaaagtgaaagagggagagggagagggagagagagggggagaaggggagagagagagagggagagagaggctggaactctcccttactctcgcactttccctttatttcctaagctgctggttgcgcagccacctcgggatactgcacacggagaggagggaaaataagcgaggcaccgccgcaccacgcgggagacctacggagacccacagcgcccgagccctggaagagcactactggatgtcagcggagaaatggctttgagctcagcctggcgctcggttctgcctctgtggctcctctggagcgctgcctgctcccgcgccgcgtccggggacgacaacgcttttccttttgacattgaagggagctcagcggttggcaggcaagacccgcctgagacgagcgaaccccgcgtggctctgggacgcctgccgcctgcggccgagaaatgcaatgctggattctttcacaccctgtcgggagaatgtgtgccctgcgactgtaatggcaattccaacgagtgtttggacggctcaggatactgtgtgcactgccagcggaacacaacaggagagcactgtgaaaagtgtctggatggttatatcggagattccatcaggggagcaccccaattctgccagccgtgcccctgtcccctgccccacttggccaattttgcagaatcctgctataggaaaaatggagctgttcggtgcatttgtaacgaaaattatgctggacctaactgtgaaagatgtgctcccggttactatggaaaccccttactcattggaagcacctgtaagaaatgtgactgcagtggaaattcagatcccaacctgatctttgaagattgtgatgaagtcactggccagtgtaggaattgcttacgcaacaccaccggattcaagtgtgaacgttgcgctcctggctactatggggacgccaggatagccaagaactgtgcagtgtgcaactgcgggggaggcccatgtgacagtgtaaccggagaatgcttggaagaaggttttgaaccccctacaggcatggactgcccaaccataagctgtgataagtgcgtctgggacctgactgatgacctgcggttagcagcgctctccatcgaggaaggcaaatccggggtgctgagcgtatcctctggggccgccgctcataggcacgtgaatgaaatcaacgccaccatctacctcctcaaaacaaaattgtcagaaagagaaaaccaata

SEQ ID NO: 11061 - DNA, 480 bp, Homo sapiens
  source 1..480: mol_type = unassigned DNA
aagaaatgtgactgcagtggaaattcagatcccaacctgatctttgaagattgtgatgaagtcactggccagtgtaggaattgcttacgcaacaccaccggattcaagtgtgaacgttgcgctcctggctactatggggacgccaggatagccaagaactgtgcagtgtgcaactgcgggggaggcccatgtgacagtgtaaccggagaatgcttggaagaaggttttgaaccccctacaggcatggactgcccaaccataagtaaaaataacagtacatgattgactaaccccactttctctaatgtgctgcaggtgtgggattaagaaaagctatgcaatatcactctctagaaactgctgagtcccacccctggacttaaccctttctgcacctcagcaaatggagcctgcaccaagtacttggtggtccacttgattccctagggcaaatgggtggtttacatttgcatagctcta

SEQ ID NO: 11062 - DNA, 559 bp, Homo sapiens
  source 1..559: mol_type = unassigned DNA
ttattcttccttgcaatgataagacagtgttaaaggcatttctgttctcctgaaaagtgaaaggagggaaaaagttatgtaacaaagaagattatatatacatcatctatcactgaatgaaatgcaatgctggattctttcacaccctgtcgggagaatgtgtgccctgcgactgtaatggcaattccaacgagtgtttggacggctcaggatactgtgtgcactgccagcggaacacaacaggagagcactgtgaaaagtgtctggatggttatatcggagattccatcaggggagcaccccaattctgccagccgtgcccctgtcccctgccccacttggccaattttgcagaatcctgctataggaaaaatggagctgttcggtgcatttgtaacgaaaattatgctggacctaactgtgaaagatgtgctcccggttactatggaaaccccttactcattggaagcacctgtaagaaatgtgactgcagtggaaattcagatcccaacctgatctttgaagattgtgatgaagtcactggccagtgtaggaattg

SEQ ID NO: 11063 - DNA, 331 bp, Homo sapiens
  source 1..331: mol_type = unassigned DNA
tcacaccctgtcgggagaatgtgtgccctgcgactgtaatggcaattccaacgagtgtttggacggctcaggatactgtgtgcactgccagcggaacacaacaggagagcactgtgaaaagtgtctggatggttatatcggagattccatcaggggagcaccccaattctgccagccgtgcccctgtcccctgccccacttggccaattttgcagaatcctgctataggaaaaatggagctgttcggtgcatttgtaacgaaaattatgctggacctaactgtgaaaggccttctccacagagcacgagaggctttccactgaatgactcg

SEQ ID NO: 11064 - DNA, 588 bp, Homo sapiens
  source 1..588: mol_type = unassigned DNA
aaaagctgaatattcttctggagcccttggaggggctccaaactgagaggggagggaagaccgcagggaaaggcggacctcagtgtctgaaaagccagcttagagtgggagggcctgggagtagaagctgctggttgcgcagccacctcgggatactgcacacggagaggagggaaaataagcgaggcaccgccgcaccacgcgggagacctacggagacccacagcgcccgagccctggaagagcactactggatgtcagcggagaaatggctttgagctcagcctggcgctcggttctgcctctgtggctcctctggagcgctgcctgctcccgcgccgcgtccggggacgacaacgcttttccttttgacattgaagggagctcagcggttggcaggcaagacccgcctgagacgagcgaaccccgcgtggctctgggacgcctgccgcctgcggccgagaaatgcaatgctggattctttcacaccctgtcgggagaatgtgtgccctgcgactgtaatggcaattccaacgagtgtttggacggctcaggatactgtgtgcactgccagcggaacacaacagg

SEQ ID NO: 11065 - DNA, 1080 bp, Homo sapiens
  source 1..1080: mol_type = unassigned DNA
aatgtgagaaggaagccaggacagcgcagtccccagtcccgaacggccagggagaggaggtggcctagcgctggcggggctcaccccaatccgtctgccttttgatgccgtactctgctggttgcgcagccacctcgggatactgcacacggagaggagggaaaataagcgaggcaccgccgcaccacgcgggagacctacggagacccacagcgcccgagccctggaagagcactactggatgtcagcggagaaatggctttgagctcagcctggcgctcggttctgcctctgtggctcctctggagcgctgcctgctcccgcgccgcgtccggggacgacaacgcttttccttttgacattgaagggagctcagcggttggcaggcaagacccgcctgagacgagcgaaccccgcgtggctctgggacgcctgccgcctgcggccgagaaatgcaatgctggattctttcacaccctgtcgggagaatgtgtgccctgcgactgtaatggcaattccaacgagtgtttggacggctcaggatactgtgtgactactgacggagaagacccaggtttttcagcttctgccctatcgttcattctcagctctcagggagccagagaagccagggctccaacatgaacacttcttgtagctcactgtcatgaccagtgtttcagtcagttcttgcaggttgcctgacttacctcatttctctcatttcctgtaagcaaccaaaaataaaaggctttcttttatttcattttgtcttattttgcttttatcttgaaggcatataagacctctgtatctgccttgttcaccttcaactgcttctaattcttcctcaattccagtgtccaatgtcaatttgaaattaaaatttacagactgattttaactaagctgttggtaaagctgacctaagccattcagccacaaaatatagagtatacaaaattatgctaccattttacacatatcaagcaagcaaagagatttttttttactggtggaacactaatctttcaaatatagaatagtggctaaatgaaaataaaacagcttagaaatcta

SEQ ID NO: 11066 - DNA, 541 bp, Homo sapiens
  source 1..541: mol_type = unassigned DNA
agtcccgaacggccagggagaggaggtggcctagcgctggcggggctcaccccaatccgtctgccttttgatgccgtactgtaagctccgtccatctgtaggttcttgagccagaacctctgcgggaaggagaaaaactgctggttgcgcagccacctcgggatactgcacacggagaggagggaaaataagcgaggcaccgccgcaccacgcgggagacctacggagacccacagcgcccgagccctggaagagcactactggatgtcagcggagaaatggctttgagctcagcctggcgctcggttctgcctctgtggctcctctggagcgctgcctgctcccgcgccgcgtccggggacgacaacgcttttccttttgacattgaagggagctcagcggttggcaggcaagacccgcctgagacgagcgaaccccgcgtggctctgggacgcctgccgcctgcggccgagaaatgcaatgctggattctttcacaccctgtcgggagaatgtgtgccctgcgactgtaatggcaattc

SEQ ID NO: 11067 - DNA, 539 bp, Homo sapiens
  source 1..539: mol_type = unassigned DNA
gtctatcccccagaaaaaacccgagaaaccttgctcaagaaagtgggcaccctgaccctctgccttcagagatcatctacctttggttcctgccctggaatcccttttccacccactttcctgcaaactagcgggggccacataaaatatctatctgctggttgcgcagccacctcgggatactgcacacggagaggagggaaaataagcgaggcaccgccgcaccacgcgggagacctacggagacccacagcgcccgagccctggaagagcactactggatgtcagcggagaaatggctttgagctcagcctggcgctcggttctgcctctgtggctcctctggagcgctgcctgctcccgcgccgcgtccggggacgacaacgcttttccttttgacattgaagggagctcagcggttggcaggcaagacccgcctgagacgagcgaaccccgcgtggctctgggacgcctgccgcctgcggccgagaaatgcaatgctggattctttcacaccctgtcgggagaatgtgtgccct

SEQ ID NO: 11068 - DNA, 1061 bp, Homo sapiens
  source 1..1061: mol_type = unassigned DNA
gggagtggtgagaatgaatgtgagaaggaagccaggacagcgcagtccccagtcccgaacggccagggagaggaggtggcctagcgctggcggggctcaccccaatccgtctgccttttgatgccgtactctgctggttgcgcagccacctcgggatactgcacacggagaggagggaaaataagcgaggcaccgccgcaccacgcgggagacctacggagacccacagcgcccgagccctggaagagcactactggatgtcagcggagaaatggctttgagctcagcctggcgctcggttctgcctctgtggctcctctggagcgctgcctgctcccgcgccgcgtccggggacgacaacgcttttccttttgacattgaagggagctcagcggttggcaggcaagacccgcctgagacgagcgaaccccgcgtggctctgggacgcctgccgcctgcggccgaggtacagtgtccctgccattgccaccctgctggggcacctgcgcccccgcgggctgtgccacactcgtccttctctctctctccgcctctttcctctccccagtgccttgagagtttcacctgggctaggtcagttcggaaacttgaaataaagagttttcctttgtaagttgcatttggatgttgagagttgaaagttgaggcttcggaatgtgtctgctcaaaggggtgagagtgcatgtgttggtgctctgagttcatccgctagactctcaccggggactgcagcagcacatcggtgacttctgccacttgcgtgtcccagtagtcattttgtcaagccacggcacttaacgtgtgtgccctgtcactggcttcctgctcctctgtgctgttaggacagtgggaacactactgcaggatctttttgtctcatattagacaagaagtcttctgcagcagggaaggtgagggggtgagtgagagtggctggtcatgaaaggagctgttagacaactgctgagagggtatcttaagtagaaacgagccattgtattccagaaacaagatgtttccattaaaatcaagcctcagga

SEQ ID NO: 11069 - DNA, 645 bp, Homo sapiens
  source 1..645: mol_type = unassigned DNA
agaatgaatgtgagaaggaagccaggacagcgcagtccccagtcccgaacggccagggagaggaggtggcctagcgctggcggggctcaccccaatccgtctgccttttgatgccgtactgtaagctccgtccatctctgctggttgcgcagccacctcgggatactgcacacggagaggagggaaaataagcgaggcaccgccgcaccacgcgggagacctacggagacccacagcgcccgagccctggaagagcactactggatgtcagcggagaaatggctttgagctcagcctggcgctcggttctgcctctgtggctcctctggagcgctgcctgctcccgcgccgcgtccggggacgacaacgcttttccttttgacattgaagggagctcagcggttggcaggcaagacccgcctgagacgagcgaaccccgcgtggctctgggacgcctgccgcctgcggccgaggtacagtgtccctgccattgccaccctgctggggcacctgcgcccccgcgggctgtgccacactcgtccttctctctctctccgcctctttcctctccccagtgccttgagagtttcacctgggctaggtcagttcggaaacttgaaataaagagttttcctttgtaagttg

SEQ ID NO: 11070 - DNA, 554 bp, Homo sapiens
  source 1..554: mol_type = unassigned DNA
gacctcagtgtctgaaaagccagcttagagtgggagggcctgggagtagaagctgctggttgcgcagccacctcgggatactgcacacggagaggagggaaaataagcgaggcaccgccgcaccacgcgggagacctacggagacccacagcgcccgagccctggaagagcactactggatgtcagcggagaaatggctttgagctcagcctggcgctcggttctgcctctgtggctcctctggagcgctgcctgctcccgcgccgcgtccggggacgacaacgcttttccttttgacattgaagggagctcagcggttggcaggcaagacccgcctgagacgagcgaaccccgcgtggctctgggacgcctgccgcctgcggccgaggtacagtgtccctgccattgccaccctgctggggcacctgcgcccccgcgggctgtgccacactcgtccttctctctctctccgcctctttcctctccccagtgccttgagagtttcacctgggctaggtcagttcggaaacttgaaataaagagttttcctttgt

SEQ ID NO: 11071 - DNA, 1540 bp, Homo sapiens
  source 1..1540: mol_type = unassigned DNA
ctttcccgtaacatactctgccgttcctgtctccccatctggaattgtcctttcttctttcaaattctattatcccttaaaatctgatcagctcctcatcttccacgaaggtttccctcactacccagcctaaaacaaattctagtagtactcaattgtctgcagttacttttttgtgtgtgtaggtctcatctcccctcaaaatcccagatagattataaactcttaaacaggaagttagtgtctcttggtgtgtaaccccaccatgctagtccatagtagatgaccagtaagtggttgaatgaatgaaccatctattcttttcacctctttttggggacatctttgcttttcacagaggatagtgctgatttggacagcattgaagcagttgctaatgaagtattgaaaatggagatgcctagcaccccacagcagttacagaacttgacagaagatatacgtgaacgagttgaaagcctttctcaagtagaggttattcttcagcatagtgctgctgacattgccagagctgagatgttgttagaagaagctaaaagagcaaggtatctaaagacatggcatctaaggggcttattttgtgtatctatcatggagtaaaaagtatctctttaaccaatgaaacttctaagaaggacctatgcgagtctctctgggtcatttcaggaaggctattctttaaagaaaagaacactgagagtacttttttcatgttcagcaacaatatactgtctcattattttttactcagcaaaagtgcaacagatgttaaagtcactgcagatatggtaaaggaagctctggaagaagcagaaaaggcccaggtcgcagcagagaaggcaattaaacaagcagatgaagacattcaaggaacccagaacctgttaacttcgattgagtctgaaacagcagcttctgaggaaaccttgttcaacgcgtcccagcgcatcagcgagttagagaggaatgtggaagaacttaagcggaaagctgcccaaaactccggggaggcagaatatattgaaaaagtagtatatactgtgaagcaaagtgcagaagatgttaagaagactttagatggtgaacttgatgaaaagtataaaaaagtagaaaatttaattgccaaaaaaactgaagagtcagctgatgccagaaggaaagccgaaatgctacaaaatgaagcaaaaactcttttagctcaagcaaatagcaagctgcaactgctcaaagatttagaaagaaaatatgaagacaatcaaagatacttagaagataaagctcaagaattagcaagactggaaggagaagtccgttcactcctaaaggatataagccagaaagttgctgtgtatagcacatgcttgtaacagaggagaataaaaaatggctgaggtgaacaaggtaaaacaactacattttaaaaactgacttaatgctcttcaaaataaaacatcacctatttaatgtttttaatcacattttgtatggagttaaataaagtacagtgcttttgtatata

SEQ ID NO: 11072 - DNA, 5766 bp, Homo sapiens
  source 1..5766: mol_type = unassigned DNA
ggggctgatcagggtgggcgcgagcgtcggtgggtttcccgggagggaggctctcgctgctggacagacctgatgacgtgtgtgggtttctttccgtgtccttctcctttcggagtccctgccttcccagcctctcctgcgctcatctctccattgtcttttctgtgcattttgctttcttccgaatggactgtcctctctccgcacccactcccccgcccccgcttgttcgtttttttcgggctccactccctgcttgtgtccccccaactctgttgcctgtccttcccgcagccctgtgcagagcccgagtgcgcgctcaggaacccgagttcagctacggctgcgcagaaggcagctgctatcccgccacgggcgaccttctcatcggccgagcacagaagctttcggtgacctcgacgtgcgggctgcacaagcccgaaccctactgtatcgtcagccacttgcaggaggacaaaaaatgcttcatatgcaattcccaagatccttatcatgagaccctgaatcctgacagccatctcattgaaaatgtggtcactacatttgctccaaaccgccttaagatttggtggcaatctgaaaatggtgtggaaaatgtaactatccaactggatttggaagcagaattccattttactcatctcataatgactttcaagacattccgtccagctgctatgctgatagaacgatcgtccgactttgggaaaacctggggtgtgtatagatacttcgcctatgactgtgaggcctcgtttccaggcatttcaactggccccatgaaaaaagtcgatgacataatttgtgattctcgatattctgacattgaaccctcaactgaaggagaggtgatatttcgtgctttagatcctgctttcaaaatagaagatccttatagcccaaggatacagaatttattaaaaattaccaacttgagaatcaagtttgtgaaactgcatactttgggagataaccttctggattccaggatggaaatcagagaaaagtattattatgcagtttatgatatggtggttcgaggaaattgcttctgctatggtcatgccagcgaatgtgcccctgtggatggattcaatgaagaagtggaaggaatggttcacggacactgcatgtgcaggcataacaccaagggcttaaactgtgaactctgcatggatttctaccatgatttaccttggagacctgctgaaggccgaaacagcaacgcctgtaaaaaatgtaactgcaatgaacattccatctcttgtcactttgacatggctgtttacctggccacggggaacgtcagcggaggcgtgtgtgatgactgtcagcacaacaccatggggcgcaactgtgagcagtgcaagccgttttactaccagcacccagagagggacatccgagatcctaatttctgtgaacgatgtacgtgtgacccagctggctctcaaaatgagggaatttgtgacagctatactgatttttctactggtctcattgctggccagtgtcggtgtaaattaaatgtggaaggagaacattgtgatgtttgcaaagaaggcttctatgatttaagcagtgaagatccatttggttgtaaatcttgtgcttgcaatcctctgggaacaattcctggagggaatccttgtgattccgagacaggtcactgctactgcaagcgtctggtgacaggacagcattgtgaccagtgcctgccagagcactggggcttaagcaatgatttggatggatgtcgaccatgtgactgtgaccttgggggagccttaaacaacagttgctttgcggagtcaggccagtgctcatgccggcctcacatgattggacgtcagtgcaacgaagtggaacctggttactactttgccaccctggatcactacctctatgaagcggaggaagccaacttggggcctggggttagcatagtggagcggcaatatatccaggaccggattccctcctggactggagccggcttcgtccgagtgcctgaaggggcttatttggagtttttcattgacaacataccatattccatggagtacgacatcctaattcgctacgagccacagctacccgaccactgggaaaaagctgtcatcacagtgcagcgacctggaaggattccaaccagcagccgatgtggtaataccatccccgatgatgacaaccaggtggtgtcattatcaccaggctcaagatatgtcgtccttcctcggccggtgtgctttgagaagggaacaaactacacggtgaggttggagctgcctcagtacacctcctctgatagcgacgtggagagcccctacacgctgatcgattctcttgttctcatgccatactgtaaatcactggacatcttcaccgtgggaggttcaggagatggggtggtcaccaacagtgcctgggaaacctttcagagataccgatgtctagagaacagcagaagcgttgtgaaaacaccgatgacagatgtttgcagaaacatcatctttagcatttctgccctgttacaccagacaggcctggcttgtgaatgcgaccctcagggttcgttaagttccgtgtgtgatcccaacggaggccagtgccagtgccggcccaacgtggttggaagaacctgcaacagatgtgcacctggaacttttggctttggccccagtggatgcaaaccttgtgagtgccatctgcaaggatctgtcaatgccttctgcaatcccgtcactggccagtgccactgtttccagggagtgtatgctcggcagtgtgatcggtgcttacctgggcactggggctttccaagttgccagccctgccagtgcaatggccacgccgatgactgcgacccagtgactggggagtgcttgaactgccaggactacaccatgggtcataactgtgaaaggtgcttggctggttactatggcgaccccatcattgggtcaggagatcactgccgcccttgcccttgcccagatggtcccgacagtggacgccagtttgccaggagctgctaccaagatcctgttactttacagcttgcctgtgtttgtgatcctggatacattggttccagatgtgacgactgtgcctcaggatactttggcaatccatcagaagttggggggtcgtgtcagccttgccagtgtcacaacaacattgacacgacagacccagaagcctgtgacaaggagactgggaggtgtctcaagtgcctgtaccacacggaaggggaacactgtcagttctgccggtttggatactatggtgatgccctccagcaggactgtcgaaagtgtgtctgtaattacctgggcaccgtgcaagagcactgtaacggctctgactgccagtgcgacaaagccactggtcagtgcttgtgtcttcctaatgtgatcgggcagaactgtgaccgctgtgcgcccaatacctggcagctggccagtggcactggctgtgacccatgcaactgcaatgctgctcattccttcgggccatcttgcaatgagttcacggggcagtgccagtgcatgcctgggtttggaggccgcacctgcagcgagtgccaggaactcttctggggagaccccgacgtggagtgccgagcctgtgactgtgaccccaggggcattgagacgccacagtgtgaccagtccacgggccagtgtgtctgcgttgagggtgttgagggtccacgctgtgacaagtgcacgcgagggtactcgggggtcttccctgactgcacaccctgccaccagtgctttgctctctgggatgtgatcattgccgagctgaccaacaggacacacagattcctggagaaagccaaggccttgaagatcagtggtgtgatcgggccttaccgtgagactgtggactcggtggagaggaaagtcagcgagataaaagacatcctggcgcagagccccgcagcagagccactgaaaaacattgggaatctctttgaggaagcagagaaactgattaaagatgttacagaaatgatggctcaagtagaagtgaaattatctgacacaacttcccaaagcaacagcacagccaaagaactggattctctacagacagaagccgaaagcctagacaacactgtgaaagaacttgctgaacaactggaatttatcaaaaactcagatattcggggtgccttggatagcattaccaagtatttccagatgtctcttgaggcagaggagagggtgaatgcctccaccacagaacccaacagcactgtggagcagtcagccctcatgagagacagagtagaagacgtgatgatggagcgagaatcccagttcaaggaaaaacaagaggagcaggctcgcctccttgatgaactggcaggcaagctacaaagcctagacctttcagccgctgccgaaatgacctgtggaacacccccaggggcctcctgttccgagactgaatgtggcgggccaaactgcagaactgacgaaggagagaggaagtgtggggggcctggctgtggtggtctggttactgttgcacacaacgcctggcagaaagccatggacttggaccaagatgtcctgagtgccctggctgaagtggaacagctctccaagatggtctctgaagcaaaactgagggcagatgaggcaaaacaaagtgctgaagacattctgttgaagacaaatgctaccaaagaaaaaatggacaagagcaatgaggagctgagaaatctaatcaagcaaatcagaaactttttgacccaggatagtgctgatttggacagcattgaagcagttgctaatgaagtattgaaaatggagatgcctagcaccccacagcagttacagaacttgacagaagatatacgtgaacgagttgaaagcctttctcaagtagaggttattcttcagcatagtgctgctgacattgccagagctgagatgttgttagaagaagctaaaagagcaagcaaaagtgcaacagatgttaaagtcactgcagatatggtaaaggaagctctggaagaagcagaaaaggcccaggtcgcagcagagaaggcaattaaacaagcagatgaagacattcaaggaacccagaacctgttaacttcgattgagtctgaaacagcagcttctgaggaaaccttgttcaacgcgtcccagcgcatcagcgagttagagaggaatgtggaagaacttaagcggaaagctgcccaaaactccggggaggcagaatatattgaaaaagtagtatatactgtgaagcaaagtgcagaagatgttaagaagactttagatggtgaacttgatgaaaagtataaaaaagtagaaaatttaattgccaaaaaaactgaagagtcagctgatgccagaaggaaagccgaaatgctacaaaatgaagcaaaaactcttttagctcaagcaaatagcaagctgcaactgctcaaagatttagaaagaaaatatgaagacaatcaaagatacttagaagataaagctcaagaattagcaagactggaaggagaagtccgttcactcctaaaggatataagccagaaagttgctgtgtatagcacatgcttgtaacagaggagaataaaaaatggctgaggtgaacaaggtaaaacaactacattttaaaaactgacttaatgctcttcaaaataaaacatcacctatttaatgtttttaatcacattttgtatggagttaaataaagtacagtgcttttgta

SEQ ID NO: 11073 - DNA, 5725 bp, Homo sapiens
  source 1..5725: mol_type = unassigned DNA
ttgcggccgcccgccccttcagccccggctctccgtatgcgcatgagcagaggcgcctccctctgttcctcccaaggctaaactttctaattcccttctttgggctcgggggctcccggagcagggcgagagctcgcgtcgccggaaaggaagacgggaagaaagggcaggcggctcggcgggcgtcttctccactcctctgccgcgtccccgtggctgcagggagccggcatggggcttctccagttgctagctttcagtttcttagccctgtgcagagcccgagtgcgcgctcaggaacccgagttcagctacggctgcgcagaaggcagctgctatcccgccacgggcgaccttctcatcggccgagcacagaagctttcggtgacctcgacgtgcgggctgcacaagcccgaaccctactgtatcgtcagccacttgcaggaggacaaaaaatgcttcatatgcaattcccaagatccttatcatgagaccctgaatcctgacagccatctcattgaaaatgtggtcactacatttgctccaaaccgccttaagatttggtggcaatctgaaaatggtgtggaaaatgtaactatccaactggatttggaagcagaattccattttactcatctcataatgactttcaagacattccgtccagctgctatgctgatagaacgatcgtccgactttgggaaaacctggggtgtgtatagatacttcgcctatgactgtgaggcctcgtttccaggcatttcaactggccccatgaaaaaagtcgatgacataatttgtgattctcgatattctgacattgaaccctcaactgaaggagaggtgatatttcgtgctttagatcctgctttcaaaatagaagatccttatagcccaaggatacagaatttattaaaaattaccaacttgagaatcaagtttgtgaaactgcatactttgggagataaccttctggattccaggatggaaatcagagaaaagtattattatgcagtttatgatatggtggttcgaggaaattgcttctgctatggtcatgccagcgaatgtgcccctgtggatggattcaatgaagaagtggaaggaatggttcacggacactgcatgtgcaggcataacaccaagggcttaaactgtgaactctgcatggatttctaccatgatttaccttggagacctgctgaaggccgaaacagcaacgcctgtaaaaaatgtaactgcaatgaacattccatctcttgtcactttgacatggctgtttacctggccacggggaacgtcagcggaggcgtgtgtgatgactgtcagcacaacaccatggggcgcaactgtgagcagtgcaagccgttttactaccagcacccagagagggacatccgagatcctaatttctgtgaacgatgtacgtgtgacccagctggctctcaaaatgagggaatttgtgacagctatactgatttttctactggtctcattgctggccagtgtcggtgtaaattaaatgtggaaggagaacattgtgatgtttgcaaagaaggcttctatgatttaagcagtgaagatccatttggttgtaaatcttgtgcttgcaatcctctgggaacaattcctggagggaatccttgtgattccgagacaggtcactgctactgcaagcgtctggtgacaggacagcattgtgaccagtgcctgccagagcactggggcttaagcaatgatttggatggatgtcgaccatgtgactgtgaccttgggggagccttaaacaacagttgctttgcggagtcaggccagtgctcatgccggcctcacatgattggacgtcagtgcaacgaagtggaacctggttactactttgccaccctggatcactacctctatgaagcggaggaagccaacttggggcctggggttagcatagtggagcggcaatatatccaggaccggattccctcctggactggagccggcttcgtccgagtgcctgaaggggcttatttggagtttttcattgacaacataccatattccatggagtacgacatcctaattcgctacgagccacagctacccgaccactgggaaaaagctgtcatcacagtgcagcgacctggaaggattccaaccagcagccgatgtggtaataccatccccgatgatgacaaccaggtggtgtcattatcaccaggctcaagatatgtcgtccttcctcggccggtgtgctttgagaagggaacaaactacacggtgaggttggagctgcctcagtacacctcctctgatagcgacgtggagagcccctacacgctgatcgattctcttgttctcatgccatactgtaaatcactggacatcttcaccgtgggaggttcaggagatggggtggtcaccaacagtgcctgggaaacctttcagagataccgatgtctagagaacagcagaagcgttgtgaaaacaccgatgacagatgtttgcagaaacatcatctttagcatttctgccctgttacaccagacaggcctggcttgtgaatgcgaccctcagggttcgttaagttccgtgtgtgatcccaacggaggccagtgccagtgccggcccaacgtggttggaagaacctgcaacagatgtgcacctggaacttttggctttggccccagtggatgcaaaccttgtgagtgccatctgcaaggatctgtcaatgccttctgcaatcccgtcactggccagtgccactgtttccagggagtgtatgctcggcagtgtgatcggtgcttacctgggcactggggctttccaagttgccagccctgccagtgcaatggccacgccgatgactgcgacccagtgactggggagtgcttgaactgccaggactacaccatgggtcataactgtgaaaggtgcttggctggttactatggcgaccccatcattgggtcaggagatcactgccgcccttgcccttgcccagatggtcccgacagtggacgccagtttgccaggagctgctaccaagatcctgttactttacagcttgcctgtgtttgtgatcctggatacattggttccagatgtgacgactgtgcctcaggatactttggcaatccatcagaagttggggggtcgtgtcagccttgccagtgtcacaacaacattgacacgacagacccagaagcctgtgacaaggagactgggaggtgtctcaagtgcctgtaccacacggaaggggaacactgtcagttctgccggtttggatactatggtgatgccctccagcaggactgtcgaaagtgtgtctgtaattacctgggcaccgtgcaagagcactgtaacggctctgactgccagtgcgacaaagccactggtcagtgcttgtgtcttcctaatgtgatcgggcagaactgtgaccgctgtgcgcccaatacctggcagctggccagtggcactggctgtgacccatgcaactgcaatgctgctcattccttcgggccatcttgcaatgagttcacggggcagtgccagtgcatgcctgggtttggaggccgcacctgcagcgagtgccaggaactcttctggggagaccccgacgtggagtgccgagcctgtgactgtgaccccaggggcattgagacgccacagtgtgaccagtccacgggccagtgtgtctgcgttgagggtgttgagggtccacgctgtgacaagtgcacgcgagggtactcgggggtcttccctgactgcacaccctgccaccagtgctttgctctctgggatgtgatcattgccgagctgaccaacaggacacacagattcctggagaaagccaaggccttgaagatcagtggtgtgatcgggccttaccgtgagactgtggactcggtggagaggaaagtcagcgagataaaagacatcctggcgcagagccccgcagcagagccactgaaaaacattgggaatctctttgaggaagcagagaaactgattaaagatgttacagaaatgatggctcaagtagaagtgaaattatctgacacaacttcccaaagcaacagcacagccaaagaactggattctctacagacagaagccgaaagcctagacaacactgtgaaagaacttgctgaacaactggaatttatcaaaaactcagatattcggggtgccttggatagcattaccaagtatttccagatgtctcttgaggcagaggagagggtgaatgcctccaccacagaacccaacagcactgtggagcagtcagccctcatgagagacagagtagaagacgtgatgatggagcgagaatcccagttcaaggaaaaacaagaggagcaggctcgcctccttgatgaactggcaggcaagctacaaagcctagacctttcagccgctgccgaaatgacctgtggaacacccccaggggcctcctgttccgagactgaatgtggcgggccaaactgcagaactgacgaaggagagaggaagtgtggggggcctggctgtggtggtctggttactgttgcacacaacgcctggcagaaagccatggacttggaccaagatgtcctgagtgccctggctgaagtggaacagctctccaagatggtctctgaagcaaaactgagggcagatgaggcaaaacaaagtgctgaagacattctgttgaagacaaatgctaccaaagaaaaaatggacaagagcaatgaggagctgagaaatctaatcaagcaaatcagaaactttttgacccaggatagtgctgatttggacagcattgaagcagttgctaatgaagtattgaaaatggagatgcctagcaccccacagcagttacagaacttgacagaagatatacgtgaacgagttgaaagcctttctcaagtagaggttattcttcagcatagtgctgctgacattgccagagctgagatgttgttagaagaagctaaaagagcaagcaaaagtgcaacagatgttaaagtcactgcagatatggtaaaggaagctctggaagaagcagaaaaggcccaggtcgcagcagagaaggcaattaaacaagcagatgaagacattcaaggaacccagaacctgttaacttcgattgagtctgaaacagcagcttctgaggaaaccttgttcaacgcgtcccagcgcatcagcgagttagagaggaatgtggaagaacttaagcggaaagctgcccaaaactccggggaggcagaatatattgaaaaagtagtatatactgtgaagcaaagtgcagaagatgttaagaagactttagatggtgaacttgatgaaaagtataaaaaagtagaaaatttaattgccaaaaaaactgaagagtcagctgatgccagaaggaaagccgaaatgctacaaaatgaagcaaaaactcttttagctcaagcaaatagcaagctgcaactgctcaaagatttagaaagaaaatatgaagacaatcaaagatacttagaagataaagctcaagaattagcaagactggaaggagaagtccgttcactcctaaaggatataagccagaaagttgctgtgtatagcacatgcttgtaacagaggagaataaaaaatggctgaggtgaacaaggtaaaacaactacattttaaaaactgacttaatgctcttcaaaataaaacatcacctatttaatgtttttaatcacattttgtatggagttaaataaag

SEQ ID NO: 11074 - DNA, 945 bp, Homo sapiens
  source 1..945: mol_type = unassigned DNA
agcctagacaacactgtgaaagaacttgctgaacaactggaatttatcaaaaactcagatattcggggtgccttggatagcattaccaagtatttccagatgtctcttgaggcagaggagagggtgaatgcctccaccacagaacccaacagcactgtggagcagtcagccctcatgagagacagagtagaagacgtgatgatggagcgagaatcccagttcaaggaaaaacaagaggagcaggctcgcctccttgatgaactggcaggcaagctacaaagcctagacctttcagccgctgccgaaatgcacccttgctgaggaccacctacacattctctggggccacccaggccctgcacagctgttttgctgcagcagattcactatccgaagtattgtgcctgatccttggcttgttgcagacctgtggaacacccccaggggcctcctgttccgagactgaatgtggcgggccaaactgcagaactgacgaaggagagaggaagtgtggggggcctggctgtggtggtctggttactgttgcacacaacgcctggcagaaagccatggacttggaccaagatgtcctgagtgccctggctgaagtggaacagctctccaagatggtctctgaagcaaaactgagggcagatgaggcaaaacaaagtgctgaagacattctgttgaagacaaatgctaccaaagaaaaaatggacaagagcaatgaggagctgagaaatctaatcaagcaaatcagaaactttttgacccaggatagtgctgatttggacagcattgaagcagttgctaatgaagtattgaaaatggagatgcctagcaccccacagcagttacagaacttgacagaagatatacgtgaacgagttgaaagcctttctcaagtagaggttattcttcagcatagtgctgctgacattgcca

SEQ ID NO: 11075 - DNA, 595 bp, Homo sapiens
  source 1..595: mol_type = unassigned DNA
ttttaactcatttgggcagaagatattgatgagttgtaaacttccattgtttccttggaaataagcaggttagtttactcctaaactctctgctcctctctccattctgtctcccaaacactgttttcaagcacccttgctgaggaccacctacacattctctggggccacccaggccctgcacagctgttttgctgcagcagattcactatccgaagtattgtgcctgatccttggcttgttgcagacctgtggaacacccccaggggcctcctgttccgagactgaatgtggcgggccaaactgcagaactgacgaaggagagaggaagtgtggggggcctggctgtggtggtctggttactgttgcacacaacgcctggcagaaagccatggacttggaccaagatgtcctgagtgccctggctgaagtggaacagctctccaagatggtctctgaagcaaaactgagggcagatgaggcaaaacaaagtgctgaagacattctgttgaagacaaatgctaccaaagaaaaaatggacaagagcaatgaggagctgagaaatctaatcaagcaaatcagaaactttttgacc

SEQ ID NO: 11076 - DNA, 379 bp, Homo sapiens
  source 1..379: mol_type = unassigned DNA
cagaagccgaaagcctagacaacactgtgaaagaacttgctgaacaactggaatttatcaaaaactcagatattcggggtgccttggatagcattaccaagtatttccagatgtctcttgaggcagaggagagggtgaatgcctccaccacagaacccaacagcactgtggagcagtcagccctcatgagagacagagtagaagacgtgatgatggagcgagaatcccagttcaaggaaaaacaagaggagcaggctcgcctccttgatgaactggcaggcaagctacaaagcctagacctttcagccgctgccgaaatggtaaggtttggggatgtggccttactgctatggtgccaagcaaaaaaaaaaaaaaaaaa

SEQ ID NO: 11077 - DNA, 449 bp, Homo sapiens
  source 1..449: mol_type = unassigned DNA
cgaaagcctagacaacactgtgaaagaacttgctgaacaactggaatttatcaaaaactcagatattcgggagatgggctcttgctatgctgctcaggctggtcttgaactcctggactcaagtgatcctcccgtctcagacttctgaatagctgagattatagaggtgccttggatagcattaccaagtatttccagatgtctcttgaggcagaggagagggtgaatgcctccaccacagaacccaacagcactgtggagcagtcagccctcatgagagacagagtagaagacgtgatgatggagcgagaatcccagttcaaggaaaaacaagaggagcaggctcgcctccttgatgaactggcaggcaagctacaaagcctagacctttcagccgctgccgaaatggtaaggtttggggatgtggccttactgctatggtgccaagc

SEQ ID NO: 11078 - DNA, 764 bp, Homo sapiens
  source 1..764: mol_type = unassigned DNA
attactgctaagaaggggttagcaaccactgaagtcacgcatgtgctagaggaagctgctacagtctctacctgagccattggtcaattgttgtcgatggttgacaccttcccattttcacagtgaagtgagtattctaaatgccacatcttgtcactgaggttcatgattaagtagatcagctagcattgcttattcccttctagcctgtgactgtgaccccaggggcattgagacgccacagtgtgaccagtccacgggccagtgtgtctgcgttgagggtgttgagggtccacgctgtgacaagtgcacgcgagggtactcgggggtcttccctgactgcacaccctgccaccagtgctttgctctctgggatgtgatcattgccgagctgaccaacaggacacacagattcctggagaaagccaaggccttgaagatcagtggtgtgatcgggccttaccgtgagactgtggactcggtggagaggaaagtcagcgagataaaagacatcctggcgcagagccccgcagcagagccactgaaaaacattgggaatctctttgaggaagcagagaaactgattaaagatgttacagaaatgatggctcaagtagaagtgaaattatctgacacaacttcccaaagcaacagcacagccaaagaactggattctctacagacagaagccgaaagcctagacaacactgtgaaagaacttgctgaacaactggaatttatcaaaaactcagatattcggggtg

SEQ ID NO: 11079 - DNA, 653 bp, Homo sapiens
  source 1..653: mol_type = unassigned DNA
cagaagcctgtgacaaggagactgggaggtgtctcaagtgcctgtaccacacggaaggggaacactgtcagttctgccggtttggatactatggtgatgccctccagcaggactgtcgaaagtgtgtctgtaattacctgggcaccgtgcaagagcactgtaacggctctgactgccagtgcgacaaagccactggtcagtgcttgtgtcttcctaatgtgatcgggcagaactgtgaccgctgtgcgcccaatacctggcagctggccagtggcactggctgtgacccatgcaactgcaatgctgctcattccttcgggccatcttgcaatgagttcacggggcagtgccagtgcatgcctgggtttggaggccgcacctgcagcgagtgccaggaactcttctggggagaccccgacgtggagtgccgagatgtggaagacgtgactcagtttcctgattacccagggtcacataacatgtgtggagaaggcaggatttaccacctcagtccgcagttcatgctcttaaccataatgctgtactcctcaaacctgccactcgagagcttggaatgtagggggagaacaaagacaataaaaagataaactagcaatacaaggcaggatgtggtgagggccaaatgaatgggc

SEQ ID NO: 11080 - DNA, 304 bp, Homo sapiens
  source 1..304: mol_type = unassigned DNA
tacctggcagctggccagtggcactggctgtgacccatgcaactgcaatgctgctcattccttcgggccatcttgcaatgagttcacggggcagtgccagtgcatgcctgggtttggaggccgcacctgcagcgagtgccaggaactcttctggggagaccccgacgtggagtgccgaggtgagttgtgggcgttctcgcattgacttgatcagagagtggagggaactggggttctacaagagccttctgtaaattataaaacacagtacaaattaacgtgtctataagaacctgtatttaat

SEQ ID NO: 11081 - DNA, 2806 bp, Homo sapiens
  source 1..2806: mol_type = unassigned DNA
ctcccaaggctaaactttctaattcccttctttgggctcgggggctcccggagcagggcgagagctcgcgtcgccggaaaggaagacgggaagaaagggcaggcggctcggcgggcgtcttctccactcctctgccgcgtccccgtggctgcagggagccggcatggggcttctccagttgctagctttcagtttcttagccctgtgcagagcccgagtgcgcgctcaggaacccgagttcagctacggctgcgcagaaggcagctgctatcccgccacgggcgaccttctcatcggccgagcacagaagctttcggtgacctcgacgtgcgggctgcacaagcccgaaccctactgtatcgtcagccacttgcaggaggacaaaaaatgcttcatatgcaattcccaagatccttatcatgagaccctgaatcctgacagccatctcattgaaaatgtggtcactacatttgctccaaaccgccttaagatttggtggcaatctgaaaatggtgtggaaaatgtaactatccaactggatttggaagcagaattccattttactcatctcataatgactttcaagacattccgtccagctgctatgctgatagaacgatcgtccgactttgggaaaacctggggtgtgtatagatacttcgcctatgactgtgaggcctcgtttccaggcatttcaactggccccatgaaaaaagtcgatgacataatttgtgattctcgatattctgacattgaaccctcaactgaaggagaggtgatatttcgtgctttagatcctgctttcaaaatagaagatccttatagcccaaggatacagaatttattaaaaattaccaacttgagaatcaagtttgtgaaactgcatactttgggagataaccttctggattccaggatggaaatcagagaaaagtattattatgcagtttatgatatggtggttcgaggaaattgcttctgctatggtcatgccagcgaatgtgcccctgtggatggattcaatgaagaagtggaaggaatggttcacggacactgcatgtgcaggcataacaccaagggcttaaactgtgaactctgcatggatttctaccatgatttaccttggagacctgctgaaggccgaaacagcaacgcctgtaaaaaatgtaactgcaatgaacattccatctcttgtcactttgacatggctgtttacctggccacggggaacgtcagcggaggcgtgtgtgatgactgtcagcacaacaccatggggcgcaactgtgagcagtgcaagccgttttactaccagcacccagagagggacatccgagatcctaatttctgtgaacgatgtacgtgtgacccagctggctctcaaaatgagggaatttgtgacagctatactgatttttctactggtctcattgctggccagtgtcggtgtaaattaaatgtggaaggagaacattgtgatgtttgcaaagaaggcttctatgatttaagcagtgaagatccatttggttgtaaatcttgtgcttgcaatcctctgggaacaattcctggagggaatccttgtgattccgagacaggtcactgctactgcaagcgtctggtgacaggacagcattgtgaccagtgcctgccagagcactggggcttaagcaatgatttggatggatgtcgaccatgtgactgtgaccttgggggagccttaaacaacagttgctttgcggagtcaggccagtgctcatgccggcctcacatgattggacgtcagtgcaacgaagtggaacctggttactactttgccaccctggatcactacctctatgaagcggaggaagccaacttggggcctggggttagcatagtggagcggcaatatatccaggaccggattccctcctggactggagccggcttcgtccgagtgcctgaaggggcttatttggagtttttcattgacaacataccatattccatggagtacgacatcctaattcgctacgagccacagctacccgaccactgggaaaaagctgtcatcacagtgcagcgacctggaaggattccaaccagcagccgatgtggtaataccatccccgatgatgacaaccaggtggtgtcattatcaccaggctcaagatatgtcgtccttcctcggccggtgtgctttgagaagggaacaaactacacggtgaggttggagctgcctcagtacacctcctctgatagcgacgtggagagcccctacacgctgatcgattctcttgttctcatgccatactgtaaatcactggacatcttcaccgtgggaggttcaggagatggggtggtcaccaacagtgcctgggaaacctttcagagataccgatgtctagagaacagcagaagcgttgtgaaaacaccgatgacagatgtttgcagaaacatcatctttagcatttctgccctgttacaccagacaggcctggcttgtgaatgcgaccctcagggttcgttaagttccgtgtgtgatcccaacggaggccagtgccagtgccggcccaacgtggttggaagaacctgcaacagatgtgcacctggaacttttggctttggccccagtggatgcaaacgtaggttcctcaaaagcattgttatgcattcattcagattaactcagccattgtggcagggttccattgctgcagagccgatgcttccctcctgaagttgatcacaccaacccatgagcattctgaattggggacagggtgcttataaaaggagcatgtttccattgaatgagtttctcaaggca

SEQ ID NO: 11082 - DNA, 703 bp, Homo sapiens
  source 1..703: mol_type = unassigned DNA
aaactttctaattcccttctttgggctcgggggctcccggagcagggcgagagctcgcgtcgccggaaaggaagacgggaagaaagggcaggcggctcggcgggcgtcttctccactcctctgccgcgtccccgtggctgcagggagccggcatggggcttctccagttgctagctttcagtttcttagaaacagcaggacctggcgcttccctggaatggagaagccttgaaaccactccagagccccagggactgtccatgggctcccctagctccggaaagcggcgtccaccgcgagccccggcgcctcgtccccagcgaagcgccggtgaccctcgcgcgtgcacgcacacgcactctcgcttcccaagctcacagatctccacgcgcacactcacaccgaggatgcgcgggctgccgcgtgcacgcgggttcacgtgcgtggccctgtgcagagcccgagtgcgcgctcaggaacccgagttcagctacggctgcgcagaaggcagctgctatcccgccacgggcgaccttctcatcggccgagcacagaagctttcggtgacctcgacgtgcgggctgcacaagcccgaaccctactgtatcgtcagccacttgcaggaggacaaaaaatgcttcatatgcaattcccaagatccttatcatgagaccctgaatcctgacagccatctcattgaaaa

SEQ ID NO: 11083 - DNA, 550 bp, Homo sapiens
  source 1..550: mol_type = unassigned DNA
ttctttgggctcgggggctcccggagcagggcgagagctcgcgtcgccgggtgaggagaacaaagtggctgcacgattttccccactttccagcccaccccccgcttccgtgggagcgacaggaaatggaagggcgcctcttctctctttgaacatttgccttttttcccctcctttccacctctccagaaaggaagacgggaagaaagggcaggcggctcggcgggcgtcttctccactcctctgccgcgtccccgtggctgcagggagccggcatggggcttctccagttgctagctttcagtttcttagccctgtgcagagcccgagtgcgcgctcaggaacccgagttcagctacggctgcgcagaaggcagctgctatcccgccacgggcgaccttctcatcggccgagcacagaagctttcggtgacctcgacgtgcgggctgcacaagcccgaaccctactgtatcgtcagccacttgcaggaggacaaaaaatgcttcatatgcaattcccaagatccttatcatgagaccctgaatcctga

SEQ ID NO: 11084 - DNA, 689 bp, Homo sapiens
  source 1..689: mol_type = unassigned DNA
gacacacgggacacagagcagaccctgtaccaggtacaggagaggatggcaggtgcagagcgggcactgagctctgcaggtgaaagggctcggcagttggatgctctcctggaggctctgaaattgaaacgggcaggaaatagtctggcagcctctacagcagaagaaacggcaggcagtgcccagggtcgtgcccaggaggctgagcagctgctacgcggtcctctgggtgatcagtaccagacggtgaaggccctagctgagcgcaaggcccaaggtgtgctggctgcacaggcaagggcagaacaactgcgggatgaggctcgggacctgttgcaagccgctcaggacaagctgcagcggctacagggtaagaaatggggcaccagagacacaagactgcgggaaaccccccctaaactgacacctgcccttcctagaattggaaggcacctatgaggaaaatgagcgggcactggagagtaaggcagcccagttggacgggttggaggccaggatgcgcagcgtgcttcaagccatcaacttgcaggtgcagatctacaacacctgccagtgacccctgcccaaggcctaccccagttcctagcactgccccacatgcatgtctgcctatgcactgaagagctcttggcccggcagggcccccaataaaccagtgtgaaccccca

SEQ ID NO: 11085 - DNA, 5674 bp, Homo sapiens
  source 1..5674: mol_type = unassigned DNA
ccgcccggtgttgcgctccttcccagaatccgctccggcctttccttcctgccgcgattcccaactttgctcaaagtcgctggactctaagctgtcggagggaccgctggacagacctgggaactgacagagggcctggagggaaacaggccaaagacccacaggatggagctgacctcaagggaaagagggaggggacagcctctgccctgggaacttcgactgggcctactgctaagcgtgctggctgccacactggcacaggcccctgccccggatgtgcctggctgttccaggggaagctgctaccccgccacgggcgacctgctggtgggccgagctgacagactgactgcctcatccacttgtggcctgaatggcccccagccctactgcatcgtcagtcacctgcaggacgaaaagaagtgcttcctttgtgactcccggcgccccttctctgctagagacaacccacacagccatcgcatccagaatgtagtcaccagctttgcaccacagcggcgggcagcctggtggcagtcagagaatggtatccctgcggtcaccatccagctggacctggaggctgagtttcatttcacacacctcattatgaccttcaagacatttcgccctgctgccatgctggtggaacgctcagcagactttggccgcacctggcatgtgtaccgatatttctcctatgactgtggggctgacttcccaggagtcccactagcacccccacggcactgggatgatgtagtctgtgagtcccgctactcagagattgagccatccactgaaggcgaggtcatctatcgtgtgctggaccctgccatccctatcccagacccctacagctcacggattcagaacctgttgaagatcaccaacctacgggtgaacctgactcgtctacacacgttgggagacaacctactcgacccacggagggagatccgagagaagtactactatgccctctatgagctggttgtacgtggcaactgcttctgctacggacacgcctcagagtgtgcacccgccccaggggcaccagcccatgctgagggcatggtgcacggagcttgcatctgcaaacacaacacacgtggcctcaactgcgagcagtgtcaggatttctatcgtgacctgccctggcgtccggctgaggacggccatagtcatgcctgtaggaagtgtgagtgccatgggcacacccacagctgccacttcgacatggccgtatacctggcatctggcaatgtgagtggaggtgtgtgtgatggatgtcagcataacacagctgggcgccactgtgagctctgtcggcccttcttctaccgtgacccaaccaaggacctgcgggatccggctgtgtgccgctcctgtgattgtgaccccatgggttctcaagacggtggtcgctgtgattcccatgatgaccctgcactgggactggtctccggccagtgtcgctgcaaagaacatgtggtgggcactcgctgccagcaatgccgtgatggcttctttgggctcagcatcagtgaccgtctgggctgccggcgatgtcaatgtaatgcacggggcacagtgcctgggagcactccttgtgaccccaacagtggatcctgttactgcaaacgtctagtgactggacgtggatgtgaccgctgcctgcctggccactggggcctgagccacgacctgctcggctgccgcccctgtgactgcgacgtgggtggtgctttggatccccagtgtgatgagggcacaggtcaatgccactgccgccagcacatggttgggcgacgctgtgagcaggtgcaacctggctacttccggcccttcctggaccacctaatttgggaggctgaggacacccgagggcaggtgctcgatgtggtggagcgcctggtgacccccggggaaactccatcctggactggctcaggcttcgtgcggctacaggaaggtcagaccctggagttcctggtggcctctgtgccgaaggctatggactatgacctgctgctgcgcttagagccccaggtccctgagcaatgggcagagttggaactgattgtgcagcgtccagggcctgtgcctgcccacagcctgtgtgggcatttggtgcccaaggatgatcgcatccaagggactctgcaaccacatgccaggtacttgatatttcctaatcctgtctgccttgagcctggtatctcctacaagctgcatctgaagctggtacggacagggggaagtgcccagcctgagactccctactctggacctggcctgctcattgactcgctggtgctgctgccccgtgtcctggtgctagagatgtttagtgggggtgatgctgctgccctggagcgccaggccacctttgaacgctaccaatgccatgaggagggtctggtgcccagcaagacttctccctctgaggcctgcgcacccctcctcatcagcctgtccaccctcatctacaatggtgccctgccatgtcagtgcaaccctcaaggttcactgagttctgagtgcaaccctcatggtggtcagtgcctgtgcaagcctggagtggttgggcgccgctgtgacctctgtgcccctggctactatggctttggccccacaggctgtcaagcctgccagtgcagccacgagggggcactcagcagtctctgtgaaaagaccagtgggcaatgtctctgtcgaactggtgcctttgggcttcgctgtgaccgctgccagcgtggccagtggggattccctagctgccggccatgtgtctgcaatgggcatgcagatgagtgcaacacccacacaggcgcttgcctgggctgccgtgatcacacagggggtgagcactgtgaaaggtgcattgctggtttccacggggacccacggctgccatatgggggccagtgccggccctgtccctgtcctgaaggccctgggagccaacggcactttgctacttcttgccaccaggatgaatattcccagcagattgtgtgccactgccgggcaggctatacggggctgcgatgtgaagcttgtgcccctgggcactttggggacccatcaaggccaggtggccggtgccaactgtgtgagtgcagtgggaacattgacccaatggatcctgatgcctgtgacccccacacggggcaatgcctgcgctgtttacaccacacagagggtccacactgtgcccactgcaagcctggcttccatgggcaggctgcccgacagagctgtcaccgctgcacatgcaacctgctgggcacaaatccgcagcagtgcccatctcctgaccagtgccactgtgatccaagcagtgggcagtgcccatgcctccccaatgtccagggccctagctgtgaccgctgtgcccccaacttctggaacctcaccagtggccatggttgccagccttgtgcctgccacccaagccgggccagaggccccacctgcaacgagttcacagggcagtgccactgccgtgccggctttggagggcggacttgttctgagtgccaagagctccactggggagaccctgggttgcagtgccatgcctgtgattgtgactctcgtggaatagatacacctcagtgtcaccgcttcacaggtcactgcagctgccgcccaggggtgtctggtgtgcgctgtgaccagtgtgcccgtggcttctcaggaatctttcctgcctgccatccctgccatgcatgcttcggggattgggaccgagtggtgcaggacttggcagcccgtacacagcgcctagagcagcgggcgcaggagttgcaacagacgggtgtgctgggtgcctttgagagcagcttctggcacatgcaggagaagctgggcattgtgcagggcatcgtaggtgcccgcaacacctcagccgcctccactgcacagcttgtggaggccacagaggagctgcggcgtgaaattggggaggccactgagcacctgactcagctcgaggcagacctgacagatgtgcaagatgagaacttcaatgccaaccatgcactaagtggtctggagcgagataggcttgcacttaatctcacactgcggcagctcgaccagcatcttgacttgctcaaacattcaaacttcctgggtgcctatgacagcatccggcatgcccatagccagtctgcagaggcagaacgtcgtgccaatacctcagccctggcagtacctagccctgtgagcaactcggcaagtgctcggcatcggacagaggcactgatggatgctcagaaggaggacttcaacagcaaacacatggccaaccagcgggcacttggcaagctctctgcccatacccacaccctgagcctgacagacataaatgagctggtgtgtggggcaccaggggatgcaccctgtgctacaagcccttgtgggggtgccggctgtcgagatgaggatgggcagccgcgctgtgggggcctcagctgcaatggggcagcggctacagcagacctagcactgggccgggcccggcacacacaggcagagctgcagcgggcactggcagaaggtggtagcatcctcagcagagtggctgagactcgtcggcaggcaagcgaggcacagcagcgggcccaggcagccctggacaaggctaatgcttccaggggacaggtggaacaggccaaccaggaacttcaagaacttatccagagtgtgaaggacttcctcaaccaggagggggctgatcctgatagcattgaaatggtggccacacgggtgctagagctctccatcccagcttcagctgagcagatccagcacctggcgggtgcgattgcagagcgagtccggagcctggcagatgtggatgcgatcctggcacgtactgtaggagatgtgcgtcgtgccgagcagctactgcaggatgcacggcgggcaaggagctgggctgaggatgagaaacagaaggcagagacagtacaggcagcactggaggaggcccagcgggcacagggtattgcccagggtgccatccggggggcagtggctgacacacgggacacagagcagaccctgtaccaggtacaggagaggatggcaggtgcagagcgggcactgagctctgcaggtgaaagggctcggcagttggatgctctcctggaggctctgaaattgaaacgggcaggaaatagtctggcagcctctacagcagaagaaacggcaggcagtgcccagggtcgtgcccaggaggctgagcagctgctacgcggtcctctgggtgatcagtaccagacggtgaaggccctagctgagcgcaaggcccaaggtgtgctggctgcacaggcaagggcagaacaactgcgggatgaggctcgggacctgttgcaagccgctcaggacaagctgcagcggctacaggaattggaaggcacctatgaggaaaatgagcgggcactggagagtaaggcagcccagttggacgggttggaggccaggatgcgcagcgtgcttcaagccatcaacttgcaggtgcagatctacaacacctgccagtgacccctgcccaaggcctaccccagttcctagcactgccccacatgcatgtctgcctatgcactgaagagctcttggcccggcagggcccccaataaaccagtgtgaaccccca

SEQ ID NO: 11086 - DNA, 412 bp, Homo sapiens
  source 1..412: mol_type = unassigned DNA
gcagctgctacgcggtcctctgggtgatcagtaccagacggtgaaggccctagctgagcgcaaggcccaaggtgtgctggctgcacaggcaagggcagaacaactgcgggatgaggctcgggacctgttgcaagccgctcaggacaagctgcagcggctacaggaattggaaggcacctatgaggaaaatgagcgggcactggagagtaaggcagcccagttggacgggttggaggccaggatgcgcagcgtgcttcaagccatcaacttgcaggtgcagatctacaacacctgccagtgacccctgcccaaggcctaccccagttcctagcactgccccacatgcatgtctgcctatgcactgaagagctcttggcccggcagggcccccaataaaccagtgtgaaccccc

SEQ ID NO: 11087 - DNA, 5643 bp, Homo sapiens
  source 1..5643: mol_type = unassigned DNA
agggaccgctggacagacctgggaactgacagagggcctggagggaaacaggccaaagacccacaggcagagttgacacggaaccccaaagcaaggaggagggctcgggcccgagaccgttcacctccccttatccctgttcccctcttcaggatggagctgacctcaagggaaagagggaggggacagcctctgccctgggaacttcgactgggcctactgctaagcgtgctggctgccacactggcacaggcccctgccccggatgtgcctggctgttccaggggaagctgctaccccgccacgggcgacctgctggtgggccgagctgacagactgactgcctcatccacttgtggcctgaatggcccccagccctactgcatcgtcagtcacctgcaggacgaaaagaagtgcttcctttgtgactcccggcgccccttctctgctagagacaacccacacagccatcgcatccagaatgtagtcaccagctttgcaccacagcggcgggcagcctggtggcagtcagagaatggtatccctgcggtcaccatccagctggacctggaggctgagtttcatttcacacacctcattatgaccttcaagacatttcgccctgctgccatgctggtggaacgctcagcagactttggccgcacctggcatgtgtaccgatatttctcctatgactgtggggctgacttcccaggagtcccactagcacccccacggcactgggatgatgtagtctgtgagtcccgctactcagagattgagccatccactgaaggcgaggtcatctatcgtgtgctggaccctgccatccctatcccagacccctacagctcacggattcagaacctgttgaagatcaccaacctacgggtgaacctgactcgtctacacacgttgggagacaacctactcgacccacggagggagatccgagagaagtactactatgccctctatgagctggttgtacgtggcaactgcttctgctacggacacgcctcagagtgtgcacccgccccaggggcaccagcccatgctgagggcatggtgcacggagcttgcatctgcaaacacaacacacgtggcctcaactgcgagcagtgtcaggatttctatcgtgacctgccctggcgtccggctgaggacggccatagtcatgcctgtaggaagtgtgagtgccatgggcacacccacagctgccacttcgacatggccgtatacctggcatctggcaatgtgagtggaggtgtgtgtgatggatgtcagcataacacagctgggcgccactgtgagctctgtcggcccttcttctaccgtgacccaaccaaggacctgcgggatccggctgtgtgccgctcctgtgattgtgaccccatgggttctcaagacggtggtcgctgtgattcccatgatgaccctgcactgggactggtctccggccagtgtcgctgcaaagaacatgtggtgggcactcgctgccagcaatgccgtgatggcttctttgggctcagcatcagtgaccgtctgggctgccggcgatgtcaatgtaatgcacggggcacagtgcctgggagcactccttgtgaccccaacagtggatcctgttactgcaaacgtctagtgactggacgtggatgtgaccgctgcctgcctggccactggggcctgagccacgacctgctcggctgccgcccctgtgactgcgacgtgggtggtgctttggatccccagtgtgatgagggcacaggtcaatgccactgccgccagcacatggttgggcgacgctgtgagcaggtgcaacctggctacttccggcccttcctggaccacctaatttgggaggctgaggacacccgagggcaggtgctcgatgtggtggagcgcctggtgacccccggggaaactccatcctggactggctcaggcttcgtgcggctacaggaaggtcagaccctggagttcctggtggcctctgtgccgaaggctatggactatgacctgctgctgcgcttagagccccaggtccctgagcaatgggcagagttggaactgattgtgcagcgtccagggcctgtgcctgcccacagcctgtgtgggcatttggtgcccaaggatgatcgcatccaagggactctgcaaccacatgccaggtacttgatatttcctaatcctgtctgccttgagcctggtatctcctacaagctgcatctgaagctggtacggacagggggaagtgcccagcctgagactccctactctggacctggcctgctcattgactcgctggtgctgctgccccgtgtcctggtgctagagatgtttagtgggggtgatgctgctgccctggagcgccaggccacctttgaacgctaccaatgccatgaggagggtctggtgcccagcaagacttctccctctgaggcctgcgcacccctcctcatcagcctgtccaccctcatctacaatggtgccctgccatgtcagtgcaaccctcaaggttcactgagttctgagtgcaaccctcatggtggtcagtgcctgtgcaagcctggagtggttgggcgccgctgtgacctctgtgcccctggctactatggctttggccccacaggctgtcaagcctgccagtgcagccacgagggggcactcagcagtctctgtgaaaagaccagtgggcaatgtctctgtcgaactggtgcctttgggcttcgctgtgaccgctgccagcgtggccagtggggattccctagctgccggccatgtgtctgcaatgggcatgcagatgagtgcaacacccacacaggcgcttgcctgggctgccgtgatcacacagggggtgagcactgtgaaaggtgcattgctggtttccacggggacccacggctgccatatgggggccagtgccggccctgtccctgtcctgaaggccctgggagccaacggcactttgctacttcttgccaccaggatgaatattcccagcagattgtgtgccactgccgggcaggctatacggggctgcgatgtgaagcttgtgcccctgggcactttggggacccatcaaggccaggtggccggtgccaactgtgtgagtgcagtgggaacattgacccaatggatcctgatgcctgtgacccccacacggggcaatgcctgcgctgtttacaccacacagagggtccacactgtgcccactgcaagcctggcttccatgggcaggctgcccgacagagctgtcaccgctgcacatgcaacctgctgggcacaaatccgcagcagtgcccatctcctgaccagtgccactgtgatccaagcagtgggcagtgcccatgcctccccaatgtccagggccctagctgtgaccgctgtgcccccaacttctggaacctcaccagtggccatggttgccagccttgtgcctgccacccaagccgggccagaggccccacctgcaacgagttcacagggcagtgccactgccgtgccggctttggagggcggacttgttctgagtgccaagagctccactggggagaccctgggttgcagtgccatgcctgtgattgtgactctcgtggaatagatacacctcagtgtcaccgcttcacaggtcactgcagctgccgcccaggggtgtctggtgtgcgctgtgaccagtgtgcccgtggcttctcaggaatctttcctgcctgccatccctgccatgcatgcttcggggattgggaccgagtggtgcaggacttggcagcccgtacacagcgcctagagcagcgggcgcaggagttgcaacagacgggtgtgctgggtgcctttgagagcagcttctggcacatgcaggagaagctgggcattgtgcagggcatcgtaggtgcccgcaacacctcagccgcctccactgcacagcttgtggaggccacagaggagctgcggcgtgaaattggggaggccactgagcacctgactcagctcgaggcagacctgacagatgtgcaagatgagaacttcaatgccaaccatgcactaagtggtctggagcgagataggcttgcacttaatctcacactgcggcagctcgaccagcatcttgacttgctcaaacattcaaacttcctgggtgcctatgacagcatccggcatgcccatagccagtctgcagaggcagaacgtcgtgccaatacctcagccctggcagtacctagccctgtgagcaactcggcaagtgctcggcatcggacagaggcactgatggatgctcagaaggaggacttcaacagcaaacacatggccaaccagcgggcacttggcaagctctctgcccatacccacaccctgagcctgacagacataaatgagctggtgtgtggggcaccaggggatgcaccctgtgctacaagcccttgtgggggtgccggctgtcgagatgaggatgggcagccgcgctgtgggggcctcagctgcaatggggcagcggctacagcagacctagcactgggccgggcccggcacacacaggcagagctgcagcgggcactggcagaaggtggtagcatcctcagcagagtggctgagactcgtcggcaggcaagcgaggcacagcagcgggcccaggcagccctggacaaggctaatgcttccaggggacaggtggaacaggccaaccaggaacttcaagaacttatccagagtgtgaaggacttcctcaaccaggagggggctgatcctgatagcattgaaatggtggccacacgggtgctagagctctccatcccagcttcagctgagcagatccagcacctggcgggtgcgattgcagagcgagtccggagcctggcagatgtggatgcgatcctggcacgtactgtaggagatgtgcgtcgtgccgagcagctactgcaggatgcacggcgggcaaggagctgggctgaggatgagaaacagaaggcagagacagtacaggcagcactggaggaggcccagcgggcacagggtattgcccagggtgccatccggggggcagtggctgacacacgggacacagagcagaccctgtaccaggtacaggagaggatggcaggtgcagagcgggcactgagctctgcaggtgaaagggctcggcagttggatgctctcctggaggctctgaaattgaaacgggcaggaaatagtctggcagcctctacagcagaagaaacggcaggcagtgcccagggtcgtgcccaggaggctgagcagctgctacgcggtcctctgggtgatcagtaccagacggtgaaggccctagctgagcgcaaggcccaaggtgtgctggctgcacaggcaagggcagaacaactgcgggatgaggctcgggacctgttgcaagccgctcaggacaagctgcagcggctacaggaattggaaggcacctatgaggaaaatgagcgggcactggagagtaaggcagcccagttggacgggttggaggccaggatgcgcagcgtgcttcaagccatcaacttgcaggtgcagatctacaacacctgccagtgacccctgcccaaggcctaccccagttcctagcactgccccacatgcatgtctgcctatgcactgaagagctcttggcccggcagggcccccaat

SEQ ID NO: 11088 - DNA, 1021 bp, Homo sapiens
  source 1..1021: mol_type = unassigned DNA
agtgtttatgatcccttgactggctcctgagttattgcccatatgtggtcccaggtccatgttcttgagtctgagccccttgtatagtccctgtccttgtgattatatccttatgcctggtaacaaacccctatcccatgtacatgtcctgagtccataccccaaaactgtatcctcatgcccatgctggagaatctatgttcttaagttcttgctgtgtccctatagaggagggggctgatcctgatagcattgaaatggtggccacacgggtgctagagctctccatcccagcttcagctgagcagatccagcacctggcgggtgcgattgcagagcgagtccggagcctggcagatgtggatgcgatcctggcacgtactgtaggagatgtgcgtcgtgccgagcagctactgcaggatgcacggcgggcaaggagctgggctgaggatgagaaacagaaggcagagacagtacaggcagcactggaggaggcccagcgggcacagggtattgcccagggtgccatccggggggcagtggctgacacacgggacacagagcagaccctgtaccaggtacaggagaggatggcaggtgcagagcgggcactgagctctgcaggtgaaagggctcggcagttggatgctctcctggaggctctgaaattgaaacgggcaggaaatagtctggcagcctctacagcagaagaaacggcaggcagtgcccagggtcgtgcccaggaggctgagcagctgctacgcggtcctctgggtgatcagtaccagacggtgaaggccctagctgagcgcaaggcccaaggtgtgctggctgcacaggcaagggcagaacaactgcgggatgaggctcgggacctgttgcaagccgctcaggacaagctgcagcggctacaggaattggaaggcacctatgaggaaaatgagcgggcactggagagtaaggcagcccagttggacgggttggaggccaggatgcgcagcgtgcttcaagccatcaactt

SEQ ID NO: 11089 - DNA, 1092 bp, Homo sapiens
  source 1..1092: mol_type = unassigned DNA
gcttgtggaggccacagaggagctgcggcgtgaaattggggaggccactgagcacctgactcagctcgaggcagacctgacagatgtgcaagatgagaacttcaatgccaaccatgcactaagtggtctggagcgagataggcttgcacttaatctcacactgcggcagctcgaccagcatcttgacttgctcaaacattcaaacttcctgggtgcctatgacagcatccggcatgcccatagccagtctgcagaggcagaacgtcgtgccaatacctcagccctggcagtacctagccctgtgagcaactcggcaagtgctcggcatcggacagaggcactgatggatgctcagaaggaggacttcaacagcaaacacatggccaaccagcgggcacttggcaagctctctgcccatacccacaccctgagcctgacagacataaatgagctggtgaggttgaagtgttgggtggggcaggtgggtgtagatgttcctctcacagggccctgacttgttctgtgcctggcaggtgtgtggggcaccaggggatgcaccctgtgctacaagcccttgtgggggtgccggctgtcgagatgaggatgggcagccgcgctgtgggggcctcagctgcaatggggcagcggctacagcagacctagcactgggccgggcccggcacacacaggcagagctgcagcgggcactggcagaaggtggtagcatcctcagcagagtggctgagactcgtcggcaggcaagcgaggcacagcagcgggcccaggcagccctggacaaggctaatgcttccaggggacaggtggaacaggccaaccaggaacttcaagaacttatccagagtgtgaaggacttcctcaaccgtgagcctcccacgtgtcccaggccatgtggttgtcccctttggcaactcccggtgtctgtatctcccttggttcatacttgagcctcagggactacactggattagtgtttatgatcccttgactggctcctgagttattgcccatatgtggtcccaggtccatgttcttgagtctgagccccttgtatagtccctgtccttgtgatta

SEQ ID NO: 11090 - DNA, 535 bp, Homo sapiens
  source 1..535: mol_type = unassigned DNA
ccatgcatgcttcggggattgggaccgagtggtgcaggacttggcagcccgtacacagcgcctagagcagcgggcgcaggagttgcaacagacgggtgtgctgggtgcctttgagagcagcttctggcacatgcaggagaagctgggcattgtgcagggcatcgtaggtgcccgcaacacctcagccgcctccactgcacagcttgtggaggccacagaggagctgcggcgtgaaattggggaggccactgagcacctgactcagctcgaggcagacctgacagatgtgcaagatgagaacttcaatgccaaccatgcactaagtggtctggagcgagataggcttgcacttaatctcacactgcggcagctcgaccagcatcttgacttgctcaaacattcaaacttcctgggtgagttgttagccaactaggcaggtggaccagggtcagtcttcagctgactgtctgcctctgcccaatttaggtgcctatgacagcatccggcatgcccatagccagtctgcagaggcaga

SEQ ID NO: 11091 - DNA, 563 bp, Homo sapiens
  source 1..563: mol_type = unassigned DNA
caacttctggaacctcaccagtggccatggttgccagccttgtgcctgccacccaagccgggccagaggccccacctgcaacgagttcacagggcagtgccactgccgtgccggctttggagggcggacttgttctgagtgccaagagctccactggggagaccctgggttgcagtgccatgcctgtgattgtgactctcgtggaatagatacacctcagtgtcaccgcttcacaggtcactgcagctgccgcccaggggtgtctggtgtgcgctgtgaccagtgtgcccgtggcttctcaggaatctttcctgcctgccatccctgccatgcatgcttcggggattgggaccgagtggtgcaggacttggcagcccgtacacagcgcctagagcagcgggcgcaggagttgcaacagacgggtgtgctgggtgcctttgagagcagcttctggcacatgcaggagaagctgggcattgtgcagggcatcgtaggtgcccgcaacacctcagccgcctccactgcacagcttgtggaggccacagaggagctgcggtgcggaa

SEQ ID NO: 11092 - DNA, 576 bp, Homo sapiens
  source 1..576: mol_type = unassigned DNA
ggttggcacaggctgcacatgcaacctgctgggcacaaatccgcagcagtgcccatctcctgaccagtgccactgtgatccaagcagtgggcagtgcccatgcctccccaatgtccagggccctagctgtgaccgctgtgcccccaacttctggaacctcaccagtggccatggttgccagccttgtgcctgccacccaagccgggccagaggccccacctgcaacgaggtatgggaccctcctgcagatccctggttagatggggccaggtgtctgtcttatctccagggcttagcctcttatagaggctctgaccctgccttgttcccaccccagttcacagggcagtgccactgccgtgccggctttggagggcggacttgttctgagtgccaagagctccactggggagaccctgggttgcagtgccatgcctgtgattgtgactctcgtggaatagatacacctcagtgtcaccgcttcacaggtcactgcagctgccgcccaggggtgtctggtgtgcgctgtgaccagtgtgcccgtggcttctcaggaatctttcctgcctgccatcc

SEQ ID NO: 11093 - DNA, 594 bp, Homo sapiens
  source 1..594: mol_type = unassigned DNA
agggatgacacatttcttcttcctcctccctgcaggtgcattgctggtttccacggggacccacggctgccatatgggggccagtgccggccctgtccctgtcctgaaggccctgggagccaacggcactttgctacttcttgccaccaggatgaatattcccagcagattgtgtgccactgccgggcaggctatacggggctgcgatgtgaagcttgtgcccctgggcactttggggacccatcaaggccaggtggccggtgccaactgtgtgagtgcagtgggaacattgacccaatggatcctgatgcctgtgacccccacacggggcaatgcctgcgctgtttacaccacacagagggtccacactgtgcccactgcaagcctggcttccatgggcaggctgcccgacagagctgtcaccgctgcacatgcaacctgctgggcacaaatccgcagcagtgcccatctcctgaccagtgccactgtgatccaagcagtgggcagtgcccatgcctccccaatgtccagggccctagctgtgaccgctgtgcccccaacttctggaacctcaccagtggccatggttgccag

SEQ ID NO: 11094 - DNA, 536 bp, Homo sapiens
  source 1..536: mol_type = unassigned DNA
agcgtggccagtggggattccctagctgccggccatgtgtctgcaatgggcatgcagatgagtgcaacacccacacaggcgcttgcctgggctgccgtgatcacacagggggtgagcactgtgaaaggtgcattgctggtttccacggggacccacggctgccatatgggggccagtgccggccctgtccctgtcctgaaggccctgggagccaacggcactttgctacttcttgccaccaggatgaatattcccagcagattgtgtgccactgccgggcaggctatacggggctgcgatgtgaagcttgtgcccctgggcactttggggacccatcaaggccaggtggccggtgccaactgtgtgagtgcagtgggaacattgacccaatggatcctgatgcctgtgacccccacacggggcaatgcctgcgctgtttacaccacacagagggtccacactgtgcccactgcaagcctggcttccatgggcaggctgcccgacagagctgtcaccgtgagtatgagtgtgggagg

SEQ ID NO: 11095 - DNA, 732 bp, Homo sapiens
  source 1..732: mol_type = unassigned DNA
ctatgcttctctctccttcccattactgttctctctcctccttctggacctgctgctggtttcctcaaactaagtcttggaccctctactctcaacctgggtcagttgtagttctcttccatttcctgaccttcccacctagactcccactactcacactcccctgagaccctcccccacccacactcccctcagaccccctcccctggctctggctcagctctgccttgctcctagcctgccagtgcagccacgagggggcactcagcagtctctgtgaaaagaccagtgggcaatgtctctgtcgaactggtgcctttgggcttcgctgtgaccgctgccagcgtggccagtggggattccctagctgccggccatgtgtctgcaatgggcatgcagatgagtgcaacacccacacaggcgcttgcctgggctgccgtgatcacacagggggtgcattgctggtttccacggggacccacggctgccatatgggggccagtgccggccctgtccctgtcctgaaggccctgggagccaacggcactttgctacttcttgccaccaggatgaatattcccagcagattgtgtgccactgccgggcaggctatacggggctgcgatgtgaagcttgtgcccctgggcactttggggacccatcaaggccaggtggccggtgccaactgtgtgagtgcagtgggaacattgacccaatggatcctgatgcctg

SEQ ID NO: 11096 - DNA, 558 bp, Homo sapiens
  source 1..558: mol_type = unassigned DNA
ctactcacactcccctgagaccctcccccacccacactcccctcagaccccctcccctggctctggctcagctctgccttgctcctagcctgccagtgcagccacgagggggcactcagcagtctctgtgaaaagaccagtgggcaatgtctctgtcgaactggtgcctttgggcttcgctgtgaccgctgccagcgtggccagtggggattccctagctgccggccatgtgtctgcaatgggcatgcagatgagtgcaacacccacacaggcgcttgcctgggctgccgtgatcacacagggggtgagcactgtgaaaggtgcattgctggtttccacggggacccacggctgccatatgggggccagtgccggccctgtccctgtcctgaaggccctgggagccaacggcactttgctacttcttgccaccaggatgaatattcccagcagattgtgtgccactgccgggcaggctatacggggctgcgatgtgaagcttgtgcccctgggcactttggggacccatcaaggccaggtggccggtgccaactgtgt

SEQ ID NO: 11097 - DNA, 590 bp, Homo sapiens
  source 1..590: mol_type = unassigned DNA
gattgtgcagcgtccagggcctgtgcctgcccacagcctgtgtgggcatttggtgcccaaggatgatcgcatccaagggactctgcaaccacatgccaggtacttgatatttcctaatcctgtctgccttgagcctggtatctcctacaagctgcatctgaagctggtacggacagggggaagtgcccagcctgagactccctactctggacctggcctgctcattgactcgctggtgctgctgccccgtgtcctggtgctagagatgtttagtgggggtgatgctgctgccctggagcgccaggccacctttgaacgctaccaatgccatgaggagggtctggtgcccagcaagacttctccctctgaggcctgcgcacccctcctcatcagcctgtccaccctcatctacaatggtgccctgcgtgcattgctggtttccacggggacccacggctgccatatgggggccagtgccggccctgtccctgtcctgaaggccctgggagccaacggcactttgctacttcttgccaccaggatgaatattcccagcagattgtgtgccactgccgggcaggctatacggg

SEQ ID NO: 11098 - DNA, 559 bp, Homo sapiens
  source 1..559: mol_type = unassigned DNA
gatcttccttgctcactccttcagctggtgctgctgccccgtgtcctggtgctagagatgtttagtgggggtgatgctgctgccctggagcgccaggccacctttgaacgctaccaatgccatgaggagggtctggtgcccagcaagacttctccctctgaggcctgcgcacccctcctcatcagcctgtccaccctcatctacaatggtgccctgccatgtcagtgcaaccctcaaggttcactgagttctgagtgcaaccctcatggtggtcagtgcctgtgcaagcctggagtggttgggcgccgctgtgacctctgtgcccctggctactatggctttggccccacaggctgtcaagcctgccagtgcagccacgagggggcactcagcagtctctgtgaaaagaccagtgggcaatgtctctgtcgaactggtgcctttgggcttcgctgtgaccgctgccagcgtggccagtggggattccctagctgccggccatgtgtctgcaatgggcatgcagatgagtgcaacacccacacaggcgcttgcctgggct

SEQ ID NO: 11099 - DNA, 605 bp, Homo sapiens
  source 1..605: mol_type = unassigned DNA
gacagggggaagtgcccagcctgagactccctactctggacctggcctgctcattgactcgctggtgctgctgccccgtgtcctggtgctagagatgtttagtgggggtgatgctgctgccctggagcgccaggccacctttgaacgctaccaatgccatgaggagggtctggtgcccagcaagacttctccctctgaggcctgcgcacccctcctcatcagcctgtccaccctcatctacaatggtgccctgccatgtcagtgcaaccctcaaggttcactgagttctgagtgcaaccctcatggtggtcagtgcctgtgcaagcctggagtggttgggcgccgctgtgacctctgtgcccctggctactatggctttggccccacaggctgtcaaggtactcttctgccccttgttccctcctatgcttctctctccttcccattactgttctctctcctccttctggacctgctgctggtttcctcaaactaagtcttggaccctctactctcaacctgggtcagttgtagttctcttccatttcctgaccttcccacctagactcccactactcacactcccctgagaccctcccccaccc

SEQ ID NO: 11100 - DNA, 343 bp, Homo sapiens
  source 1..343: mol_type = unassigned DNA
aaggtcagaccctggagttcctggtggcctctgtgccgaaggctatggactatgacctgctgctgcgcttagagccccaggtccctgagcaatgggcagagttggaactgattgtgcagcgtccagggcctgtgcctgcccacagcctgtgtgggcatttggtgcccaaggatgatcgcatccaagggactctgcaaccacatgccaggtacttgatatttcctaatcctgtctgccttgagcctggtatctcctacaagctgcatctgaagctggtacggacagggggaagtgcccagcctgagactccctactctggacctggcctgctcattgactcggt

SEQ ID NO: 11101 - DNA, 408 bp, Homo sapiens
  source 1..408: mol_type = unassigned DNA
gcgacgtgggtggtgctttggatccccagtgtgatgagggcacaggtcaatgccactgccgccagcacatggttgggcgacgctgtgagcaggtgcaacctggctacttccggcccttcctggaccacctaatttgggaggctgaggacacccgagggcaggtgctcgatgtggtggagcgcctggtgacccccggggaaactccatcctggactggctcaggcttcgtgcggctacaggaaggtcagaccctggagttcctggtggcctctgtgccgaaggctatggactatgacctgctgctgcgcttagagccccaggttagaccctgttatctaatctggggctgaacctctgggtgtgggagcatctcctccatcatcccgttttcccaggtccctgagcaat

SEQ ID NO: 11102 - DNA, 582 bp, Homo sapiens
  source 1..582: mol_type = unassigned DNA
aactttgctcaaagtcgctggactctaagctgtcggagggaccgctggacagacctgggaactgacagagggcctggagggaaacaggccaaagacccacaggctgagtttcatttcacacacctcattatgaccttcaagacatttcgccctgctgccatgctggtggaacgctcagcagactttggccgcacctggcatgtgtaccgatatttctcctatgactgtggggctgacttcccaggagtcccactagcacccccacggcactgggatgatgtagtctgtgagtcccgctactcagagattgagccatccactgaaggcgaggtcatctatcgtgtgctggaccctgccatccctatcccagacccctacagctcacggattcagaacctgttgaagatcaccaacctacgggtgaacctgactcgtctacacacgttgggagacaacctactcgacccacggagggagatccgagagaagtactactatgccctctatgagctggttgtacgtggcaactgcttctgctacggacacgcctcagagtgtgcacccgccccaggggcaccagcc

SEQ ID NO: 11103 - DNA, 1309 bp, Homo sapiens
  source 1..1309: mol_type = unassigned DNA
agatgcgttttcagaagacagtactccagtgataaggtatctacaccacttaataactgtacctggtaaggagatttaataaggctgagggtggtattaagtttctcagaacagactcatctttgcggatgcagttgcagaacaggaaacagacccagggagaagtttagtccccccagatctcattggccctccgcacaagccaagccacagccactcctgccacacaatcggattgctttcagcactcgcagccgtggaccgccgtgcggtcctttcctccgcagtgagccgatttgctctgccagcagctgtcggtgccgcgctcgacaccgagtcctagctaggcgctcacagaatacgcgctccctccctcccccttctctgtcccccgcctctcgctcaccccggcccactccagcggcgactttgagggattccctctctggcggcctctgcagcagcacagccggcctcattcggggcactgcgagtatggatctccaaggaagaggggtccccagcatcgacagacttcgagttctcctgatgttgttccatacaatggctcaaatcatggcagaacaagaagtggaaaatctctcaggcctttccactaaccctgaaaaagatatatttgtggtgcgggaaaatgggacgacgtgtctcatggcagagtttgcagccaaatttattgtaccttatgatgtgtgggccagcaactacgtagatgaaagccacaacatgtccaagggacctgaggcgacttggaggctgagcaaagtgcagtttgtctacgactcctcggagaaaacccacttcaaagacgcagtcagtgctgggaagcacacagccaactcgcaccacctctctgccttggtcacccccgctgggaagtcctatgagtgtcaagctcaacaaaccatttcactggcctctagtgatccgcagaagacggtcaccatgatcctgtctgcggtccacatccaaccttttgacattatctcagattttgtcttcagtgaagagcataaatgcccagtggatgagcgggagcaactggaagaaaccttgcccctgattttggggctcatcttgggcctcgtcatcatggtaacactcgcgatttaccacgtccaccacaaaatgactgccaaccaggtgcagatccctcgggacagatcccagtataagcacatgggctagaggccgttaggcaggcaccccctattcctgctcccccaactggatcaggtagaacaacaaaagcacttttccatcttgtacacgagatacaccaacatagcta

SEQ ID NO: 11104 - DNA, 2039 bp, Homo sapiens
  source 1..2039: mol_type = unassigned DNA
tgcgttttcagaagacagtactccagtgataaggtatctacaccacttaataactgtacctggtaaggagatttaataaggctgagggtggtattaagtttctcagaacagactcatctttgcggatgcagttgcagaacaggaaacagacccagggagaagtttagtccccccagatctcattggccctccgcacaagccaagccacagccactcctgccacacaatcggattgctttcagcactcgcagccgtggaccgccgtgcggtcctttcctccgcagtgagccgatttgctctgccagcagctgtcggtgccgcgctcgacaccgagtcctagctaggcgctcacagaatacgcgctccctccctcccccttctctgtcccccgcctctcgctcaccccggcccactccagcggcgactttgagggattccctctctggcggcctctgcagcagcacagccggcctcattcggggcactgcgagtatggatctccaaggaagaggggtccccagcatcgacagacttcgagttctcctgatgttgttccatacaatggctcaaatcatggcagaacaagaagtggaaaatctctcaggcctttccactaaccctgaaaaagatatatttgtggtgcgggaaaatgggacgacgtgtctcatggcagagtttgcagccaaatttattgtaccttatgatgtgtgggccagcaactacgtagatctgatcacagaacaggccgatatcgcattgacccggggagctgaggtgaagggccgctgtggccacagccagtcggagctgcaagtgttctgggtggatcgcgcatatgcactcaaaatgctctttgtaaaggaaagccacaacatgtccaagggacctgaggcgacttggaggctgagcaaagtgcagtttgtctacgactcctcggagaaaacccacttcaaagacgcagtcagtgctgggaagcacacagccaactcgcaccacctctctgccttggtcacccccgctgggaagtcctatgagtgtcaagctcaacaaaccatttcactggcctctagtgatccgcagaagacggtcaccatgatcctgtctgcggtccacatccaaccttttgacattatctcagattttgtcttcagtgaagagcataaatgcccagtggatgagcgggagcaactggaagaaaccttgcccctgattttggggctcatcttgggcctcgtcatcatggtaacactcgcgatttaccacgtccaccacaaaatgactgccaaccaggtgcagatccctcgggacagatcccagtataagcacatgggctagaggccgttaggcaggcaccccctattcctgctcccccaactggatcaggtagaacaacaaaagcacttttccatcttgtacacgagatacaccaacatagctacaatcaaacaggcctgggtatctgaggcttgcttggcttgtgtccatgcttaaacccacggaagggggagactctttcggatttgtagggtgaaatggcaattattctctccatgctggggaggaggggaggagggtctcagacagctttcgtgctcatggtggcttggctttgactctccaaagagcaataaatgccacttggagctgtatctggccccaaagtttagggattgaaaacatgcttctttgaggaggaaacccctttaggttcagaagaatatggggtgctttgctcccttggacacagctggcttatcctatacagttgtcaatgcacacagaatacaacctcatgctccctgcagcaagacccctgaaagtgattcatgcttctggctggcattctgcatgtttagtgattgtcttgggaatgtttcactgctacccgcatccagcgactgcagcaccagaaaacgactaatgtaactatgcagagttgtttggacttcttcctgtgccaggtccaagtcgggggacctgaagaatcaatctgtgtgagtctgtttttcaaaatgaaataaaacacactattctctggc

SEQ ID NO: 11105 - DNA, 3173 bp, Homo sapiens
  source 1..3173: mol_type = unassigned DNA
atcctattttctgggaaaagattactaccacagtaattgagctgtgaagcggagacaaattgctctcggtggtggttcaaagtactgcaattgactggaatagcaccgcgcagttttccttcctctcgtgcaagataagagtgataggagctgtatcgattacctgcaagatagaagtagaagcgggccgggtgcggtggctcacgcctgtaatcccagcactttgggaggctgaggcgggtggatcattcgacgtcaggagttccagaccagcctgaccaacatggtgaaaccccgtctctactaaaaatacaacaaattagccgggtgtggtggcaagcgcctgtaatcccagctactcggttggttgggcaggagaatcgcttgaacccgggaggcggaggttgcagtgagccgagatcgcgccattgcactccagcctgggcgacaagagcgagactctgtctcaaaaaaaaaaaaaaaagaagtagaagggaagaaaatcgcaaggaactagactaaaagaatctcgacccttgaatggagttacacgaacggccagatgaaagaaggaaggcccggacctccactcagggccgactaggggactggcggagggtgcacgctgatggatttactcaccgggtgcttggagctccagcagctggctggagcccgcgatgacgtcacggactcgggtcacatggccaagtccgccccgccccctccccgtccccgccgctgcagcggtcgccttcggagcgaagggtaccgacccggcagaagctcggagctctcggggtatcgaggaggcaggcccgcgggcgcacgggcgagcgggccgggagccggagcggcggaggagccggcagcagcggcgcggcgggctccaggcgaggcggtcgacgctcctgaaaacttgcgcgcgcgctcgcgccactgcgcccggagcgatgaagatggtcgcgccctggacgcggttctactccaacagctgctgcttgtgctgccatgtccgcaccggcaccatcctgctcggcgtctggtatctgatcatcaatgctgtggtactgttgattttattgagtgccctggctgatccggatcagtataacttttcaagttctgaactgggaggtgactttgagttcatggatgatgccaacatgtgcattgccattgcgatttctcttctcatgatcctgatatgtgctatggctacttacggagcgtacaagcaacgcgcagcctggatcatcccattcttctgttaccagatctttgactttgccctgaacatgttggttgcaatcactgtgcttatttatccaaactccattcaggaatacatacggcaactgcctcctaattttccctacagagatgatgtcatgtcagtgaatcctacctgtttggtccttattattcttctgtttattagcattatcttgacttttaagggttacttgattagctgtgtttggaactgctaccgatacatcaatggtaggaactcctctgatgtcctggtttatgttaccagcaatgacactacggtgctgctacccccgtatgatgatgccactgtgaatggtgctgccaaggagccaccgccaccttacgtgtctgcctaagccttcaagtgggcggagctgagggcagcagcttgactttgcagacatctgagcaatagttctgttatttcacttttgccatgagcctctctgagcttgtttgttgctgaaatgctactttttaaaatttagatgttagattgaaaactgtagttttcaacatatgctttgctggaacactgtgatagattaactgtagaattcttcctgtacgattggggatataatgggcttcactaaccttccctaggcattgaaacttcccccaaatctgatggacctagaagtctgcttttgtacctgctgggccccaaagttgggcatttttctctctgttccctctcttttgaaaatgtaaaataaaaccaaaaatagacaactttttcttcagccattccagcatagagaacaaaaccttatggaaacaggaatgtcaattgtgtaatcattgttctaattaggtaaatagaagtccttatgtatgtgttacaagaatttcccccacaacatcctttatgactgaagttcaatgacagtttgtgtttggtggtaaaggattttctccatggcctgaattaagaccattagaaagcaccaggccgtgggagcagtgaccatctgctgactgttcttgtggatcttgtgtccagggacatggggtgacatgcctcgtatgtgttagagggtggaatggatgtgtttggcgctgcatgggatctggtgcccctcttctcctggattcacatccccacccagggcccgcttttactaagtgttctgccctagattggttcaaggaggtcatccaactgactttatcaagtggaattgggatatatttgatatacttctgcctaacaacatggaaaagggttttcttttccctgcaagctacatcctactgctttgaacttccaagtatgtctagtcaccttttaaaatgtaaacattttcagaaaaatgaggattgccttccttgtatgcgctttttaccttgactacctgaattgcaagggatttttatatattcatatgttacaaagtcagcaactctcctgttggttcattattgaatgtgctgtaaattaagttgtttgcaattaaaacaaggtttgcccacatccaagatgaccttgtgattttgtgctgattgtgtctgaggacctttccctccacatatggtctggcagatgcacccagttcagcctaaggagtaggcttttttttgggggggggaggtcgggtgggggggatttttaatcttttaattttcaagatggttaaaatattgaaatgtttaagtggataactatattattcataaaatgactgagtgaaaactaatacactatgagatgaaaagtacttgtcagggattttcaagcttttgctcaagtaattactatgaaataacaatttctagaaatgaagaacaatccgtggagaataaattaccattggtgtgggggaaaaaagccaaacagaagtagaaaaaggtgtagccggcatacaaatgttatctacagtgtatttttagat

SEQ ID NO: 11106 - DNA, 915 bp, Homo sapiens
  source 1..915: mol_type = unassigned DNA
cgccccctccccgtccccgccgctgcagcggtcgccttcggagcgaagggtaccgacccggcagaagctcggagctctcggggtatcgaggaggcaggcccgcgggcgcacgggcgagcgggccgggagccggagcggcggaggagccggcagcagcggcgcggcgggctccaggcgaggcggtcgacgctcctgaaaacttgcgcgcgcgctcgcgccactgcgcccggagcgatgaagatggtcgcgccctggacgcggttctactccaacagctgctgcttgtgctgccatgtccgcaccggcaccatcctgctcggcgtctggtatctgatcatcaatgctgtggtactgttgattttattgagtgccctggctgatccggatcagtataacttttcaagttctgaactgggaggtgactttgagttcatggatgatgccaacatgtgcattgccattgcgatttctcttctcatgatcctgatatgtgctatggctacttacggagcgtacaagcaacgcgcagcctggatcatcccattcttctgttaccagatctttgactttgccctgaacatgttggttgcaatcactgtgcttatttatccaaactccattcaggaatacatacggcaactgcctcctaattttccctacagagatgatgtcatgtcagtgaatcctacctgtttggtccttattattcttctgtttattagcattatcttgacttttaagggttacttgattagctgtgtttggaactgctaccgatacatcaatggtaggaactcctctgatgtcctggtttatgttaccagcaatgacactacggtgctgctacccccgtatgatgatgccactgtgaatggtgctgccaaggagccaccgccaccttacgtgtctgcctaa

SEQ ID NO: 11107 - DNA, 618 bp, Homo sapiens
  source 1..618: mol_type = unassigned DNA
gctctcggggtatcgaggaggcaggcccgcgggcgcacgggcgagcgggccgggagccggagcggcggaggagccggcagcagcggcgcggcgggctccaggcgaggcggtcgacgctcctgaaaacttgcgcgcgcgctcgcgccactgcgcccggagcgatgaagatggtcgcgccctggacgcggttctactccaacagctgctgcttgtgctgccatgtccgcaccggcaccatcctgctcggcgtctggtatctgatcatcaatgctgtggtactgttgattttattgagtgccctggctgatccggatcagtataacttttcaagttctgaactgggaggtgactttgagttcatggatgatgccaaaattctttttaatctttcggcagacatgtgcattgccattgcgatttctcttctcatgatcctgatatgtgctatggctacttacggagcgtacaagcaacgcgcagcctggatcatcccattcttctgttaccagatctttgactttgccctgaacatgttggttgcaatcactgtgcttatttatccaaactccattcaggaatacatacggcaactgcctcctaattttccctacagagatg

SEQ ID NO: 11108 - DNA, 2758 bp, Homo sapiens
  source 1..2758: mol_type = unassigned DNA
atcctattttctgggaaaagattactaccacagtaattgagctgtgaagcggagacaaattgctctcggtggtggttcaaagtactgcaattgactggaatagcaccgcgcagttttccttcctctcgtgcaagataagagtgataggagctgtatcgattacctgcaagatagaagtagaagcgggccgggtgcggtggctcacgcctgtaatcccagcactttgggaggctgaggcgggtggatcattcgacgtcaggagttccagaccagcctgaccaacatggtgaaaccccgtctctactaaaaatacaacaaattagccgggtgtggtggcaagcgcctgtaatcccagctactcggttggttgggcaggagaatcgcttgaacccgggaggcggaggttgcagtgagccgagatcgcgccattgcactccagcctgggcgacaagagcgagactctgtctcaaaaaaaaaaaaaaaagaagtagaagggaagaaaatcgcaaggaactagactaaaagaatctcgacccttgaatggagttacacgaacggccagatgaaagaaggaaggcccggacctccactcagggccgactaggggactggcggagggtgcacgctgatggatttactcaccgggtgcttggagctccagcagctggctggagcccgcgatgacgtcacggactcgggtcacatggccaagtccgccccgccccctccccgtccccgccgctgcagcggtcgccttcggagcgaagggtaccgacccggcagaagctcggagctctcggggtatcgaggaggcaggcccgcgggcgcacgggcgagcgggccgggagccggagcggcggaggagccggcagcagcggcgcggcgggctccaggcgaggcggtcgacgctcctgaaaacttgcgcgcgcgctcgcgccactgcgcccggagcgatgaagatggtcgcgccctggacgcggttctactccaacagctgctgcttgtgctgccatgtccgcaccggcaccatcctgctcggcgtctggtatctgatcatcaatgctgtggtactgttgattttattgagtgccctggctgatccggatcagtataacttttcaagttctgaactgggaggtgactttgagttcatggatgatgccaacatgtgcattgccattgcgatttctcttctcatgatcctgatatgtgctatggctacttacggagcgtacaagcaacgcgcagcctggatcatcccattcttctgttaccagatctttgactttgccctgaacatgttggttgcaatcactgtgcttatttatccaaactccattcaggaatacatacggcaactgcctcctaattttccctacagagatgatgtcatgtcagtgaatcctacctgtttggtccttattattcttctgtttattagcattatcttgacttttaagggttacttgattagctgtgtttggaactgctaccgatacatcaatggtaggaactcctctgatgtcctggtttatgttaccagcaatgacactacggtgctgctacccccgtatgatgatgccactgtgaatggtgctgccaaggagccaccgccaccttacgtgtctgcctaagccttcaagtgggcggagctgagggcagcagcttgactttgcagacatctgagcaatagttctgttatttcacttttgccatgagcctctctgagcttgtttgttgctgaaatgctactttttaaaatttagatgttagattgaaaactgtagttttcaacatatgctttgctggaacactgtgatagattaactgtagaattcttcctgtacgattggggatataatgggcttcactaaccttccctaggcattgaaacttcccccaaatctgatggacctagaagtctgcttttgtacctgctgggccccaaagttgggcatttttctctctgttccctctcttttgaaaatgtaaaataaaaccaaaaatagacaactttttcttcagccattccagcatagagaacaaaaccttatggaaacaggaatgtcaattgtgtaatcattgttctaattaggtaaatagaagtccttatgtatgtgttacaagaatttcccccacaacatcctttatgactgaagttcaatgacagtttgtgtttggtggtaaaggattttctccatggcctgaattaagaccattagaaagcaccaggccgtgggagcagtgaccatctgctgactgttcttgtggatcttgtgtccagggacatggggtgacatgcctcgtatgtgttagagggtggaatggatgtgtttggcgctgcatgggatctggtgcccctcttctcctggattcacatccccacccagggcccgcttttactaagtgttctgccctagattggttcaaggaggtcatccaactgactttatcaagtggaattgggatatatttgatatacttctgcctaacaacatggaaaagggttttcttttccctgcaagctacatcctactgctttgaacttccaagtatgtctagtcaccttttaaaatgtaaacattttcagaaaaatgaggattgccttccttgtatgcgctttttaccttgactacctgaattgcaagggatttttatatattcatatgttacaaagtcagcaactctcctgttggttcattattgaatgtgctgtaaattaagttgtttgcaattaaaacaaggtttgcccacatcc

SEQ ID NO: 11109 - DNA, 4469 bp, Homo sapiens
  source 1..4469: mol_type = unassigned DNA
gcagtcgctgccgaccggctggctgggccttgcggcgtgaggaccccggcggcgccgcagtcccgcgagccatggcccagtccggcggggaggctcggcccgggcccaagacggcggtgcagatccgcgtcgccatccaggaggccgaggacgtggacgagttggaggacgaggaggagggggcggagactcggggcgccggggacccggcccggtacctcagccccggctggggcagcgcgagcgaggaggagccgagccgcgggcacagtggcaccactgcaagtggaggtgagaacgagcgtgaggacctggagcaggagtggaagcccccggatgaggagttgatcaagaaactggtggatcagatcgaattctacttttctgatgaaaacctggagaaggacgcctttttgctaaaacacgtgaggaggaacaagctgggatatgtgagcgttaagctactcacatccttcaaaaaggtgaaacatcttacacgggactggagaaccacagcacatgctttgaagtattcagtggtccttgagttgaatgaggaccaccggaaggtgaggaggaccacccccgtcccactgttccccaacgagaacctccccagcaagatgctcctggtctatgatctctacttgtctcctaagctgtgggctctggccaccccccagaagaatggaagggtgcaagagaaggtgatggaacacctgctcaagctttttgggacttttggagtcatctcatcagtgcggatcctcaaacctgggagagagctgccccctgacatccggaggatcagcagccgctacagccaagtggggacccaggagtgcgccatcgtggagttcgaggaggtggaagcagccatcaaagcccatgagttcatgatcacagaatctcagggcaaagagaacatgaaagctgtcctgattggtatgaagccacccaaaaagaaacctgccaaagacaaaaatcatgacgaggagcccactgcgagcatccacctgaacaagtccctgaacaagagagtcgaggagcttcagtacatgggtgatgagtcttctgccaacagctcctctgaccccgagagcaaccccacatcccctatggcgggccgacggcacgcggccaccaacaagctcagcccgtctggccaccagaatctctttctgagtccaaatgcctccccgtgcacaagtccttggagcagccccttggcccaacgcaaaggcgtttccagaaagtccccactggcggaggaaggtagactgaactgcagcaccagccctgagatcttccgcaagtgtatggattattcctctgacagcagcgtcactccctctggcagcccctgggtccggaggcgtcgccaagccgagatggggacccaggagaaaagccccggtacgagtcccctgctctcccggaagatgcagactgcagatgggctacccgtaggggtgctgaggttgcccaggggtcctgacaacaccagaggatttcatggccatgagaggagcagggcctgtgtataaataccttctatttttaatacaagctccactgaaaaccaccttcgttttcaaggttctgacaaacacctggcatgacagaatggaattcgttcccctttgagagattttttattcatgtagacctcttaatttatctatctgtaatatacataaatcggtacgccatggtttgaagaccaccttctagttcaggactcctgttcttcccagcatggccactattttgatgatggctgatgtgtgtgagtgtgatggccctgaagggctgtaggacggaggttccctgggggaagtctgttctttggtatggaatttttctctcttctttggtatggaatttttcccttcagtgactgagctgtcctcgataggccatgcaagggcttcctgagagttcaggaaagttctcttgtgcaacagcaagtagctaagcctatagcatggtgtcttgtaggaccaaatcgatgttacctgtcaagtaaataaataataaaacacccaactgggagtgctgactttgaggttatagattgtgcctgacaaaagtctgtgcctgtctgacagagctgtgggtggtatgtcatgaggccctgaggagcttagcagagacatctttcttttctttaagagaacatttaaaaatttttttatttgtacacatttatgggctacatgagaaactttgttacatgtttataatgcatagtgatcaagtcagggcatttagggtttctcactgtaccccagggcagccccagggctctccttgggcttctggcagcctgagtggtgtctcatcacagggaattttactgagcaaaggcagcttggcgtatactgagggtgtacagtccaggacccacagcattgatctcacctgggaacttattagaaatccagattctcaggccaaccctaggcccactgaattagaaagtctgggagaaaggcctggaatttgggttttaacaaacgctgcaggtgattctgatgcacgctggagaaccactggatggacaaaggctgcaggacttgaggtcagtccatttgacccccaatctctcactattttgtgaccttgggaaggttactaagccccgtgaacctcatcatctccctgtgaattgctttgttacgatgtccatgtctggaatgcagctggccctccataaatgttagctctctttccttctcacttgggttaatgtttgttatcatcaggagctgccttggtgtagcagaaagagcattggcctagattccagtgttggcttatgctctggctatttggcaggatttaatagagcttgttaataattattgaacagtgattaggtgccagggactatgctaagagctttccatgcattatctcatttaatctgcccaaaaactacaagagaaatgttcaggtattatctctattttattccagaaaaaaacagactttacttgggtaattaacttgtctaaggcttaacagctaaattggtagagttgggcttgaaactagtggtctggctttggagcccacactgtttaaccactaagtggtactcaacatttctgatctttactatccatattcaaaaaagaatccaccataaaaggtgctaatatttattcagcaccttcctacgtgctaggcattgggttagacacatttcacttactctcagtgtccatcataaggaattattatgccagtatcacacatgcagctgctgaagtaggaaaataatatcccaaacttgtgaaaatggacaaagatagtatatcctaaatgatatggctctatacaaattagcaggtgattgtgatctggatagtaagatgctttgtcccttaagatgcagaagagttcgtgttaactggcaaatgcctccagcaatgttctggatttgccatttccagcactaccagctgtaggtagcctgaaggcttgtgcctagaccaccaggactcctgaccttgggcaatgtcagggccccctccagccccgccctatgcttccctccctgactctgctcccatcaccccctgcctgctccttccctgcagccactccacctgctccttggccatcgggccatctgggcttcaccagctcttcttggcctgtgacattcaaggctgttccaccctattatgcctgttacacaagtcacagctctatttttagattaaccctcgtggatcatagttacttttaaaaatacctacaccctcacctttacatgtgaatacagatgaacttggccttcctttggtcgtattgccctgtgtgacattataaaagaaccctgaagtgggggtcagcagatctgaggtcgagtcgtggcttttctactaagcaactgtgaccttcagcaagtcatttattttattggttcacagttcttcccacaaaccagtggataacaagaagatgttccttaaataaggtcatatatgtgcaagtgctttctgaatggaaaagtgctttgcaggcattagtcactacttatcctgctgtctgatcatcacctccaaaggcaagcctccttttgctgcaattcttaaccctggcctcacattagagtcacctaaagagcttttaaaaactgcctatggggctgggcacggtggctcacgcctgtaatcccagcacttcaggagactgaggcgggcagatcatgaggtcaggagattgagactatcctggctaatgtggtaaaaccctgtctctactaaaaatacaaaaaaattagccgggcatggtggcacgcacctgtaatcccagctacttgggaggcggaggcaggagaattgcttgaacctgggaggcggaggttgcagtgagccgagatcacgccgctgcattccagcctgggcaacagaatgagactccatctcaaaaaaataaaaataaaaataaacaaa

SEQ ID NO: 11110 - DNA, 558 bp, Homo sapiens
  source 1..558: mol_type = unassigned DNA
atcatcgccctgcctttcccagtcctgctggctgcgctcagtctttaggtggtagcaggccaggtacagcggacacttgctgatgggggattccaggaggtgggatttcaagtggcaccactgcaagtggaggtgagaacgagcgtgaggacctggagcaggagtggaagcccccggatgaggagttgatcaagaaactggtggatcagatcgaattctacttttctgatgaaaacctggagaaggacgcctttttgctaaaacacgtgaggaggaacaagctgggatatgtgagcgttaagctactcacatccttcaaaaaggtgaaacatcttacacgggactggagaaccacagcacatgctttgaagtattcagtggtccttgagttgaatgaggaccaccggaaggtgaggaggaccacccccgtcccactgttccccaacgagaacctccccagcaagatgctcctggtctatgatctctacttgtctcctaagctgtgggctctggccaccccccagaagaatggaagggtgcaagagaaggtgatggaac

SEQ ID NO: 11111 - DNA, 473 bp, Homo sapiens
  source 1..473: mol_type = unassigned DNA
gccgcaaagtccatccctacccgccttcccctccccttgcgagtggtcccgcttacccttcactgccatcatcgccctgcctttcccagtcctgctggctgcgctcagtctttaggtggtagcaggccaggtacagcggacacttgctgatgggggattccaggaggtgggatttcaaggaataggagctcggtgaattcaaggaccatgcttgcttcgttcattgtatcttcagcacctagcacagcacccagcacataggacatgtttgttgactgaatgcgtatctctatcatcacactcactcaatggtgttgagatatttgtgtttccccttccctagacagtgagatccttgaaggcagctgccttatcttattcctttttgtatttccatacctagcctaatacctagcttatataagggaacagaataaatgaacaataaagaaaagtctttacagcctctaaaa

SEQ ID NO: 11112 - DNA, 527 bp, Homo sapiens
  source 1..527: mol_type = unassigned DNA
gaggaccccggcggcgccgcagtcccgcgagccatggcccagtccggcggggaggctcggcccgggcccaagacggcggtgcagatccgcgtcgccatccaggaggccgaggacgtggacgagttggaggacgaggaggagggggcggagactcggggcgccggggacccggcccggtacctcagccccggctggggcagcgcgagcgaggaggagccgagccgcgggcacaggaataggagctcggtgaattcaaggaccatgcttgcttcgttcattgtatcttcagcacctagcacagcacccagcacataggacatgtttgttgactgaatgcgtatctctatcatcacactcactcaatggtgttgagatatttgtgtttccccttccctagacagtgagatccttgaaggcagctgccttatcttattcctttttgtatttccatacctagcctaatacctagcttatataagggaacagaataaatgaacaataaagaaaagtctttacagcctctaaaa

SEQ ID NO: 11113 - DNA, 964 bp, Homo sapiens
  source 1..964: mol_type = unassigned DNA
cgtggacgagttggaggacgaggaggagggggcggagactcggggcgccggggacccggcccggtacctcagccccggctggggcagcgcgagcgaggaggagccgagccgcgggcacagaactgcccagctcccgtggcttgagtctcagcaagtgttcagtctgaagcccttcctgctgcccactggcatagagttgaccccagaaaatccctggggttcttcggtgagctgacagagcccagtgggcaggcacccagagcaggaggagatgtagccaagaacaggatccacactatcccctgtttggacccaggctcgcatggcagcagccatcacccgatgtgaatgttctcagctcctggagcctacaggagaaaacccagattcctcaatctgctcattaagatgtgacacccactcacatcatctcctcagcccattgcctcaacagttcacgctgtcaacagttcacgctcccgtgattccagctagttccctgagcatagggggctattttgtgtctacatgcctctgcacccccacctctaggtcctctgattgactgatttctagtcagcctttaaaacttcgctgcctcttctccaccacccccaatccccaccccagagctggctgtgtttcctttcttctctgttgctgtagtactctgtacattttatgcctagcaccttccacaattgtgattctatcattgtgtctccctcacaggaataggagctcggtgaattcaaggaccatgcttgcttcgttcattgtatcttcagcacctagcacagcacccagcacataggacatgtttgttgactgaatgcgtatctctatcatcacactcactcaatggtgttgagatatttgtgtttccccttccctagacagtgagatccttgaaggcagctgccttatcttattcctttttgtatttccatacctagcctaatac

SEQ ID NO: 11114 - DNA, 4281 bp, Homo sapiens
  source 1..4281: mol_type = unassigned DNA
gttgctctcctcccttccccggtcccgcccccgtctgtctgtgtcgactgcggacgctatcgataaagttgctgttttgacaacatggcggcgcccatggtccgtggcccggcagtgctcgcctaaaggtggagaacgaggagtagaggagccgcaggccagagcctgtgagcagatccagacctacagataaaaaacattatttaatctatctgggatttactccggcttatgatttgagggccttctcaccttctgaagaatggcttctgtttggcagagattgggtttttatgcctctcttctgaaaagacagctaaatggtgggccagatgtcatcaagtgggaaaggagagtaattcccggatgtaccagaagcatctacagtgccacgggaaagtggacaaaagagtatacattgcagacaagaaaggatgttgagaaatggtggcatcaacgaataaaagaacaggcctccaaaatttcagaagctgataaatcgaagccaaaattttacgtgctttccatgttcccttatccttctggtaagctgcacatgggccatgtgcgtgtctacaccatcagcgacaccatagcacggttccagaagatgagagggatgcaggtcatcaaccccatgggatgggatgcttttggattgcctgctgaaaatgccgcagtcgagaggaatctacatccacaaagttggacacaaagtaatattaaacacatgaggaaacagcttgatcgtctgggcctgtgtttcagctgggatagggaaataactacgtgtttgccagattactacaagtggactcagtatctctttattaaactgtatgaggctgggctggcctatcaaaaggaggccctggttaactgggacccagtggatcaaacagtgcttgccaatgagcaggtggatgaacatggctgttcatggcgttctggagcaaaggtggaacagaagtacctcagacaatggtttattaagacaaccgcttatgcaaaggccatgcaggacgcgttggcagaccttccagaatggtatggaataaaaggcatgcaagcccactggattggggactgtgtgggctgccacctggacttcacattaaaggttcatgggcaagccacgggcgaaaagctgactgcctatacggccacccctgaagccatttatggcacctcccacgtggccatctcgcccagccacagactcctacatgggcacagctctctgaaggaagccttgaggatggcccttgtccctggcaaagattgcctcacgcctgtaatggctgtgaacatgcttacccagcaggaggtccctgtcgttattttggccaaagctgacttggaaggctctctggattcaaaaataggaattcccagtactagctcagaggacaccatcttagcccaaaccctgggcctggcctactctgaagtcattgaaactttgccagatggcacagagagactgagcagctctgctgagttcacaggtatgacccggcaggatgcttttctagccctgactcagaaagcccgggggaagagagtgggtggagacgtgacaagtgataaactgaaagactggctgatttcacggcagcggtactggggcacaccaatccccattgtccactgcccagtctgtggccccacacctgtgcccctggaggacttgcctgtgaccctgcccaacatcgcgtctttcactggcaagggaggccccccactggccatggcttcagagtgggtgaactgctcctgcccaaggtgcaagggagcagccaagagagagacagacacgatggatacctttgttgattctgcttggtactacttcagatacactgaccctcataatccacacagcccttttaacacagcagtggccgattactggatgcctgtggatttgtacattggagggaaagaacatgccgtcatgcacttgttctatgcaagattctttagtcatttttgccatgatcaaaaaatggttaaacatagggagccttttcataagctgctggcccaaggccttatcaaggggcagacattccgcctaccatctggacagtatctacagagagaggaagtggatctcacaggttccgttcctgttcatgcaaaaacgaaagagaagttagaggtgacgtgggagaagatgagtaagtccaaacacaacggggtggacccagaggaagttgtggagcagtatgggatcgacacgattcggctctacatcctttttgctgcccctcctgagaaggatatcttgtgggatgtgaaaactgatgctctccctggggtgctgagatggcaacaacgactgtggaccttgacaactcggtttattgaggccagggcttctgggaagtctccccagcctcagctgctgagtaacaaggagaaagctgaggccaggaagctctgggagtacaagaactccgtcatctctcaggtgaccacccatttcacagaggacttctcactgaattctgcaatttctcagctgatgggactcagcaatgccctctcgcaagcctctcagagcgtcattctccacagccccgagtttgaggatgctttgtgtgccctgatggtaatggctgctccactggcccctcatgtaacctcagagatctgggcaggcctggcgctggtgccgaggaagctctgtgcccactacacttgggatgccagtgtgctgctccaggcatggcctgctgtggacccggagttcctgcagcagcctgaggttgtccagatggcagttctgatcaacaataaagcttgtggcaaaattcctgtgccccaacaagttgcccgggaccaggacaaagtccacgaatttgttcttcaaagcgagctgggtgtcaggcttttgcaaggacgaagcatcaagaagtccttcctttccccgagaactgccctcatcaacttcctggtgcaagattgacagccaggaggctgcagctaccacgagggcctctgaggaacctccttccaggcctgggatgagggggcgatgtctgctggcccaggggaagggaaaagacaaatgtcttgactgttgacctcggtcctgtggcagactgcagtcaacagtgtgcctctgtagtgtggcctggtgctggggtgaaggtgagctgggcaaaggagaaatatgagctactgaggagggggttggacatcctgcccctcaccccccacccacactgcaggtagaggaggccatctgatcccatgggaagccatcagagacactgctggtgggagcaggaaggagcagtgcccctcgagcagccaggaagcctgcggatctgggaaatggctctgccttaggcacttctcgggaatttgaggccagcctgaggaactgcaggactcaggtgcaatgtgccagccacttggaactgctaactgagcctccagatggtagtgaatggtctctttgccttcaggctggatgaggaagtcatttaggaaatgttcaaataaccaatatgtggaaatggacacagggatcttctgaagttgctttgaatcaaaaggcaggcagtgctggttcctctgcctgtgtccccaccactccccagctctgtcatgcaggcctgtcctccccaaccccagctggatgtgcctcccaggcctgctgtggttctgacacacaggatcccaggcaaggcaccacttcctcacatgaatgaggagcagcaagtcataaccactcccttgggtatacaatttgctgtgtagtgaagtggaaccaggctcaggctgctggtcccaacctcagagccccaccgcagcccagtagggatgcagcacgccccagagggctcatgtgggccccagatggcaatgccaccattgttgatgtgactccagagccagttattaggaagagcaagctcaccacagaggagtggaactgaggccccccagatgttgcctccggtgtccaagccacagcggtctggctgttgggaagatggccaggaatggactcataccattggcacattaggctaatcctggttttatgtgaagtcagcaattaagtgttcccactagaactgacctaagccactgattaatatttaatgagggaaggtaggggagaatctagccattttataatgccagaaatctatatatgttatctgatgccatttttctgaagtagcctcacatgtggtccccctgcagttcagcagttaacagatgacttttttagtgtaataaaatgtttatcatctatga

SEQ ID NO: 11115 - DNA, 4744 bp, Homo sapiens
  source 1..4744: mol_type = unassigned DNA
gctatcgataaagttgctgttttgacaacatggcggcgcccatggtccgtggcccggcagtgctcgcctaaaggtggagaacgaggagtagaggagccgcaggccagagcctgtgagcagggccttctcaccttctgaagaatggcttctgtttggcagagattgggtttttatgcctctcttctgaaaagacagctaaatggtgggccagatgtcatcaagtgggaaaggagagtaattcccggatgtaccagaagcatctacagtgccacgggaaagtggacaaaagagtatacattgcagacaagaaaggatgttgagaaatggtggcatcaacgaataaaagaacaggcctccaaaatttcagaagctgataaatcgaagccaaaattttacgtgctttccatgttcccttatccttctggtaagctgcacatgggccatgtgcgtgtctacaccatcagcgacaccatagcacggttccagaagatgagagggatgcaggtcatcaaccccatgggatgggatgcttttggattgcctgctgaaaatgccgcagtcgagaggaatctacatccacaaagttggacacaaagtaatattaaacacatgaggaaacagcttgatcgtctgggcctgtgtttcagctgggatagggaaataactacgtgtttgccagattactacaagtggactcagtatctctttattaaactgtatgaggctgggctggcctatcaaaaggaggccctggttaactgggacccagtggatcaaacagtgcttgccaatgagcaggtggatgaacatggctgttcatggcgttctggagcaaaggtggaacagaagtacctcagacaatggtttattaagacaaccgcttatgcaaaggccatgcaggacgcgttggcagaccttccagaatggtatggaataaaaggcatgcaagcccactggattggggactgtgtgggctgccacctggacttcacattaaaggttcatgggcaagccacgggcgaaaagctgactgcctatacggccacccctgaagccatttatggcacctcccacgtggccatctcgcccagccacagactcctacatgggcacagctctctgaaggaagccttgaggatggcccttgtccctggcaaagattgcctcacgcctgtaatggctgtgaacatgcttacccagcaggaggtccctgtcgttattttggccaaagctgacttggaaggctctctggattcaaaaataggaattcccagtactagctcagaggacaccatcttagcccaaaccctgggcctggcctactctgaagtcattgaaactttgccagatggcacagagagactgagcagctctgctgagttcacaggtatgacccggcaggatgcttttctagccctgactcagaaagcccgggggaagagagtgggtggagacgtgacaagtgataaactgaaagactggctgatttcacggcagcggtactggggcacaccaatccccattgtccactgcccagtctgtggccccacacctgtgcccctggaggacttgcctgtgaccctgcccaacatcgcgtctttcactggcaagggaggccccccactggccatggcttcagagtgggtgaactgctcctgcccaaggtgcaagggagcagccaagagagagacagacacgatggatacctttgttgattctgcttggtactacttcagatacactgaccctcataatccacacagcccttttaacacagcagtggccgattactggatgcctgtggatttgtacattggagggaaagaacatgccgtcatgcacttgttctatgcaagattctttagtcatttttgccatgatcaaaaaatggttaaacatagggagccttttcataagctgctggcccaaggccttatcaaggggcagacattccgcctaccatctggacagtatctacagagagaggaagtggatctcacaggttccgttcctgttcatgcaaaaacgaaagagaagttagaggtgacgtgggagaagatgagtaagtccaaacacaacggggtggacccagaggaagttgtggagcagtatgggatcgacacgattcggctctacatcctttttgctgcccctcctgagaaggatatcttgtgggatgtgaaaactgatgctctccctggggtgctgagatggcaacaacgactgtggaccttgacaactcggtttattgaggccagggcttctgggaagtctccccagcctcagctgctgagtaacaaggagaaagctgaggccaggaagctctgggagtacaagaactccgtcatctctcaggtgaccacccatttcacagaggacttctcactgaattctgcaatttctcagctgatgggactcagcaatgccctctcgcaagcctctcagagcgtcattctccacagccccgagtttgaggatgctttgtgtgccctgatggtaatggctgctccactggcccctcatgtaacctcagagatctgggcaggcctggcgctggtgccgaggaagctctgtgcccactacacttgggatgccagtgtgctgctccaggcatggcctgctgtggacccggagttcctgcagcagcctgaggttgtccagatggcagttctgatcaacaataaagcttgtggcaaaattcctgtgccccaacaagttgcccgggaccaggacaaagtccacgaatttgttcttcaaagcgagctgggtgtcaggcttttgcaaggacgaagcatcaagaagtccttcctttccccgagaactgccctcatcaacttcctggtgcaagattgacagccaggaggctgcagctaccacgagggcctctgaggaacctccttccaggcctgggatgagggggcgatgtctgctggcccaggggaagggaaaagacaaatgtcttgactgttgacctcggtcctgtggcagactgcagtcaacagtgtgcctctgtagtgtggcctggtgctggggtgaaggtgagctgggcaaaggagaaatatgagctactgaggagggggttggacatcctgcccctcaccccccacccacactgcaggtagaggaggccatctgatcccatgggaagccatcagagacactgctggtgggagcaggaaggagcagtgcccctcgagcagccaggaagcctgcggatctgggaaatggctctgccttaggcacttctcgggaatttgaggccagcctgaggaactgcaggactcaggtgcaatgtgccagccacttggaactgctaactgagcctccagatggtagtgaatggtctctttgccttcaggctggatgaggaagtcatttaggaaatgttcaaataaccaatatgtggaaatggacacagggatcttctgaagttgctttgaatcaaaaggcaggcagtgctggttcctctgcctgtgtccccaccactccccagctctgtcatgcaggcctgtcctccccaaccccagctggatgtgcctcccaggcctgctgtggttctgacacacaggatcccaggcaaggcaccacttcctcacatgaatgaggagcagcaagtcataaccactcccttgggtatacaatttgctgtgtagtgaagtggaaccaggctcaggctgctggtcccaacctcagagccccaccgcagcccagtagggatgcagcacgccccagagggctcatgtgggccccagatggcaatgccaccattgttgatgtgactccagagccagttattaggaagagcaagctcaccacagaggagtggaactgaggccccccagatgttgcctccggtgtccaagccacagcggtctggctgttgggaagatggccaggaatggactcataccattggcacattaggctaatcctggttttatgtgaagtcagcaattaagtgttcccactagaactgacctaagccactgattaatatttaatgagggaaggtaggggagaatctagccattttataatgccagaaatctatatatgttatctgatgccatttttctgaagtagcctcacatgtggtccccctgcagttcagcagttaacagatgacttttttagtgtaataaaatgtttatcatctatgacttcaggacatatgtgtgatcctggaatacaccatattccaatttcagagttaattacaaacagattgaggtattccatcatcatcggaagcattggctgtgtgtctgactccacatggaatgctataaagtgggatacatgtggttcttcttgttccagaacttacagtccatggtagacaacactgatacaggcaaactagcaacagcaattaagtcactggttctcagacttaatactctgcctggtcctcatgcccagatattccaatttaattggtccatggtgtggcttgaacaccaggaatctttaaaactccacaagtgattctaatgggcagcaaagtttgagaatcactggacacattgatgcacttgagccatcatttctatctagttcttcctcttcctaatcttcaggttagcggggataagtttggtccaggaccaagagttggaccaaaagggaagacaggggccagaagtctagagtgctagagccgacttgaatgtactcagtctcattgcacatggcagtgaatatggattaaatataagcccatgaaaatatttggtacaaggaa

SEQ ID NO: 11116 - DNA, 570 bp, Homo sapiens
  source 1..570: mol_type = unassigned DNA
atcgataaagttgctgttttgacaacatggcggcgcccatggtccgtggcccggcagtgctcgcctaaaggtggagaacgaggagtagaggagccgcaggccagagcctgtgagcagggccttctcaccttctgaagaatggcttctgtttggcagagattgggtttttatgcctctcttctgaaaagacagctaaatggtgggccagatgtcatcaagtgggaaaggagagtaattcccggatgtaccagaagcatctacagtgccacgggaaagtggacaaaagagtatacattgcagacaagaaaggatgttgagaaatggtggcatcaacgaataaaagaacaggcctccaaaatttcagaagctgatgtcatcaaccccatgggatgggatgcttttggattgcctgctgaaaatgccgcagtcgagaggaatctacatccacaaagttggacacaaagtaatattaaacacatgaggaaacagcttgatcgtctgggcctgtgtttcagctgggatagggaaataactacgtgtttgccagattactacaagtggactcagtat

SEQ ID NO: 11117 - DNA, 2800 bp, Homo sapiens
  source 1..2800: mol_type = unassigned DNA
atcgataaagttgctgttttgacaacatggcggcgcccatggtccgtggcccggcagtgctcgcctaaaggtggagaacgaggagtagaggagccgcaggccagagcctgtgagcagggccttctcaccttctgaagaatggcttctgtttggcagagattgggtttttatgcctctcttctgaaaagacagctaaatggtgggccagatgtcatcaagtgggaaaggagagtaattcccggatgtaccagaagcatctacagtgccacgggaaagtggacaaaagagtatacattgcagacaagaaaggatgttgagaaatggtggcatcaacgaataaaagaacaggcctccaaaatttcagaagctgatgtcatcaaccccatgggatgggatgcttttggattgcctgctgaaaatgccgcagtcgagaggaatctacatccacaaagttggacacaaagtaatattaaacacatgaggaaacagcttgatcgtctgggcctgtgtttcagctgggatagggaaataactacgtgtttgccagattactacaagtggactcagtatctctttattaaactgtatgaggctgggctggcctatcaaaaggaggccctggttaactgggacccagtggatcaaacagtgcttgccaatgagcaggtggatgaacatggctgttcatggcgttctggagcaaaggtggaacagaagtacctcagacaatggtttattaagacaaccgcttatgcaaaggccatgcaggacgcgttggcagaccttccagaatggtatggaataaaaggcatgcaagcccactggattggggactgtgtgggctgccacctggacttcacattaaaggttcatgggcaagccacgggcgaaaagctgactgcctatacggccacccctgaagccatttatggcacctcccacgtggccatctcgcccagccacagactcctacatgggcacagctctctgaaggaagccttgaggatggcccttgtccctggcaaagattgcctcacgcctgtaatggctgtgaacatgcttacccagcaggaggtccctgtcgttattttggccaaagctgacttggaaggctctctggattcaaaaataggaattcccagtactagctcagaggacaccatcttagcccaaaccctgggcctggcctactctgaagtcattgaaactttgccagatggcacagagagactgagcagctctgctgagttcacaggtatgacccggcaggatgcttttctagccctgactcagaaagcccgggggaagagagtgggtggagacgtgacaagtgataaactgaaagactggctgatttcacggcagcggtactggggcacaccaatccccattgtccactgcccagtctgtggccccacacctgtgcccctggaggacttgcctgtgaccctgcccaacatcgcgtctttcactggcaagggaggccccccactggccatggcttcagagtgggtgaactgctcctgcccaaggtgcaagggagcagccaagagagagacagacacgatggatacctttgttgattctgcttggtactacttcagatacactgaccctcataatccacacagcccttttaacacagcagtggccgattactggatgcctgtggatttgtacattggagggaaagaacatgccgtcatgcacttgttctatgcaagattctttagtcatttttgccatgatcaaaaaatggttaaacatagggagccttttcataagctgctggcccaaggccttatcaaggggcagacattccgcctaccatctggacagtatctacagagagaggaagtggatctcacaggttccgttcctgttcatgcaaaaacgaaagagaagttagaggtgacgtgggagaagatgagtaagtccaaacacaacggggtggacccagaggaagttgtggagcagtatgggatcgacacgattcggctctacatcctttttgctgcccctcctgagaaggatatcttgtgggatgtgaaaactgatgctctccctggggtgctgagatggcaacaacgactgtggaccttgacaactcggtttattgaggccagggcttctgggaagtctccccagcctcagctgctgagtaacaaggagaaagctgaggccaggaagctctgggagtacaagaactccgtcatctctcaggtgaccacccatttcacagaggacttctcactgaattctgcaatttctcagctgatgggactcagcaatgccctctcgcaagcctctcagagcgtcattctccacagccccgagtttgaggatgctttgtgtgccctgatggtaatggctgctccactggcccctcatgtaacctcagagatctgggcaggcctggcgctggtgccgaggaagctctgtgcccactacacttgggatgccagtgtgctgctccaggcatggcctgctgtggacccggagttcctgcagcagcctgaggttgtccagatggcagttctgatcaacaataaagcttgtggcaaaattcctgtgccccaacaagttgcccgggaccaggacaaagtccacgaatttgttcttcaaagcgagctgggtgtcaggcttttgcaaggacgaagcatcaagaagtccttcctttccccgagaactgccctcatcaacttcctggtgcaagattgacagccaggaggctgcagctaccacgagggcctctgaggaacctccttccaggcctgggatgagggggcgatgtctgctg

SEQ ID NO: 11118 - DNA, 566 bp, Homo sapiens
  source 1..566: mol_type = unassigned DNA
agtgctcgcctaaaggtggagaacgaggagtagaggagccgcaggccagagcctgtgagcaggtcgttttcacgttagggctcggaggtcctcagaaagatgaggttccagacgagaaatccgcctgaggtcacagatccagacctacagataaaaaacattatttaatctatctgggatttactccggcttatgatttgagggccttctcaccttctgaagaatggcttctgtttggcagagattgggtttttatgcctctcttctgaaaagacagctaaatggtgggccagatgtcatcaagtgggaaaggagagtaattcccggatgtaccagaagcatctacagtgccacgggaaagtggacaaaagagtatacattgcagacaagaaaggatgttgagaaatggtggcatcaacgaataaaagaacaggcctccaaaatttcagaagctgataaatcgaagccaaaattttacgtgctttccatgttcccttatccttctggtaagctgcacatgggccatgtgcgtgtctacaccatcagcgacaccatagcacggttcc

SEQ ID NO: 11119 - DNA, 804 bp, Homo sapiens
  source 1..804: mol_type = unassigned DNA
tagtcatttttgccatgatcaaaaaatggttaaacatagggagccttttcataagctgctggcccaaggccttatcaaggggcagacattccgcctaccatctggacagtatctacagagagaggaagtggatctcacaggttccgttcctgttcatgcaaaaacgaaagagaagttagaggtgacgtgggagaagatgagtaagtccaaacacaacggggtggacccagaggaagttgtggagcagtatgggatcgacacgattcggctctacatcctttttgctgcccctcctgagaaggatatcttgtgggatgtgaaaactgatgctctccctggggtgctgagatggcaacaacgactgtggaccttgacaactcggtttattgaggccagggcttctgggaagtctccccagcctcagctgctgagtaacaaggagaaagctgaggccaggaagctctgggagtacaagaactccgtcatctctcaggtgaccacccatttcacagaggacttctcactgaattctgcaatttctcagctgatgggactcagcaatgccctctcgcaagcctctcagagcgtcattctccacagccccgagtttgaggatgctttgtgtgccctgatggtaatggctgctccactggcccctcatgtaacctcagagatctgggcaggcatcctgtacaactgccatacggaggttttggaaatcttcccgctgcagctgggtcacaggacaagccacacaggaccagctcactaaaagaagtgatgatctctcttctgtgacctccg

SEQ ID NO: 11120 - DNA, 580 bp, Homo sapiens
  source 1..580: mol_type = unassigned DNA
ttattgaggccagggcttctgggaagtctccccagcctcagctgctgagtaacaaggagaaagctgaggccaggaagctctgggagtacaagaactccgtcatctctcaggctggagtgcaatggcgcaatctcagctcactgcaggctccacctcccaggttcaagagattctcctgcctcagcctcccaagtagctgggattacaggtgaccacccatttcacagaggacttctcactgaattctgcaatttctcagctgatgggactcagcaatgccctctcgcaagcctctcagagcgtcattctccacagccccgagtttgaggatgctttgtgtgccctgatggtaatggctgctccactggcccctcatgtaacctcagagatctgggcaggcctggcgctggtgccgaggaagctctgtgcccactacacttgggatgccagtgtgctgctccaggcatggcctgctgtggacccggagttcctgcagcagcctgaggttgtccagatggcagttctgatcaacaataaagcttgtggcaaaattcctgtgccccaacaagttgcccgggac

SEQ ID NO: 11121 - DNA, 567 bp, Homo sapiens
  source 1..567: mol_type = unassigned DNA
ttatccatccatctttacagctctgcgtgccatttgtgaaaaacaaaagctacccaacaacctgggattataaaccaggccaaagtggtgagcacccagcagccatggtctggcttcccaccggctcctcacacagctccaagccaggctgtgttgggatggaagctttggtcctgctctcataagcctccctgttcttagagtgaccccacgcttctgtgcctcggcattgcaggcctggcgctggtgccgaggaagctctgtgcccactacacttgggatgccagtgtgctgctccaggcatggcctgctgtggacccggagttcctgcagcagcctgaggttgtccagatggcagttctgatcaacaataaagcttgtggcaaaattcctgtgccccaacaagttgcccgggaccaggacaaagtccacgaatttgttcttcaaagcgagctgggtgtcaggcttttgcaaggacgaagcatcaagaagtccttcctttccccgagaactgccctcatcaacttcctggtgcaagattgacagccaggaggctgcagctaccac

SEQ ID NO: 11122 - DNA, 2933 bp, Homo sapiens
  source 1..2933: mol_type = unassigned DNA
ggggctgagtgctcagtggagagcggggagttgtgtccaccttgccgacgtcgctagccgtggggctgtcctgggaaggcggacggcgagcgcccggtgtccgcactcggccgcctgccgtgcccgtctgcgcccgtgtcatcctcactcgggacgcagggaccgtttttaaatcacaggggcgtgtgtcagcctgccctaggacttcatgtctatatatttccccattcactgccccgactatctgagatcggccaagatgactgaggtgatgatgaacacccagcccatggaggagatcggcctcagcccccgcaaggatggcctttcctaccagatcttcccagacccgtcagattttgaccgctgctgcaaactgaaggaccgtctgccctccatagtggtggaacccacagaaggggaggtggagagcggggagctccggtggccccctgaggagttcctggtccaggaggatgagcaagataactgcgaagagacagcgaaagaaaataaagagcagtagagtccctgtggactcccatgggtcataccagccagcatctgttcctgaactgtgtttttcccatcatgacggaagaagagagtgagccgcaattgttctgaaaatgtcaaacgaggcttctgttttgcacctgcagatcaccgagttggttttcttttcttttcttgcctttttttttttttgaaatttgccgagcagtggagccctctgacaatttgcaaggccctctgagaaaggaagctgcttagagccagggggttagtgggtgaggggagcgagtgctgtttttgagatcattatctgaactcaggcagcctagtagaggcagtggtgggattccaatgggtcttggtgggtgggaggtggggcatgtgcaaagcaagcaaggaacatttggggtaagaaaacaaacatgaggcaaaagaaaaaatacatgtttttaagaaaacattgagcagagaactgcagccaggatgcgctcagcagacattcactctggctgctgggacatcagaaaacaaagtcttcatctctctctccagtttcacccaccccaccctttgctttcatttcaggtgtgttggtctatatgacagggaggagagtaaaggagagcaggagcaattggctgcctgcaaagccagctggaggtgaagtgcaggaaaggaaaggtcaccccattctactccatggcctctctgctcccagctgtggtaggctcacatagccagtgtgatcggtttttaagaggcagtgcttttcagcttttctccctgatatatccattttgcttcccagcactttttaggagtagtgagagcacttcctgcccttgttggaagccccagggtggacactcagcacgaaggtctctcccttaactgctgcccttccaagacttgctcccgagatggagtgggcgtggtcttccaggctggcccttccttctcctcaccgccaccttccctgccccagccccagcagccatgggtacatgggtccccagctcacctatggattcccgccagtctgcccagctgcagtactcacgccccatgggggatcttggtctgtttttcttgtgggagcctagtggagagcagacgtggctttttatgtgtcttgttggggaggtgacttgcatggtggggacaaggctgtcgtggcaaccttgggatcgagtttgagactaaaggatgtcatgagatccctggcttctccccatgttgttcccggacaagggcagaagggaggcatggcaagggacctctgctgtccttactcaacagtggtcctcatccctccccacctcccactgcttcctgcaagggcaccagttgtatgagaaagttggcctttggacttaggatttcttattgtagctaagagccatctgaagcagcaggttgcaggacaaatgcttcagtccgccgagagcagtaccgtgtggccaagaggtggactcagagccttccttgagctaaactcggccaaccaaggcacgcagcatgtcccctcaggtctccagtcagtccaggttgaccctcagttctggacgtgtgtatatagctgtatttaatacctcaaggtcattgtggctctggggatgccggggcaggaggacgagggtgcgctgtggacacagcagtccgcggaattccgttctgggaagccaatggtcgccggcaccccttgcttcctccctctgttgtctgcctgtgtgacacacatcaatggcaataacttcttccaactcctcgcagaagtgggagaggccggcagcctgcaccgagaggggctttcctctctcttgctccccgcttcgttctgttttggctgcagagagtggttcatccatactctcattccctcgcctccccttgtggacgggggtcttgccttttcaattcctgtgttttggtgtcttcccttatctgctaccctgaatcacctgtcctggtcttgctgtgtgatgggaacatgcttgtaaactgcgtaacaaatctactttgtgtatgtgtctgtttatgggggtggtttattatttttgctggtccctagaccactttgtatgaccgtttgcagtctgagcaggccaggggctgacagctaatgtcaggaccctcagcggtggagcctgctggggggacccagctgctcttggacaagtggctgagctcctatctggcctcctctttttttttttttcaagtaatttgtgtgtatttctaactgattgtattgaaaaaattcctagtatttcagtaaaaatgcctgttgtgagatgaacctcctgtaacttctatctgttcttttttgaggctcagggagaaactagcatttttttttttccaaactactttttgtcactgtgacagttgtaaataaagtttgaaaatgctttcca

SEQ ID NO: 11123 - DNA, 550 bp, Homo sapiens
  source 1..550: mol_type = unassigned DNA
tgagtgctcagtggagagcggggagttgtgtccaccttgccgacgtcgctagccgtggggctgtcctgggaaggcggacggcgagcgcccggtgtccgcactcggccgcctgccgtgcccgtctgcgcccgtgtcatcctcactcgggacgcagggaccgtttttaaatcacaggggcgtgtgtcagcctgccctaggacttcatgtctatatatttccccattcactgccccgactatctgagatcggccaagatgactgaggtgatgatgaacacccagcccatggaggagatcggcctcagcccccgcaaggatggcctttcctaccagtagtttaccatatgagaggtttcaccatgttagccaggatggtctcgatctcctgacctcgtgatccacctgcctcagcatccgaaagcactgggattacagatcttcccagacccgtcagattttgaccgctgctgcaaactgaaggaccgtctgccctccatagtggtggaacccacagaaggggaggtggagagcggggagctccggtggccccc

SEQ ID NO: 11124 - DNA, 494 bp, Homo sapiens
  source 1..494: mol_type = unassigned DNA
gagtgctcagtggagagcggggagttgtgtccaccttgccgacgtcgctagccgtggggctgtcctgggaaggcggacggcgagcgcccggtgtccgcactcggccgcctgccgtgcccgtctgcgcccgtgtcatcctcactcgggacgcagggaccgtttttaaatcacaggggcgtgtgtcagcctgccctaggacttcatgtctatatatttccccattcactgccccgactatctgagatcggccaagatgactgaggtgatgatgaacacccagcccatggaggagatcggcctcagcccccgcaaggatggcctttcctaccagatggagtctcgctctgtcgcccagactggagtccagtggcgtgatctcggctcaccacaagctccgcctcccgggttcacaccattttctgcctcagtctccggagtagctgggaatacaggcgcccaccaccatgcccgcctaattttttttgtatttttag

SEQ ID NO: 11125 - DNA, 559 bp, Homo sapiens
  source 1..559: mol_type = unassigned DNA
gagtgctcagtggagagcggggagttgtgtccaccttgccgacgtcgctagccgtggggctgtcctgggaaggcggacggcgagcgcccggtgtccgcactcggccgcctgccgtgcccgtctgcgcccgtgtcatcctcactcgggacgcagggaccgtttttaaatcacaggggcgtgtgtcagcctgccctaggacttcatgtctatatatttccccattcactgccccgactatctgagatcggccaagatgactgaggtgatgatgaacacccagcccatggaggagatcggcctcagcccccgcaaggatggcctttcctaccaggtgaatcttcccagacccgtcagattttgaccgctgctgcaaactgaaggaccgtctgccctccatagtggtggaacccacagaaggggaggtggagagcggggagctccggtggccccctgaggagttcctggtccaggaggatgagcaagataactgcgaagagacagcgaaagaaaataaagagcagtagagtccctgtggactcccatgggtcataccagccag

SEQ ID NO: 11126 - DNA, 543 bp, Homo sapiens
  source 1..543: mol_type = unassigned DNA
gagtgctcagtggagagcggggagttgtgtccaccttgccgacgtcgctagccgtggggctgtcctgggaaggcggacggcgagcgcccggtgtccgcactcggccgcctgccgtgcccgtctgcgcccgtgtcatcctcactcgggacgcagggaccgtttttaaatcacaggggcgtgtgtcagcctgccctaggacttcatgtctatatatttccccattcactgccccgactatctgagatcggccaagatgactgaggtgatgatgaacacccagcccatggaggagatcggcctcagcccccgcaaggatggcctttcctaccaggattgtgaagaaccctagagaatactcgggtatgggatacgccagaagagctagcccttcccagctcacatcttggaaaacagcgtgtgaaccaattagcacctctcagccatgaagaaaacgttgagtcacagccttgtacatgaggttctcagagtgagatgggaccacatagggccaacctgcccagcccctgcctgcaggcggagaag

SEQ ID NO: 11127 - DNA, 485 bp, Homo sapiens
  source 1..485: mol_type = unassigned DNA
ttttgtttgcatgcaagtctcaacgtcgaggccggcagcagcggggctgagctgccccgactatctgagatcggccaagatgactgaggtgatgatgaacacccagcccatggaggagatcggcctcagcccccgcaaggatggcctttcctaccagatcttcccagacccgtcagattttgaccgctgctgcaaactgaaggaccgtctgccctccatagtggtggaacccacagaaggggaggtggagagcggggagctccggtggccccctgaggagttcctggtccaggaggatgagcaagataactgcgaagagacagcgaaagaaaataaagagcagtagagtccctgtggactcccatgggtcataccagccagcatctgttcctgaactgtgtttttcccatcatgacggaagaagagagtgagccgcaattgttctgaaaatgtcaaacgaggcttctgttttgcacctgcagatc

SEQ ID NO: 11128 - DNA, 1689 bp, Homo sapiens
  source 1..1689: mol_type = unassigned DNA
gtttgcatgcaagtctcaacgtcgaggccggcagcagcggggctgagctggtgcggccgcagggtttgcagagctccgggggggtggggggcgggaaacgctctccccacacgtaaccccactaaagccacaagcagcagggcacgcgctgcagcctctcaacccctgccctctccaccgcccctaaaaaccgacgcacattggtgggggccgggactgggaggagccgccttcgccgtgctgaaggggaaggagcccgggccgggcgcggggcgtcggaggtttgccccggactggggatcggagccgggagggatgcagagagaggcaggcccctgactgctgggacttccttgctggcagtttcttccttcctgctctgggttagaggagaagcggccgggggcgagcgccggcagccccggagcgcgctctcaggtgcggacgtggggagctcggccccgagtctccggcaggcgctgagcgaagggaaaaccggcgcaagccgcggcggggtccggcctggcccaagaagcggaaagttcatgcttctcgcttcaacttttcgggccggcgccacagccccgagcgaggaagagccgcccctacgtcagactcttcaccctgcgtgcgctcttctggctcctttctttggaggtcgccagcagcctttccaagacccgggaggaaactgcctttgcagggcccagctcccgaacctaaacttgccgcaaagccccgcatcttctgttagtctccctgcccccatccgtcccagcctggcagtgtttagagaggggactgaacttccctctctcaacagttcaagttcccccaccccgaggcttgtgtacccttcttgtgggtgcccctcccttgcctctcccgtggtgtgtgagcagctaggtgccttattataggtgaagctttgaaggctgttggaggctttgtgcctttggctgctcaaaatttgccaagccccgactatctgagatcggccaagatgactgaggtgatgatgaacacccagcccatggaggagatcggcctcagcccccgcaaggatggcctttcctaccagatcttcccagacccgtcagattttgaccgctgctgcaaactgaaggaccgtctgccctccatagtggtggaacccacagaaggggaggtggagagcggggagctccggtggccccctgaggagttcctggtccaggaggatgagcaagataactgcgaagagacagcgaaagaaaataaagagcagtagagtccctgtggactcccatgggtcataccagccagcatctgttcctgaactgtgtttttcccatcatgacggaagaagagagtgagccgcaattgttctgaaaatgtcaaacgaggcttctgttttgcacctgcagatcaccgagttggttttcttttcttttcttgcctttttttttttttgaaatttgccgagcagtggagccctctgacaatttgcaaggccctctgagaaaggaagctgcttagagccagggggttagtgggtgaggggagcgagtgctgtttttgagatcattatctgaactcaggcagcctagtagaggcagtggtgggattccaatgggtcttggtgggtgggaggtggggcatgtgcaaagcaagcaaggaacatttggggtaagaaaacaaacatgaggc

SEQ ID NO: 11129 - DNA, 756 bp, Homo sapiens
  source 1..756: mol_type = unassigned DNA
gaggccggcagcagcggggctgagctggtgcggccgcagggtttgcagagctccgggggggtggggggcgggaaacgctctccccacacgtaaccccactaaagccacaagcagcagggcacgcgctgcagcctctcaacccctgccctctccaccgcccctaaaaaccgacgcacattggtgggggccgggactgggaggagccgccttcgccgtgctgaaggggaaggagcccgggccgggcgcggggcgtcggaggtttgccccggactggggatcggagccgggagggatgcagagagaggcaggcccctgactgctgggacttccttgctggcagtttcttccttcctgctctgggttagaggagaagcggccgggggcgagcgccggcagccccggagcgcgctctcagccccgactatctgagatcggccaagatgactgaggtgatgatgaacacccagcccatggaggagatcggcctcagcccccgcaaggatggcctttcctaccagatcttcccagacccgtcagattttgaccgctgctgcaaactgaaggaccgtctgccctccatagtggtggaacccacagaaggggaggtggagagcggggagctccggtggccccctgaggagttcctggtccaggaggatgagcaagataactgcgaagagacagcgaaagaaaataaagagcagtagagtccctgtggactcccatgggtcataccagccagcatctgttcctgaa

SEQ ID NO: 11130 - DNA, 510 bp, Homo sapiens
  source 1..510: mol_type = unassigned DNA
gttttgctgcaagttctgttttgaacacctctcttcctgtctccagacagtcccctgatcccacagcagtgaatgcatgaagagttaggaatgtgaaagcgcgtgtgtttgttgacttttggtctgggtttcttggcagccccgactatctgagatcggccaagatgactgaggtgatgatgaacacccagcccatggaggagatcggcctcagcccccgcaaggatggcctttcctaccagatcttcccagacccgtcagattttgaccgctgctgcaaactgaaggaccgtctgccctccatagtggtggaacccacagaaggggaggtggagagcggggagctccggtggccccctgaggagttcctggtccaggaggatgagcaagataactgcgaagagacagcgaaagaaaataaagagcagtagagtccctgtggactcccatgggtcataccagccagcatctgttcctgaactgtgtttttcccatcatgacggaagaaga

SEQ ID NO: 11131 - DNA, 2900 bp, Homo sapiens
  source 1..2900: mol_type = unassigned DNA
gtccctcccgggctggggttcccaccactctttcgggctccacatcccgggtcggagagaccgagaccttcgggccggtgcggtcattgcagctaggccggcgggaggcgggtgcgccaggagcgcggctcgcagtttggggtgggggcggtggcttttcagtcgcccgaggttcgggtgcaataaaggagcagctaatgtaatttacaaacagctcgggccgaacgcagcgcagcgcccggactgacaggcgcattaggcaggctaattccagccggctcctcctacccccggcccgctaattaatgagcttcccaacttacagccgcctgcattggacagacagagagtgaaagagagggcgagggagagggagagaaggagagagaaggggggagcagagaagagagaagagagagggagggagggagagcgagaacaggaggagagaacagaggcaaagaagagaggaaaaagggagaaaggagagagaaagagaaagaagtgccgctgcagataattgattacaccgcgatcaaggctaacttgttagcaatagtcaattgccccgtctctccgcctccctcgcagtccgggatcggcgccctcgcctcggctcttccaactgcggccgccaggacccggggccaggagccactgccgagccacctgacacctttaaatagcaccggggttggcgaaactggagccccgcgcagcgcgccccggctccggccccggattgctggaagccccagcagcagcggcgcccgcgtcagcgccctcttcccggggccccgcgctgttctcccctcctcagccgccgcgctaatcggccccgcgcccggcccgcgccctgcccagtgcggcctcctttccacccgccgctgcctgcccgcgccgtccggcgcccgagctgcccgcgggctgggtccccgcggcccgagccgccccggccgggaccccgaacaaggccgagatgacttccaaggaggacggcaaggcggcgccgggggaggagcggcggcgcagcccgctggaccacctgcctccgcctgccaactccaacaagccactgacgccgttcagcatcgaggacatcctcaacaagccgtctgtgcggagaagttactcgctgtgcggggcggcgcacctgctggccgccgcggacaagcacgcgcagggcggcttgcccctggcgggccgcgcgctgctctcgcagacctcgccgctgtgcgcgctggaggagctcgccagcaagacgtttaaggggctggaggtcagcgttctgcaggcagccgaaggccgcgacggtatgaccatctttgggcagcggcagacccctaagaagcggcgaaagtcgcgcacggccttcaccaaccaccagatctatgaattggaaaagcgctttctataccagaagtacctgtcccccgccgatcgcgaccaaatcgcgcagcagctgggcctcaccaacgcgcaagtcatcacctggttccagaatcggcgcgctaagctcaagcgggacctggaggagatgaaggccgacgtagagtccgccaagaaactgggccccagcgggcagatggacatcgtggcgctggccgaactcgagcagaactcggaggccacagccggcggtggcggcggctgcggcagggccaagtcgaggcccggctctccggtcctccccccaggcgccccgaaggccccgggcgctggcgccctgcagctctcgcctgcctctccgctcacggaccagccggccagcagccaggactgctcggaggacgaggaagacgaagagatcgacgtggacgattgagcggcgccccgggtcttccgccgccctgggctcctagcgctcgaaagcccaacgcctcccggaccggaccgccgaggggagctgggacctcctctgccaactcccgcctcctcccctgtccccggccccggactcggctcctggcagccgcctcttccctctcgaagcaataaacccaggctggccggccgggccggccgccaccagcggcctccgccgccccggaagccctcgccgtgcaattctgtatggcttctatataaatatttaaacctatatagcgggttcttcccaccgcagcctgatttttcctttcttttattattattttttaaatctcggagatttcgatgttttcaaagctctcgggctgccgggtttgctgagggcgagacagaaaccagggcggggaacactaaccctgcggtctaggggagtggcagctccggctgttttgatttttctctgcatgtggcgaatgcaccggcccgctccttcctcgcctccctcggccttattgcagttgacttctatttcctcgggccttttttcctcatgtgggaggggaagaggtgggcagtcaggtcctgacttgcaagtttcaaaatcgatctttcctccccaccctctgagagaaaagtctgttttcgatgccatttctgcctcctaatgcccactaatgctgtttttaagattcctccctccctcccgcatttcctcggactgactgttggagtccggctcttagggacaatgcagggggaaatccaaccaaccaactatcgaaaacagaacccaaagccctataattattttgtactctttttagaatttttttgcatgtgacagagacagagaggaggccgacccaagccctcacctcacctcctccacagctctgggtctctcttgccacttcgaacaccccactcctacccgacttggccagaggagggtggctggatgtgagtgggctgcgagtgccccttccctgctcctcccttcccctctcctccctagactgtacccaaggcctctttctccaataaataaagtctttgccattttactagaa

SEQ ID NO: 11132 - DNA, 1507 bp, Homo sapiens
  source 1..1507: mol_type = unassigned DNA
ctttctctggcagtaggcaccagggctggaatggggccgcccggctccccatggcagtgggtgacgctgctgctggggctgctgctccctcctgccgcccccttctggctcctcaatgtgctcttccccccgcacaccacgcccaaggctgagctcagtaaccacacacggcccgtcatcctcgtgcccggctgcctggggaatcagctagaagccaagctggacaaaccagatgtggtgaactggatgtgctaccgcaagacagaggacttcttcaccatctggctggatctcaacatgttcctaccccttggggtagactgctggatcgataacaccagggttgtctacaaccggagctctgggctcgtgtccaacgcccctggtgtccagatccgcgtccctggctttggcaagacctactctgtggagtacctggacagcagcaagctggcagggtacctgcacacactggtgcagaacctggtcaacaatggctacgtgcgggacgagactgtgcgcgccgccccctatgactggcggctggagcccggccagcaggaggagtactaccgcaagctcgcagggctggtggaggagatgcacgctgcctatgggaagcctgtcttcctcattggccacagcctcggctgtctacacttgctctatttcctgctgcgccagccccaggcctggaaggaccgctttattgatggcttcatctctcttggggctccctggggtggctccatcaagcccatgctggtcttggcctcaggtgacaaccagggcatccccatcatgtccagcatcaagctgaaagaggagcagcgcataaccaccacctccccctggatgtttccctctcgcatggcgtggcctgaggaccacgtgttcatttccacacccagcttcaactacacaggccgtgacttccaacgcttctttgcagacctgcactttgaggaaggctggtacatgtggctgcagtcacgtgacctcctggcaggactcccagcacctggtgtggaagtatactgtctttacggcgtgggcctgcccacgccccgcacctacatctacgaccacggcttcccctacacggaccctgtgggtgtgctctatgaggatggtgatgacacggtggcgacccgcagcaccgagctctgtggcctgtggcagggccgccagccacagcctgtgcacctgctgcccctgcacgggatacagcatctcaacatggtcttcagcaacctgaccctggagcacatcaatgccatcctgctgggtgcctaccgccagggtccccctgcatccccgactgccagcccagagcccccgcctcctgaataaagaccttcctttgctaccgtaagccctgatggctatgtttcaggttgaagggaggcactagagtcccacactaggtttcactcctcaccagccacaggctcagtgctgtgtgcagtgaggcaagatgggctctgctgaggcctgggactgagct

SEQ ID NO: 11133 - DNA, 1083 bp, Homo sapiens
  source 1..1083: mol_type = unassigned DNA
gtccagatccgcgtccctggctttggcaagacctactctgtggagtacctggacagcagcaagctggcagggtacctgcacacactggtgcagaacctggtcaacaatggctacgtgcgggacgagactgtgcgcgccgccccctatgactggcggctggagcccggccagcaggaggagtactaccgcaagctcgcagggctggtggaggagatgcacgctgcctatgggaagcctgtcttcctcattggccacagcctcggctgtctacacttgctctatttcctgctgcgccagccccaggcctggaaggaccgctttattgatggcttcatctctcttggggctccctggggtggctccatcaagcccatgctggtcttggcctcagagacagggtctcactgcattgcctagtctggtcacggactcctggcctcaagtgatcctcctgcctcagcctcccaaagtgttgggattacaggggtgacaaccagggcatccccatcatgtccagcatcaagctgaaagaggagcagcgcataaccaccacctccccctggatgtttccctctcgcatggcgtggcctgaggaccacgtgttcatttccacacccagcttcaactacacaggccgtgacttccaacgcttctttgcagacctgcactttgaggaaggctggtacatgtggctgcagtcacgtgacctcctggcaggactcccagcacctggtgtggaagtatactgtctttacggcgtgggcctgcccacgccccgcacctacatctacgaccacggcttcccctacacggaccctgtgggtgtgctctatgaggatggtgatgacacggtggcgacccgcagcaccgagctctgtggcctgtggcagggccgccagccacagcctgtgcacctgctgcccctgcacgggatacagcatctcaacatggtcttcagcaacctgaccctggagcacatcaatgccatcctgctgggtgcctaccgccagggtccccctgcatccccgactgccagcccagagcccccgcctcctgaataaagaccttcctttgctaccgtaa

SEQ ID NO: 11134 - DNA, 348 bp, Homo sapiens
  source 1..348: mol_type = unassigned DNA
cctaccccttggggtagactgctggatcgataacaccagggttgtctacaaccggagctctgggctcgtgtccaacgcccctggtgtccagatccgcgtccctggctttggcaagacctactctgtggagtacctggacagcagcaagctggcagggccgccagccacagcctgtgcacctgctgcccctgcacgggatacagcatctcaacatggtcttcagcaacctgaccctggagcacatcaatgccatcctgctgggtgcctaccgccagggtccccctgcatccccgactgccagcccagagcccccgcctcctgaataaagaccttcctttgctaccgtaa

SEQ ID NO: 11135 - DNA, 1240 bp, Homo sapiens
  source 1..1240: mol_type = unassigned DNA
ggcccccacccaccaaggacaagatgcccagcccaggatcggtgagcaggagaggcccatccatgcccggcccctattaggcccagcccccatgcccccagacctatctgttcccaccttggactttggcaataaaggagcgccagactgggtgtttgctctgcagaggcaggggtcagcggccttggcctcagcacctcagcgccttcccttcctcagggaagcctgggctttggctactggggggacagcagggagagggggtgtaagcaggggagggtaagtgtgctttgtacctgggggttgagggtatgggaggtggggggtgggtctggtcactgcagcatctggggtgacgggggtaagggtcacggggggaatccagagtccagagtgagggctgctgctcacagtgcccggctgcctggggaatcagctagaagccaagctggacaaaccagatgtggtgaactggatgtgctaccgcaagacagaggacttcttcaccatctggctggatctcaacatgttcctaccccttggggtagactgctggatcgataacaccagggttgtctacaaccggagctctgggctcgtgtccaacgcccctggtgtccagatccgcgtccctggctttggcaagacctactctgtggagtacctggacagcagcaagctggcagggtacctgcacacactggtgcagaacctggtcaacaatggctacgtgcgggacgagactgtgcgcgccgccccctatgactggcggctggagcccggccagcaggaggagtactaccgcaagctcgcagggctggtggaggagatgcacgctgcctatgggaagcctgtcttcctcattggccacagcctcggctgtctacacttgctctatttcctgctgcgccagccccaggcctggaaggaccgctttattgatggcttcatctctcttggggctccctggggtggctccatcaagcccatgctggtcttggcctcaggtgacaaccagggcatccccatcatgtccagcatcaagctgaaagaggagcagcgcataaccaccacctccccctggatgtttccctctcgcatggcgtggcctgaggaccacgtgttcatttccacacccagcttcaactacacaggccgtgacttccaacgcttctttgcagacctgcactttgaggaaggctggtacatgtggctgcagtcacgtgacctcctggcagga

SEQ ID NO: 11136 - DNA, 842 bp, Homo sapiens
  source 1..842: mol_type = unassigned DNA
ctttctctggcagtaggcaccagggctggaatggggccgcccggctccccatggcagtgggtgacgctgctgctggggctgctgctccctcctgccgcccccttctggctcctcaatgtgctcttccccccgcacaccacgcccaaggctgagctcagtaaccacacacggcccgtcatcctcgctagaagccaagctggacaaaccagatgtggtgaactggatgtgctaccgcaagacagaggacttcttcaccatctggctggatctcaacatgttcctaccccttggggtagactgctggatcgataacaccagggttgtctacaaccggagctctgggctcgtgtccaacgcccctggtgtccagatccgcgtccctggctttggcaagacctactctgtggagtacctggacagcagcaagctggcagggtacctgcacacactggtgcagaacctggtcaacaatggctacgtgcgggacgagactgtgcgcgccgccccctatgactggcggctggagcccggccagcaggaggagtactaccgcaagctcgcagggctggtggaggagatgcacgctgcctatgggaagcctgtcttcctcattggccacagcctcggctgtctacacttgctctatttcctgctgcgccagccccaggcctggaaggaccgctttattgatggcttcatctctcttggggctccctggggtggctccatcaagcccatgctggtcttggcctcagagatgaggtcttgctatgttgcccaggctggtctcaaactcttcaccttaagtgatcttcctgcctcagcctcccgaagtgctggga

SEQ ID NO: 11137 - DNA, 359 bp, Homo sapiens
  source 1..359: mol_type = unassigned DNA
ggagtactaccgcaagctcgcagggctggtggaggagatgcacgctgcctatgggaagcctgtcttcctcattggccacagcctcggctgtctacacttgctctatttcctgctgcgccagccccaggcctggaaggaccgctttattgatggcttcatctctcttggggctccctggggtggctccatcaagcccatgctggtcttggcctcagggagtggcaccagggcccagcactgacacagctaccacctactccccaccccctgtaccctgggagctggtctggagagagaaacacagtctggacaagagaaacgctcatcagacaccaccaataaacatcaaacagacacca

SEQ ID NO: 11138 - DNA, 322 bp, Homo sapiens
  source 1..322: mol_type = unassigned DNA
agccccaggcctggaaggaccgctttattgatggcttcatctctcttggggctccctggggtggctccatcaagcccatgctggtcttggcctcaggagtgcctttgcccagggatgtgcttcactgaggatggatctgccagagctagggccagaccccccgaggccccacctgctcttccctagggagtggcaccagggcccagcactgacacagctaccacctactccccaccccctgtaccctgggagctggtctggagagagaaacacagtctggacaagagaaacgctcatcagacaccaccaataaacatcaaac

SEQ ID NO: 11139 - DNA, 568 bp, Homo sapiens
  source 1..568: mol_type = unassigned DNA
gacctactctgtggagtacctggacagcagcaagctggcagggtacctgcacacactggtgcagaacctggtcaacaatggctacgtgcgggacgagactgtgcgcgccgccccctatgactggcggctggagcccggccagcaggaggagtactaccgcaagctcgcagggctggtggaggagatgcacgctgcctatgggaagcctgtcttcctcattggccacagcctcggctgtctacacttgctctatttcctgctgcgccagccccaggcctggaaggaccgctttattgatggcttcatctctcttggggctccctggggtggctccatcaagcccatgctggtcttggcctcaggtgagaaggcctcgaacacttaggtccagcgatgggtgagaccaagctgatcctgggcctgccttcattgcggctcctgctcacagtggcctctaggggtgctatctaccactcctgggctggcatgcttgctgtcactggcccccagagcagtgaccctggcctgagcaattagggtggctccttccagagtctgtgtcagtgat

SEQ ID NO: 11140 - DNA, 573 bp, Homo sapiens
  source 1..573: mol_type = unassigned DNA
taccgcaagacagaggacttcttcaccatctggctggatctcaacatgttcctaccccttggggtagactgctggatcgataacaccagggttgtctacaaccggagctctgggctcgtgtccaacgcccctggtgtccagatccgcgtccctggctttggcaagacctactctgtggagtacctggacagcagcaagctggcagggtacctgcacacactggtgcagaacctggtcaacaatggctacgtgcgggacgagactgtgcgcgccgccccctatgactggcggctggagcccggtgagtgtctctgcggatgaccggcttggggtggggcaggtgccccagaccccagctgccctgaccccttccacccgctgcaggccagcaggaggagtactaccgcaagctcgcagggctggtggaggagatgcacgctgcctatgggaagcctgtcttcctcattggccacagcctcggctgtctacacttgctctatttcctgctgcgccagccccaggcctggaaggaccgctttattgatggcttcatctctcttggggctccctggg

SEQ ID NO: 11141 - DNA, 512 bp, Homo sapiens
  source 1..512: mol_type = unassigned DNA
gaaggttgcatataacagctcaggaagctgtgagatagagaagatcgtgggctcagaaatagacagtacgggaaaattcgcttttcctggccacagagagatccacgtgctggacaccgactacgagggctacgccatcctgcgggtgtccctgatgtggcggggcaggaactttcgcgtcctcaagtactttagtaagcttggccctggggggctctgcccagctgctgctctcccagggactgcccgcccagcccccctgtgccccacagctcggagccttgaggacaaggaccggctggggttctggaagtttcgggagctgacagcagacactggtctctacctggcggcccggcctgggcggtgtgccgagctcctgaaggaggagctgatttaatggagttcctgcctcagaccacaaggttcggagcgcccgcccacccctgcccctcctgggcaccctgcccaccaggtcacctgcacctgctctgaataaactgtgaagtcaa

SEQ ID NO: 11142 - DNA, 969 bp, Homo sapiens
  source 1..969: mol_type = unassigned DNA
cctcccgacatgtcgcagaagccctagggactgttccgcagctctagatggcccagtggggaggggctgccctgtgggcattgctgtctgatggcctgaaggcaccgcttggagggacacatgcctggggacagtgggctcacagatgtcttgctgctttgccaccgagcctcacagccatctgctgacctctcagagcccagcaggcccctgcccgggggttcgtggaatgcccctgggggtctcagacccactgctcagctcttggccaggctccgtatctctctagattggaggattctggagggaagtcggtgtggcctccgatcaaagcctggtgctgacggccccgaagcgggtggagggcttgttcctcaccttgagcgggagtaacctgaccgtgaaggttgcatataacagctcaggaagctgtgagatagagaagatcgtgggctcagaaatagacagtacgggaaaattcgcttttcctgcttctgtagtgtctccaaccactcaagtgctgggactgggtgggggcaggatggagttagaccctgcagaccctggccttcgaggtccgtccccctcagacgtctcccccaacgccatggccggctcttgaaggccacagagagatccacgtgctggacaccgactacgagggctacgccatcctgcgggtgtccctgatgtggcggggcaggaactttcgcgtcctcaagtactttactcggagccttgaggacaaggaccggctggggttctggaagtttcgggagctgacagcagacactggtctctacctggcggcccggcctgggcggtgtgccgagctcctgaaggaggagctgatttaatggagttcctgcctcagaccacaaggttcggagcgcccgcccacccctgcccctcctgggcaccctgcccaccaggtcacctgcacctgctctgaataaactgtgaagtcaa

SEQ ID NO: 11143 - DNA, 2625 bp, Homo sapiens
  source 1..2625: mol_type = unassigned DNA
actccgccgcgccctgcgggctttcttttccaggcctctgctcctgggtcctgcctccgaggtcaggcagggcctgtggttcctcccgacatgtcgcagaagccctagggactgttccgcagctctagatggcccagtggggaggggctgccctgtgggcattgctgtctgatggcctgaaggcaccgcttggagggacacatgcctggggacagtgggctcacagatgtcttgctgctttgccaccgagcctcacagccatctgctgacctctcagagcccagcaggcccctgcccgggggttcgtggaatgcccctgggggtctcagacccactgctcagctcttggccaggctccgtatctctctagattggaggattctggagggaagtcggtgtggcctccgatcaaagcctggtgctgacggccccgaagcgggtggagggcttgttcctcaccttgagcgggagtaacctgaccgtgaaggttgcatataacagctcaggaagctgtgagatagagaagatcgtgggctcagaaatagacagtacgggaaaattcgcttttcctggtaagtgcagttgccctgtgatggcaggtggaacccggctgtgcacacagctaggccttattgttccccatgctgttccctgcactgttccccatgctgttccctgcactgttctctgtgctgttccctgcactgttccccatgctgttccctgaactattccctgtgctgttccccatgttgttccctgcactgctccctgcactgttccacatgctgtttcctgcactattccccatgctgttccctgcacttttctctgcgccattccccatgcgttccctgcactgttccctgcactgttccccatgctgttccctgcgctgttccccatgctgttccctgcactgttcctcatgctgttccctgcgctgttccacatgctgttccctgcgctgttccccatgctgttccctgcactgttccccatgctgttccctgcaatgctccctgcactgttccccgcactgctccctgcactgttccccatgctgtttcctgcactattccccatgctgttccctgcacttttctctgtgccgttccccatgcattccctgcactgttccctgcactgttccccatgctgttccctgcaatgctccctgcactgttccccgcactgctccctgcactattccccatgctgttccctgcacttttctctgtgccgttccccatgcattccctgcactgttccctgcactgttccccatgctgttccctgcactgttccccatgctgtttcctgcaccgttccccatgctgttccctgcagggttccctgcactgttccccatgctgttccctgcacatttcatgccccagaccttcccattctcccaccaacacactggatcatccttcaaaagcttctgtagtgtctccaaccactcaagtgctgggactgggtgggggcaggatggagttagaccctgcagaccctggccttcgaggtccgtccccctcagacgtctcccccaacgccatggccggctcttgaaggccacagagagatccacgtgctggacaccgactacgagggctacgccatcctgcgggtgtccctgatgtggcggggcaggaactttcgcgtcctcaagtactttagtaagcttggccctggggggctctgcccagctgctgctctcccagggactgcccgcccagcccccctgtgccccacagctcggagccttgaggacaaggaccggctggggttctggaagtttcgggagctgacagcagacactggtctctacctggcggcccggcctgggcggtgtgccgagctcctgaaggaggtgagcctgacccccgaccctggcctgtgctgaagttcccgggcccctggcccagtccctggccctgtcaggagcccccgtggctccgcctcccggccctgggctgggccttctcaccccttcctgtgaacaggacaccaaacaccactggtgggcagctccagagatgagtctgtctcctggtttggaaagagctggaacctccagggtggtgaccctaggctgccaggcagggaccctgggaggctggggtcacggggtgcagagctgggtggggcaggggagcagaaatggcgccttttcttcggtgttctgtgcaggactgccggctgcttctgcccccgaaggtcccgtcggcggcggggcacagatcctgcgggcgctgcctcagggctcccatgttgggcactgcgagaacccagtgtctccctcacctcgctttgtcttggccctagaggctgggcctgttaccccattttgcagattgagaaggcgctcagggagctgggtgctttgcgcaaaaccaggcagcgaggacagaagtcccgccgtgtggccctcatcgaagccccgtggggcctccagagaccacacgggcctgagcccctgcacttctgtgtcgcaggagctgatttaatggagttcctgcctcagaccacaaggttcggagcgcccgcccacccctgcccctcctgggcaccctgcccaccaggtcacctgcacctgctctgaataaactgtgaagtcaa

SEQ ID NO: 11144 - DNA, 867 bp, Homo sapiens
  source 1..867: mol_type = unassigned DNA
atatgccaggagggtggctgggcaggctgctgtctaggccaggctaacccctgcggtgggcgtgggtgtcaccagggccgatggcgcttgtgcagaaacccacgtctctgagctgccagcagccaagctgtcctgatgacattcccgggtgggcgcacaagcctgcactgtccgtatagaatcggcccaggctgtgcagcaggggaacccggagcccggaccccgccacggaggccaggctgccgtgcaccatcctgggtgtcctcgtggtgctccgggcgcaggtggcagcagccatggaggagctggaccggcagaagattggaggattctggagggaagtcggtgtggcctccgatcaaagcctggtgctgacggccccgaagcgggtggagggcttgttcctcaccttgagcgggagtaacctgaccgtgaaggttgcatataacagctcaggaagctgtgagatagagaagatcgtgggctcagaaatagacagtacgggaaaattcgcttttcctggccacagagagatccacgtgctggacaccgactacgagggctacgccatcctgcgggtgtccctgatgtggcggggcaggaactttcgcgtcctcaagtactttactcggagccttgaggacaaggaccggctggggttctggaagtttcgggagctgacagcagacactggtctctacctggcggcccggcctgggcggtgtgccgagctcctgaaggaggagctgatttaatggagttcctgcctcagaccacaaggttcggagcgcccgcccacccctgcccctcctgggcaccctgcccaccaggtcacctgcacctgctctgaataaactgtgaagtcaa

SEQ ID NO: 11145 - DNA, 638 bp, Homo sapiens
  source 1..638: mol_type = unassigned DNA
atgcctggtgcagcagaggccctccccactgtcactgtcactctggtcgctggcgctgtgcctccggcctccggagctctgactgcccactgcattggaggattctggagggaagtcggtgtggcctccgatcaaagcctggtgctgacggccccgaagcgggtggagggcttgttcctcaccttgagcgggagtaacctgaccgtgaaggttgcatataacagctcaggaagctgtgagatagagaagatcgtgggctcagaaatagacagtacgggaaaattcgcttttcctggccacagagagatccacgtgctggacaccgactacgagggctacgccatcctgcgggtgtccctgatgtggcggggcaggaactttcgcgtcctcaagtactttactcggagccttgaggacaaggaccggctggggttctggaagtttcgggagctgacagcagacactggtctctacctggcggcccggcctgggcggtgtgccgagctcctgaaggaggagctgatttaatggagttcctgcctcagaccacaaggttcggagcgcccgcccacccctgcccctcctgggcaccctgcccaccaggtcacctgcacctgctctgaataaactgtgaagtc

SEQ ID NO: 11146 - DNA, 10430 bp, Homo sapiens
  source 1..10430: mol_type = unassigned DNA
gtgacacgtgtcaatcaacccccctccggggggcgcgcgctccggggctcgcgccgagggctcgcgcccctgcctcgtgcctgcgctgctcgtatgtaaatgagggcgcgtgacgcgggacgcagatggacaagggaagagagagaatggccgctgccgccgccgctgctgccgccgccgccgccgccgctcagtgccggagccctcggtgcgcggcggagagaagaggattccggcgggaactcgactcttggcgccaccgcctcatgcactgtgtaggttttgagagtattttagaagggctttatggaccacggctacgaagagacctcagtttatttgaagactgtgaaccagaagagctgactgactggtctatggatgaaaaatgttcattttgtaacctacagagagaagcagtcagtgattgtataccatctcttgattcttcacagtcaacaccaacagaggagctatcatctcagggccagtccaacactgataagattgaatgccaagcagaaaattacctaaatgcactctttcgaaagaaagatcttcctcagaactgtgatcctaacattcccctagttgctcaggaattaatgaaaaagatgatacgtcaatttgcgattgagtacatttcaaaaagtggtaaaactcaagagaatagaaatggttcaattggaccaagtatagtatgtaaaagtatccaaatgaatcaagcagaaaactcccttcaggaagagcaggaaggccccttagacctcactgtgaatcgaatgcaagaacaaaatactcagcaaggggatggagtgttagatctctctacaaagaaaaccagcataaaatctgaagagtcatccatatgtgatccttcttctgaaaattcagtggctggttcaactgttgatgcaaaatcagaggaagctactaaaatggaaaaaagaaaatcagcattaaacaaagttttggaatctttgtgcatacatcaccagcaacaagttttggctatgttgaaatttctagtccaagagcagaatgctgcttctctttgctgttgtaatacatcatgtgttgtgtcttcagaatctcaaaagcccttaatcgaagatgatttatgtggtctgttctgtagttgtgaatataggctggcagaaagaggttgtttacaaaacgaaaaacaaagccctggtttagaacctctgccagtctgtattaaagatttacattgtttatcttgccaaactgtaactgttgaacacgttaagccagtagtgaatagaggaattgcagacagttataattctcacaggtgctgttctggactgttaccaaacattcactctacaaaatcagcctttcgtagtcctcttttgtcaaaggaagtatgtgatctttcagtcactcttaaagatgcctgtagatctcgaagtccctcacccccaccattatcacctatagaaactgaaggatttgaaaaattgaaagacgtcatctcagagatttcagccttagaaaataacaaacttgaagcaaacattaaccagcctccatctctcacaccagcagaaatcagcagcaataagagtgatcatcaagataaaatacttaaaactaaaaaatccagtaactcttattctttactctcaaatgacagcaataattctactacaaatcatgaaaaaggtgaaactgctgtaatttttcaagatttaatggatcgcattaatgaaaaactaaaatcaatagaaaccacggatatgacaagccttgtaaaattatctagcagtgattataatacatataatgatttaaaattgggagatttcataacatctctcttgcataatgcaaaagccagtgattatagttttatggaattattgagtcaacatgataaaaaggtagaaaataaaattattcagacaagatttcgaaagcgtcaagaaactttatttgcaatgcgcaactcctctgattcacccatgtttagaaggcagtctttacagataaaaagagaacttgctagtcttgatgaaaattttacaagaaaaaaatacaccgaaaaaagttcaaggaaattgacacaaaacaatgagatatcttcatcagacaaaggagaattctatcatgaccaagggccttctttacaaaattctaaaagacttcaaggtaaaaatcatgctgaaacatcattttcaccaaattatgcattacagtcactgcaactacctcttcatagttcagaaactaacttgtcttttaatgaattttcagaaagctttaaaacaacttcccctgagaaaatgagcataagaaagccacaggagaaatctgcagatggaaaacaatttttgcaaaatgataggaaaaatccaaagttaggtaatactcaaactcttttgagaaatgatgtttctggacttttgagcagaactaaacgaaatattgtgcctccagggtggtattctgtatatgtaacaaataattatgtttttaaaaaatcccctaaagccaaaaaagtatccgaatccacaacaaaaaacgatccagtgaaaaatattcacattgaaagctcacacaatatagacctaaacaaaattgcaatgaattctaatttacaagtggttgtgaagcgtttggaagatacaataagtatagccaaaaaatcctggaataatcagccattatcagaaggatataaagcatccaagaaattgatagaaattgatggtaaagaccaacatgctgacagaaatatgactcttactctaaatagaatgacatgcaaagaacagagcttatcaaaatctgtggtagcatccggcaatattatcaatagtcactgcatgcctacagtggatttgaataacaaaagacttgaaaatctgaaaaagtcatctattttagatatgggtcgcttgatttccagtgttgaaaatgtaccagcaaaatatgaaggtactgaaagttcatctgtttccaactattctagtcctatcaaactcatgtttttatctgaggttaaaagtagtgaaggggtcaaatatactttaacttcagttggcacttcccattcaaatgttgttctcccttctgaaaaacctacaacccatcacgtaactgaagaaaaaacagaaacaaatgaggatatctcaaatgcgaactctgaaaattatcactccagtcattatgatactgatacttttcaaagagaactaaacaaattcagtcatgcaaaagaaactgcaggatcctctacaatgtttataggtgatataaatagtgataagccacaagaagaacctaaggacaattcaagcagtgctactgatccatcttttaaaagaaaaccaggtagaccaaaaaaaataggtccccaagttgtgaaacagattaagcgaccaattggaagaccaccaaagcctaaaattgatcaaacaaacatcactgtttgccagaatgagccctttagtgctggaaggaaaagcccagaatgtctcatatcagaagtaaaagaaggtatttataaaaagagtattacagtaactgttatttacggaaggtcaagaagaactaaaaggcatgtttctgaaggaagggtaaacataagcaaccttatgtctttaaacaataatgctggtgattttccaactgaatataatagtcccagaaatattagtgaagacaaaattgacttgggtgaaagaataagtgctgtagcaagcttgactactgaaagtgagatcttggggtctggctttgaatatgtgagacccatcaagaacaaatctgtgatacctcagccttccaagaacattattcgaccaaatcagaagcctttggcaataagtaggaagcctggtagaccggcaaaagtgaaaatctctggcatatctgtgactattaatagaacttcacctcaggaaagagaagtaagtattagcagctgcttgcctcctttagaacaggataatacgtcaggaaaaaatctgcctgaagaaaagtatgaccaacagtgcactcaaatggataaaataaggcacactgaagctgatatatttaaaaatggatcaaaacgtatgattgctactgtacctttgagacattctattagggatagaaaaccatctctgcatttcttacattcattagcatcttctagctcacttatttatagaaacgctctgctccataaatcatataaactgcatttgcagaaaaataaaagtcagaaggaaaaacataggcactcaaagatgaaaatagcttacaaagataccccaagaaacagactttcgcggaatgcaaaaaagtgtttggaagataataaattagtacctatttctgaagtatccttggatcctataatttcatcaaaccctttgctcaggtggtgggctacttctgcttcaaatgattccttattagaggaattaaacaatagatttgagcaaataacaaatgcttgggtgcaagtaagtggagatgaagctgaaaattgtattcataaaaaaagagaacacattgaaaatgatcatttcaaagtagcaagccctttggaaacttgtcttttagaacttgaagtttcacctgtaaaaatgctttttcagaaaaagtatgatttgaatgaactctgtacttggtttatgcaaacaacagaaacacagtctctttcactagttagaaaagcaaatgcccgaaaccctttggaagtaataaataccaggggaatcaaattagggaccaaatattctgactttaatgccagccccttcagaaagcactttaaaaaatttgcactctcttctccttcaaaatcagcagagaaattgcatatactgcataaagtggctaactctccactcttaaatgtgaaaagtaatttagcaatagctagattaaaaaggactgagtttaagaggttgcatcatgaaaggtggaaaagagagggaaagctgcacaaccatggaacagttgactggaactctaaaaggagaaacttaagatttttctgccagaaccaatttttaaataagactgagggagaaacaaatgctgacatcccactccaaggaaaaagcatagtagataatcagtgtgttttgccacctgagatcaggggtgacttgcagcagagggtagtaatgcctgacttcaaaatacatgctagttttgagaataaatttaagtcagaagcaaaagagaatggaacaaattgcagccaaaaagactttcaaaagggaccaagactagaaaatgtatgtcctaatagttggaggtcaaaaaccttaaaagactgtagaatatttttgaggaagctcaactgtcttgaacacagaaatacttttaagctaaatacaatcatttactctcctgaatctactgacagtggaaatactcatcagactcatatggaagaatcaaagcgctttactttaagatctcattctgctaggcaaaattcttttaaaaagcaatctaaagaaatagaaaatgctaacacaaataatccttcagctgatgaatttgctgaccatcttggcaatagtaaattaagcaaatgtgttaactttgacaagaatcctgatagttttgaagttcttagcaatttgaacaaaagaaaaagaccaccatggaagatcacagaaatgtcaacaaaaagacataaacgacagtcttgcaacagtggacaaatggcaaactatttttccaaatccctagcatgctacaagtgaaaactgatgagaaactgaatgtgtctgatgagaatacagcaagttgccctttgagccccattaagatgtgccttaatcgtcccattgaatggaatctgaatttgacaacagcatctctaacgagctgtacagttcataaccaaaatctcaaaagcgaagagaaatagattgcagttcttcttgcactatctttattttgtatgtcagtattccttctgaacaataagcatttatcaattgatcttgaagtatttctagtcctgtgatttgtctttatattaaatcattagcattaatcattttgattatattctttatatgttttttttacatgttttacatcagatcattgtggaattttgtaaacggattttgatgtttctcttttagtggtattatgtgaattttttatgccctaagtttaaatacgtaattgtccctagttttatttctgtgcacaaagttttaatatataacacattgtgatttataaagctagtattgtaaagatttgtgatgataacctgacccatgagcagttgtaaaacaggtggataccaactacctcgaagcaaattggtgaaagaaaaggcaaaggtatctcttagaagtaaatctccttcaacgttatatatgtacagaagaaaaaaagttgatcatagctttttgtcaagtagcatgtttcccattcacaggaaaatgtgagcttatcagttctttctctgtattttaaatctaagtctgtgggctttaagagcaatggcacaattgcatgtttactgttcagcaaatctgtgcctcttgatagagaaaaatactatgtggtttctgtaagttaccagttttgaatgaaaaatggtaaatggatttacatctgttttattgtaccttagccttttattttaaagttaaagggatgacttttaaaagcaggacattccctacctttaatagtgcaaagcacagtttcagcaatggctacatgactatgtctaaaaactgaatactcagaatactaaaggtttggtgcttaaatttatttttcccatgccagagaaagcaagctttggtatggtaaaccacatgagaacatggctcctttctttttggatagcctggccatgtgtgaatgggattttagcttattatgtttctaagacttttccttacagcacacttaatgtaccttttcagtccttctcccaaccccctgcaaattgtctttaaaacaacaacacataaggaatctgaagcacaggagaacacagagccaacaaacagaatgaagaacaatcatctatttttaactgactttctatcattaccatttttccttttgcttaataactatcttgctttgaaactttgactccttttataagttctatgaggcacatatgtatagcaatttggttctaaaaaccagtgatcttactttagctccatcttaaaatttcaccttaagtaaatggcctctagtagatgataagcctaaaaaaagcacaattattaaaacaaacagatccatgttaggacatttctgaataataaagagaaaaggtgtttcgttgggtattgcagaaaagaggaccaatttcatatagtacaagtttcgtaagtcaggccaagtgtcaatttcaaaagacaagaaatgaaattgacagtgaatagtgctcataaattggtagcgtatataaagagaagttcctgtcacattatattcccactagaattattatccacagtaaataaatattattttgttatgccaaaaatatagcgagcagcttcatggttaataatacatttatgttgacacctccctaatccaggaaacattcacaaacaaggactcccatatacaaatactttaggaagagagatttcccaggcagatatcaccaaaaatgttttcactgtaggaatcacaaaataagtttttgtcaaaataactgttgttgaacgttatactggtcttcctcactggtgattgataagctcctttctagccagtttgtggtacttccttcattttccctagaaatgttacttgttaaatgtgtcctcaggcggtttcatctttgttgattctgcccatctaagtcataagcttctcaaatgcaagctactagctagttacacttgtaagttttccataatgacatgattttaaacataaagagttcataagaatcacttggagagactatttaaaaatgagattcctaggcccacctcagattgtgataaatctgtgtgactgactgatgcacactttttctggactataataactgatgctgctctactgctttaatacaggccaaagtaacgtggaagcgcacagcagaaaatcttcagaaagacatcaggtttgttctgattttgacaagggtaacttcttctttattaaagcaaataactggacataatcttaaaggattccacctccatcgtctttcctaacttagatcttcattgagaaattgggcaaggttaagtttacttttttctagtgctgcggttttggctcgtcttggtagtctcatcttcatttctgattctggttctggaacttcatgatcactaaatagatgttgaaaatacacgaatttagatacaagctttaaaaccagtttatttataaataaaacttttttgtttctgactcacattctatcagtgtttaattgatagcctgattccattgacttagcttaaaactaaaatctcaatgtcaaaaaaacactgacttggctatctagcaaagtgaatcagggaaaatctagctaatgattttatatactataacagaacctggtgttatacaggaaaaaaagccacaaacttgtaatgaagcttgtaattaaacgaggaccataactgtccaaaagagatttctttgaaactcaagaagtgacaaaaaaattaagttctctctcttgatttaagcaataaattccaaaaacatagtaaaaaacaagtttccccccaaaaaagacaaatttaatcaacagtgtaaaactatgtactgaaaatacacacaatacaattttgcaaatgaatacaagacagctaccaactttcagctctaacagtggcttgactgacagaagccaaaaataaaacactctaccacacaatatacccaaattatagacagaattattctatcagtatgtaagtgtagagaacccaaatattatcaaaatcaagagtttgctaactgaagatcaaagaggagtcacatcatgtaattaaaaattgaaacaacatattaaagatagtactaaagaccatgccagctaataggcaaaagcaaacacgccgtaagaagtcaaatgctcttgatgatggaattttagactatatacctaagacagctatttatagttttcactatcttgttatatattctctctcattcgcaagaaaattagtttttttctacttgtagaaataaaaagtgaagataggcctccatatattctagacatgcatgacatacctttcagagtcggcttcagcagtctgacacctcctgttcgtcctagctgaaactgtcacttttctctgtccttgaagatagtataattcattatcaggatttattatcagttgctttttgtttttaatctagtttctaggctaactaaatcctttgtcttcaacacaacaatcctttcaacacatgtatctcctacttgttctagccatcttggtaccagttatcactgccacagaaaaaggaacccaagcaagattaaaacttaatttattttgtaagcactaataatgagtaagggaaaataaggaaatttcaagcaagttaaaagaaggcaaattttagttcaatgtatttgaggacagtatatgaaaaatgtgttataatgaagtacctctattattgctatagcacaaagtctgtggagactcatgaaaattaagggttagaaaggtaggttaggtgcataaacaggtgctaaagaaacaacttttttttttcttggaaggtgataaaacatagtaaggtaataatggcttcttgtaaaataacatacatgaccaattcaaatgtgttctaaaatatatttcaatgtaaaaactagaacctttatatactggggattataagattctacttactagaaatttacaaggttaaggagtaagacaaagtttggcttgtgatgtttctcatttataaggaataaaacaatatgaatatatgaagtttggtctattaaaaaggatggtgttctcatggtgtgatataccacaaaaaaaatctgatcaaaaccaaactgttcaatgtgacagtctgaaaattatatactctacttcattcatgttacacttttttctactccttacctgcttttactaatgcatttatccccaagaaaacatccaacaatatgggactaatttggaacaatatccagcaattggtatttaaataatttactggttacaaaacaatattatgaccagactccattttagaaaaaattaaatctgcatcgaaaagggccttaaaaaatagatttctaaaatcaaaatcatggttggctcatgggtgggattattagtgttccttatagtagtttgtctggatgtactttctgattcttctgtaataagcatgcattgcttttgtaatgaggaaataataaaacaataaaaaga

SEQ ID NO: 11147 - DNA, 5604 bp, Homo sapiens
  source 1..5604: mol_type = unassigned DNA
gtgacacgtgtcaatcaacccccctccggggggcgcgcgctccggggctcgcgccgagggctcgcgcccctgcctcgtgcctgcgctgctcgtatgtaaatgagggcgcgtgacgcgggacgcagatggacaagggaagagagagaatggccgctgccgccgccgctgctgccgccgccgccgccgccgctcagtgccggagccctcggtgcgcggcggagagaagaggattccggcgggaactcgactcttggcgccaccgcctcatgcactgtgtaggttttgagagtattttagaagggctttatggaccacggctacgaagagacctcagtttatttgaagactgtgaaccagaagagctgactgactggtctatggatgaaaaatgttcattttgtaacctacagagagaagcagtcagtgattgtataccatctcttgattcttcacagtcaacaccaacagaggagctatcatctcagggccagtccaacactgataagattgaatgccaagcagaaaattacctaaatgcactctttcgaaagaaagatcttcctcagaactgtgatcctaacattcccctagttgctcaggaattaatgaaaaagatgatacgtcaatttgcgattgagtacatttcaaaaagtggtaaaactcaagagaatagaaatggttcaattggaccaagtatagtatgtaaaagtatccaaatgaatcaagcagaaaactcccttcaggaagagcaggaaggccccttagacctcactgtgaatcgaatgcaagaacaaaatactcagcaaggggatggagtgttagatctctctacaaagaaaaccagcataaaatctgaagagtcatccatatgtgatccttcttctgaaaattcagtggctggcatgctacaagtgaaaactgatgagaaactgaatgtgtctgatgagaatacagcaagttgccctttgagccccattaagatgtgccttaatcgtcccattgaatggaatctgaatttgacaacagcatctctaacgagctgtacagttcataaccaaaatctcaaaagcgaagagaaatagattgcagttcttcttgcactatctttattttgtatgtcagtattccttctgaacaataagcatttatcaattgatcttgaagtatttctagtcctgtgatttgtctttatattaaatcattagcattaatcattttgattatattctttatatgttttttttacatgttttacatcagatcattgtggaattttgtaaacggattttgatgtttctcttttagtggtattatgtgaattttttatgccctaagtttaaatacgtaattgtccctagttttatttctgtgcacaaagttttaatatataacacattgtgatttataaagctagtattgtaaagatttgtgatgataacctgacccatgagcagttgtaaaacaggtggataccaactacctcgaagcaaattggtgaaagaaaaggcaaaggtatctcttagaagtaaatctccttcaacgttatatatgtacagaagaaaaaaagttgatcatagctttttgtcaagtagcatgtttcccattcacaggaaaatgtgagcttatcagttctttctctgtattttaaatctaagtctgtgggctttaagagcaatggcacaattgcatgtttactgttcagcaaatctgtgcctcttgatagagaaaaatactatgtggtttctgtaagttaccagttttgaatgaaaaatggtaaatggatttacatctgttttattgtaccttagccttttattttaaagttaaagggatgacttttaaaagcaggacattccctacctttaatagtgcaaagcacagtttcagcaatggctacatgactatgtctaaaaactgaatactcagaatactaaaggtttggtgcttaaatttatttttcccatgccagagaaagcaagctttggtatggtaaaccacatgagaacatggctcctttctttttggatagcctggccatgtgtgaatgggattttagcttattatgtttctaagacttttccttacagcacacttaatgtaccttttcagtccttctcccaaccccctgcaaattgtctttaaaacaacaacacataaggaatctgaagcacaggagaacacagagccaacaaacagaatgaagaacaatcatctatttttaactgactttctatcattaccatttttccttttgcttaataactatcttgctttgaaactttgactccttttataagttctatgaggcacatatgtatagcaatttggttctaaaaaccagtgatcttactttagctccatcttaaaatttcaccttaagtaaatggcctctagtagatgataagcctaaaaaaagcacaattattaaaacaaacagatccatgttaggacatttctgaataataaagagaaaaggtgtttcgttgggtattgcagaaaagaggaccaatttcatatagtacaagtttcgtaagtcaggccaagtgtcaatttcaaaagacaagaaatgaaattgacagtgaatagtgctcataaattggtagcgtatataaagagaagttcctgtcacattatattcccactagaattattatccacagtaaataaatattattttgttatgccaaaaatatagcgagcagcttcatggttaataatacatttatgttgacacctccctaatccaggaaacattcacaaacaaggactcccatatacaaatactttaggaagagagatttcccaggcagatatcaccaaaaatgttttcactgtaggaatcacaaaataagtttttgtcaaaataactgttgttgaacgttatactggtcttcctcactggtgattgataagctcctttctagccagtttgtggtacttccttcattttccctagaaatgttacttgttaaatgtgtcctcaggcggtttcatctttgttgattctgcccatctaagtcataagcttctcaaatgcaagctactagctagttacacttgtaagttttccataatgacatgattttaaacataaagagttcataagaatcacttggagagactatttaaaaatgagattcctaggcccacctcagattgtgataaatctgtgtgactgactgatgcacactttttctggactataataactgatgctgctctactgctttaatacaggccaaagtaacgtggaagcgcacagcagaaaatcttcagaaagacatcaggtttgttctgattttgacaagggtaacttcttctttattaaagcaaataactggacataatcttaaaggattccacctccatcgtctttcctaacttagatcttcattgagaaattgggcaaggttaagtttacttttttctagtgctgcggttttggctcgtcttggtagtctcatcttcatttctgattctggttctggaacttcatgatcactaaatagatgttgaaaatacacgaatttagatacaagctttaaaaccagtttatttataaataaaacttttttgtttctgactcacattctatcagtgtttaattgatagcctgattccattgacttagcttaaaactaaaatctcaatgtcaaaaaaacactgacttggctatctagcaaagtgaatcagggaaaatctagctaatgattttatatactataacagaacctggtgttatacaggaaaaaaagccacaaacttgtaatgaagcttgtaattaaacgaggaccataactgtccaaaagagatttctttgaaactcaagaagtgacaaaaaaattaagttctctctcttgatttaagcaataaattccaaaaacatagtaaaaaacaagtttccccccaaaaaagacaaatttaatcaacagtgtaaaactatgtactgaaaatacacacaatacaattttgcaaatgaatacaagacagctaccaactttcagctctaacagtggcttgactgacagaagccaaaaataaaacactctaccacacaatatacccaaattatagacagaattattctatcagtatgtaagtgtagagaacccaaatattatcaaaatcaagagtttgctaactgaagatcaaagaggagtcacatcatgtaattaaaaattgaaacaacatattaaagatagtactaaagaccatgccagctaataggcaaaagcaaacacgccgtaagaagtcaaatgctcttgatgatggaattttagactatatacctaagacagctatttatagttttcactatcttgttatatattctctctcattcgcaagaaaattagtttttttctacttgtagaaataaaaagtgaagataggcctccatatattctagacatgcatgacatacctttcagagtcggcttcagcagtctgacacctcctgttcgtcctagctgaaactgtcacttttctctgtccttgaagatagtataattcattatcaggatttattatcagttgctttttgtttttaatctagtttctaggctaactaaatcctttgtcttcaacacaacaatcctttcaacacatgtatctcctacttgttctagccatcttggtaccagttatcactgccacagaaaaaggaacccaagcaagattaaaacttaatttattttgtaagcactaataatgagtaagggaaaataaggaaatttcaagcaagttaaaagaaggcaaattttagttcaatgtatttgaggacagtatatgaaaaatgtgttataatgaagtacctctattattgctatagcacaaagtctgtggagactcatgaaaattaagggttagaaaggtaggttaggtgcataaacaggtgctaaagaaacaacttttttttttcttggaaggtgataaaacatagtaaggtaataatggcttcttgtaaaataacatacatgaccaattcaaatgtgttctaaaatatatttcaatgtaaaaactagaacctttatatactggggattataagattctacttactagaaatttacaaggttaaggagtaagacaaagtttggcttgtgatgtttctcatttataaggaataaaacaatatgaatatatgaagtttggtctattaaaaaggatggtgttctcatggtgtgatataccacaaaaaaaatctgatcaaaaccaaactgttcaatgtgacagtctgaaaattatatactctacttcattcatgttacacttttttctactccttacctgcttttactaatgcatttatccccaagaaaacatccaacaatatgggactaatttggaacaatatccagcaattggtatttaaataatttactggttacaaaacaatattatgaccagactccattttagaaaaaattaaatctgcatcgaaaagggccttaaaaaatagatttctaaaatcaaaatcatggttggctcatgggtgggattattagtgttccttatagtagtttgtctggatgtactttctgattcttctgtaataagcatgcattgcttttgtaatgaggaaataataaaacaataaaaaga

SEQ ID NO: 11148 - DNA, 9431 bp, Homo sapiens
  source 1..9431: mol_type = unassigned DNA
gggaagagagagaatggccgctgccgccgccgctgctgccgccgccgccgccgccgctcagtgccggagccctcggtgcgcggcggagagaagaggattccggcgggaactcgactcttggcgccaccgcctcatgcactgtgtaggttttgagagtattttagaagggctttatggaccacggctacgaagagacctcagtttatttgaaggattgtataccatctcttgattcttcacagtcaacaccaacagaggagctatcatctcagggccagtccaacactgataagattgaatgccaagcagaaaattacctaaatgcactctttcgaaagaaagatcttcctcagaactgtgatcctaacattcccctagttgctcaggaattaatgaaaaagatgatacgtcaatttgcgattgagtacatttcaaaaagtggtaaaactcaagagaatagaaatggttcaattggaccaagtatagtatgtaaaagtatccaaatgaatcaagcagaaaactcccttcaggaagagcaggaaggccccttagacctcactgtgaatcgaatgcaagaacaaaatactcagcaaggggatggagtgttagatctctctacaaagaaaaccagcataaaatctgaagagtcatccatatgtgatccttcttctgaaaattcagtggctggttcaactgttgatgcaaaatcagaggaagctactaaaatggaaaaaagaaaatcagcattaaacaaagttttggaatctttgtgcatacatcaccagcaacaagttttggctatgttgaaatttctagtccaagagcagaatgctgcttctctttgctgttgtaatacatcatgtgttgtgtcttcagaatctcaaaagcccttaatcgaagatgatttatgtggtctgttctgtagttgtgaatataggctggcagaaagaggttgtttacaaaacgaaaaacaaagccctggtttagaacctctgccagtctgtattaaagatttacattgtttatcttgccaaactgtaactgttgaacacgttaagccagtagtgaatagaggaattgcagacagttataattctcacaggtgctgttctggactgttaccaaacattcactctacaaaatcagcctttcgtagtcctcttttgtcaaaggaagtatgtgatctttcagtcactcttaaagatgcctgtagatctcgaagtccctcacccccaccattatcacctatagaaactgaaggatttgaaaaattgaaagacgtcatctcagagatttcagccttagaaaataacaaacttgaagcaaacattaaccagcctccatctctcacaccagcagaaatcagcagcaataagagtgatcatcaagataaaatacttaaaactaaaaaatccagtaactcttattctttactctcaaatgacagcaataattctactacaaatcatgaaaaaggtgaaactgctgtaatttttcaagatttaatggatcgcattaatgaaaaactaaaatcaatagaaaccacggatatgacaagccttgtaaaattatctagcagtgattataatacatataatgatttaaaattgggagatttcataacatctctcttgcataatgcaaaagccagtgattatagttttatggaattattgagtcaacatgataaaaaggtagaaaataaaattattcagacaagatttcgaaagcgtcaagaaactttatttgcaatgcgcaactcctctgattcacccatgtttagaaggcagtctttacagataaaaagagaacttgctagtcttgatgaaaattttacaagaaaaaaatacaccgaaaaaagttcaaggaaattgacacaaaacaatgagatatcttcatcagacaaaggagaattctatcatgaccaagggccttctttacaaaattctaaaagacttcaagaaagctttaaaacaacttcccctgagaaaatgagcataagaaagccacaggagaaatctgcagatggaaaacaatttttgcaaaatgataggaaaaatccaaagttaggtaatactcaaactcttttgagaaatgatgtttctggacttttgagcagaactaaacgaaatattgtgcctccagggtggtattctgtatatgtaacaaataattatgtttttaaaaaatcccctaaagccaaaaaagtatccgaatccacaacaaaaaacgatccagtgaaaaatattcacattgaaagctcacacaatatagacctaaacaaaattgcaatgaattctaatttacaagtggttgtgaagcgtttggaagatacaataagtatagccaaaaaatcctggaataatcagccattatcagaaggatataaagcatccaagaaattgatagaaattgatggtaaagaccaacatgctgacagaaatatgactcttactctaaatagaatgacatgcaaagaacagagcttatcaaaatctgtggtagcatccggcaatattatcaatagtcactgcatgcctacagtggatttgaataacaaaagacttgaaaatctgaaaaagtcatctattttagatatgggtcgcttgatttccagtgttgaaaatgtaccagcaaaatatgaaggtactgaaagttcatctgtttccaactattctagtcctatcaaactcatgtttttatctgaggttaaaagtagtgaaggggtcaaatatactttaacttcagttggcacttcccattcaaatgttgttctcccttctgaaaaacctacaacccatcacgtaactgaagaaaaaacagaaacaaatgaggatatctcaaatgcgaactctgaaaattatcactccagtcattatgatactgatacttttcaaagagaactaaacaaattcagtcatgcaaaagaaactgcaggatcctctacaatgtttataggtgatataaatagtgataagccacaagaagaacctaaggacaattcaagcagtgctactgatccatcttttaaaagaaaaccaggtagaccaaaaaaaataggtccccaagttgtgaaacagattaagcgaccaattggaagaccaccaaagcctaaaattgatcaaacaaacatcactgtttgccagaatgagccctttagtgctggaaggaaaagcccagaatgtctcatatcagaagtaaaagaaggtatttataaaaagagtattacagtaactgttatttacggaaggtcaagaagaactaaaaggcatgtttctgaaggaagggtaaacataagcaaccttatgtctttaaacaataatgctggtgattttccaactgaatataatagtcccagaaatattagtgaagacaaaattgacttgggtgaaagaataagtgctgtagcaagcttgactactgaaagtgagatcttggggtctggctttgaatatgtgagacccatcaagaacaaatctgtgatacctcagccttccaagaacattattcgaccaaatcagaagcctttggcaataagtaggaagcctggtagaccggcaaaagtgaaaatctctggcatatctgtgactattaatagaacttcacctcaggaaagagaagtaagtattagcagctgcttgcctcctttagaacaggataatacgtcaggaaaaaatctgcctgaagaaaagtatgaccaacagtgcactcaaatggataaaataaggcacactgaagctgatatatttaaaaatggatcaaaacgtatgattgctactgtacctttgagacattctattagggatagaaaaccatctctgcatttcttacattcattagcatcttctagctcacttatttatagaaacgctctgctccataaatcatataaactgcatttgcagaaaaataaaagtcagaaggaaaaacataggcactcaaagatgaaaatagcttacaaagataccccaagaaacagactttcgcggaatgcaaaaaagtgtttggaagataataaattagtacctatttctgaagtatccttggatcctataatttcatcaaaccctttgctcaggtggtgggctacttctgcttcaaatgattccttattagaggaattaaacaatagatttgagcaaataacaaatgcttgggtgcaagtaagtggagatgaagctgaaaattgtattcataaaaaaagagaacacattgaaaatgatcatttcaaagtagcaagccctttggaaacttgtcttttagaacttgaagtttcacctgtaaaaatgctttttcagaaaaagtatgatttgaatgaactctgtacttggtttatgcaaacaacagaaacacagtctctttcactagttagaaaagcaaatgcccgaaaccctttggaagtaataaataccaggggaatcaaattagggaccaaatattctgactttaatgccagccccttcagaaagcactttaaaaaatttgcactctcttctccttcaaaatcagcagagaaattgcatatactgcataaagtggctaactctccactcttaaatgtgaaaagtaatttagcaatagctagattaaaaaggactgagtttaagaggttgcatcatgaaaggtggaaaagagagggaaagctgcacaaccatggaacagttgactggaactctaaaaggagaaacttaagatttttctgccagaaccaatttttaaataagactgagggagaaacaaatgctgacatcccactccaaggaaaaagcatagtagataatcagtgtgttttgccacctgagatcaggggtgacttgcagcagagggtagtaatgcctgacttcaaaatacatgctagttttgagaataaatttaagtcagaagcaaaagagaatggaacaaattgcagccaaaaagactttcaaaagggaccaagactagaaaatgtatgtcctaatagttggaggtcaaaaaccttaaaagactgtagaatatttttgaggaagctcaactgtcttgaacacagaaatacttttaagctaaatacaatcatttactctcctgaatctactgacagtggaaatactcatcagactcatatggaagaatcaaagcgctttactttaagatctcattctgctaggcaaaattcttttaaaaagcaatctaaagaaatagaaaatgctaacacaaataatccttcagctgatgaatttgctgaccatcttggcaatagtaaattaagcaaatgtgttaactttgacaagaatcctgatagttttgaagttcttagcaatttgaacaaaagaaaaagaccaccatggaagatcacagaaatgtcaacaaaaagacataaacgacagtcttgcaacagtggacaaatggcaaactatttttccaaatccctagcatgctacaagtgaaaactgatgagaaactgaatgtgtctgatgagaatacagcaagttgccctttgagccccattaagatgtgccttaatcgtcccattgaatggaatctgaatttgacaacagcatctctaacgagctgtacagttcataaccaaaatctcaaaagcgaagagaaatagattgcagttcttcttgcactatctttattttgtatgtcagtattccttctgaacaataagcatttatcaattgatcttgaagtatttctagtcctgtgatttgtctttatattaaatcattagcattaatcattttgattatattctttatatgttttttttacatgttttacatcagatcattgtggaattttgtaaacggattttgatgtttctcttttagtggtattatgtgaattttttatgccctaagtttaaatacgtaattgtccctagttttatttctgtgcacaaagttttaatatataacacattgtgatttataaagctagtattgtaaagatttgtgatgataacctgacccatgagcagttgtaaaacaggtggataccaactacctcgaagcaaattggtgaaagaaaaggcaaaggtatctcttagaagtaaatctccttcaacgttatatatgtacagaagaaaaaaagttgatcatagctttttgtcaagtagcatgtttcccattcacaggaaaatgtgagcttatcagttctttctctgtattttaaatctaagtctgtgggctttaagagcaatggcacaattgcatgtttactgttcagcaaatctgtgcctcttgatagagaaaaatactatgtggtttctgtaagttaccagttttgaatgaaaaatggtaaatggatttacatctgttttattgtaccttagccttttattttaaagttaaagggatgacttttaaaagcaggacattccctacctttaatagtgcaaagcacagtttcagcaatggctacatgactatgtctaaaaactgaatactcagaatactaaaggtttggtgcttaaatttatttttcccatgccagagaaagcaagctttggtatggtaaaccacatgagaacatggctcctttctttttggatagcctggccatgtgtgaatgggattttagcttattatgtttctaagacttttccttacagcacacttaatgtaccttttcagtccttctcccaaccccctgcaaattgtctttaaaacaacaacacataaggaatctgaagcacaggagaacacagagccaacaaacagaatgaagaacaatcatctatttttaactgactttctatcattaccatttttccttttgcttaataactatcttgctttgaaactttgactccttttataagttctatgaggcacatatgtatagcaatttggttctaaaaaccagtgatcttactttagctccatcttaaaatttcaccttaagtaaatggcctctagtagatgataagcctaaaaaaagcacaattattaaaacaaacagatccatgttaggacatttctgaataataaagagaaaaggtgtttcgttgggtattgcagaaaagaggaccaatttcatatagtacaagtttcgtaagtcaggccaagtgtcaatttcaaaagacaagaaatgaaattgacagtgaatagtgctcataaattggtagcgtatataaagagaagttcctgtcacattatattcccactagaattattatccacagtaaataaatattattttgttatgccaaaaatatagcgagcagcttcatggttaataatacatttatgttgacacctccctaatccaggaaacattcacaaacaaggactcccatatacaaatactttaggaagagagatttcccaggcagatatcaccaaaaatgttttcactgtaggaatcacaaaataagtttttgtcaaaataactgttgttgaacgttatactggtcttcctcactggtgattgataagctcctttctagccagtttgtggtacttccttcattttccctagaaatgttacttgttaaatgtgtcctcaggcggtttcatctttgttgattctgcccatctaagtcataagcttctcaaatgcaagctactagctagttacacttgtaagttttccataatgacatgattttaaacataaagagttcataagaatcacttggagagactatttaaaaatgagattcctaggcccacctcagattgtgataaatctgtgtgactgactgatgcacactttttctggactataataactgatgctgctctactgctttaatacaggccaaagtaacgtggaagcgcacagcagaaaatcttcagaaagacatcaggtttgttctgattttgacaagggtaacttcttctttattaaagcaaataactggacataatcttaaaggattccacctccatcgtctttcctaacttagatcttcattgagaaattgggcaaggttaagtttacttttttctagtgctgcggttttggctcgtcttggtagtctcatcttcatttctgattctggttctggaacttcatgatcactaaatagatgttgaaaatacacgaatttagatacaagctttaaaaccagtttatttataaataaaacttttttgtttctgactcacattctatcagtgtttaattgatagcctgattccattgacttagcttaaaactaaaatctcaatgtcaaaaaaacactgacttggctatctagcaaagtgaatcagggaaaatctagctaatgattttatatactataacagaacctggtgttatacaggaaaaaaagccacaaacttgtaatgaagcttgtaattaaacgaggaccataactgtccaaaagagatttctttgaaactcaagaagtgacaaaaaaattaagttctctctcttgatttaagcaataaattccaaaaacatagtaaaaaacaagtttccccccaaaaaagacaaatttaatcaacagtgtaaaactatgtactgaaaatacacacaatacaattttgcaaatgaatacaagacagctaccaactttcagctctaacagtggcttgactgacagaagccaaaaataaaacactctaccacacaatatacccaaattatagacagaattattctatcagtatgtaagtgtagagaacccaaatattatcaaaatcaagagtttgctaactgaagatcaaagaggagtcacatcatgtaattaaaaattgaaacaacatattaaagatagtactaaagaccatgccagctaataggcaaaagcaaacacgccgtaagaagtcaaatgctcttgatgatggaattttagactatatacctaagacagctatttatagttttcactatcttgttatatattctctctcattcgcaagaaaattagtttttttctacttgtagaaataaaaagtgaagataggcctccatatattctagacatgcatgacatacctttcagagtcggcttcagcagtctgacacctcctgttcgtcctagctgaaactgtcacttttctctgtccttgaagatagtataattcattatcaggatttattatcagttgctttttgtttttaatctagtttctaggctaactaaatcctttgtcttcaacacaacaatcctttcaacacatgtatctcctacttgttctagccatcttggtaccagttatcactgccacagaaaaaggaacccaagcaagattaaaacttaatttattttgtaagcactaataatgagtaagggaaaataaggaaatttcaagcaagttaaaagaaggcaaattttagttcaatgtatttgaggacagtatatgaaaaatgtgttataatgaagtacctctattattgctatagcacaaagtctgtggagactcatgaaaattaagggttagaaaggtaggttaggtgcataaacaggtgctaaagaaacaacttttttttttctt

SEQ ID NO: 11149 - DNA, 1013 bp, Homo sapiens
  source 1..1013: mol_type = unassigned DNA
acgcagatggacaagggaagagagagaatggccgctgccgccgccgctgctgccgccgccgccgccgccgctcagtgccggagccctcggtgcgcggcggagagaagaggattccggcgggaactcgactcttggcgccaccgcctcatgcactgtgtaggttttgagagtattttagaagggctttatggaccacggctacgaagagacctcagtttatttgaaggattgtataccatctcttgattcttcacagtcaacaccaacagaggagctatcatctcagggccagtccaacactgataagattgaatgccaagcagaaaattacctaaatgcactctttcgaaagaaagatcttcctcagaactgtgatcctaacattcccctagttgctcaggaattaatgaaaaagatgatacgtcaatttgcgattgagtacatttcaaaaagtggtaaaactcaagagaatagaaatggttcaattggaccaagtatagtatgtaaaagtatccaaatgaatcaagcagaaaactcccttcaggaagagcaggaaggccccttagacctcactgtgaatcgaatgcaagaacaaaatactcagcaagcatgctacaagtgaaaactgatgagaaactgaatgtgtctgatgagaatacagcaagttgccctttgagccccattaagatgtgccttaatcgtcccattgaatggaatctgaatttgacaacagcatctctaacgagctgtacagttcataaccaaaatctcaaaagcgaagagaaatagattgcagttcttcttgcactatctttattttgtatgtcagtattccttctgaacaataagcatttatcaattgatcttgaagtatttctagtcctgtgatttgtctttatattaaatcattagcattaatcattttgattatattctttatatgttttttttacatgttttacatcagatcattgtggaattttgtaaacggattttgatgtttctcttttagt

SEQ ID NO: 11150 - DNA, 486 bp, Homo sapiens
  source 1..486: mol_type = unassigned DNA
gattgtataccatctcttgattcttcacagtcaacaccaacagaggagctatcatctcagggccagtccaacactgataagattgaatgccaagcagaaaattacctaaatgcactctttcgaaagaaaggggatggagtgttagatctctctacaaagaaaaccagcataaaatctgaagagtcatccatatgtgatccttcttctgaaaattcagtggctggcatgctacaagtgaaaactgatgagaaactgaatgtgtctgatgagaatacagcaagttgccctttgagccccattaagatgtgccttaatcgtcccattgaatggaatctgaatttgacaacagcatctctaacgagctgtacagttcataaccaaaatctcaaaagcgaagagaaatagattgcagttcttcttgcactatctttattttgtatgtcagtattccttctgaacaataagcatttatcaattgatcttgaa

SEQ ID NO: 11151 - DNA, 4984 bp, Homo sapiens
  source 1..4984: mol_type = unassigned DNA
tccccacctcccatccccattcaactgcaattccctctttttggttggatctgaatcgttttgcctcaaacttctgggcttggggctctcaccctgtggattgtttagggtgacaggaatggtgggactcccgaccttgctgcagtcgcttttttttttttctttttttgcctaagacgaatgcatagagctgttatccagcaggttttgagagtattttagaagggctttatggaccacggctacgaagagacctcagtttatttgaagactgtgaaccagaagagctgactgactggtctatggatgaaaaatgttcattttgtaacctacagagagaagcagtcagtgattgtataccatctcttgattcttcacagtcaacaccaacagaggagctatcatctcagggccagtccaacactgataagattgaatgccaagcagaaaattacctaaatgcactctttcgaaagaaagatcttcctcagaactgtgatcctaacattcccctagttgctcaggaattaatgaaaaagatgatacgtcaatttgcgattgagtacatttcaaaaagtggtaaaactcaagagaatagaaatggttcaattggaccaagtatagtatgtaaaagtatccaaatgaatcaagcagaaaactcccttcaggaagagcaggaaggccccttagacctcactgtgaatcgaatgcaagaacaaaatactcagcaaggggatggagtgttagatctctctacaaagaaaaccagcataaaatctgaagagtcatccatatgtgatccttcttctgaaaattcagtggctgggagactacacagaaacagagaggactatgtggaaagaagtgctgagtttgcagatggtttgctctcaaaagctttgaaagacattcagtctggagcactggacataaataaagcaggcatactttatggcatacctcaaaaaactttacttcttcacttagaagccttaccagcagggaagcctgcatcttttaaaaacaaaactcgagatttccatgatagttattcatataaggacagtaaagaaacttgtgcagtgctgcaaaaagtagccttgtgggcaagagctcaagcagagcgcacagaaaaaagtaaactcaatctacttgaaacctcagaaataaaattcccaacagcttccacttacctccatcagctaactctacagaaaatggtcactcagtttaaagaaaaaaatgaaagcctccaatatgaaacttcaaatcctactgtacagttaaaaattcctcagctacgagtaagttctgtctcaaaatcacaacctgatggttctggtctgttggatgttatgtatcaagtttccaaaacctcttcagtcctagaaggatcagctctccaaaaactgaaaaatatactccctaaacagaacaaaatagaatgttctgggcctgtaactcactcaagtgttgactcttactttctacatggggacctctctcctttgtgtcttaattctaaaaatggaacagttgatggaacctctgaaaatactgaagatggattagatcgaaaagacagtaagcagcccaggaaaaaacgtggccgctatcggcaatatgatcatgaaataatggaagaagctattgcaatggtaatgagcggaaaaatgagtgtttccaaagcacaaggaatttatggggtacctcacagcactttagaatacaaggtaaaagaaagatctggaacactgaagactcctccgaagaagaaactacgattaccagacactgggttatataatatgacagattcagggactggcagctgcaaaaacagcagcaagcctgtgtagattacttgttaggaaaatgtttgtgagtgtgtgtgtgtgtgtgtgtttgcgtgtgtgtgtatgtgcacaggtgtgtatttgtgtgtctatatacacacgtgggaattacaaatgctcactctgacaggagacatgaaattttacagttcaaaaaccacttacatgccttttgaaaaaaagttttattcagggttttcactgtggacagaattatatagttgcttacttaattctgatagtttgtatttaatccttgtataaataggtgaaaaagattcaggttttctttagtagtcaatagcataaagcgttgtgggaaaacgagtaattgtcaagtgaaacatttttattggtgaaagaccattccagccattcagttgaaccatcttataatggaaatatgatattcatagtttataaacattctatacaacagacttaacacttgttgtatgtatgtcaagcaaccaatcaaagtttaaatagctatctccatactaagaaaaattaatatatacagtattagtacacgacagtgcattctatgaaatacaaaatgcactcaagtgcatccaccaggaatagaaaagaaaaccttaaaggatatgtataatgaaatttaatatttatcatttaatagttgatttagcaagaagttggggtttataaggtatatactttaaaaaaactgacacatagttaaccccagcagctatagaaccctttaatataataagatggagtactaagaacaaaaaataatttaaatttaattattaaaataatttagttttgtttttcatttgaaaaataagctaatgtgtaaggttagaaaagaaagttggaatgcaacttagagcatgtttataatgtgcacagaaaaagcttgagaatgataattttggtttaaatgtgctggttagttgatgttatgactactttaaattttaaggattgtgacacactcctactattgaaaaacctcagtgtaactttaatatatttgctgctgtgacatttcaaaacattttcagtttatcaaaatgaattgcagatttcattttggtgggcgatacattatcattttgctaataaccaaatttgcagtttgttcagggtcttgaatagatttacaaatatttaacactgaagctgttttgaactttcagtaatgtaaactctctactaattgggtagttagaagctgggcagtgcattttaacttttactagactcataagagagactggtcatttttacctagcagttttaaaatatgggtcaaagtatccttgttggatttatggagtatgcaactgtagtggtaaaatgttataaagcatatgccttcatataaagaatagggatttgctttatgtattcaaaattctctgagtgccccctttctctgttaaaattcaggttctgatcatttttctaagccagttttcctaagtccaaaaggaatacttttagctgaatttaaaaaataagtgcaccttgtcaaatgcttgtgtttttacacttgtgtttgtgtgtatttaataatcatatatacgtgtaatactaaagagattttcagctattaaattttaaaactgcttacatgtttaaagaaactgaagagtgagaaactacacaaccaagcagttatttggtctctgagatctatacttaaccctcttcagctattaatgttacctgcacactagggtatgaatcctcttttttttttttttcaccccaagaaaatatacataatagattacagaacagcagatgtcagggtcatctttctttttaaagaattaagccatattttgtgagggccagaacttgcattatttagtatatttcccccttcccccaatggaaagcaaagttaaaggtaaagtacatatttcaaaacaattttattgacctctttatacagaattttacttggaaaactttgggggctttgaatgcattacataatatttatattgtattgagcttttttattcctcacactatatttacattaataaattgattgagaagtttatagtaaagggaaacttacagaacacttttgtatcatttaaaagatgacctgaccaaaaactttacaggattcataaatcagggatcattttgctattgacttcacagtaatcagtagttttataggtaatattatagttaatttgcagcattttagtacttgtattatttatttttggtcagaaatagtaaattaaaatattttttgatagtttataggtaataatcaacccataacttttaaaagaaacaaaacatttctattattgagttaacatttgattatacaaactaggaaaggcagggaaattccccttctccccagtgattctattaagatgacctttatgttaaactttcaaagtactttatgaatttagttaccagttactatttattaattgacaattttctgaaaaatcccgtttcagcagacttaatgaaggtgaaagcaacccttatgtgctttctacttatttgaatgttcctcaagtattttatattaaaaaaaaaaagaaggaaaagagaaaacagtgcctctgtttttagaaaactactgctcagtaaagttgtttaaaccatttctggtagctaatgacaattttatattaaattgtatactaactttagtgagactgatttttttagttgtttacagtacaaatacttgtatttgttttttaattgcagtatttccaatgtcgcagtaatttagtaaaactctgtggctgccttgattttgacagattttgttaatataaactgattgttaggcaattagttatatttatgcataaatcaattgcactataattcatgaattatttattacaatattttctaatgaattcatgtatctgtcttgtgttgtaaatgtactgtaattctgttcctactttgtgttgttatatatctaaatctgattgtatgaattttaattgttcagttaacgtgtttctaggttgtaatttgtagtaaagcacttcaatgcttttgcacttaaatttacaacactgttggtgtgtgattgatttactcattcagtaaaagaaaaaaagaaaagaaaagaaaaaaactga

SEQ ID NO: 11152 - DNA, 500 bp, Homo sapiens
  source 1..500: mol_type = unassigned DNA
gcagatggacaagggaagagagagaatggccgctgccgccgccgctgctgccgccgccgccgccgccgctcagtgccggagccctcggtgcgcggcggagagaagaggattccggcgggaactcgactcttggcgccaccgcctcatgcactgtgtaggttttgagagtattttagaagggctttatggaccacggctacgaagagacctcagtttatttgaagactgtgaaccagaagagctgactgactggtctatggatgaaaaatgttcattttgtaacctacagagagaagcagtcagtgattgtataccatctcttgattcttcacagtcaacaccaacagaggagctatcatctcagggccagtccaacactgataagattgaatgccaagcagaaaattacctaaatgcactctttcgaaagaaagctgattcaagcatctgggtctccaagaggtctcctaccaatggttgggtgagtgttcttggatatt

SEQ ID NO: 11153 - DNA, 5009 bp, Homo sapiens
  source 1..5009: mol_type = unassigned DNA
aacccccctccggggggcgcgcgctccggggctcgcgccgagggctcgcgcccctgcctcgtgcctgcgctgctcgtatgtaaatgagggcgcgtgacgcgggacgcagatggacaagggaagagagagaatggccgctgccgccgccgctgctgccgccgccgccgccgccgctcagtgccggagccctcggtgcgcggcggagagaagaggattccggcgggaactcgactcttggcgccaccgcctcatgcactgtgtaggttttgagagtattttagaagggctttatggaccacggctacgaagagacctcagtttatttgaagactgtgaaccagaagagctgactgactggtctatggatgaaaaatgttcattttgtaacctacagagagaagcagtcagtgattgtataccatctcttgattcttcacagtcaacaccaacagaggagctatcatctcagggccagtccaacactgataagattgaatgccaagcagaaaattacctaaatgcactctttcgaaagaaagatcttcctcagaactgtgatcctaacattcccctagttgctcaggaattaatgaaaaagatgatacgtcaatttgcgattgagtacatttcaaaaagtggtaaaactcaagagaatagaaatggttcaattggaccaagtatagtatgtaaaagtatccaaatgaatcaagcagaaaactcccttcaggaagagcaggaaggccccttagacctcactgtgaatcgaatgcaagaacaaaatactcagcaaggggatggagtgttagatctctctacaaagaaaaccagcataaaatctgaagagtcatccatatgtgatccttcttctgaaaattcagtggctgggagactacacagaaacagagaggactatgtggaaagaagtgctgagtttgcagatggtttgctctcaaaagctttgaaagacattcagtctggagcactggacataaataaagcaggcatactttatggcatacctcaaaaaactttacttcttcacttagaagccttaccagcagggaagcctgcatcttttaaaaacaaaactcgagatttccatgatagttattcatataaggacagtaaagaaacttgtgcagtgctgcaaaaagtagccttgtgggcaagagctcaagcagagcgcacagaaaaaagtaaactcaatctacttgaaacctcagaaataaaattcccaacagcttccacttacctccatcagctaactctacagaaaatggtcactcagtttaaagaaaaaaatgaaagcctccaatatgaaacttcaaatcctactgtacagttaaaaattcctcagctacgagtaagttctgtctcaaaatcacaacctgatggttctggtctgttggatgttatgtatcaagtttccaaaacctcttcagtcctagaaggatcagctctccaaaaactgaaaaatatactccctaaacagaacaaaatagaatgttctgggcctgtaactcactcaagtgttgactcttactttctacatggggacctctctcctttgtgtcttaattctaaaaatggaacagttgatggaacctctgaaaatactgaagatggattagatcgaaaagacagtaagcagcccaggaaaaaacgtggccgctatcggcaatatgatcatgaaataatggaagaagctattgcaatggtaatgagcggaaaaatgagtgtttccaaagcacaaggaatttatggggtacctcacagcactttagaatacaaggtaaaagaaagatctggaacactgaagactcctccgaagaagaaactacgattaccagacactgggttatataatatgacagattcagggactggcagctgcaaaaacagcagcaagcctgtgtagattacttgttaggaaaatgtttgtgagtgtgtgtgtgtgtgtgtgtttgcgtgtgtgtgtatgtgcacaggtgtgtatttgtgtgtctatatacacacgtgggaattacaaatgctcactctgacaggagacatgaaattttacagttcaaaaaccacttacatgccttttgaaaaaaagttttattcagggttttcactgtggacagaattatatagttgcttacttaattctgatagtttgtatttaatccttgtataaataggtgaaaaagattcaggttttctttagtagtcaatagcataaagcgttgtgggaaaacgagtaattgtcaagtgaaacatttttattggtgaaagaccattccagccattcagttgaaccatcttataatggaaatatgatattcatagtttataaacattctatacaacagacttaacacttgttgtatgtatgtcaagcaaccaatcaaagtttaaatagctatctccatactaagaaaaattaatatatacagtattagtacacgacagtgcattctatgaaatacaaaatgcactcaagtgcatccaccaggaatagaaaagaaaaccttaaaggatatgtataatgaaatttaatatttatcatttaatagttgatttagcaagaagttggggtttataaggtatatactttaaaaaaactgacacatagttaaccccagcagctatagaaccctttaatataataagatggagtactaagaacaaaaaataatttaaatttaattattaaaataatttagttttgtttttcatttgaaaaataagctaatgtgtaaggttagaaaagaaagttggaatgcaacttagagcatgtttataatgtgcacagaaaaagcttgagaatgataattttggtttaaatgtgctggttagttgatgttatgactactttaaattttaaggattgtgacacactcctactattgaaaaacctcagtgtaactttaatatatttgctgctgtgacatttcaaaacattttcagtttatcaaaatgaattgcagatttcattttggtgggcgatacattatcattttgctaataaccaaatttgcagtttgttcagggtcttgaatagatttacaaatatttaacactgaagctgttttgaactttcagtaatgtaaactctctactaattgggtagttagaagctgggcagtgcattttaacttttactagactcataagagagactggtcatttttacctagcagttttaaaatatgggtcaaagtatccttgttggatttatggagtatgcaactgtagtggtaaaatgttataaagcatatgccttcatataaagaatagggatttgctttatgtattcaaaattctctgagtgccccctttctctgttaaaattcaggttctgatcatttttctaagccagttttcctaagtccaaaaggaatacttttagctgaatttaaaaaataagtgcaccttgtcaaatgcttgtgtttttacacttgtgtttgtgtgtatttaataatcatatatacgtgtaatactaaagagattttcagctattaaattttaaaactgcttacatgtttaaagaaactgaagagtgagaaactacacaaccaagcagttatttggtctctgagatctatacttaaccctcttcagctattaatgttacctgcacactagggtatgaatcctcttttttttttttttcaccccaagaaaatatacataatagattacagaacagcagatgtcagggtcatctttctttttaaagaattaagccatattttgtgagggccagaacttgcattatttagtatatttcccccttcccccaatggaaagcaaagttaaaggtaaagtacatatttcaaaacaattttattgacctctttatacagaattttacttggaaaactttgggggctttgaatgcattacataatatttatattgtattgagcttttttattcctcacactatatttacattaataaattgattgagaagtttatagtaaagggaaacttacagaacacttttgtatcatttaaaagatgacctgaccaaaaactttacaggattcataaatcagggatcattttgctattgacttcacagtaatcagtagttttataggtaatattatagttaatttgcagcattttagtacttgtattatttatttttggtcagaaatagtaaattaaaatattttttgatagtttataggtaataatcaacccataacttttaaaagaaacaaaacatttctattattgagttaacatttgattatacaaactaggaaaggcagggaaattccccttctccccagtgattctattaagatgacctttatgttaaactttcaaagtactttatgaatttagttaccagttactatttattaattgacaattttctgaaaaatcccgtttcagcagacttaatgaaggtgaaagcaacccttatgtgctttctacttatttgaatgttcctcaagtattttatattaaaaaaaaaaagaaggaaaagagaaaacagtgcctctgtttttagaaaactactgctcagtaaagttgtttaaaccatttctggtagctaatgacaattttatattaaattgtatactaactttagtgagactgatttttttagttgtttacagtacaaatacttgtatttgttttttaattgcagtatttccaatgtcgcagtaatttagtaaaactctgtggctgccttgattttgacagattttgttaatataaactgattgttaggcaattagttatatttatgcataaatcaattgcactataattcatgaattatttattacaatattttctaatgaattcatgtatctgtcttgtgttgtaaatgtactgtaattctgttcctactttgtgttgttatatatctaaatctgattgtatgaattttaattgttcagttaacgtgtttctaggttgtaatttgtagtaaagcacttcaatgcttttgcacttaaatttacaacactgttggtgtgtgattgatttactcattcagt

SEQ ID NO: 11154 - DNA, 1895 bp, Homo sapiens
  source 1..1895: mol_type = unassigned DNA
ggcacttccggtctcgtgccgccttcccaggaccctcagggagagcgggcagccttccaggtggacaggtaacccaggtttttctgccttttatgtgccatttgcaaaggctttatactctttgacaaacagacgctttccagtttggactatcagtcatgctgggcatgcgttggctcccaaagacaagaagattcttacaacatcagaggattcaaacgctcaagaaattaaggacatttatggactaaatggacaaatagagcacaaactagctttcctgagaactcatgtgccaaaggacatgaaacttgtgctcattggccattcaataggcagctatttcacacttcagatgctgaagcgagtccctgagctcccggtaattcgtgcctttctgctctttccaacaattgaacgaatgtctgagtcacccaatggcagaattgccactccacttttgtgctggtttcgatatgttctctatgttactggctacttattattgaaaccgtgtcctgagacaatcaagtccttgctaatcagaaggggccttcaagtaatgaacctagagaatgaattttcaccattgaatatattagaaccattctgccttgctaatgctgcctaccttgggggccaagaaatgatggaggtggtgaagagagatgacgaaaccataaaggagcatttatgtaagcttacattttattatggtactatagatccttggtgtccaaaagagtactatgaagacattaagaaggattttccagaaggagacattcgactctgtgagaaaaacatacctcatgctttcatcacccattttaaccaggaaatggcagacatgattgctgactccctaaaggatgacttgtccaaaataggaaatccctcatggcattatcattccctaaggacaatgagatgtccctccgctcaaatcctaaagccccctgatgaaagatttggctctgatttgctgccaacttattggtggaagaatcagatttcaagagactgaagttcattctgtttcattagggattagactaaaatggacaaacagtggaagaaatccattttccagaagcagctctgcctgtatgtcccagtcaaccacatggatggtctttgtgaaagttttaacttcctgcagagttaccgagtgctcagcgattgagctttgaccacacccgtgtttgttcctagtctgttcccagccataagcatctccacaagccctctgtggcttgtgtggcctgatgtccatggccaccaagggcctctcaccatacgcttctccactcaacctttggagagacacggaccaccaaaggcttgatttttcttcatcctacattatattcaaaacaaacaggctgggtgccgtagctcacacctgtgatcccagcaccttgggaggatgagctgggaagatcgtttgaggctaggagtttgagaccagcccgtgcaaaaaacgagacctcgtgtctaaaataatttttaaaaaagagcaaaaaaaaaaagcaatttcagattaaaggagactgaagagacatgacaattggacacaacatctgattctgaattggatgtttttgttataaaagacattgttgagacaatttgcacaacttgaatgaggtctgaagattagctgggagtaagatgccactgttaattttctgatttcagtggttgtactgggaagaagtaagagagtgtccttgtttgtactggagacactgaggtatctgggggtgaggggcatcatgtctgtttactgtcagatggttgaggggaaaataatgttctttgtacttgcagattttttggaagtttgagatgttttagaatttgtaaaaataattatttttaaaaccccacca

SEQ ID NO: 11155 - DNA, 2045 bp, Homo sapiens
  source 1..2045: mol_type = unassigned DNA
acctgaggggggcacttccggtctcgtgccgccttcccaggaccctcagggagagcgggcagccttccaggtggacagaaatggactcagaactcaaggaagaaattcctgtgcatgaggaattcattttgtgtggtggagccgaaacccaggttctaaaatgtgggccctggacagacctctttcatgatcaaagtgtcaaaaggcctaagctgcttattttcattattcctggtaacccaggtttttctgccttttatgtgccatttgcaaaggctttatactctttgacaaacagacgctttccagtttggactatcagtcatgctgggcatgcgttggctcccaaagacaagaagattcttacaacatcagaggattcaaacgctcaagaaattaaggacatttatggactaaatggacaaatagagcacaaactagctttcctgagaactcatgtgccaaaggacatgaaacttgtgctcattggccattcaataggcagctatttcacacttcagatgctgaagcgagtccctgagctcccggtaattcgtgcctttctgctctttccaacaattgaacgaatgtctgagtcacccaatggcagaattgccactccacttttgtgctggtttcgatatgttctctatgttactggctacttattattgaaaccgtgtcctgagacaatcaagtccttgctaatcagaaggggccttcaagtaatgaacctagagaatgaattttcaccattgaatatattagaaccattctgccttgctaatgctgcctaccttgggggccaagaaatgatggaggtggtgaagagagatgacgaaaccataaaggagcatttatgtaagcttacattttattatggtactatagatccttggtgtccaaaagagtactatgaagacattaagaaggattttccagaaggagacattcgactctgtgagaaaaacatacctcatgctttcatcacccattttaaccaggaaatggcagacatgattgctgactccctaaaggatgacttgtccaaaataggaaatccctcatggcattatcattccctaaggacaatgagatgtccctccgctcaaatcctaaagccccctgatgaaagatttggctctgatttgctgccaacttattggtggaagaatcagatttcaagagactgaagttcattctgtttcattagggattagactaaaatggacaaacagtggaagaaatccattttccagaagcagctctgcctgtatgtcccagtcaaccacatggatggtctttgtgaaagttttaacttcctgcagagttaccgagtgctcagcgattgagctttgaccacacccgtgtttgttcctagtctgttcccagccataagcatctccacaagccctctgtggcttgtgtggcctgatgtccatggccaccaagggcctctcaccatacgcttctccactcaacctttggagagacacggaccaccaaaggcttgatttttcttcatcctacattatattcaaaacaaacaggctgggtgccgtagctcacacctgtgatcccagcaccttgggaggatgagctgggaagatcgtttgaggctaggagtttgagaccagcccgtgcaaaaaacgagacctcgtgtctaaaataatttttaaaaaagagcaaaaaaaaaaagcaatttcagattaaaggagactgaagagacatgacaattggacacaacatctgattctgaattggatgtttttgttataaaagacattgttgagacaatttgcacaacttgaatgaggtctgaagattagctgggagtaagatgccactgttaattttctgatttcagtggttgtactgggaagaagtaagagagtgtccttgtttgtactggagacactgaggtatctgggggtgaggggcatcatgtctgtttactgtcagatggttgaggggaaaataatgttctttgtacttgcagattttttggaagtttgagatgttttagaatttgtaaaaataattat

SEQ ID NO: 11156 - DNA, 2116 bp, Homo sapiens
  source 1..2116: mol_type = unassigned DNA
tattagaaccattctgccttgctaatgctgcctaccttgggggccaagaaatgatggaggtggtgaagagagatgacgaaaccataaaggagcatttatgtaagcttacattttattatggtactatagatccttggtgtccaaaagagtactatgaagacattaagaaggattttccagaaggagacattcgactctgtgagaaaaacatacctcatgctttcatcacccattttaaccaggaaatggcagacatgattgctgactccctaaaggatgacttgtccaaaatgtaaattggcctgaggaacaagcccccactgccagtacatggaggcagtcagtgtactagacttagtaggtaaatgtttaattttgaagactgatattagaaatgaagaaagtgagaacctttgtcttacaaaccaactctccgctcgccatgttataggctgaagtaaacacagttgatgaatcattccataggtttaaccatacattttccaagactcagggaacacagtgatctacacagagtcttgtgtttgcacaagatgcccagtggcaccatatggtttattttggtaggcaggatctttgcagatgaaaaaaaaatctacatgtacttgattttaattgagttacattgtagaataggctcctctggaggaaattatgaaatacctactagaaaatgtaaaataaatcagtgaatgttaagagtatagttagatatgtgaagtgtatgagattatgacaaggatacactcatgttccaggagcaggaagtgaacctgggtctcctgtaagacagaagatgaagatgagcccaggctaacttagcacagatcttggctgagatcatcaatgtgacgtctaatgtacctgcactagacagagaataaagttcaccagacattactctggtcagctaaccagataaagaattgttgaaggaccccaactgtgcctcctgccacaggacaaccagcaagttctatgctgagccttagcctcccaggttataagctccctgcaggctcctcctctccagagccaggatggagaggcactgggctgtcccaaagcaggcttggatgtgccaacgtacagttgctccttctgtaattcttgcactaaaactccattaaagaccatcaatgagccaaatagtgtgctagccattgaggatggagttcttagctacttaatgattcttttcttctggaaatcttctagtgaataatttttaaaagcttcttttaaactgctcagtaaaacattgccatacattaactctccatttctgcattaacttcatttgctggaaagaaattattttgttaatgaaccaaacccagccattaagttatgtgaattcaccttctctagacacattgaggtatggcagagaagacacatattccctggcctagagtgggctgacaatattgctgcctcccctaaattgactcaatcttgagaaccacatactgcagtgacagttgatcatggatcagaaatattcctttttctcctagaggaaatccctcatggcattatcattccctaaggacaatgagatgtccctccgctcaaatcctaaagccccctgatgaaagatttggctctgatttgctgccaacttattgggattagactaaaatggacaaacagtggaagaaatccattttccagaagcagctctgcctgtatgtcccagtcaaccacatggatggtctttgtgaaagttttaacttcctgcagagttaccgagtgctcagcgattgagctttgaccacacccgtgtttgttcctagtctgttcccagccataagcatctccacaagccctctgtggcttgtgtggcctgatgtccatggccaccaagggcctctcaccatacgcttctccactcaacctttggagagacacggaccaccaaaggcttgatttttcttcatcctacattatattcaaaacaaacaggctgggtgccgtagctcacacctgtgatcccagcaccttgggaggatgagctgggaagatcgtttgaggctaggagtttgagaccagcccgtgcaaaaaacgagacctcgtgtctaaaataattttt

SEQ ID NO: 11157 - DNA, 2907 bp, Homo sapiens
  source 1..2907: mol_type = unassigned DNA
acctgaggggggcacttccggtctcgtgccgccttcccaggaccctcagggagagcgggcagccttccaggtggacagaaatggactcagaactcaaggaagaaattcctgtgcatgaggaattcattttgtgtggtggagccgaaacccaggttctaaaatgtgggccctggacagacctctttcatgatcaaagtgtcaaaaggcctaagctgcttattttcattattcctggtaacccaggtttttctgccttttatgtgccatttgcaaaggctttatactctttgacaaacagacgctttccagtttggactatcagtcatgctgggcatgcgttggctcccaaagacaagaagattcttacaacatcagaggattcaaacgctcaagaaattaaggacatttatggactaaatggacaaatagagcacaaactagctttcctgagaactcatgtgccaaaggacatgaaacttgtgctcattggccattcaataggcagctatttcacacttcagatgctgaagcgagtccctgagctcccggtaattcgtgcctttctgctctttccaacaattgaacgaatgtctgagtcacccaatggcagaattgccactccacttttgtgctggtttcgatatgttctctatgttactggctacttattattgaaaccgtgtcctgagacaatcaagtccttgctaatcagaaggggccttcaagtaatgaacctagagaatgaattttcaccattgaatatattagaaccattctgccttgctaatgctgcctaccttgggggccaagaaatgatggaggtggtgaagagagatgacgaaaccataaaggagcatttatgtaagcttacattttattatggtactatagatccttggtgtccaaaagagtactatgaagacattaagaaggattttccagaaggagacattcgactctgtgagaaaaacatacctcatgctttcatcacccattttaaccaggaaatggcagacatgattgctgactccctaaaggatgacttgtccaaaatgtaaattggcctgaggaacaagcccccactgccagtacatggaggcagtcagtgtactagacttagtaggtaaatgtttaattttgaagactgatattagaaatgaagaaagtgagaacctttgtcttacaaaccaactctccgctcgccatgttataggctgaagtaaacacagttgatgaatcattccataggtttaaccatacattttccaagactcagggaacacagtgatctacacagagtcttgtgtttgcacaagatgcccagtggcaccatatggtttattttggtaggcaggatctttgcagatgaaaaaaaaatctacatgtacttgattttaattgagttacattgtagaataggctcctctggaggaaattatgaaatacctactagaaaatgtaaaataaatcagtgaatgttaagagtatagttagatatgtgaagtgtatgagattatgacaaggatacactcatgttccaggagcaggaagtgaacctgggtctcctgtaagacagaagatgaagatgagcccaggctaacttagcacagatcttggctgagatcatcaatgtgacgtctaatgtacctgcactagacagagaataaagttcaccagacattactctggtcagctaaccagataaagaattgttgaaggaccccaactgtgcctcctgccacaggacaaccagcaagttctatgctgagccttagcctcccaggttataagctccctgcaggctcctcctctccagagccaggatggagaggcactgggctgtcccaaagcaggcttggatgtgccaacgtacagttgctccttctgtaattcttgcactaaaactccattaaagaccatcaatgagccaaatagtgtgctagccattgaggatggagttcttagctacttaatgattcttttcttctggaaatcttctagtgaataatttttaaaagcttcttttaaactgctcagtaaaacattgccatacattaactctccatttctgcattaacttcatttgctggaaagaaattattttgttaatgaaccaaacccagccattaagttatgtgaattcaccttctctagacacattgaggtatggcagagaagacacatattccctggcctagagtgggctgacaatattgctgcctcccctaaattgactcaatcttgagaaccacatactgcagtgacagttgatcatggatcagaaatattcctttttctcctagaggaaatccctcatggcattatcattccctaaggacaatgagatgtccctccgctcaaatcctaaagccccctgatgaaagatttggctctgatttgctgccaacttattggtaagtgctgaatgagttactgtgctttggcatagcttctacatcacagcaagtgacttctcagaggggaaaagccaagctccagacaaggagtgctgttagcccaaggggaagagctaatagatacataggccgtaagcacagggctgtacacagatcctttattggcatctgcatgagaggcctagaaatcggatgttagaagctaggaatcatggctctgagcgccttgcatacaggagatactcactgatactaaatcaaggcatgtaaacaatactgggtaaatcatacctaccagaataaagagtaacattcagagcttttcttttatctgttattttaaatgttactccatatttcaaaagtctgcacgtatgaaattgtgtcttatttctggtttttagagcctaagaaagatactcattcttaattcctatttatcatctgaaaaccaaatgaatttttgaaataaatgttttaccagcatttc

SEQ ID NO: 11158 - DNA, 1179 bp, Homo sapiens
  source 1..1179: mol_type = unassigned DNA
acttccggtctcgtgccgccttcccaggaccctcagggagagcgggcagccttccaggtggacagaaatggactcagaactcaaggaagaaattcctgtgcatgaggaattcattttgtgtggtggagccgaaacccaggttctaaaatgtgggccctggacagacctctttcatgatcaaagtgtcaaaaggcctaagctgcttattttcattattcctgattcaaacgctcaagaaattaaggacatttatggactaaatggacaaatagagcacaaactagctttcctgagaactcatgtgccaaaggacatgaaacttgtgctcattggccattcaataggcagctatttcacacttcagatgctgaagcgagtccctgagctcccggtaattcgtgcctttctgctctttccaacaattgaacgaatgtctgagtcacccaatggcagaattgccactccacttttgtgctggtttcgatatgttctctatgttactggctacttattattgaaaccgtgtcctgagacaatcaagtccttgctaatcagaaggggccttcaagtaatgaacctagagaatgaattttcaccattgaatatattagaaccattctgccttgctaatgctgcctaccttgggggccaagaaatgatggaggtggtgaagagagatgacgaaaccataaaggagcatttatgtaagcttacattttattatggtactatagatccttggtgtccaaaagagtactatgaagacattaagaaggattttccagaaggagacattcgactctgtgagaaaaacatacctcatgctttcatcacccattttaaccaggaaatggcagacatgattgctgactccctaaaggatgacttgtccaaaatgtaaattggcctgaggaacaagcccccactgccagtacatggaggcagtcagtgtactagacttagtaggtaaatgtttaattttgaagactgatattagaaatgaagaaagtgagaacctttgtcttacaaaccaactctccgctcgccatgttataggctgaagtaaacacagttgatgaatcattccataggtttaaccatacattttccaagactcagggaacacagtgatctacacagagtcttgtgtttgcacaagatgcccagtggcaccatatg

SEQ ID NO: 11159 - DNA, 548 bp, Homo sapiens
  source 1..548: mol_type = unassigned DNA
acttccggtctcgtgccgccttcccaggaccctcagggagagcgggcagccttccaggtggacagattcaaacgctcaagaaattaaggacatttatggactaaatggacaaatagagcacaaactagctttcctgagaactcatgtgccaaaggacatgaaacttgtgctcattggccattcaataggcagctatttcacacttcagatgctgaagcgagtccctgagctcccggtaattcgtgcctttctgctctttccaacaattgaacgaatgtctgagtcacccaatggcagaattgccactccacttttgtgctggtttcgatatgttctctatgttactggctacttattattgaaaccgtgtcctgagacaatcaagtccttgctaatcagaaggggccttcaagtaatgaacctagagaatgaattttcaccattgaatatattagaaccattctgccttgctaatgctgcctaccttgggggccaagaaatgatggaggtggtgaagagagatgacgaaaccataaaggagcatttat

SEQ ID NO: 11160 - DNA, 566 bp, Homo sapiens
  source 1..566: mol_type = unassigned DNA
gtgacgtcacctgaggggggcacttccggtctcgtgccgccttcccaggaccctcagggagagcgggcagccttccaggtggacagaaatggactcagaactcaaggaagaaattcctgtgcatgaggaattcattttgtgtggtggagccgaaacccaggttctaaaatgtgggccctggacagacctctttcatgatcaaagtgtcaaaaggcctaagctgcttattttcattattcctgattcaaacgctcaagaaattaaggacatttatggactaaatggacaaatagagcacaaactagctttcctgagaactcatgtgccaaaggacatgaaacttgtgctcattggccattcaataggcagctatttcacacttcagatgctgaagcgagtccctgagctcccggtaattcgtgcctttctgctctttccaacaattgaacgaatgtctgagtcacccaatggcagaattgccactccacttttgtgctggtttcgatatgttctctatgttactggctacttattattgaaaccgtgtcctgagacaatcaagtcct

SEQ ID NO: 11161 - DNA, 493 bp, Homo sapiens
  source 1..493: mol_type = unassigned DNA
gtgccgccttcccaggaccctcagggagagcgggcagccttccaggtggacagaaatggactcagaactcaaggaagaaattcctgtgcatgaggaattcattttgtgtggtggagccgaaacccaggttctaaaatgtgggccctggacagacctctttcatgatcaaagtgtcaaaaggcctaagctgcttattttcattattcctggtgagcgtaaaagtctgggtaacccaggtttttctgccttttatgtgccatttgcaaaggctttatactctttgacaaacagacgctttccagtttggactatcagtcatgctgggcatgcgttggctcccaaagacaagaagattcttacaacatcagaggattcaaacgctcaagaaattaaggacatttatggactaaatggacaaatagagcacaaactagctttcctgagaactcatgtgccaaaggacatgaaacttgtgctcattggccattcaata

SEQ ID NO: 11162 - DNA, 826 bp, Homo sapiens
  source 1..826: mol_type = unassigned DNA
gaggggggcacttccggtctcgtgccgccttcccaggaccctcagggagagcgggcagccttccaggtggacagaaatggactcagaactcaaggaagaaattcctgtgcatgaggaattcattttgtgtggtggagccgaaacccaggttctaaaatgtgggccctggacagacctctttcatgatcaaagtgtcaaaaggcctaagctgcttattttcattattcctggtaacccaggtttttctgccttttatgtgccatttgcaaaggctttatactctttgacaaacagacgctttccagtttggactatcagtcatgctgggcatgcgttggctcccaaagacaagaagattcttacaacatcagagggtggcattcttgctgtcctctcgtggtggacacaggaggcaagccctcttgggactctcgcgggctctaccctcatgaccccatctgatcctaattacttcccaaagacccctctccacctcttaatagcatttgggcatagggtttcacctatggatttgggggccatataagcattcagaccattacagctggttttcacaattgaataaaatttggatttagggcatggaggtgggtgcagaggtacaacagacagaaagagtagcacagaagggagcaagatttaatagcgatgttactgctaagcagggccagtttgagagggactttgagagctggagagagagccaggactccatgctggaaggtttctaaatggaagaagtaataccatggagatgcaaactacctcctttaaatctgtgagaattctagcatgttcactgttc

SEQ ID NO: 11163 - DNA, 3663 bp, Homo sapiens
  source 1..3663: mol_type = unassigned DNA
gcggtactgtgacgtcacctgaggggggcacttccggtctcgtgccgccttcccaggaccctcagggagagcgggcagccttccaggtggacagattcaaacgctcaagaaattaaggacatttatggactaaatggacaaatagagcacaaactagctttcctgagaactcatgtgccaaaggacatgaaacttgtgctcattggccattcaataggcagctatttcacacttcagatgctgaagcgagtccctgagctcccggtaattcgtgcctttctgctctttccaacaattgaacgaatgtctgagtcacccaatggcagaattgccactccacttttgtgctggtttcgatatgttctctatgttactggctacttattattgaaaccgtgtcctgagacaatcaagtccttgctaatcagaaggggccttcaagtaatgaacctagagaatgaattttcaccattgaatatattagaaccattctgccttgctaatgctgcctaccttgggggccaagaaatgatggaggtggtgaagagagatgacgaaaccataaaggagcatttatgtaagcttacattttattatggtactatagatccttggtgtccaaaagagtactatgaagacattaagaaggattttccagaaggagacattcgactctgtgagaaaaacatacctcatgctttcatcacccattttaaccaggaaatggcagacatgattgctgactccctaaaggatgacttgtccaaaatgtaaattggcctgaggaacaagcccccactgccagtacatggaggcagtcagtgtactagacttagtaggtaaatgtttaattttgaagactgatattagaaatgaagaaagtgagaacctttgtcttacaaaccaactctccgctcgccatgttataggctgaagtaaacacagttgatgaatcattccataggtttaaccatacattttccaagactcagggaacacagtgatctacacagagtcttgtgtttgcacaagatgcccagtggcaccatatggtttattttggtaggcaggatctttgcagatgaaaaaaaaatctacatgtacttgattttaattgagttacattgtagaataggctcctctggaggaaattatgaaatacctactagaaaatgtaaaataaatcagtgaatgttaagagtatagttagatatgtgaagtgtatgagattatgacaaggatacactcatgttccaggagcaggaagtgaacctgggtctcctgtaagacagaagatgaagatgagcccaggctaacttagcacagatcttggctgagatcatcaatgtgacgtctaatgtacctgcactagacagagaataaagttcaccagacattactctggtcagctaaccagataaagaattgttgaaggaccccaactgtgcctcctgccacaggacaaccagcaagttctatgctgagccttagcctcccaggttataagctccctgcaggctcctcctctccagagccaggatggagaggcactgggctgtcccaaagcaggcttggatgtgccaacgtacagttgctccttctgtaattcttgcactaaaactccattaaagaccatcaatgagccaaatagtgtgctagccattgaggatggagttcttagctacttaatgattcttttcttctggaaatcttctagtgaataatttttaaaagcttcttttaaactgctcagtaaaacattgccatacattaactctccatttctgcattaacttcatttgctggaaagaaattattttgttaatgaaccaaacccagccattaagttatgtgaattcaccttctctagacacattgaggtatggcagagaagacacatattccctggcctagagtgggctgacaatattgctgcctcccctaaattgactcaatcttgagaaccacatactgcagtgacagttgatcatggatcagaaatattcctttttctcctagaggaaatccctcatggcattatcattccctaaggacaatgagatgtccctccgctcaaatcctaaagccccctgatgaaagatttggctctgatttgctgccaacttattggtaagtgctgaatgagttactgtgctttggcatagcttctacatcacagcaagtgacttctcagaggggaaaagccaagctccagacaaggagtgctgttagcccaaggggaagagctaatagatacataggccgtaagcacagggctgtacacagatcctttattggcatctgcatgagaggcctagaaatcggatgttagaagctaggaatcatggctctgagcgccttgcatacaggagatactcactgatactaaatcaaggcatgtaaacaatactgggtaaatcatacctaccagaataaagagtaacattcagagcttttcttttatctgttattttaaatgttactccatatttcaaaagtctgcacgtatgaaattgtgtcttatttctggtttttagagcctaagaaagatactcattcttaattcctatttatcatctgaaaaccaaatgaatttttgaaataaatgttttaccagcatttctgacctggtctggcctgatctctgtgttgggcaagagagggtacaatttgagcagttctcctgagttagactcggctcaaagtctctcttttaaagtgaaaagccacctttctcattgcttttttcataggtggaagaatcagatttcaagagactgaagttcattctgtttcattagggattagactaaaatggacaaacagtggaagaaatccattttccagaagcagctctgcctgtatgtcccagtcaaccacatggatggtctttgtgaaagttttaacttcctgcagagttaccgagtgctcagcgattgagctttgaccacacccgtgtttgttcctagtctgttcccagccataagcatctccacaagccctctgtggcttgtgtggcctgatgtccatggccaccaagggcctctcaccatacgcttctccactcaacctttggagagacacggaccaccaaaggcttgatttttcttcatcctacattatattcaaaacaaacaggctgggtgccgtagctcacacctgtgatcccagcaccttgggaggatgagctgggaagatcgtttgaggctaggagtttgagaccagcccgtgcaaaaaacgagacctcgtgtctaaaataatttttaaaaaagagcaaaaaaaaaaagcaatttcagattaaaggagactgaagagacatgacaattggacacaacatctgattctgaattggatgtttttgttataaaagacattgttgagacaatttgcacaacttgaatgaggtctgaagattagctgggagtaagatgccactgttaattttctgatttcagtggttgtactgggaagaagtaagagagtgtccttgtttgtactggagacactgaggtatctgggggtgaggggcatcatgtctgtttactgtcagatggttgaggggaaaataatgttctttgtacttgcagattttttggaagtttgagatgttttagaatttgtaaaaataattatttttaaaaccccaccatgctatctcctgca

SEQ ID NO: 11164 - DNA, 3807 bp, Homo sapiens
  source 1..3807: mol_type = unassigned DNA
gcggtactgtgacgtcacctgaggggggcacttccggtctcgtgccgccttcccaggaccctcagggagagcgggcagccttccaggtggacaggtaacccaggtttttctgccttttatgtgccatttgcaaaggctttatactctttgacaaacagacgctttccagtttggactatcagtcatgctgggcatgcgttggctcccaaagacaagaagattcttacaacatcagaggattcaaacgctcaagaaattaaggacatttatggactaaatggacaaatagagcacaaactagctttcctgagaactcatgtgccaaaggacatgaaacttgtgctcattggccattcaataggcagctatttcacacttcagatgctgaagcgagtccctgagctcccggtaattcgtgcctttctgctctttccaacaattgaacgaatgtctgagtcacccaatggcagaattgccactccacttttgtgctggtttcgatatgttctctatgttactggctacttattattgaaaccgtgtcctgagacaatcaagtccttgctaatcagaaggggccttcaagtaatgaacctagagaatgaattttcaccattgaatatattagaaccattctgccttgctaatgctgcctaccttgggggccaagaaatgatggaggtggtgaagagagatgacgaaaccataaaggagcatttatgtaagcttacattttattatggtactatagatccttggtgtccaaaagagtactatgaagacattaagaaggattttccagaaggagacattcgactctgtgagaaaaacatacctcatgctttcatcacccattttaaccaggaaatggcagacatgattgctgactccctaaaggatgacttgtccaaaatgtaaattggcctgaggaacaagcccccactgccagtacatggaggcagtcagtgtactagacttagtaggtaaatgtttaattttgaagactgatattagaaatgaagaaagtgagaacctttgtcttacaaaccaactctccgctcgccatgttataggctgaagtaaacacagttgatgaatcattccataggtttaaccatacattttccaagactcagggaacacagtgatctacacagagtcttgtgtttgcacaagatgcccagtggcaccatatggtttattttggtaggcaggatctttgcagatgaaaaaaaaatctacatgtacttgattttaattgagttacattgtagaataggctcctctggaggaaattatgaaatacctactagaaaatgtaaaataaatcagtgaatgttaagagtatagttagatatgtgaagtgtatgagattatgacaaggatacactcatgttccaggagcaggaagtgaacctgggtctcctgtaagacagaagatgaagatgagcccaggctaacttagcacagatcttggctgagatcatcaatgtgacgtctaatgtacctgcactagacagagaataaagttcaccagacattactctggtcagctaaccagataaagaattgttgaaggaccccaactgtgcctcctgccacaggacaaccagcaagttctatgctgagccttagcctcccaggttataagctccctgcaggctcctcctctccagagccaggatggagaggcactgggctgtcccaaagcaggcttggatgtgccaacgtacagttgctccttctgtaattcttgcactaaaactccattaaagaccatcaatgagccaaatagtgtgctagccattgaggatggagttcttagctacttaatgattcttttcttctggaaatcttctagtgaataatttttaaaagcttcttttaaactgctcagtaaaacattgccatacattaactctccatttctgcattaacttcatttgctggaaagaaattattttgttaatgaaccaaacccagccattaagttatgtgaattcaccttctctagacacattgaggtatggcagagaagacacatattccctggcctagagtgggctgacaatattgctgcctcccctaaattgactcaatcttgagaaccacatactgcagtgacagttgatcatggatcagaaatattcctttttctcctagaggaaatccctcatggcattatcattccctaaggacaatgagatgtccctccgctcaaatcctaaagccccctgatgaaagatttggctctgatttgctgccaacttattggtaagtgctgaatgagttactgtgctttggcatagcttctacatcacagcaagtgacttctcagaggggaaaagccaagctccagacaaggagtgctgttagcccaaggggaagagctaatagatacataggccgtaagcacagggctgtacacagatcctttattggcatctgcatgagaggcctagaaatcggatgttagaagctaggaatcatggctctgagcgccttgcatacaggagatactcactgatactaaatcaaggcatgtaaacaatactgggtaaatcatacctaccagaataaagagtaacattcagagcttttcttttatctgttattttaaatgttactccatatttcaaaagtctgcacgtatgaaattgtgtcttatttctggtttttagagcctaagaaagatactcattcttaattcctatttatcatctgaaaaccaaatgaatttttgaaataaatgttttaccagcatttctgacctggtctggcctgatctctgtgttgggcaagagagggtacaatttgagcagttctcctgagttagactcggctcaaagtctctcttttaaagtgaaaagccacctttctcattgcttttttcataggtggaagaatcagatttcaagagactgaagttcattctgtttcattagggattagactaaaatggacaaacagtggaagaaatccattttccagaagcagctctgcctgtatgtcccagtcaaccacatggatggtctttgtgaaagttttaacttcctgcagagttaccgagtgctcagcgattgagctttgaccacacccgtgtttgttcctagtctgttcccagccataagcatctccacaagccctctgtggcttgtgtggcctgatgtccatggccaccaagggcctctcaccatacgcttctccactcaacctttggagagacacggaccaccaaaggcttgatttttcttcatcctacattatattcaaaacaaacaggctgggtgccgtagctcacacctgtgatcccagcaccttgggaggatgagctgggaagatcgtttgaggctaggagtttgagaccagcccgtgcaaaaaacgagacctcgtgtctaaaataatttttaaaaaagagcaaaaaaaaaaagcaatttcagattaaaggagactgaagagacatgacaattggacacaacatctgattctgaattggatgtttttgttataaaagacattgttgagacaatttgcacaacttgaatgaggtctgaagattagctgggagtaagatgccactgttaattttctgatttcagtggttgtactgggaagaagtaagagagtgtccttgtttgtactggagacactgaggtatctgggggtgaggggcatcatgtctgtttactgtcagatggttgaggggaaaataatgttctttgtacttgcagattttttggaagtttgagatgttttagaatttgtaaaaataattatttttaaaaccccaccatgctatctcctgca

SEQ ID NO: 11165 - DNA, 3728 bp, Homo sapiens
  source 1..3728: mol_type = unassigned DNA
gcggtactgtgacgtcacctgaggggggcacttccggtctcgtgccgccttcccaggaccctcagggagagcgggcagccttccaggtggacagaaatggactcagaactcaaggaagaaattcctgtgcatgaggaattcattttgtgtggtggagccgaaacccaggttctaaaatgtgggccctggacagacctctttcatgatcaaagtgtcaaaaggcctaagctgcttattttcattattcctggtaacccaggtttttctgccttttatgtgccatttgcaaaggctttatactctttgacaaacagacgctttccagtttggactatcagtcatgctgggcatgcgttggctcccaaagacaagaagattcttacaacatcagaggattcaaacgctcaagaaattaaggacatttatggactaaatggacaaatagagcacaaactagctttcctgagaactcatgtgccaaaggacatgaaacttgtgctcattggccattcaataggcagctatttcacacttcagatgctgaagcgagtccctgagctcccgctaatgctgcctaccttgggggccaagaaatgatggaggtggtgaagagagatgacgaaaccataaaggagcatttatgtaagcttacattttattatggtactatagatccttggtgtccaaaagagtactatgaagacattaagaaggattttccagaaggagacattcgactctgtgagaaaaacatacctcatgctttcatcacccattttaaccaggaaatggcagacatgattgctgactccctaaaggatgacttgtccaaaatgtaaattggcctgaggaacaagcccccactgccagtacatggaggcagtcagtgtactagacttagtaggtaaatgtttaattttgaagactgatattagaaatgaagaaagtgagaacctttgtcttacaaaccaactctccgctcgccatgttataggctgaagtaaacacagttgatgaatcattccataggtttaaccatacattttccaagactcagggaacacagtgatctacacagagtcttgtgtttgcacaagatgcccagtggcaccatatggtttattttggtaggcaggatctttgcagatgaaaaaaaaatctacatgtacttgattttaattgagttacattgtagaataggctcctctggaggaaattatgaaatacctactagaaaatgtaaaataaatcagtgaatgttaagagtatagttagatatgtgaagtgtatgagattatgacaaggatacactcatgttccaggagcaggaagtgaacctgggtctcctgtaagacagaagatgaagatgagcccaggctaacttagcacagatcttggctgagatcatcaatgtgacgtctaatgtacctgcactagacagagaataaagttcaccagacattactctggtcagctaaccagataaagaattgttgaaggaccccaactgtgcctcctgccacaggacaaccagcaagttctatgctgagccttagcctcccaggttataagctccctgcaggctcctcctctccagagccaggatggagaggcactgggctgtcccaaagcaggcttggatgtgccaacgtacagttgctccttctgtaattcttgcactaaaactccattaaagaccatcaatgagccaaatagtgtgctagccattgaggatggagttcttagctacttaatgattcttttcttctggaaatcttctagtgaataatttttaaaagcttcttttaaactgctcagtaaaacattgccatacattaactctccatttctgcattaacttcatttgctggaaagaaattattttgttaatgaaccaaacccagccattaagttatgtgaattcaccttctctagacacattgaggtatggcagagaagacacatattccctggcctagagtgggctgacaatattgctgcctcccctaaattgactcaatcttgagaaccacatactgcagtgacagttgatcatggatcagaaatattcctttttctcctagaggaaatccctcatggcattatcattccctaaggacaatgagatgtccctccgctcaaatcctaaagccccctgatgaaagatttggctctgatttgctgccaacttattggtaagtgctgaatgagttactgtgctttggcatagcttctacatcacagcaagtgacttctcagaggggaaaagccaagctccagacaaggagtgctgttagcccaaggggaagagctaatagatacataggccgtaagcacagggctgtacacagatcctttattggcatctgcatgagaggcctagaaatcggatgttagaagctaggaatcatggctctgagcgccttgcatacaggagatactcactgatactaaatcaaggcatgtaaacaatactgggtaaatcatacctaccagaataaagagtaacattcagagcttttcttttatctgttattttaaatgttactccatatttcaaaagtctgcacgtatgaaattgtgtcttatttctggtttttagagcctaagaaagatactcattcttaattcctatttatcatctgaaaaccaaatgaatttttgaaataaatgttttaccagcatttctgacctggtctggcctgatctctgtgttgggcaagagagggtacaatttgagcagttctcctgagttagactcggctcaaagtctctcttttaaagtgaaaagccacctttctcattgcttttttcataggtggaagaatcagatttcaagagactgaagttcattctgtttcattagggattagactaaaatggacaaacagtggaagaaatccattttccagaagcagctctgcctgtatgtcccagtcaaccacatggatggtctttgtgaaagttttaacttcctgcagagttaccgagtgctcagcgattgagctttgaccacacccgtgtttgttcctagtctgttcccagccataagcatctccacaagccctctgtggcttgtgtggcctgatgtccatggccaccaagggcctctcaccatacgcttctccactcaacctttggagagacacggaccaccaaaggcttgatttttcttcatcctacattatattcaaaacaaacaggctgggtgccgtagctcacacctgtgatcccagcaccttgggaggatgagctgggaagatcgtttgaggctaggagtttgagaccagcccgtgcaaaaaacgagacctcgtgtctaaaataatttttaaaaaagagcaaaaaaaaaaagcaatttcagattaaaggagactgaagagacatgacaattggacacaacatctgattctgaattggatgtttttgttataaaagacattgttgagacaatttgcacaacttgaatgaggtctgaagattagctgggagtaagatgccactgttaattttctgatttcagtggttgtactgggaagaagtaagagagtgtccttgtttgtactggagacactgaggtatctgggggtgaggggcatcatgtctgtttactgtcagatggttgaggggaaaataatgttctttgtacttgcagattttttggaagtttgagatgttttagaatttgtaaaaataattatttttaaaaccccaccatgctatctcctgca

SEQ ID NO: 11166 - DNA, 3837 bp, Homo sapiens
  source 1..3837: mol_type = unassigned DNA
gcggtactgtgacgtcacctgaggggggcacttccggtctcgtgccgccttcccaggaccctcagggagagcgggcagccttccaggtggacagaaatggactcagaactcaaggaagaaattcctgtgcatgaggaattcattttgtgtggtggagccgaaacccaggttctaaaatgtgggccctggacagacctctttcatgatcaaagtgtcaaaaggcctaagctgcttattttcattattcctggtgagcgtaaaagtctggattcaaacgctcaagaaattaaggacatttatggactaaatggacaaatagagcacaaactagctttcctgagaactcatgtgccaaaggacatgaaacttgtgctcattggccattcaataggcagctatttcacacttcagatgctgaagcgagtccctgagctcccggtaattcgtgcctttctgctctttccaacaattgaacgaatgtctgagtcacccaatggcagaattgccactccacttttgtgctggtttcgatatgttctctatgttactggctacttattattgaaaccgtgtcctgagacaatcaagtccttgctaatcagaaggggccttcaagtaatgaacctagagaatgaattttcaccattgaatatattagaaccattctgccttgctaatgctgcctaccttgggggccaagaaatgatggaggtggtgaagagagatgacgaaaccataaaggagcatttatgtaagcttacattttattatggtactatagatccttggtgtccaaaagagtactatgaagacattaagaaggattttccagaaggagacattcgactctgtgagaaaaacatacctcatgctttcatcacccattttaaccaggaaatggcagacatgattgctgactccctaaaggatgacttgtccaaaatgtaaattggcctgaggaacaagcccccactgccagtacatggaggcagtcagtgtactagacttagtaggtaaatgtttaattttgaagactgatattagaaatgaagaaagtgagaacctttgtcttacaaaccaactctccgctcgccatgttataggctgaagtaaacacagttgatgaatcattccataggtttaaccatacattttccaagactcagggaacacagtgatctacacagagtcttgtgtttgcacaagatgcccagtggcaccatatggtttattttggtaggcaggatctttgcagatgaaaaaaaaatctacatgtacttgattttaattgagttacattgtagaataggctcctctggaggaaattatgaaatacctactagaaaatgtaaaataaatcagtgaatgttaagagtatagttagatatgtgaagtgtatgagattatgacaaggatacactcatgttccaggagcaggaagtgaacctgggtctcctgtaagacagaagatgaagatgagcccaggctaacttagcacagatcttggctgagatcatcaatgtgacgtctaatgtacctgcactagacagagaataaagttcaccagacattactctggtcagctaaccagataaagaattgttgaaggaccccaactgtgcctcctgccacaggacaaccagcaagttctatgctgagccttagcctcccaggttataagctccctgcaggctcctcctctccagagccaggatggagaggcactgggctgtcccaaagcaggcttggatgtgccaacgtacagttgctccttctgtaattcttgcactaaaactccattaaagaccatcaatgagccaaatagtgtgctagccattgaggatggagttcttagctacttaatgattcttttcttctggaaatcttctagtgaataatttttaaaagcttcttttaaactgctcagtaaaacattgccatacattaactctccatttctgcattaacttcatttgctggaaagaaattattttgttaatgaaccaaacccagccattaagttatgtgaattcaccttctctagacacattgaggtatggcagagaagacacatattccctggcctagagtgggctgacaatattgctgcctcccctaaattgactcaatcttgagaaccacatactgcagtgacagttgatcatggatcagaaatattcctttttctcctagaggaaatccctcatggcattatcattccctaaggacaatgagatgtccctccgctcaaatcctaaagccccctgatgaaagatttggctctgatttgctgccaacttattggtaagtgctgaatgagttactgtgctttggcatagcttctacatcacagcaagtgacttctcagaggggaaaagccaagctccagacaaggagtgctgttagcccaaggggaagagctaatagatacataggccgtaagcacagggctgtacacagatcctttattggcatctgcatgagaggcctagaaatcggatgttagaagctaggaatcatggctctgagcgccttgcatacaggagatactcactgatactaaatcaaggcatgtaaacaatactgggtaaatcatacctaccagaataaagagtaacattcagagcttttcttttatctgttattttaaatgttactccatatttcaaaagtctgcacgtatgaaattgtgtcttatttctggtttttagagcctaagaaagatactcattcttaattcctatttatcatctgaaaaccaaatgaatttttgaaataaatgttttaccagcatttctgacctggtctggcctgatctctgtgttgggcaagagagggtacaatttgagcagttctcctgagttagactcggctcaaagtctctcttttaaagtgaaaagccacctttctcattgcttttttcataggtggaagaatcagatttcaagagactgaagttcattctgtttcattagggattagactaaaatggacaaacagtggaagaaatccattttccagaagcagctctgcctgtatgtcccagtcaaccacatggatggtctttgtgaaagttttaacttcctgcagagttaccgagtgctcagcgattgagctttgaccacacccgtgtttgttcctagtctgttcccagccataagcatctccacaagccctctgtggcttgtgtggcctgatgtccatggccaccaagggcctctcaccatacgcttctccactcaacctttggagagacacggaccaccaaaggcttgatttttcttcatcctacattatattcaaaacaaacaggctgggtgccgtagctcacacctgtgatcccagcaccttgggaggatgagctgggaagatcgtttgaggctaggagtttgagaccagcccgtgcaaaaaacgagacctcgtgtctaaaataatttttaaaaaagagcaaaaaaaaaaagcaatttcagattaaaggagactgaagagacatgacaattggacacaacatctgattctgaattggatgtttttgttataaaagacattgttgagacaatttgcacaacttgaatgaggtctgaagattagctgggagtaagatgccactgttaattttctgatttcagtggttgtactgggaagaagtaagagagtgtccttgtttgtactggagacactgaggtatctgggggtgaggggcatcatgtctgtttactgtcagatggttgaggggaaaataatgttctttgtacttgcagattttttggaagtttgagatgttttagaatttgtaaaaataattatttttaaaaccccaccatgctatctcctgca

SEQ ID NO: 11167 - DNA, 2295 bp, Homo sapiens
  source 1..2295: mol_type = unassigned DNA
gggaagaacacagcccatgtgctctgcatggacgttactgatactctgtttagcttgattttcgaaaagcaggcaagatgtccagcacaccacatgaccccttctattcttctcctttcggcccattttataggaggcatacaccatacatggtacagccagagtaccgaatctatgagatgaacaagagactgcagtctcgcacagaggatagtgacaacctctggtgggacgcctttgccactgaattttttgaagatgacgccacattaaccctttcattttgtttggaagatggaccaaagcgatacactatcggcaggaccctcatcccccgttactttagcactgtgtttgaaggaggggtgaccgacctgtattacattctcaaacactcgaaagagtcataccacaactcatccatcacggtggactgcgaccagtgtaccatggtcacccagcacgggaagcccatgtttaccaaggtatgtacagaaggcagactgatcttggagttcacctttgatgatctcatgagaatcaaaacatggcactttaccattagacaataccgagagttagtcccgagaagcatcctagccatgcatgcacaagatcctcaggtcctggatcagctgtccaaaaacatcaccaggatggggctaacaaacttcaccctcaactacctcaggttgtgtgtaatattggagccaatgcaggaactgatgtcgagacataaaacttacaacctcagtccccgagactgcctgaagacctgcttgtttcagaagtggcagaggatggtggctccgccagcagaacccacaaggcaaccaacaaccaaacggagaaaaaggaaaaattccaccagcagcacttccaacagcagcgctgggaacaatgcaaacagcactggcagcaagaagaagaccacagctgcaaacctgagtctgtccagtcaggatgtgatggtggtaggagagccaactctgatgggaggtgagtttggggacgaggacgaaaggctaatcactagattagaaaacacgcaatatgatgcggccaacggcatggacgacgaggaggacttcaacaattcacccgcgctggggaacaacagcccgtggaacagtaaacctcccgccactcaagagaccaaatcagaaaaccccccaccccaggcttcccaataagatgatcggcaccagaatccactgtcaataggcccgtgggtgatcattacaattgcaaatctttacttacaggagaggaaacagaagagataaaaacttttccatgcaaatatctatttctaaaccacaatgatctgattttctttcttctttctttttttctaattgagaggattattcccagtaagcttccatgaccctttcttggaggccttcacaggtaatacagatactggcactgattgtaattaaaatgagagaaaactctagcgcatcttctggcacggttttaacaacgtgtttgtgttgaatttcctttttatgcatcaaacgaaggccatattgtccataaatgctcagtgctcaggatctcattaatatgccgaacctaactacagatgactttttaatattgtaaaatattttctgctttttgacttgcatctgagagtttcttgtttcagtaaaaaaagaaaagacaaaaaaatcagctttggaaagtaatttaaatgtaccttattttttttttctttatgttttctttcattgggcaacagctaagagggcccagcaaggtaatttatggttgagctgatgtcaattggttcttgtcttgagtcgactcaatttagcccaagtgctgaaacaagaaatgtcatttttttcatcaaagacaccagggcagatttttaagtaaagaaagacaattggacccttaagaatttatgcatttgtaaagttgctgttgatccaaatattttcaagccatgtaatccattggttttgtgggcagtttaataaacctgaacctttgtgtgttttctaattgtacctgagttgaccatcctttctttttatagtatatttcttgtatgatattttgtaaagctctcacctggttcttttatggggacttttcgtttttgggcaactccagtgtatttatgtgaaactttataagagaattaatttttccatttgcatattaatatgttcctccacacatgtaaaggcacagtggctccgtgtgttaaaaaacagctgtattttatgtatgctttactgataagtgtgccaataataaactgtgttaatgaccaaa

SEQ ID NO: 11168 - DNA, 2476 bp, Homo sapiens
  source 1..2476: mol_type = unassigned DNA
gtgagcgtgtgtgcgtgcgtctactttgtactgggaagaacacagcccatgtgctctgcatggacgttactgatactctgtttagcttgattttcgaaaagcaggcaagatgtccagcacaccacatgaccccttctattcttctcctttcggcccattttataggaggcatacaccatacatggtacagccagagtaccgaatctatgagatgaacaagagactgcagtctcgcacagaggatagtgacaacctctggtgggacgcctttgccactgaattttttgaagatgacgccacattaaccctttcattttgtttggaagatggaccaaagcgatacactatcggcaggaccctcatcccccgttactttagcactgtgtttgaaggaggggtgaccgacctgtattacattctcaaacactcgaaagagtcataccacaactcatccatcacggtggactgcgaccagtgtaccatggtcacccagcacgggaagcccatgtttaccaaggtatgtacagaaggcagactgatcttggagttcacctttgatgatctcatgagaatcaaaacatggcactttaccattagacaataccgagagttagtcccgagaagcatcctagccatgcatgcacaagatcctcaggtcctggatcagctgtccaaaaacatcaccaggatggggctaacaaacttcaccctcaactacctcaggttgtgtgtaatattggagccaatgcaggaactgatgtcgagacataaaacttacaacctcagtccccgagactgcctgaagacctgcttgtttcagaagtggcagaggatggtggctccgccagcagaacccacaaggcaaccaacaaccaaacggagaaaaaggaaaaattccaccagcagcacttccaacagcagcgctgggaacaatgcaaacagcactggcagcaagaagaagaccacagctgcaaacctgagtctgtccagtcaggtacctgggctaggagcgatcccgaactgcagcctcaaccctgggagggatggagacctgtgtcattcaacagcagtgaccccttctggccaatttaaggagaagcattgaggggccctgaaaggagtcacttccagtcctcctcagaggatgtgatggtggtaggagagccaactctgatgggaggtgagtttggggacgaggacgaaaggctaatcactagattagaaaacacgcaatatgatgcggccaacggcatggacgacgaggaggacttcaacaattcacccgcgctggggaacaacagcccgtggaacagtaaacctcccgccactcaagagaccaaatcagaaaaccccccaccccaggcttcccaataagatgatcggcaccagaatccactgtcaataggcccgtgggtgatcattacaattgcaaatctttacttacaggagaggaaacagaagagataaaaacttttccatgcaaatatctatttctaaaccacaatgatctgattttctttcttctttctttttttctaattgagaggattattcccagtaagcttccatgaccctttcttggaggccttcacaggtaatacagatactggcactgattgtaattaaaatgagagaaaactctagcgcatcttctggcacggttttaacaacgtgtttgtgttgaatttcctttttatgcatcaaacgaaggccatattgtccataaatgctcagtgctcaggatctcattaatatgccgaacctaactacagatgactttttaatattgtaaaatattttctgctttttgacttgcatctgagagtttcttgtttcagtaaaaaaagaaaagacaaaaaaatcagctttggaaagtaatttaaatgtaccttattttttttttctttatgttttctttcattgggcaacagctaagagggcccagcaaggtaatttatggttgagctgatgtcaattggttcttgtcttgagtcgactcaatttagcccaagtgctgaaacaagaaatgtcatttttttcatcaaagacaccagggcagatttttaagtaaagaaagacaattggacccttaagaatttatgcatttgtaaagttgctgttgatccaaatattttcaagccatgtaatccattggttttgtgggcagtttaataaacctgaacctttgtgtgttttctaattgtacctgagttgaccatcctttctttttatagtatatttcttgtatgatattttgtaaagctctcacctggttcttttatggggacttttcgtttttgggcaactccagtgtatttatgtgaaactttataagagaattaatttttccatttgcatattaatatgttcctccacacatgtaaaggcacagtggctccgtgtgttaaaaaacagctgtattttatgtatgctttactgataagtgtgccaataataaactgtgttaatgaccaaa

SEQ ID NO: 11169 - DNA, 2548 bp, Homo sapiens
  source 1..2548: mol_type = unassigned DNA
ccctccctcccttcttccctcccttcctccataccaacctccctccctctctggagctcctgctctctccctctccctcctctcccgtgctccctccctccctccctctttccctccctcctctcctctccctctcctctcctgctatagagggctccgacagcagttcccagccagcgtgttcagcctgcctgcctgcctgcctctgtgtgtgtgtgagcgtgtgtgcgtgcgtctactttgtactgggaagaacacagcccatgtgctctgcatggacgttactgatactctgtttagcttgattttcgaaaagcaggcaagatgtccagcacaccacatgaccccttctattcttctcctttcggcccattttataggaggcatacaccatacatggtacagccagagtaccgaatctatgagatgaacaagagactgcagtctcgcacagaggatagtgacaacctctggtgggacgcctttgccactgaattttttgaagatgacgccacattaaccctttcattttgtttggaagatggaccaaagcgatacactatcggcaggaccctcatcccccgttactttagcactgtgtttgaaggaggggtgaccgacctgtattacattctcaaacactcgaaagagtcataccacaactcatccatcacggtggactgcgaccagtgtaccatggtcacccagcacgggaagcccatgtttaccaaggtatgtacagaaggcagactgatcttggagttcacctttgatgatctcatgagaatcaaaacatggcactttaccattagacaataccgagagttagtcccgagaagcatcctagccatgcatgcacaagatcctcaggtcctggatcagctgtccaaaaacatcaccaggatggggctaacaaacttcaccctcaactacctcaggttgtgtgtaatattggagccaatgcaggaactgatgtcgagacataaaacttacaacctcagtccccgagactgcctgaagacctgcttgtttcagaagtggcagaggatggtggctccgccagcagaacccacaaggcaaccaacaaccaaacggagaaaaaggaaaaattccaccagcagcacttccaacagcagcgctgggaacaatgcaaacagcactggcagcaagaagaagaccacagctgcaaacctgagtctgtccagtcaggtacctgatgtgatggtggtaggagagccaactctgatgggaggtgagtttggggacgaggacgaaaggctaatcactagattagaaaacacgcaatatgatgcggccaacggcatggacgacgaggaggacttcaacaattcacccgcgctggggaacaacagcccgtggaacagtaaacctcccgccactcaagagaccaaatcagaaaaccccccaccccaggcttcccaataagatgatcggcaccagaatccactgtcaataggcccgtgggtgatcattacaattgcaaatctttacttacaggagaggaaacagaagagataaaaacttttccatgcaaatatctatttctaaaccacaatgatctgattttctttcttctttctttttttctaattgagaggattattcccagtaagcttccatgaccctttcttggaggccttcacaggtaatacagatactggcactgattgtaattaaaatgagagaaaactctagcgcatcttctggcacggttttaacaacgtgtttgtgttgaatttcctttttatgcatcaaacgaaggccatattgtccataaatgctcagtgctcaggatctcattaatatgccgaacctaactacagatgactttttaatattgtaaaatattttctgctttttgacttgcatctgagagtttcttgtttcagtaaaaaaagaaaagacaaaaaaatcagctttggaaagtaatttaaatgtaccttattttttttttctttatgttttctttcattgggcaacagctaagagggcccagcaaggtaatttatggttgagctgatgtcaattggttcttgtcttgagtcgactcaatttagcccaagtgctgaaacaagaaatgtcatttttttcatcaaagacaccagggcagatttttaagtaaagaaagacaattggacccttaagaatttatgcatttgtaaagttgctgttgatccaaatattttcaagccatgtaatccattggttttgtgggcagtttaataaacctgaacctttgtgtgttttctaattgtacctgagttgaccatcctttctttttatagtatatttcttgtatgatattttgtaaagctctcacctggttcttttatggggacttttcgtttttgggcaactccagtgtatttatgtgaaactttataagagaattaatttttccatttgcatattaatatgttcctccacacatgtaaaggcacagtggctccgtgtgttaaaaaacagctgtattttatgtatgctttactgataagtgtgccaataataaactgtgttaatgaccaaa

SEQ ID NO: 11170 - DNA, 2718 bp, Homo sapiens
  source 1..2718: mol_type = unassigned DNA
aaggtgccatgttacattttacaaggttacaaattgcagtcttcaaataatgaaaatagtctccaggtggtcctccactttctgagctaggctttatacctaatacctctgaagatcagggggaaaaagccaaaagagggaaataaagagtctctttattaaaaaagtatcaagttatgcccacttctggtgaaattttgaatagagaaaatggcctgatttagataaatcaactgaaaaagtgtacacaggagcccatttctttatccaatcctggagttaaaggcagtaacattcgttagtttcctctagcaaataagaaaaagtgcatctcagaggattctgaaacggtgatatagctacttaaaggcactgtagctgcaagaatcccaatcagttcaacagatgttttctgagctcctactatgtgcccacactgtgccaggtactagcaataccaaggtgaaaaacaacaacaacaaagccctgtcattgaagagctcactgtctaatctagggatggcaaggacattttctctctcctgccagccctcagagtatggtattgaggaggattctaaggtctagtctgggtttggtgggccatccattagtgatgtctgacatggttgtagaagttgagagtagcagcttacatgtcatatgttttgacacatatggtctagtcagaatcatttcaatttcatttgaaagaggatatagcttctgtactctgttatgctcctgtcttccaaatcaacaactgtattttactggaggttacctgtatccagagggtttgtaacaagtagagaccctttgcattttgtgtgattaagagcaaggcaccgttaggaaatgagagttggattccatcactatctccacactatgcagttaaagatgttttaataaagtaaaattgtcagatgttacagagaggcagaaagaacaaccagattaggaaaatgtacaaattcatatgtgtcctggagttgaatggacattaaatgataagcgttggatgacttgtggtgaccatatcttttaaccctgtctactgagttatcaacactattctactggttaactagagatgctacctgcaggcatccactgtctggtccaaaggcatgtgccactatgaccacagctgtggtctgtgtagctgctgcggcagcgatgtgtgtgtctggcgagggctagggtttaatccttggattctgcttctcactccatgagcaggggctaggagcgatcccgaactgcagcctcaaccctgggagggatggagacctgtgtcattcaacagcagtgaccccttctggccaatttaaggagaagcattgaggggccctgaaaggagtcacttccagtcctcctcagaggatgtgatggtggtaggagagccaactctgatgggaggtgagtttggggacgaggacgaaaggctaatcactagattagaaaacacgcaatatgatgcggccaacggcatggacgacgaggaggacttcaacaattcacccgcgctggggaacaacagcccgtggaacagtaaacctcccgccactcaagagaccaaatcagaaaaccccccaccccaggcttcccaataagatgatcggcaccagaatccactgtcaataggcccgtgggtgatcattacaattgcaaatctttacttacaggagaggaaacagaagagataaaaacttttccatgcaaatatctatttctaaaccacaatgatctgattttctttcttctttctttttttctaattgagaggattattcccagtaagcttccatgaccctttcttggaggccttcacaggtaatacagatactggcactgattgtaattaaaatgagagaaaactctagcgcatcttctggcacggttttaacaacgtgtttgtgttgaatttcctttttatgcatcaaacgaaggccatattgtccataaatgctcagtgctcaggatctcattaatatgccgaacctaactacagatgactttttaatattgtaaaatattttctgctttttgacttgcatctgagagtttcttgtttcagtaaaaaaagaaaagacaaaaaaatcagctttggaaagtaatttaaatgtaccttattttttttttctttatgttttctttcattgggcaacagctaagagggcccagcaaggtaatttatggttgagctgatgtcaattggttcttgtcttgagtcgactcaatttagcccaagtgctgaaacaagaaatgtcatttttttcatcaaagacaccagggcagatttttaagtaaagaaagacaattggacccttaagaatttatgcatttgtaaagttgctgttgatccaaatattttcaagccatgtaatccattggttttgtgggcagtttaataaacctgaacctttgtgtgttttctaattgtacctgagttgaccatcctttctttttatagtatatttcttgtatgatattttgtaaagctctcacctggttcttttatggggacttttcgtttttgggcaactccagtgtatttatgtgaaactttataagagaattaatttttccatttgcatattaatatgttcctccacacatgtaaaggcacagtggctccgtgtgttaaaaaacagctgtattttatgtatgctttactgataagtgtgccaataataaactgtgttaatgacc

SEQ ID NO: 11171 - DNA, 2626 bp, Homo sapiens
  source 1..2626: mol_type = unassigned DNA
agcgtgttcagcctgcctgcctgcctgcctctgtgtgtgtgtgagcgtgtgtgcgtgcgtctactttgtactgggaagaacacagcccatgtgctctgcatggacgttactgatactctgtttagcttgattttcgaaaagcaggcaagatgtccagcacaccacatgaccccttctattcttctcctttcggcccattttataggaggcatacaccatacatggtacagccagagtaccgaatctatgagatgaacaagagactgcagtctcgcacagaggatagtgacaacctctggtgggacgcctttgccactgaattttttgaagatgacgccacattaaccctttcattttgtttggaagatggaccaaagcgatacactatcggcaggaccctcatcccccgttactttagcactgtgtttgaaggaggggtgaccgacctgtattacattctcaaacactcgaaagagtcataccacaactcatccatcacggtggactgcgaccagtgtaccatggtcacccagcacgggaagcccatgtttaccaaggtatgtacagaaggcagactgatcttggagttcacctttgatgatctcatgagaatcaaaacatggcactttaccattagacaataccgagagttagtcccgagaagcatcctagccatgcatgcacaagatcctcaggtcctggatcagctgtccaaaaacatcaccaggatggggctaacaaacttcaccctcaactacctcaggttgtgtgtaatattggagccaatgcaggaactgatgtcgagacataaaacttacaacctcagtccccgagactgcctgaagacctgcttgtttcagaagtggcagaggatggtggctccgccagcagaacccacaaggcaaccaacaaccaaacggagaaaaaggaaaaattccaccagcagcacttccaacagcagcgctgggaacaatgcaaacagcactggcagcaagaagaagaccacagctgcaaacctgagtctgtccagtcaggtacctattgctagcattgctcgttctccagtgtcaggctgcgcactaaggacataaactcgcgtggttgttacacatcaggaggcgatgtttatttcctgtagaaatcaaatatgcgtctcggcccccgacattgagacttgaccccgttgtacagtacacgagtgtgtctgtcctagattccccgactcctcccactgttattttaagctgagcttctctctcccaaggtttccctgtaataatgtcagctgctgttcacaggatgtgatggtggtaggagagccaactctgatgggaggtgagtttggggacgaggacgaaaggctaatcactagattagaaaacacgcaatatgatgcggccaacggcatggacgacgaggaggacttcaacaattcacccgcgctggggaacaacagcccgtggaacagtaaacctcccgccactcaagagaccaaatcagaaaaccccccaccccaggcttcccaataagatgatcggcaccagaatccactgtcaataggcccgtgggtgatcattacaattgcaaatctttacttacaggagaggaaacagaagagataaaaacttttccatgcaaatatctatttctaaaccacaatgatctgattttctttcttctttctttttttctaattgagaggattattcccagtaagcttccatgaccctttcttggaggccttcacaggtaatacagatactggcactgattgtaattaaaatgagagaaaactctagcgcatcttctggcacggttttaacaacgtgtttgtgttgaatttcctttttatgcatcaaacgaaggccatattgtccataaatgctcagtgctcaggatctcattaatatgccgaacctaactacagatgactttttaatattgtaaaatattttctgctttttgacttgcatctgagagtttcttgtttcagtaaaaaaagaaaagacaaaaaaatcagctttggaaagtaatttaaatgtaccttattttttttttctttatgttttctttcattgggcaacagctaagagggcccagcaaggtaatttatggttgagctgatgtcaattggttcttgtcttgagtcgactcaatttagcccaagtgctgaaacaagaaatgtcatttttttcatcaaagacaccagggcagatttttaagtaaagaaagacaattggacccttaagaatttatgcatttgtaaagttgctgttgatccaaatattttcaagccatgtaatccattggttttgtgggcagtttaataaacctgaacctttgtgtgttttctaattgtacctgagttgaccatcctttctttttatagtatatttcttgtatgatattttgtaaagctctcacctggttcttttatggggacttttcgtttttgggcaactccagtgtatttatgtgaaactttataagagaattaatttttccatttgcatattaatatgttcctccacacatgtaaaggcacagtggctccgtgtgttaaaaaacagctgtattttatgtatgctttactgataagtgtgccaataataaactgtgttaatga

SEQ ID NO: 11172 - DNA, 1485 bp, Homo sapiens
  source 1..1485: mol_type = unassigned DNA
ctatcggcaggaccctcatcccccgttactttagcactgtgtttgaaggaggggtgaccgacctgtattacattctcaaacactcgaaagagtcataccacaactcatccatcacggtggactgcgaccagtgtaccatggtcacccagcacgggaagcccatgtttaccaaggtatgtacagaaggcagactgatcttggagttcacctttgatgatctcatgagaatcaaaacatggcactttaccattagacaataccgagagttagtcccgagaagcatcctagccatgcatgcacaagatcctcaggtcctggatcagctgtccaaaaacatcaccaggatggggctaacaaacttcaccctcaactacctcaggttgtgtgtaatattggagccaatgcaggaactgatgtcgagacataaaacttacaacctcagtccccgagactgcctgaagacctgcttgtttcagaagtggcagaggatggtggctccgccagaacccacaaggcaaccaacaaccaaacggagaaaaaggaaaaattccaccagcagcacttccaacagcagcgctgggaacaatgcaaacagcactggcagcaagaagaagaccacagctgcaaacctgagtctgtccagtcaggtacctgatgtgatggtggtaggagagccaactctgatgggaggtgagtttggggacgaggacgaaaggctaatcactagattagaaaacacgcaatatgatgcggccaacggcatggacgacgaggaggacttcaacaattcacccgcgctggggaacaacagcccgtggaacagtaaacctcccgccactcaagagaccaaatcagaaaaccccccaccccaggcttcccaataagatgatcggcaccagaatccactgtcaataggcccgtgggtgatcattacaattgcaaatctttacttacaggagaggaaacagaagagataaaaacttttccatgcaaatatctatttctaaaccacaatgatctgattttctttcttctttctttttttctaattgagaggattattcccagtaagcttccatgaccctttcttggaggccttcacaggtaatacagatactggcactgattgtaattaaaatgagagaaaactctagcgcatcttctggcacggttttaacaacgtgtttgtgttgaatttcctttttatgcatcaaacgaaggccatattgtccataaatgctcagtgctcaggatctcattaatatgccgaacctaactacagatgactttttaatattgtaaaatattttctgctttttgacttgcatctgagagtttcttgtttcagtaaaaaaagaaaagacaaaaaaatcagctttggaaagtaatttaaatgtaccttattttttttttctttatgttttctttcattgggcaacagctaagagggcccagcaaggtaatttatggttgagctgatgtcaa

SEQ ID NO: 11173 - DNA, 1498 bp, Homo sapiens
  source 1..1498: mol_type = unassigned DNA
agcgtgttcagcctgcctgcctgcctgcctctgtgtgtgtgtgagcgtgtgtgcgtgcgtctactttgtactgggaagaacacagcccatgtgctctgcatggacgttactgatactctgtttagcttgattttcgaaaagcaggcaagatgtccagcacaccacatgaccccttctattcttctcctttcggcccattttataggaggcatacaccatacatggtacagccagagtaccgaatctatgagatgaacaagagactgcagtctcgcacagaggatagtgacaacctctggtgggacgcctttgccactgaattttttgaagatgacgccacattaaccctttcattttgtttggaagatggaccaaagcgatacattgtgcattcagcggcagatgccagaggaaactgcaaccagctcggggattcggaaccagatgcctgtgatggattattacaatttcctatcatgtaattgcttttctgtttgaccaaagctatcggcaggaccctcatcccccgttactttagcactgtgtttgaaggaggggtgaccgacctgtattacattctcaaacactcgaaagagtcataccacaactcatccatcacggtggactgcgaccagtgtaccatggtcacccagcacgggaagcccatgtttaccaaggtatgtacagaaggcagactgatcttggagttcacctttgatgatctcatgagaatcaaaacatggcactttaccattagacaataccgagagttagtcccgagaagcatcctagccatgcatgcacaagatcctcaggtcctggatcagctgtccaaaaacatcaccaggatggggctaacaaacttcaccctcaactacctcaggttgtgtgtaatattggagccaatgcaggaactgatgtcgagacataaaacttacaacctcagtccccgagactgcctgaagacctgcttgtttcagaagtggcagaggatggtggctccgccagcagaacccacaaggcaaccaacaaccaaacggagaaaaaggaaaaattccaccagcagcacttccaacagcagcgctgggaacaatgcaaacagcactggcagcaagaagaagaccacagctgcaaacctgagtctgtccagtcaggtacctattgctagcattgctcgttctccagtgtcaggctgcgcactaaggacataaactcgcgtggttgttacacatcaggaggcgatgtttatttcctgtagaaatcaaatatgcgtctcggcccccgacattgagacttgaccccgttgtacagtacacgagtgtgtctgtcctagattccccgactcctcccactgttattttaagctgagcttctctctcccaaggtttccctgtaataatgtcagctgctgttcacaggatgtgatggtggtaggagagccaactctgatgggaggtgagtttggggacgaggacgaaaggctaatcactagattaga

SEQ ID NO: 11174 - DNA, 923 bp, Homo sapiens
  source 1..923: mol_type = unassigned DNA
tgcctgcctgcctgcctctgtgtgtgtgtgagcgtgtgtgcgtgcgtctactttgtactgggaagaacacagcccatgtgctctgcatggacgttactgatactctgtttagcttgattttcgaaaagcaggcaagatgtccagcacaccacatgaccccttctattcttctcctttcggcccattttataggaggcatacaccatacatggtacagccagagtaccgaatctatgagatgaacaagagactgcagtctcgcacagaggatagtgacaacctctggtgggacgcctttgccactgaattttttgaagatgacgccacattaaccctttcattttgtttggaagatggaccaaagcgatacagaaccaagaatttaagaccaattggggaaaaaatgaatattaatggaaaatgctatcggcaggaccctcatcccccgttactttagcactgtgtttgaaggaggggtgaccgacctgtattacattctcaaacactcgaaagagtcataccacaactcatccatcacggtggactgcgaccagtgtaccatggtcacccagcacgggaagcccatgtttaccaaggtatgtacagaaggcagactgatcttggagttcacctttgatgatctcatgagaatcaaaacatggcactttaccattagacaataccgagagttagtcccgagaagcatcctagccatgcatgcacaagatcctcaggtcctggatcagctgtccaaaaacatcaccaggatggggctaacaaacttcaccctcaactacctcaggttgtgtgtaatattggagccaatgcaggaactgatgtcgagacataaaacttacaacctcagtccccgagactgcctgaagacctgcttgtttcagaagtggcagaggatggtggctccg

SEQ ID NO: 11175 - DNA, 573 bp, Homo sapiens
  source 1..573: mol_type = unassigned DNA
agatttgtttcctaaatcgtggtgcacccagcaaagcaacaaagctgtctggctcccattcttgtccactggaatgagcccaagtccctcgagctatcggcaggaccctcatcccccgttactttagcactgtgtttgaaggaggggtgaccgacctgtattacattctcaaacactcgaaagagtcataccacaactcatccatcacggtggactgcgaccagtgtaccatggtcacccagcacgggaagcccatgtttaccaaggtatgtacagaaggcagactgatcttggagttcacctttgatgatctcatgagaatcaaaacatggcactttaccattagacaataccgagagttagtcccgagaagcatcctagccatgcatgcacaagatcctcaggtcctggatcagctgtccaaaaacatcaccaggatggggctaacaaacttcaccctcaactacctcaggttgtgtgtaatattggagccaatgcaggaactgatgtcgagacataaaacttacaacctcagtccccgagactgcctgaagacctgcttgtttcagaagt

SEQ ID NO: 11176 - DNA, 574 bp, Homo sapiens
  source 1..574: mol_type = unassigned DNA
gcagttttcttctcatattccttgcctcctgttattttgcatgtactaaaatataaatgtatttattgaggatagagcacctgcctggatctggtgcatgcataaataccattgaatttcatctgcactgtaattctacaagtttggatttatcattggtattcagagacaggtatcttggacataatggactctatggagtgaatggatgagtgatcccagctatcggcaggaccctcatcccccgttactttagcactgtgtttgaaggaggggtgaccgacctgtattacattctcaaacactcgaaagagtcataccacaactcatccatcacggtggactgcgaccagtgtaccatggtcacccagcacgggaagcccatgtttaccaaggtatgtacagaaggcagactgatcttggagttcacctttgatgatctcatgagaatcaaaacatggcactttaccattagacaataccgagagttagtcccgagaagcatcctagccatgcatgcacaagatcctcaggtcctggatcagctgtccaaaaacatcaccaggatggggct

SEQ ID NO: 11177 - DNA, 567 bp, Homo sapiens
  source 1..567: mol_type = unassigned DNA
gagggctccgacagcagttcccagccagcgtgttcagcctgcctgcctgcctgcctctgaggcatacaccatacatggtacagccagagtaccgaatctatgagatgaacaagagactgcagtctcgcacagaggatagtgacaacctctggtgggacgcctttgccactgaattttttgaagatgacgccacattaaccctttcattttgtttggaagatggaccaaagcgatacactatcggcaggaccctcatcccccgttactttagcactgtgtttgaaggaggggtgaccgacctgtattacattctcaaacactcgaaagagtcataccacaactcatccatcacggtggactgcgaccagtgtaccatggtcacccagcacgggaagcccatgtttaccaaggtatgtacagaaggcagactgatcttggagttcacctttgatgatctcatgagaatcaaaacatggcactttaccattagacaataccgagagttagtcccgagaagcatcctagccatgcatgcacaagatcctcaggtcctggatcagctgtcca

SEQ ID NO: 11178 - DNA, 583 bp, Homo sapiens
  source 1..583: mol_type = unassigned DNA
acagttctctgtgttctgtctccttgcagtttctggagaatcctttgtctatagtccagatctcctttcatggctatctaatggatctgtcttctgcagcgtttccatccaggtgttggcatcctttcacagtaagcagtaggagaggcttgctgccgaggctcatatatgtcacaaacaagactacctgatcttcattgagagtcactctgatgaggacattacatgttaccatatctaatcagtagccacttgagctatcggcaggaccctcatcccccgttactttagcactgtgtttgaaggaggggtgaccgacctgtattacattctcaaacactcgaaagagtcataccacaactcatccatcacggtggactgcgaccagtgtaccatggtcacccagcacgggaagcccatgtttaccaaggtatgtacagaaggcagactgatcttggagttcacctttgatgatctcatgagaatcaaaacatggcactttaccattagacaataccgagagttagtcccgagaagcatcctagccatgcatgcacaagatcctcaggtcctggatcagctg

SEQ ID NO: 11179 - DNA, 515 bp, Homo sapiens
  source 1..515: mol_type = unassigned DNA
atacgcgaagtaatgagcaaggagcagctgagtttttctttctcttcccttttctcttcctctttgagatatttcccactttcccttgttaaataaatgatctgtctctttgcaggatagtgacaacctctggtgggacgcctttgccactgaattttttgaagatgacgccacattaaccctttcattttgtttggaagatggaccaaagcgatacactatcggcaggaccctcatcccccgttactttagcactgtgtttgaaggaggggtgaccgacctgtattacattctcaaacactcgaaagagtcataccacaactcatccatcacggtggactgcgaccagtgtaccatggtcacccagcacgggaagcccatgtttaccaaggtatgtacagaaggcagactgatcttggagttcacctttgatgatctcatgagaatcaaaacatggcactttaccattagacaataccgagagttagtcccgagaagcatcctagccatgcatg

SEQ ID NO: 11180 - DNA, 530 bp, Homo sapiens
  source 1..530: mol_type = unassigned DNA
actagaaagacaatgtcttttgcataacaatttaatccatccattcatttactggtgaatattcatattctggaggtagaaatttcaggatttacacattggtggaaataggaaatgtagatgagccccaggatagtgacaacctctggtgggacgcctttgccactgaattttttgaagatgacgccacattaaccctttcattttgtttggaagatggaccaaagcgatacactatcggcaggaccctcatcccccgttactttagcactgtgtttgaaggaggggtgaccgacctgtattacattctcaaacactcgaaagagtcataccacaactcatccatcacggtggactgcgaccagtgtaccatggtcacccagcacgggaagcccatgtttaccaaggtatgtacagaaggcagactgatcttggagttcacctttgatgatctcatgagaatcaaaacatggcactttaccattagacaataccgagagttagtcccgagaagcatcctagccatgcat

SEQ ID NO: 11181 - DNA, 562 bp, Homo sapiens
  source 1..562: mol_type = unassigned DNA
ctctcctctcctgctatagagggctccgacagcagttcccagccagcgtgttcagcctgcctgcctgcctgcctctgtgtgtgtgtgagcgtgtgtgcgtgcgtctactttgtactgggaagaacacagcccatgtgctctgcatggacgttactgatactctgtttagcttgattttcgaaaagcaggcaagatgtccagcacaccacatgaccccttctattcttctcctttcggcccattttataggaggcatacaccatacatggtacagccagagtaccgaatctatgagatgaacaagagactgcagtctcgcacagaggatagtgacaacctctggtgggacgcctttgccactgaattttttgaagatgacgccacattaaccctttcattttgtttggaagatggaccaaagcgatacagaaccaagaatttaagaccaattggggaaaaaatgaatattaatggaaaatggttcttatgcatcacagcccacctcattccctagttccctctggaggattaattgtcccttctgtctgtgccagtgacatgt

SEQ ID NO: 11182 - DNA, 499 bp, Homo sapiens
  source 1..499: mol_type = unassigned DNA
caagagactgcagtctcgcacagaggatctctacatggcctcagaaaaccaatttgtttcttttctcatttgatatttctgctacttctgtctctctatatctacctgggagcccacagccgtgaattacggtatgaatcatgataatatgttacatttcctggagcactttgcattttaggtgccacatcattgggaactatgatgatgatgacgacgatgacgacgatacacttattctggattctatcagcaaattaaataatgatagtgacaacctctggtgggacgcctttgccactgaattttttgaagatgacgccacattaaccctttcattttgtttggaagatggaccaaagcgatacagaaccaagaatttaagaccaattggggaaaaaatgaatattaatggaaaatggtgttgctgccagaatttattgtttggggactggagaagagaactgttctacacaataaaaaattattgagaaacaca

SEQ ID NO: 11183 - DNA, 2314 bp, Homo sapiens
  source 1..2314: mol_type = unassigned DNA
agctattcttaggagcctctcaagagctccacgcagcccggctgggcagcaagggacagaacaggcaaggcggccgctgacagcaccagcatgtcttacagtgtgaccctgactgggcccgggccctggggcttccgtctgcaggggggcaaggacttcaacatgcccctcactatctcccggatcacaccaggcagcaaggcagcccagtcccagctcagccagggtgacctcgtggtggccattgacggcgtcaacacagacaccatgacccacctggaagcccagaacaagatcaagtctgccagctacaacttgagcctcaccctgcagaaatcaaagcgtcccattcccatctccacgacagcacctccagtccagacccctctgccggtgatccctcaccagaaggaccccgctctggacacgaacggcagcctggtggcacccagccccagccctgaggcgagggccagcccaggcaccccaggcaccccggagctcaggcccacctttagccctgccttctcccggccctccgccttctcctcactcgccgaggcctctgaccctggccctccgcgggccagcctgagggccaagaccagcccagagggggcccgggacctactcggcccaaaagccctgccgggctcgagccagccgaggcaatataacaaccccattggcctgtactcggcagagaccctgagggagatggctcagatgtaccagatgagcctccgagggaaggcctcgggtgtcggactcccaggaggcgccgactaccaggaacgcttcaaccccagtgccctgaaggactcggccctgtccacccacaagcccatcgaggtgaaggggctgggcggcaaggccaccatcatccatgcgcagtacaacacgcccatcagcatgtattcccaggatgccatcatggatgccatcgctgggcaggcccaagcccaaggcagtgacttcagtgggagcctccctattaaggaccttgccgtagacagcgcctctcccgtctaccaggctgtgattaagagccagaacaagccagaagatgaggctgacgagtgggcacgccgttcctccaacctgcagtctcgctccttccgcatcctggcccagatgacggggacagaattcatgcaagaccctgatgaagaagctctgcgaaggtcaaggccccaggcctcttcctacagccccgcagtggccgcctcttcagcacctgccacccacaccagctacagtgagggccccgccgcccctgcacccaagccccgggttgtcaccactgccagcatccggccttctgtctaccagccagtgcctgcatctacctacagcccgtccccaggggccaattacagtcccactccctacaccccctcccctgcccctgcctacaccccctcccctgcccctgcctacaccccctcacctgtccccacctacactccatccccagcaccagcctataccccctcacctgcccccaactataaccctgcaccctcggtggcctacagcgggggccctgcggagcctgccagccgtccaccctgggtgacagatgatagcttctcccagaagtttgccccgggcaagagcaccacctccatcagcaagcagaccctgccccggggaggcccagcctacaccccagcgggtcctcaggtgccaccacttgccagggggaccgtccagagggctgagcgattcccagccagcagccggactccactctgcggtcactgcaacaatgtcatccggggcccatttctggtagccatgggccgttcttggcaccctgaagagttcacctgtgcctactgcaagacttccctggcagatgtgtgctttgtggaagagcagaacaacgtttactgtgagcgatgttatgagcaattctttgccccgctgtgtgccaagtgcaacaccaaaattatgggggaagtaatgcatgccttgagacagacatggcacaccacctgcttcgtctgtgcggcctgcaagaagccttttgggaacagcctcttccacatggaagacggggagccctactgcgagaaagactacatcaatctgttcagcaccaagtgccatggctgcgatttccccgtggaggctggcgacaagtttatcgaagccctgggccacacttggcacgacacctgcttcatttgcgcagtctgccatgtgaatctggaggggcagccgttctactccaagaaggacagacccctgtgcaagaagcacgcacacaccatcaacttgtaggcggccaaggccgcctgtgctgacg

SEQ ID NO: 11184 - DNA, 1598 bp, Homo sapiens
  source 1..1598: mol_type = unassigned DNA
gcaggcggagtgcctgagtgccctctcactcaaccctctctaccctttgtctgcagaggcggccgctgacagcaccagcatgtcttacagtgtgaccctgactgggcccgggccctggggcttccgtctgcaggggggcaaggacttcaacatgcccctcactatctcccggatcacaccaggcagcaaggcagcccagtcccagctcagccagggtgacctcgtggtggccattgacggcgtcaacacagacaccatgacccacctggaagcccagaacaagatcaagtctgccagctacaacttgagcctcaccctgcagaaatcaaagcgtcccattcccatctccacgacagcacctccagtccagacccctctgccggtgatccctcaccagaaggtggtagtcaactctccagccaacgccgactaccaggaacgcttcaaccccagtgccctgaaggactcggccctgtccacccacaagcccatcgaggtgaaggggctgggcggcaaggccaccatcatccatgcgcagtacaacacgcccatcagcatgtattcccaggatgccatcatggatgccatcgctgggcaggcccaagcccaaggcagtgacttcagtgggagcctccctattaaggaccttgccgtagacagcgcctctcccgtctaccaggctgtgattaagagccagaacaagccagaagatgaggctgacgagtgggcacgccgttcctccaacctgcagtctcgctccttccgcatcctggcccagatgacggggacagaattcatgcaagaccctgatgaagaagctctgcgaaggtcaagggaaaggtttgaaacggaacgtaacagcccacgttttgccaaattgcgcaactggcaccatggcctttcagcccaaatccttaatgttaaaagctaaaaggctgcctggaatccccccaccccaacaggctggactccctccatccttacccccacacagatctggcatgtgagccccacggtgatgcttgacaatgtataactctgctgggggcacctctgatggccaaccgcagcatttctgtcctctgcccaccccagagctgatgctggggcccagccccctgcagctctgtacccaccaaacctccccagggcaaccctcgccaccccccaaatagcccgtagcccaatcccctgccctctgcacagggccttagctgtagaccagagagggcaggaggggtttgctggcataacaccccagaaccaagggaaatggatgggccgctgctcagtttcccaccatcctcagctcctggcctcatcccctcctagaatgagtcacccgtagatcagggtctggggaagaggctgatccctggcgctgcccggctccctcgctgccctctggagctcagggcagcccggaatagggctctttgaagaggaagtagaagccccagggtaatgaggcagagacccctcctggcagtggtgaggtgggggcatgcaccctcctttctgtaccgtgtgtgctggctccatagttctctcttctgtacatataagcatgcttgttctgaaataaagaagatttgaag

SEQ ID NO: 11185 - DNA, 5297 bp, Homo sapiens
  source 1..5297: mol_type = unassigned DNA
gcggccgctgacagcaccagcatgtcttacagtgtgaccctgactgggcccgggccctggggcttccgtctgcaggggggcaaggacttcaacatgcccctcactatctcccggatcacaccaggcagcaaggcagcccagtcccagctcagccagggtgacctcgtggtggccattgacggcgtcaacacagacaccatgacccacctggaagcccagaacaagatcaagtctgccagctacaacttgagcctcaccctgcagaaatcaaagcgtcccattcccatctccacgacagcacctccagtccagacccctctgccggtgatccctcaccagaaggaccccgctctggacacgaacggcagcctggtggcacccagccccagccctgaggcgagggccagcccaggcaccccaggcaccccggagctcaggcccacctttagccctgccttctcccggccctccgccttctcctcactcgccgaggcctctgaccctggccctccgcgggccagcctgagggccaagaccagcccagagggggcccgggacctactcggcccaaaagccctgccgggctcgagccagccgaggcaatataacaaccccattggcctgtactcggcagagaccctgagggagatggctcagatgtaccagatgagcctccgagggaaggcctcgggtgtcggactcccaggagggagcctccctattaaggaccttgccgtagacagcgcctctcccgtctaccaggctgtgattaagagccagaacaagccagaagatgaggctgacgagtgggcacgccgttcctccaacctgcagtctcgctccttccgcatcctggcccagatgacggggacagaattcatgcaagaccctgatgaagaagctctgcgaaggtcaagcacccctattgagcatgcgccggtgtgcaccagccaggccaccaccccgctgctgcccgcttctgcccagccacctgctgctgcctctcccagtgcggcttcgccacccctggccacagctgctgcccacactgccatcgcctccgcctccaccacagcccctgcttcaagtcctgccgacagcccaaggccccaggcctcttcctacagccccgcagtggccgcctcttcagcacctgccacccacaccagctacagtgagggccccgccgcccctgcacccaagccccgggttgtcaccactgccagcatccggccttctgtctaccagccagtgcctgcatctacctacagcccgtccccaggggccaattacagtcccactccctacaccccctcccctgcccctgcctacaccccctcccctgcccctgcctacaccccctcacctgtccccacctacactccatccccagcaccagcctataccccctcacctgcccccaactataaccctgcaccctcggtggcctacagcgggggccctgcggagcctgccagccgtccaccctgggtgacagatgatagcttctcccagaagtttgccccgggcaagagcaccacctccatcagcaagcagaccctgccccggggaggcccagcctacaccccagcgggtcctcaggtgccaccacttgccagggggaccgtccagagggctgagcgattcccagccagcagccggactccactctgcggtcactgcaacaatgtcatccggggcccatttctggtagccatgggccgttcttggcaccctgaagagttcacctgtgcctactgcaagacttccctggcagatgtgtgctttgtggaagagcagaacaacgtttactgtgagcgatgttatgagcaattctttgccccgctgtgtgccaagtgcaacaccaaaattatgggggaagtaatgcatgccttgagacagacatggcacaccacctgcttcgtctgtgcggcctgcaagaagccttttgggaacagcctcttccacatggaagacggggagccctactgcgagaaagactacatcaatctgttcagcaccaagtgccatggctgcgatttccccgtggaggctggcgacaagtttatcgaagccctgggccacacttggcacgacacctgcttcatttgcgcagtctgccatgtgaatctggaggggcagccgttctactccaagaaggacagacccctgtgcaagaagcacgcacacaccatcaacttgtaggcggccaaggccgcctgtgctgacgaggcccggagctgctcctgctgctggcaacaaaggattcgggaggctgatgtttcttctgaggggaatggggagagagaggaagcgactgagccctttggaagtataattttaggttttttcttctgtacacagatcgtgcatttgcatagttcagactaggagccaaatgaagactcaaaaccaagctagttattaatccaagactggaattgtacttcagacatttagagcagaattccaagaactcaaaagtgaaaagcaacaagcagctttcccaaagcgatacacttgctttggtcaccagaggaggacagagcttagagcagctgtggagaatctgaagcattctgcggagttcttaagcgctcccctggcaaacaaattgaagtgccaaacagcactcgctgcagggtatttttagagtcatagctgagagcttgttagctaagacccattgggctttcctcaccaaaaaaggaagtgttattccattactagcgtcatggagctacctctgcgcatcagacttcagaccttgaacaaacttaaaaccttcttgggagcccggacgtccaaagagatgtcttctgggagccactgggcaattgccagggctccaggaagggctctggctcaggttgcagacagctgagaaaagatggccctgtcagccaccctctctcagtctgaaacatccaacatccccagaaggcttagctcctttttgaattgtgatgggaaagtagagttgggtttttccagttttgctctgtggtgtgtgagagatttttttaaaggctttgggttgtctttggcctttgtttagctttaagggttcgttagcatgagtgtccagtcgtgtgcatgaatttcaccccaacttgtgactgctcacttatgacgtctcccccagtaccctccatctcaaataggcttggtggcctgtggaaaagaagagagacagagagacagtgtctgaaacaggatggcagaataggctcacatgcccaaactctgggtggggaagaggaaacttactttctgccaccctcagtaagaacacacgaggaggcaggacctcccaccttcaggtctgcatcatccttttcaaatgttcctttaaatgcagcacactgagtttgtacaattgtgttaactgctggaagggacagatgcactgatatatatgcatttgctgttttggccaatattttgaaaatgtatgagctgagttgatctagctattatttaagtatttattgaagtagaggggccttcaaactactttatactagtgatagtttgagttaggtaagcatcttaaagctgtttggtgataaagaaggcagcttagattctgtggttggaaacagtgtagtcgcttccctttttaggaagccctgttaatatgctcattgaaaacatggcattgaagcaggcacttgcgtggatgtttctcacttgagcacgatatttaggctctcttccaactcactctattctgtcctcactcctgttttggatttttctctttgcatgtttgaaatgttttatgggaatgtattagaactcttttcttctaaggactgagacttccaggggattgccatcttacctgtctcttctccatgagggagaaggaagcagctagctatgtccctagctgcaggaagcccctattttttccaagcacgaagccaccagtctcccccagggagcatcaggaagggacatggatgtgctcctgccacagggcccttcctacctttggatctgtgagaaggtgaatacaaagcagcaggcagagtaaaatctgctgggactgcctggagatttgtcaggagctgcagacaagtaccttggagcattctgttatttttggaaagttcaaatatgcagggacaaggaggttgctgactgtactgacaggctctaagtcattttctccaaaaactatctattcaattatcaggggctggtcttgaggaaggaaaaaaaaaaaaaaacgttcccagaattcagtttccaaaatctctttttaaagggtttacacacacacacacacacacacacacacacacacacacacacacacacgatcattaaaaagtgtatgctctttaagaagaaaagtaaaatatctcaaaggacggtttcaccaccgtcctttattgaatcaatttttctacatttcagagcaagtgtagattctgagggactcctatttgccaaaaagacaaaactagcaaaaaaaaaacaaaaaaacaaaaaaaaaaccacttaaaaggtagcaggaaaagaaggtagttttgagtgtggttcactcagtgtctgtgagtctggtgtagtgtcaggagtaaggccgtgtctagctcaagtttacatttggatgtcctacaacactaaacaaaatttttcataatccatggtggggagcacactttggagctacatttcttgtctcctcattgttgacattaattaaacatttataggccaggcacagtggctcacgcctgttatcccagcactttgggaggccgaggcaggtgaatcacctgaggtcaggagtttgaaaccagcctggccaatatggtgaaaccccatctctactaaaaatacacaaaattagccaggtgtggtggcaggcgcctgtagttccagctacttgggaggctgaggcaggaatctcctgaatcctggaggcggaggttgcagtgagccgagattatgccattgcactccagcctgggcaacaggagcgaaactccgttgcaaaaaaaaaaaaaaaaaaaaaattataatcacaactttttgcaatggagtgacttatatctgcagcttatatctgcagtgtttgtgttaggaacctagcttttataatgtgttaactttttaactcagtattctggctttgggattttttgttttgtttttggaaacatttcagaagtggaatgtagcctgttaaaggtgtgcacaaaaatattttgcatgtgtttttttttttgcctgtgtgaattctactttttagcaaaaataaagccccccaaaggatgtgcaaa

SEQ ID NO: 11186 - DNA, 1664 bp, Homo sapiens
  source 1..1664: mol_type = unassigned DNA
atgtcttacagtgtgaccctgactgggcccgggccctggggcttccgtctgcaggggggcaaggacttcaacatgcccctcactatctcccggatcacaccaggcagcaaggcagcccagtcccagctcagccagggtgacctcgtggtggccattgacggcgtcaacacagacaccatgacccacctggaagcccagaacaagatcaagtctgccagctacaacttgagcctcaccctgcagaaatcaaagcgtcccattcccatctccacgacagcacctccagtccagacccctctgccggtgatccctcaccagaaggaccccgctctggacacgaacggcagcctggtggcacccagccccagccctgaggcgagggccagcccaggcaccccaggcaccccggagctcaggcccacctttagccctgccttctcccggccctccgccttctcctcactcgccgaggcctctgaccctggccctccgcgggccagcctgagggccaagaccagcccagagggggcccgggacctactcggcccaaaagccctgccgggctcgagccagccgaggcaatataacaaccccattggcctgtactcggcagagaccctgagggagatggctcagatgtaccagatgagcctccgagggaaggcctcgggtgtcggactcccaggagggagcctccctattaaggaccttgccgtagacagcgcctctcccgtctaccaggctgtgattaagagccagaacaagccagaagatgaggctgacgagtgggcacgccgttcctccaacctgcagtctcgctccttccgcatcctggcccagatgacggggacagaattcatgcaagaccctgatgaagaagctctgcgaaggtcaagggaaaggtttgaaacggaacgtaacagcccacgttttgccaaattgcgcaactggcaccatggcctttcagcccaaatccttaatgttaaaagctaaaaggctgcctggaatccccccaccccaacaggctggactccctccatccttacccccacacagatctggcatgtgagccccacggtgatgcttgacaatgtataactctgctgggggcacctctgatggccaaccgcagcatttctgtcctctgcccaccccagagctgatgctggggcccagccccctgcagctctgtacccaccaaacctccccagggcaaccctcgccaccccccaaatagcccgtagcccaatcccctgccctctgcacagggccttagctgtagaccagagagggcaggaggggtttgctggcataacaccccagaaccaagggaaatggatgggccgctgctcagtttcccaccatcctcagctcctggcctcatcccctcctagaatgagtcacccgtagatcagggtctggggaagaggctgatccctggcgctgcccggctccctcgctgccctctggagctcagggcagcccggaatagggctctttgaagaggaagtagaagccccagggtaatgaggcagagacccctcctggcagtggtgaggtgggggcatgcaccctcctttctgtaccgtgtgtgctggctccatagttctctcttctgtacatataagcatgcttgttctgaaataaagaagatttgaagtgaa

SEQ ID NO: 11187 - DNA, 1868 bp, Homo sapiens
  source 1..1868: mol_type = unassigned DNA
atgtcttacagtgtgaccctgactgggcccgggccctggggcttccgtctgcaggggggcaaggacttcaacatgcccctcactatctcccggatcacaccaggcagcaaggcagcccagtcccagctcagccagggtgacctcgtggtggccattgacggcgtcaacacagacaccatgacccacctggaagcccagaacaagatcaagtctgccagctacaacttgagcctcaccctgcagaaatcaaagcgtcccattcccatctccacgacagcacctccagtccagacccctctgccggtgatccctcaccagaaggaccccgctctggacacgaacggcagcctggtggcacccagccccagccctgaggcgagggccagcccaggcaccccaggcaccccggagctcaggcccacctttagccctgccttctcccggccctccgccttctcctcactcgccgaggcctctgaccctggccctccgcgggccagcctgagggccaagaccagcccagagggggcccgggacctactcggcccaaaagccctgccgggctcgagccagccgaggcaatataacaaccccattggcctgtactcggcagagaccctgagggagatggctcagatgtaccagatgagcctccgagggaaggcctcgggtgtcggactcccaggaggcgccgactaccaggaacgcttcaaccccagtgccctgaaggactcggccctgtccacccacaagcccatcgaggtgaaggggctgggcggcaaggccaccatcatccatgcgcagtacaacacgcccatcagcatgtattcccaggatgccatcatggatgccatcgctgggcaggcccaagcccaaggcagtgacttcagtgggagcctccctattaaggaccttgccgtagacagcgcctctcccgtctaccaggctgtgattaagagccagaacaagccagaagatgaggctgacgagtgggcacgccgttcctccaacctgcagtctcgctccttccgcatcctggcccagatgacggggacagaattcatgcaagaccctgatgaagaagctctgcgaaggtcaagggaaaggtttgaaacggaacgtaacagcccacgttttgccaaattgcgcaactggcaccatggcctttcagcccaaatccttaatgttaaaagctaaaaggctgcctggaatccccccaccccaacaggctggactccctccatccttacccccacacagatctggcatgtgagccccacggtgatgcttgacaatgtataactctgctgggggcacctctgatggccaaccgcagcatttctgtcctctgcccaccccagagctgatgctggggcccagccccctgcagctctgtacccaccaaacctccccagggcaaccctcgccaccccccaaatagcccgtagcccaatcccctgccctctgcacagggccttagctgtagaccagagagggcaggaggggtttgctggcataacaccccagaaccaagggaaatggatgggccgctgctcagtttcccaccatcctcagctcctggcctcatcccctcctagaatgagtcacccgtagatcagggtctggggaagaggctgatccctggcgctgcccggctccctcgctgccctctggagctcagggcagcccggaatagggctctttgaagaggaagtagaagccccagggtaatgaggcagagacccctcctggcagtggtgaggtgggggcatgcaccctcctttctgtaccgtgtgtgctggctccatagttctctcttctgtacatataagcatgcttgttctgaaataaagaagatttgaagtgaa

SEQ ID NO: 11188 - DNA, 3873 bp, Homo sapiens
  source 1..3873: mol_type = unassigned DNA
atgtcttacagtgtgaccctgactgggcccgggccctggggcttccgtctgcaggggggcaaggacttcaacatgcccctcactatctcccggatcacaccaggcagcaaggcagcccagtcccagctcagccagggtgacctcgtggtggccattgacggcgtcaacacagacaccatgacccacctggaagcccagaacaagatcaagtctgccagctacaacttgagcctcaccctgcagaaatcaaagcgtcccattcccatctccacgacagcacctccagtccagacccctctgccggtgatccctcaccagaaggtggtagtcaactctccagccaacgccgactaccaggaacgcttcaaccccagtgccctgaaggactcggccctgtccacccacaagcccatcgaggtgaaggggctgggcggcaaggccaccatcatccatgcgcagtacaacacgcccatcagcatgtattcccaggatgccatcatggatgccatcgctgggcaggcccaagcccaaggcagtgacttcagtgggagcctccctattaaggaccttgccgtagacagcgcctctcccgtctaccaggctgtgattaagagccagaacaagccagaagatgaggctgacgagtgggcacgccgttcctccaacctgcagtctcgctccttccgcatcctggcccagatgacggggacagaattcatgcaagaccctgatgaagaagctctgcgaaggtcaaggccccaggcctcttcctacagccccgcagtggccgcctcttcagcacctgccacccacaccagctacagtgagggccccgccgcccctgcacccaagccccgggttgtcaccactgccagcatccggccttctgtctaccagccagtgcctgcatctacctacagcccgtccccaggggccaattacagtcccactccctacaccccctcccctgcccctgcctacaccccctcccctgcccctgcctacaccccctcacctgtccccacctacactccatccccagcaccagcctataccccctcacctgcccccaactataaccctgcaccctcggtggcctacagcgggggccctgcggagcctgccagccgtccaccctgggtgacagatgatagcttctcccagaagtttgccccgggcaagagcaccacctccatcagcaagcagaccctgccccggggaggcccagcctacaccccagcgggtcctcaggtgccaccacttgccagggggaccgtccagagggctgagcgattcccagccagcagccggactccactctgcggtcactgcaacaatgtcatccggggcccatttctggtagccatgggccgttcttggcaccctgaagagttcacctgtgcctactgcaagacttccctggcagatgtgtgctttgtggaagagcagaacaacgtttactgtgagcgatgttatgagcaattctttgccccgctgtgtgccaagtgcaacaccaaaattatgggggaagtaatgcatgccttgagacagacatggcacaccacctgcttcgtctgtgcggcctgcaagaagccttttgggaacagcctcttccacatggaagacggggagccctactgcgagaaagactacatcaatctgttcagcaccaagtgccatggctgcgatttccccgtggaggctggcgacaagtttatcgaagccctgggccacacttggcacgacacctgcttcatttgcgcagtctgccatgtgaatctggaggggcagccgttctactccaagaaggacagacccctgtgcaagaagcacgcacacaccatcaacttgtaggcggccaaggccgcctgtgctgacgaggcccggagctgctcctgctgctggcaacaaaggattcgggaggctgatgtttcttctgaggggaatggggagagagaggaagcgactgagccctttggaagtataattttaggttttttcttctgtacacagatcgtgcatttgcatagttcagactaggagccaaatgaagactcaaaaccaagctagttattaatccaagactggaattgtacttcagacatttagagcagaattccaagaactcaaaagtgaaaagcaacaagcagctttcccaaagcgatacacttgctttggtcaccagaggaggacagagcttagagcagctgtggagaatctgaagcattctgcggagttcttaagcgctcccctggcaaacaaattgaagtgccaaacagcactcgctgcagggtatttttagagtcatagctgagagcttgttagctaagacccattgggctttcctcaccaaaaaaggaagtgttattccattactagcgtcatggagctacctctgcgcatcagacttcagaccttgaacaaacttaaaaccttcttgggagcccggacgtccaaagagatgtcttctgggagccactgggcaattgccagggctccaggaagggctctggctcaggttgcagacagctgagaaaagatggccctgtcagccaccctctctcagtctgaaacatccaacatccccagaaggcttagctcctttttgaattgtgatgggaaagtagagttgggtttttccagttttgctctgtggtgtgtgagagatttttttaaaggctttgggttgtctttggcctttgtttagctttaagggttcgttagcatgagtgtccagtcgtgtgcatgaatttcaccccaacttgtgactgctcacttatgacgtctcccccagtaccctccatctcaaataggcttggtggcctgtggaaaagaagagagacagagagacagtgtctgaaacaggatggcagaataggctcacatgcccaaactctgggtggggaagaggaaacttactttctgccaccctcagtaagaacacacgaggaggcaggacctcccaccttcaggtctgcatcatccttttcaaatgttcctttaaatgcagcacactgagtttgtacaattgtgttaactgctggaagggacagatgcactgatatatatgcatttgctgttttggccaatattttgaaaatgtatgagctgagttgatctagctattatttaagtatttattgaagtagaggggccttcaaactactttatactagtgatagtttgagttaggtaagcatcttaaagctgtttggtgataaagaaggcagcttagattctgtggttggaaacagtgtagtcgcttccctttttaggaagccctgttaatatgctcattgaaaacatggcattgaagcaggcacttgcgtggatgtttctcacttgagcacgatatttaggctctcttccaactcactctattctgtcctcactcctgttttggatttttctctttgcatgtttgaaatgttttatgggaatgtattagaactcttttcttctaaggactgagacttccaggggattgccatcttacctgtctcttctccatgagggagaaggaagcagctagctatgtccctagctgcaggaagcccctattttttccaagcacgaagccaccagtctcccccagggagcatcaggaagggacatggatgtgctcctgccacagggcccttcctacctttggatctgtgagaaggtgaatacaaagcagcaggcagagtaaaatctgctgggactgcctggagatttgtcaggagctgcagacaagtaccttggagcattctgttatttttggaaagttcaaatatgcagggacaaggaggttgctgactgtactgacaggctctaagtcattttctccaaaaactatctattcaattatcaggggctggtcttgaggaagga

SEQ ID NO: 11189 - DNA, 433 bp, Homo sapiens
  source 1..433: mol_type = unassigned DNA
gtaatgcatgccttgagacagacatggcacaccacctgcttcgtctgtgcggcctgcaagaagccttttgggaacagcctcttccacatggaagacggggagccctactgcgagaaagactacatcaatctgttcagcaccaagtgccatggctgcgatttccccgtggaggctggcgacaagtttatcgaagccctgggccacacttggcacgacacctgcttcatttgcgcagtatgtctctagcttggggctctggctttctgagaagaggcaggagggaggaagtgggagccagatgaccaacctctacataccttgccacgctagctttctgacatcctgatcatttttaaaagctggcaaacaccatgatgcctcgatacatcacagtcgaacaaagtttcattcctaataattatttataaaccaa

SEQ ID NO: 11190 - DNA, 5436 bp, Homo sapiens
  source 1..5436: mol_type = unassigned DNA
acagtccatttatgggcgcagccgaaggcagatatcagtgtcgatggcattcgctcccagctattcttaggagcctctcaagagctccacgcagcccggctgggcagcaagggacagaacagaggcggccgctgacagcaccagcatgtcttacagtgtgaccctgactgggcccgggccctggggcttccgtctgcaggggggcaaggacttcaacatgcccctcactatctcccggatcacaccaggcagcaaggcagcccagtcccagctcagccagggtgacctcgtggtggccattgacggcgtcaacacagacaccatgacccacctggaagcccagaacaagatcaagtctgccagctacaacttgagcctcaccctgcagaaatcaaagcgtcccattcccatctccacgacagcacctccagtccagacccctctgccggtgatccctcaccagaaggaccccgctctggacacgaacggcagcctggtggcacccagccccagccctgaggcgagggccagcccaggcaccccaggcaccccggagctcaggcccacctttagccctgccttctcccggccctccgccttctcctcactcgccgaggcctctgaccctggccctccgcgggccagcctgagggccaagaccagcccagagggggcccgggacctactcggcccaaaagccctgccgggctcgagccagccgaggcaatataacaaccccattggcctgtactcggcagagaccctgagggagatggctcagatgtaccagatgagcctccgagggaaggcctcgggtgtcggactcccaggaggcgccgactaccaggaacgcttcaaccccagtgccctgaaggactcggccctgtccacccacaagcccatcgaggtgaaggggctgggcggcaaggccaccatcatccatgcgcagtacaacacgcccatcagcatgtattcccaggatgccatcatggatgccatcgctgggcaggcccaagcccaaggcagtgacttcagtgggagcctccctattaaggaccttgccgtagacagcgcctctcccgtctaccaggctgtgattaagagccagaacaagccagaagatgaggctgacgagtgggcacgccgttcctccaacctgcagtctcgctccttccgcatcctggcccagatgacggggacagaattcatgcaagaccctgatgaagaagctctgcgaaggtcaaggccccaggcctcttcctacagccccgcagtggccgcctcttcagcacctgccacccacaccagctacagtgagggccccgccgcccctgcacccaagccccgggttgtcaccactgccagcatccggccttctgtctaccagccagtgcctgcatctacctacagcccgtccccaggggccaattacagtcccactccctacaccccctcccctgcccctgcctacaccccctcccctgcccctgcctacaccccctcacctgtccccacctacactccatccccagcaccagcctataccccctcacctgcccccaactataaccctgcaccctcggtggcctacagcgggggccctgcggagcctgccagccgtccaccctgggtgacagatgatagcttctcccagaagtttgccccgggcaagagcaccacctccatcagcaagcagaccctgccccggggaggcccagcctacaccccagcgggtcctcaggtgccaccacttgccagggggaccgtccagagggctgagcgattcccagccagcagccggactccactctgcggtcactgcaacaatgtcatccggggcccatttctggtagccatgggccgttcttggcaccctgaagagttcacctgtgcctactgcaagacttccctggcagatgtgtgctttgtggaagagcagaacaacgtttactgtgagcgatgttatgagcaattctttgccccgctgtgtgccaagtgcaacaccaaaattatgggggaagtaatgcatgccttgagacagacatggcacaccacctgcttcgtctgtgcggcctgcaagaagccttttgggaacagcctcttccacatggaagacggggagccctactgcgagaaagactacatcaatctgttcagcaccaagtgccatggctgcgatttccccgtggaggctggcgacaagtttatcgaagccctgggccacacttggcacgacacctgcttcatttgcgcagtctgccatgtgaatctggaggggcagccgttctactccaagaaggacagacccctgtgcaagaagcacgcacacaccatcaacttgtaggcggccaaggccgcctgtgctgacgaggcccggagctgctcctgctgctggcaacaaaggattcgggaggctgatgtttcttctgaggggaatggggagagagaggaagcgactgagccctttggaagtataattttaggttttttcttctgtacacagatcgtgcatttgcatagttcagactaggagccaaatgaagactcaaaaccaagctagttattaatccaagactggaattgtacttcagacatttagagcagaattccaagaactcaaaagtgaaaagcaacaagcagctttcccaaagcgatacacttgctttggtcaccagaggaggacagagcttagagcagctgtggagaatctgaagcattctgcggagttcttaagcgctcccctggcaaacaaattgaagtgccaaacagcactcgctgcagggtatttttagagtcatagctgagagcttgttagctaagacccattgggctttcctcaccaaaaaaggaagtgttattccattactagcgtcatggagctacctctgcgcatcagacttcagaccttgaacaaacttaaaaccttcttgggagcccggacgtccaaagagatgtcttctgggagccactgggcaattgccagggctccaggaagggctctggctcaggttgcagacagctgagaaaagatggccctgtcagccaccctctctcagtctgaaacatccaacatccccagaaggcttagctcctttttgaattgtgatgggaaagtagagttgggtttttccagttttgctctgtggtgtgtgagagatttttttaaaggctttgggttgtctttggcctttgtttagctttaagggttcgttagcatgagtgtccagtcgtgtgcatgaatttcaccccaacttgtgactgctcacttatgacgtctcccccagtaccctccatctcaaataggcttggtggcctgtggaaaagaagagagacagagagacagtgtctgaaacaggatggcagaataggctcacatgcccaaactctgggtggggaagaggaaacttactttctgccaccctcagtaagaacacacgaggaggcaggacctcccaccttcaggtctgcatcatccttttcaaatgttcctttaaatgcagcacactgagtttgtacaattgtgttaactgctggaagggacagatgcactgatatatatgcatttgctgttttggccaatattttgaaaatgtatgagctgagttgatctagctattatttaagtatttattgaagtagaggggccttcaaactactttatactagtgatagtttgagttaggtaagcatcttaaagctgtttggtgataaagaaggcagcttagattctgtggttggaaacagtgtagtcgcttccctttttaggaagccctgttaatatgctcattgaaaacatggcattgaagcaggcacttgcgtggatgtttctcacttgagcacgatatttaggctctcttccaactcactctattctgtcctcactcctgttttggatttttctctttgcatgtttgaaatgttttatgggaatgtattagaactcttttcttctaaggactgagacttccaggggattgccatcttacctgtctcttctccatgagggagaaggaagcagctagctatgtccctagctgcaggaagcccctattttttccaagcacgaagccaccagtctcccccagggagcatcaggaagggacatggatgtgctcctgccacagggcccttcctacctttggatctgtgagaaggtgaatacaaagcagcaggcagagtaaaatctgctgggactgcctggagatttgtcaggagctgcagacaagtaccttggagcattctgttatttttggaaagttcaaatatgcagggacaaggaggttgctgactgtactgacaggctctaagtcattttctccaaaaactatctattcaattatcaggggctggtcttgaggaaggaaaaaaaaaaaaaaacgttcccagaattcagtttccaaaatctctttttaaagggtttacacacacacacacacacacacacacacacacacacacacacacacacgatcattaaaaagtgtatgctctttaagaagaaaagtaaaatatctcaaaggacggtttcaccaccgtcctttattgaatcaatttttctacatttcagagcaagtgtagattctgagggactcctatttgccaaaaagacaaaactagcaaaaaaaaaacaaaaaaacaaaaaaaaaaccacttaaaaggtagcaggaaaagaaggtagttttgagtgtggttcactcagtgtctgtgagtctggtgtagtgtcaggagtaaggccgtgtctagctcaagtttacatttggatgtcctacaacactaaacaaaatttttcataatccatggtggggagcacactttggagctacatttcttgtctcctcattgttgacattaattaaacatttataggccaggcacagtggctcacgcctgttatcccagcactttgggaggccgaggcaggtgaatcacctgaggtcaggagtttgaaaccagcctggccaatatggtgaaaccccatctctactaaaaatacacaaaattagccaggtgtggtggcaggcgcctgtagttccagctacttgggaggctgaggcaggaatctcctgaatcctggaggcggaggttgcagtgagccgagattatgccattgcactccagcctgggcaacaggagcgaaactccgttgcaaaaaaaaaaaaaaaaaaaaaattataatcacaactttttgcaatggagtgacttatatctgcagcttatatctgcagtgtttgtgttaggaacctagcttttataatgtgttaactttttaactcagtattctggctttgggattttttgttttgtttttggaaacatttcagaagtggaatgtagcctgttaaaggtgtgcacaaaaatattttgcatgtgtttttttttttgcctgtgtgaattctactttttagcaaaaataaagccccccaaaggatgtgcaaa

SEQ ID NO: 11191 - DNA, 1889 bp, Homo sapiens
  source 1..1889: mol_type = unassigned DNA
atgtcttacagtgtgaccctgactgggcccgggccctggggcttccgtctgcaggggggcaaggacttcaacatgcccctcactatctcccggatcacaccaggcagcaaggcagcccagtcccagctcagccagggtgacctcgtggtggccattgacggcgtcaacacagacaccatgacccacctggaagcccagaacaagatcaagtctgccagctacaacttgagcctcaccctgcagaaatcaaagcgtcccattcccatctccacgacagcacctccagtccagacccctctgccggtgatccctcaccagaaggaccccgctctggacacgaacggcagcctggtggcacccagccccagccctgaggcgagggccagcccaggcaccccaggcaccccggagctcaggcccacctttagccctgccttctcccggccctccgccttctcctcactcgccgaggcctctgaccctggccctccgcgggccagcctgagggccaagaccagcccagagggggcccgggacctactcggcccaaaagccctgccgggctcgagccagccgaggcaatataacaaccccattggcctgtactcggcagagaccctgagggagatggctcagatgtaccagatgagcctccgagggaaggcctcgggtgtcggactcccaggagggtggtagtcaactctccagccaacgccgactaccaggaacgcttcaaccccagtgccctgaaggactcggccctgtccacccacaagcccatcgaggtgaaggggctgggcggcaaggccaccatcatccatgcgcagtacaacacgcccatcagcatgtattcccaggatgccatcatggatgccatcgctgggcaggcccaagcccaaggcagtgacttcagtgggagcctccctattaaggaccttgccgtagacagcgcctctcccgtctaccaggctgtgattaagagccagaacaagccagaagatgaggctgacgagtgggcacgccgttcctccaacctgcagtctcgctccttccgcatcctggcccagatgacggggacagaattcatgcaagaccctgatgaagaagctctgcgaaggtcaagggaaaggtttgaaacggaacgtaacagcccacgttttgccaaattgcgcaactggcaccatggcctttcagcccaaatccttaatgttaaaagctaaaaggctgcctggaatccccccaccccaacaggctggactccctccatccttacccccacacagatctggcatgtgagccccacggtgatgcttgacaatgtataactctgctgggggcacctctgatggccaaccgcagcatttctgtcctctgcccaccccagagctgatgctggggcccagccccctgcagctctgtacccaccaaacctccccagggcaaccctcgccaccccccaaatagcccgtagcccaatcccctgccctctgcacagggccttagctgtagaccagagagggcaggaggggtttgctggcataacaccccagaaccaagggaaatggatgggccgctgctcagtttcccaccatcctcagctcctggcctcatcccctcctagaatgagtcacccgtagatcagggtctggggaagaggctgatccctggcgctgcccggctccctcgctgccctctggagctcagggcagcccggaatagggctctttgaagaggaagtagaagccccagggtaatgaggcagagacccctcctggcagtggtgaggtgggggcatgcaccctcctttctgtaccgtgtgtgctggctccatagttctctcttctgtacatataagcatgcttgttctgaaataaagaagatttgaagtg

SEQ ID NO: 11192 - DNA, 1444 bp, Homo sapiens
  source 1..1444: mol_type = unassigned DNA
ccgtgcaccgtgtgtgcgcgcggcgttgaaatgccctgcacgtcggggcagcgggacagatcccagggtgcccagggagtctccaagtgcctcactcctcccgccgcaaacatgacagagaactccgacaaagttcccattgccctggtgggacctgatgacgtggaattctgcagccccccggcgtacgctacgctgacggtgaagccctccagccccgcgcggctgctcaaggtgggagccgtggtcctcatttcgggagctgtgctgctgctctttggggccatcggggccttctacttctggaaggggagcgacagtcacatttacaatgtccattacaccatgagtatcaatgggaaattacaagatgggtcaatggaaatagacgctgggaacaacttggagacctttaaaatgggaagtggagctgaagaagcaattgcagttaatgatttccagaatggcatcacaggaattcgttttgctggaggagagaagtgctacattaaagcgcaagtgaaggctcgtattcctgaggtgggcgccgtgaccaaacagagcatctcctccaaactggaaggcaagatcatgccagtcaaatatgaagaaaattctcttatctgggtggctgtagatcagcctgtgaaggacaacagcttcttgagttctaaggtgttagaactctgcggtgaccttcctattttctggcttaaaccaacctatccaaaagaaatccagagggaaagaagagaagtggtaagaaaaattgttccaactaccacaaaaagaccacacagtggaccacggagcaacccaggcgctggaagactgaataatgaaaccagacccagtgttcaagaggactcacaagccttcaatcctgataatccttatcatcaggaaggggaaagcatgacattcgaccctagactggatcacgaaggaatctgttgtatagaatgtaggcggagctacacccactgccagaagatctgtgaacccctggggggctattacccatggccttataattatcaaggctgccgttcggcctgcagagtcatcatgccatgtagctggtgggtggcccgtatcttgggcatggtgtgaaatcacttcatatatcatgtgctgtaaaataagaactagctgaagagacaaccaaagaagcattaaggcaggttgatgctgataggaccacaaaatatttttacactcaacctgagcggttattcttgacactcttaacagaattttttcaattgttttccagaactttagtatatgcaaatgtactgaaagggtagttcaagtctaaaatgccataacccctttattatttgttattttttatttgcattgctttgccataagtcttcccttgcttgtatcttccaaagctattttgaaataaacatgaaaatttacagtttgccaaaaa

SEQ ID NO: 11193 - DNA, 1410 bp, Homo sapiens
  source 1..1410: mol_type = unassigned DNA
gccctgcacgtcggggcagcgggacagatcccagggtgcccagggagtctccaagtgcctcactcctcccgccgcaaacatgacagagaactccgacaaagttcccattgccctggtgggacctgatgacgtggaattctgcagccccccggcgtacgctacgctgacggtgaagccctccagccccgcgcggctgctcaaggtgggagccgtggtcctcatttcgggagctgtgctgctgctctttggggccatcggggccttctacttctggaaggggagcgacagtcacatttacaatgtccattacaccatgagtatcaatgggaaattacaagatgggtcaatggaaatagacgctgggaacaacttggagacctttaaaatgggaagtggagctgaagaagcaattgcagttaatgatttccagaatggcatcacaggaattcgttttgctggaggagagaagtgctacattaaagcgcaagtgaaggctcgtattcctgaggtgggcgccgtgaccaaacagagcatctcctccaaactggaaggcaagatcatgccagtcaaatatgaagaaaattctcttatctgggtggctgtagatcagcctgtgaaggacaacagcttcttgagttctaaggtgttagaactctgcggtgaccttcctattttctggcttaaaccaacctatccaaaagaaatccagagggaaagaagagaagtggtaagaaaaattgttccaactaccacaaaaagaccacacagtggaccacggagcaacccaggcgctggaagactgaataatgaaaccagacccagtgttcaagaggactcacaagccttcaatcctgataatccttatcatcagcaggaaggggaaagcatgacattcgaccctagactggatcacgaaggaatctgttgtatagaatgtaggcggagctacacccactgccagaagatctgtgaacccctggggggctattacccatggccttataattatcaaggctgccgttcggcctgcagagtcatcatgccatgtagctggtgggtggcccgtatcttgggcatggtgtgaaatcacttcatatatcatgtgctgtaaaataagaactagctgaagagacaaccaaagaagcattaaggcaggttgatgctgataggaccacaaaatatttttacactcaacctgagcggttattcttgacactcttaacagaattttttcaattgttttccagaactttagtatatgcaaatgtactgaaagggtagttcaagtctaaaatgccataacccctttattatttgttattttttatttgcattgctttgccataagtcttcccttgcttgtatcttccaaagctattttgaaataaacatgaaaatttacagtttgcc

SEQ ID NO: 11194 - DNA, 731 bp, Homo sapiens
  source 1..731: mol_type = unassigned DNA
ccgactgcaaaggaccctcgggagggagcgcggcgaaaggggcacccgtaggagcccgggcgagctgtttcccgcccgactccccactccctgggggctaccgcgtggggcccgggtgcgctgggggccgcaggtgctggcggcacaaacgcgacggtccctctcccgccccggcccgcaggcgtacgctacgctgacggtgaagccctccagccccgcgcggctgctcaaggtgggagccgtggtcctcatttcgggagctgtgctgctgctctttggggccatcggggccttctacttctggaaggggagcgacagtcacatttacaatgtccattacaccatgagtatcaatgggaaattacaagatgggtcaatggaaatagacgctgggaacaacttggagacctttaaaatgggaagtggagctgaagaagcaattgcagttaatgatttccagaatggcatcacaggaattcgttttgctggaggagagaagtgctacattaaagcgcaagtgaaggctcgtattcctgaggtgggcgccgtgaccaaacagagcatctcctccaaactggaaggcaagatcatgccagtcaaatatgaagaaaattctcttatctgggtggctgtagatcagcctgtgaaggacaacagcttcttgagttctaaggtgttagaactctgcggtgaccttcctattttctggcttaaaccaacctatccaaaag

SEQ ID NO: 11195 - DNA, 574 bp, Homo sapiens
  source 1..574: mol_type = unassigned DNA
taaagaaatgagagatgcagaattctaaggctaaatagctaggaagtattcattcaaacttgaatattcttcaaagagagtgtgggggcaactctaatcagaggaagaaactaaaggaagtaaaaccagatgttttccaccaaagccctccttttggctggtctgatttctaccgcactggcagggccatgggctaatatatgtgctggcaagtcttccaatgagatccggacgtgtgaccgccatggctgtggacagtactctgctcaaagaagtcagaggcctcaccagggtgtggacatcttgtgctctgctggatctactgtgtacgcaccattcactggaatgattgtgggccaggagaaaccttatcaaaacaagaatgctatcaataatggtgttcgaatatctggaagagaaattaccacagacaccccaatcttcaacaactactaccctgatcagtcagcggccgtcaacatcaagacgagatcctccaccagcaagaagatgatgactcactgaaggttcagatgatggttagcatttttttttcagtcaagcatttttaaat

SEQ ID NO: 11196 - DNA, 812 bp, Homo sapiens
  source 1..812: mol_type = unassigned DNA
ggaaggacgatcttcccataaatacataaagtccagggaaaactacagtgaaaacagaattgtcaggatcaactgtgtgactgataaggcaaatggggataggaaatgtctgaggccaggagctctgctctcacttttctcctttttagcactggcagggccatgggctaatatatgtgctggcaagtcttccaatgagatccggacgtgtgaccgccatggctgtggacagtactctgctcaaagaagtcagaggcctcaccagggtgtggacatcttgtgctctgctggatctactgtgtacgcaccattcactggaatgattgtgggccaggagaaaccttatcaaaacaagaatgctatcaataatggtgttcgaatatctggaagagctttaaaaaatgtaacccatcatcagatgaaacatgaggacagctactcatctttgggagtcttagagtgtcactattattggccacaagaatcttcaatgaaggatcatccactggtgtatcttcaattttgattgatgataatgattttgagttgataaaaacaactcacatccctttagaagataaacaggccagcaaaaatacttgctagaagagtgccatgactcagtttataagagagaggctgctattcctctatcctcctccataggaaaatttccattagccagctttaccaactaccataatttaatgcctatcatatatcaggtactattctgactctgggtttataatggtaaacaaaatagaatctctgccttcaatgagtttatgtttggtataaggagaagagaa

SEQ ID NO: 11197 - DNA, 1077 bp, Homo sapiens
  source 1..1077: mol_type = unassigned DNA
aaatcaaatagctatccatggaatattagaacttgacttgctccatcctcttaaactttttgtgtctcacactaaagaaatgagagatgcagaattctaaggctaaatagctaggaagtattcattcaaacttgaatattcttcaaagagagtgtgggggcaactctaatcagaggaagaaactaaaggaagtaaaaccagatgttttccaccaaagccctccttttggctggtctgatttctaccgcactggcagggccatgggctaatatatgtgctggcaagtcttccaatgagatccggacgtgtgaccgccatggctgtggacagtactctgctcaaagaagtcagaggcctcaccagggtgtggacatcttgtgctctgctggatctactgtgtacgcaccattcactggaatgattgtgggccaggagaaaccttatcaaaacaagaatgctatcaataatggtgttcgaatatctggaagaggtttttgtgtcaaaatgttctacattaagccaattaagtataaaggtcctattaagaagggagaaaaacttggaactctattgcccttgcagaaagtttatcctggcatacaatcgcatgtgcacattgaaaactgtgactcgagtgaccctactgcatacctgtaaatcgaaggccaatggtcagatcttcaaaataaaaagtcatcttaaaaacctggatgcatacccttctcttcaagaaatttgtgttcacaaaggaaaaatgcatgaagggatggataccccattttccatgacatgattattacacattgcatgcctgtatcaaaacatctcacgtacctcataaacaaatacacctatgtacccacaaaaattttttaattaaaaaaaggaaatttgagtttaaatagaaacatgataaatgcaagaaagaaaacattttgattttaactcattgtcactctgatgttcatgtgaactggttgcttcgggctctttgatctgtcacctatggaatctgagtggttttattttttagatttctcagtcccgaagatctaagataaataaacaagagaactt

SEQ ID NO: 11198 - DNA, 762 bp, Homo sapiens
  source 1..762: mol_type = unassigned DNA
ctgaatcaggaaataaaattctggaaggacgatcttcccataaatacataaagtccagggaaaactacagtgaaaacagaattgtcaggatcaactgtgtgactgataaggcaaatggggataggaaatgtctgaggccaggagctctgctctcacttttctcctttttagcactggcagggccatgggctaatatatgtgctggcaagtcttccaatgagatccggacgtgtgaccgccatggctgtggacagtactctgctcaaagaagtcagaggcctcaccagggtgtggacatcttgtgctctgctggatctactgtgtacgcaccattcactggaatgattgtgggccaggagaaaccttatcaaaacaagaatgctatcaataatggtgttcgaatatctggaagaggtttttgtgtcaaaatgttctacattaagccaattaagtataaaggtcctattaagaagggagaaaaacttggaactctattgcccttgcagaaagtttatcctggcatacaatcgcatgtgcacattgaaaactgtgactcgagtgaccctactgcatacctgtaaatcgaaggccaatggtcagatcttcaaaataaaaagtcatcttaaaaacctggatgcatacccttctcttcaagaaatttgtgttcacaaaggaaaaatgcatgaagggatggataccccattttccatgacatgattattacacattgcatgcctgtatcaaaacatctcacgtacctca

SEQ ID NO: 11199 - DNA, 789 bp, Homo sapiens
  source 1..789: mol_type = unassigned DNA
aaactttttgtgtctcacactaaagaaatgagagatgcagaattctaaggctaaatagctaggaagtattcattcaaacttgaatattcttcaaagagagtgtgggggcaactctaatcagaggaagaaactaaaggaagtaaaaccagatgttttccaccaaagccctccttttggctggtctgatttctaccgcactggcagggccatgggctaatatatgtgctggcaagtcttccaatgagatccggacgtgtgaccgccatggctgtggacagtactctgctcaaagaagtcagaggcctcaccagggtgtggacatcttgtgctctgctggatctactgtgtacgcaccattcactggaatgattgtgggccaggagaaaccttatcaaaacaagaatgctatcaataatggtgttcgaatatctggaagaggtaagagaggtggagtctacacctggggtgcctcctggagatgttgatgctcatttatttaatgcaggttccatacgtagagattttgtacttctttcaaaatgataaaacctggaacagaaagaatatagagtgtacccaaactagctgatgcattttttaaaaaacttttattttaggttcaggggtacatgtgcacatttgttatataggtaaaccacatgtcacagacatttggtgtacagattattttgtcacccaggtaataagcatagtacccgatagatatttttttctgatcctctcccagctgaggcactttcaaggacgtttcaccattttctctgaaaa

SEQ ID NO: 11200 - DNA, 1924 bp, Homo sapiens
  source 1..1924: mol_type = unassigned DNA
aggctctccaccaaggagggactgggccagagtcctcgcgagggcacgcggcgtggtccccagagctaggccggagcgcgggccgctgacgccactgtcgggtgaggctcggtgcatccatggggagccgccctccgtgcggggcgacctcgtctgcgcggcgggcgtgccagttccccgcacccatggcagcggccagagagccggagttgccgcaggaagcccccgccacggaacccgcgcccccgccggcctgccgcttcttcctggaaggccgctgccgcttcggcgcccgctgccgccagccccaccctggggcgccggcgccgcctggccgcgaggcgcagccggaggccggggccaagaagccgccgctgcgcacagccgcggacgtcatccagcgcatccgctgggacccgcgcctcgaccccgccgacttctcggtgggctacgtcgaccgctttctgggtgtgcgcgaggagcccttcagcgccttttgctgggaccagccgctggcggcgctcgggccgggcgtgctggcagtgccccagcaccgcgtgcgcttcttccgcttccatggccgccttgtgtgggaccgcgcctcgcgcaccgacctcgtctttggctctggctcggcggcgggacgcgggcccaccatcctggacgcaccgaacaccgagggcgcccacggggcagagggtgccgagtggacactggcggggacaggtcaggaggcccaggctgcccccaagcgagggagcacaaggccgctctgcacagggcaccaggaaccaggcgtggaggaacccggagagctggaggcggcccaggagagggcgctgggcacagctgctgatttgggaacactggccccaagaggacgcctcgccggagtgactgaggaggcactgaagccaacagcagccaccaggaccacattgctggggggcaaggaagcacaggccctgggagtcccggggggctccgctgagacgacagaagccgagtggggtcctgcggcctggcccgaggacaaaagggcccgccttagtgttgcagccccttgccaaccgcgccccacacattttgtggccctcatggtgaccgagcctgggctacaagcagaagtgaccaaggcccaggaatacctggtccacgtggccccacactgcgccaacttcctagtgccctctcagaacctacacctgaccctggccctgctgcgactggcaggcgctggggaggaggccgctgccattggagctctgagacgggccctcttggccccggggctaaatgcaccccctcggctgagctttagaaagctggtcctcctgggcccgcatgtgctgtgtgccccaccctctcccacactggaaagcatggcacaagtgctgagccagaggctggaagccgaggggctgagtacactacagtctccagggcagctgcacccccacctcaccgtggccaaggtgccccatggttcccaggtccacctccccaagctggagttcaccctcagccaggaagtggggtgccagcccctgcagacactctggctgtgccgtatagggaggacaggggggcctttccagcccctggctgagatccgcctggagtgacacccccagacctctggaggagacaatggatgcaaacagcccacacaggaaagacaaagcaggagcgtgcacgctctctctttctctctttaattttggtttctctcaagcttccaaatggtgctcagtgctccaaggaaaggaaggaaggaaggaaaaggaggggagaggaggggaaggggaggcagaggaggaacatctggaaaaaaagcagcctgacagtccagctgtttgcaaactcatagcacatcctccagttacatggcagaagagggagggagggagggccaaaaagaaaa

SEQ ID NO: 11201 - DNA, 1916 bp, Homo sapiens
  source 1..1916: mol_type = unassigned DNA
aggctctccaccaaggagggactgggccagagtcctcgcgagggcacgcggcgtggtccccagagctaggccggagcgcgggccgctgacgccactgtcgggtgaggctcggtgcatccaaggggagccgccctccgtgcggggcgacctcgtctgcgcggcgggcgtgccagttccccgcacccatggcagcggccagagagccggagttgccgcaggaagcccccgccacggaacccgcgcccccgccggcctgccgcttcttcctggaaggccgctgccgcttcggcgcccgctgccgccagccccaccctggggcgccggcgccgcctggccgcgaggcgcagccggaggccggggccaagaagccgccgctgcgcacagccgcggacgtcatccagcgcatccgctgggacccgcgcctcgaccccgccgacttctcggtgggctacgtcgaccgctttctgggtgtgcgcgaggagcccttcagcgccttttgctgggaccagccgctggcggcgctcgggccgggcgtgctggcagtgccccagcaccgcgtgcgcttcttccgcttccgtggccgccttgtgtgggaccgcgcctcgcgcaccgacctcgtctttggctctggctcggcggcgggacgcgggcccaccatcctggacgcaccgaacaccgagggcgcccacggggcagagggtgccgagtggacactggcggggacaggtcaggaggcccaggctgcccccaagcgagggagcacaaggccgctctgcacagggcaccaggaaccaggcgtggaggaacccggagagctggaggcggcccaggagagggcgctgggcacagctgctgatttgggaacactggccccaagaggacgcctcgccggagtgactgaggcactgaagccaacagcagccaccaggaccacattgctggggggcaaggaagcacaggccctgggagtcccggggggctccgctgagacgacagaagccgagtggggtcctgcggcctggcccgaggacaaaagggcccgccttagtgttgcagccccttgccaaccgcgccccacacattttgtggccctcatggtgaccgagcctgggctacaagcagaagtgaccaaggcccaggaatacctggtccacgtggccccacactgcgccaacttcctagtgccctctcagaacctacacctgaccctggccctgctgcgactggcaggcgctggggaggaggccgctgccattggagctctgagacgggccctcttggccccggggctaaatgcaccccctcggctgagctttagaaagctggtcctcctgggcccgcatgtgctgtgtgccccaccctctcccacactggaaagcatggcacaagtgctgagccagaggctggaagccgaggggctgagtacactacagtctccagggcagctgcacccccacctcaccgtggccaaggtgccccatggttcccaggtccacctccccaagctggagttcaccctcagccaggaagtggggtgccagcccctgcagacactctggctgtgccgtatagggaggacaggggggcctttccagcccctggctgagatccccctggagtgacacccccagacctctggaggagacaatggatgcaaacagcccacacaggaaagacaaagcaggagcgtgcacgctctctctttctctctttaattttggtttctctcaagcttccaaatggtgctcagtgctccaaggaaaggaaggaaggaaggaaaaggaggggagaggaggggaaggggaggcagaggaggaacatctggaaaaaaagcagcctgacagtccagctgtttgcaaactcatagcacatcctccagttacatggcagaagagggagggagggagggccaaaaa

SEQ ID NO: 11202 - DNA, 1919 bp, Homo sapiens
  source 1..1919: mol_type = unassigned DNA
aggctctccaccaaggagggactgggccagagtcctcgcgagggcacgcggcgtggtccccagagctaggccggagcgcgggccgctgacgccactgtcgggtgaggctcggtgcatccatggggagccgccctccgtgcggggcgacctcgtctgcgcggcgggcgtgccagttccccgcacccatggcagcggccagagagccggagttgccgcaggaagcccccgccacggaacccgcgcccccgccggcctgccgcttcttcctggaaggccgctgccgcttcggcgcccgctgccgccagccccaccctggggcgccggcgccgcctggccgcgaggcgcagccggaggccggggccaagaagccgccgctgcgcacagccgcggacgtcatccagcgcatccgctgggacccgcgcctcgaccccgccgacttctcggtgggctacgtcgaccgctttctgggtgtgcgcgaggagcccttcagcgccttttgctgggaccagccgctggcggcgctcgggccgggcgtgctggcagtgccccagcaccgcgtgcgcttcttccgcttccatggccgccttgtgtgggaccgcgcctcgcgcaccgacctcgtctttggctctggctcggcggcgggacgcgggcccaccatcctggacgcaccgaacaccgagggcgcccacggggcagagggtgccgagtggacactggcggggacaggtcaggaggcccaggctgcccccaagcgagggagcacaaggccgctctgcacagggcaccaggaaccaggcgtggaggaacccggagagctggaggcggcccaggagagggcgctgggcacagctgctgatttgggaacactggccccaagaggacgcctcgccggagtgactgaggaggcactgaagccaacagcagccaccaggaccacattgctggggggcaaggaagcacaggccctgggagtcccggggggctccgctgagacgacagaagccgagtggggtcctgcggcctggcccgaggacaaaagggcccgccttagtgttgcagccccttgccaaccgcgccccacacattttgtggccctcatggtgaccgagcctgggctacaagcagaagtgaccaaggcccaggaatacctggtccacgtggccccacactgcgccaacttcctagtgccctctcagaacctacacctgaccctggccctgctgcgactggcaggcgctggggaggaggccgctgccattggagctctgagacgggccctcttggccccggggctaaatgcaccccctcggctgagctttagaaagctggtcctcctgggcccgcatgtgctgtgtgccccaccctctcccacactggaaagcatggcacaagtgctgagccagaggctggaagccgaggggctgagtacactacagtctccagggcagctgcacccccacctcaccgtggccaaggtgccccatggttcccaggtccacctccccaagctggagttcaccctcagccaggaagtggggtgccagcccctgcagacactctggctgtgccgtatagggaggacaggggggcctttccagcccctggctgagatccgcctggagtgacacccccagacctctggaggagacaatggatgcaaacagcccacacaggaaagacaaagcaggagcgtgcacgctctctctttctctctttaattttggtttctctcaagcttccaaatggtgctcagtgctccaaggaaaggaaggaaggaaggaaaaggaggggagaggaggggaaggggaggcagaggaggaacatctggaaaaaaagcagcctgacagtccagctgtttgcaaactcatagcacatcctccagttacatggcagaagagggagggagggagggccaaaaa

SEQ ID NO: 11203 - DNA, 1921 bp, Homo sapiens
  source 1..1921: mol_type = unassigned DNA
aggctctccaccaaggagggactgggccagagtcctcgcgagggcacgcggcgtggtccccagagctaggccggagcgcgggccgctgacgccactgtcgggtgaggctcggtgcatccaaggggagccgccctccgtgcggggcgacctcgtctgcgcggcgggcgtgccagttccccgcacccatggcagcggccagagagccggagttgccgcaggaagcccccgccacggaacccgcgcccccgccggcctgccgcttcttcctggaaggccgctgccgcttcggcgcccgctgccgccagccccaccctggggcgccggcgccgcctggccgcgaggcgcagccggaggccggggccaagaagccgccgctgcgcacagccgcggacgtcatccagcgcatccgctgggacccgcgcctcgaccccgccgacttctcggtgggctacgtcgaccgctttctgggtgtgcgcgaggagcccttcagcgccttttgctgggaccagccgctggcggcgctcgggccgggcgtgctggcagtgccccagcaccgcgtgcgcttcttccgcttccgtggccgccttgtgtgggaccgcgcctcgcgcaccgacctcgtctttggctctggctcggcggcgggacgcgggcccaccatcctggacgcaccgaacaccgagggcgcccacggggcagagggtgccgagtggacactggcggggacaggtcaggaggcccaggctgcccccaagcgagggagcacaaggccgctctgcacagggcaccaggaaccaggcgtggaggaacccggagagctggaggcggcccaggagagggcgctgggcacagctgctgatttgggaacactggccccaagaggacgcctcgccggagtgactgaggcactgaagccaacagcagccaccaggaccacattgctggggggcaaggaagcacaggccctgggagtcccggggggctccgctgagacgacagaagccgagtggggtcctgcggcctggcccgaggacaaaagggcccgccttagtgttgcagccccttgccaaccgcgccccacacattttgtggccctcatggtgaccgagcctgggctacaagcagaagtgaccaaggcccaggaatacctggtccacgtggccccacactgcgccaacttcctagtgccctctcagaacctacacctgaccctggccctgctgcgactggcaggcgctggggaggaggccgctgccattggagctctgagacgggccctcttggccccggggctaaatgcaccccctcggctgagctttagaaagctggtcctcctgggcccgcatgtgctgtgtgccccaccctctcccacactggaaagcatggcacaagtgctgagccagaggctggaagccgaggggctgagtacactacagtctccagggcagctgcacccccacctcaccgtggccaaggtgccccatggttcccaggtccacctccccaagctggagttcaccctcagccaggaagtggggtgccagcccctgcagacactctggctgtgccgtatagggaggacaggggggcctttccagcccctggctgagatccccctggagtgacacccccagacctctggaggagacaatggatgcaaacagcccacacaggaaagacaaagcaggagcgtgcacgctctctctttctctctttaattttggtttctctcaagcttccaaatggtgctcagtgctccaaggaaaggaaggaaggaaggaaaaggaggggagaggaggggaaggggaggcagaggaggaacatctggaaaaaaagcagcctgacagtccagctgtttgcaaactcatagcacatcctccagttacatggcagaagagggagggagggagggccaaaaagaaaa

SEQ ID NO: 11204 - DNA, 2268 bp, Homo sapiens
  source 1..2268: mol_type = unassigned DNA
agactaagctgcaacactggcagagcctcccaaggaagggaggagggaggacagaggccaaggcggctcctggccaccctcgcagcttcctccctccctggccacaaggacccaaagctcagagggatggatgaacagacaggaaggctcaggctggacacgtattgtatgagtgccaagcagatctgggcatggagcaaatgctcaggaaggctgtgggatgagcacatgaaatggatggaaggatggacggacagatggacagatggatggatggatggatggatggatgagtggagcccaacaccagctctcaggtcctacggaggtggcctctctcagcagacgttcatcttcactgacggggaagatgaggccctggccaggcacacgggcaacgtggtcatcacaaactgctcggccgcccacagccgccaggcgctgtcctgcaagatggccgtggagtatgaccgcttcatcgagtccggcaggaagtggttctgccacgtggacgatgacaactacgtcaacctgcgggccctgctgcggctgctggccagctacccgcacacgcgggacgtctacgtcggcaagcccagcctggacaggcccatccaggccatggagcgggtcagcgagaacaaggtgcgtcctgtccacttctggtttgccacgggcggcgctggcttctgcatcagccgtgggctggctctgaagatgagcccgtgggccagcgggggtcacttcatgaatacggctgagcggatccggctgcctgatgactgcaccatcggctacatcgtggaggccctgctgggtgtgcccctcatccgcagcggcctcttccactcccacctggagaacctgcagcaggtgcccacctcggagctccacgagcaggtgacgctgagctacggtatgtttgaaaacaagcggaacgccgtccacgtgaaggggcccttctcggtggaggccgacccatccaggttccgctccatccactgccacctgtacccggacacaccctggtgtccccgcactgccatcttctagtggccatggctgagacccaatccctgggcgcccctggtatccaaagggcccagggaccctgttgcgctgccctggcctcggcattcgaggctcccctagggccgtgcctgtgcgtgtgcgtgtgcgtgtgtgtgtgtgtgtactgcatgcccacccgggtagcaggctgctgggcagttctgctctgtggaggggcgggcaccagcgccacttatgtgcctctgctccgagggccagtgggctgcagggcctgcttggaggaaggatttgtgtgtcggaggccactccgagggcaattctgttaggatttttggatctttctacagctacggggctccgggctactttgcagggatgcgatgcgtaggtgcctttctcttcctgctgaccacaagctctgtgctgggggtacctgtgccctgaagtcctggcccctgtgtcatagccccaagtacgactcactgagccatgctcattgcaggggaggctgggtctgggggtgcgtgacccaatccccttcctcctggcctggacgctgtggcttaagagtaacagcagccaccgcccagttccagtggccccacgaagcccccagtggctggctgtccagctgggcaaacagtggcacccctcccagctcttctgagtggggagtcttccaggcctcctcagaggtcttccctttgcctccccaggacagggtgagtcagagctcagcatttaatctcctctccaaagtagagagcaagtcgcccacagtgggcgtgtctgtaaatattgtgacagtatttttttactgtgctgttttttttgaaaggggatgggtaaaaagtagggtgttcttgttttttgcttgggagggtgggggtgggggagggtcttattttatcttatcttttctgtggatcagaaaaaacagaagccaaactcggggtcatctttgtttttaaagctgaagtgggactgtctggcactctgtgtatttatgcgttccagcatctggaacctcccatccctgccctcctcctgtgtagctgccacctccccgctgggcccagcatggctcacctgtcccgtgggctgtgtttcttgttgtttttctctttgcaaagacatagctaggaaagcgaatgataagggaaaagttctcagggaattgaagtgttgttgctatggtgacgtccttttgctgtgaataaaggtgctctttgcagc

SEQ ID NO: 11205 - DNA, 2058 bp, Homo sapiens
  source 1..2058: mol_type = unassigned DNA
ggagggttttgctctttgtgtgggtgtgtgagtggctatgatcctagttgtccagctgctgcgtggagaataagtaaagcaggtctgaatgacaccaggtcgctgctgtcttgcggctgacattcaggtagagacgttcatcttcactgacggggaagatgaggccctggccaggcacacgggcaacgtggtcatcacaaactgctcggccgcccacagccgccaggcgctgtcctgcaagatggccgtggagtatgaccgcttcatcgagtccggcaggaagtggttctgccacgtggacgatgacaactacgtcaacctgcgggccctgctgcggctgctggccagctacccgcacacgcgggacgtctacgtcggcaagcccagcctggacaggcccatccaggccatggagcgggtcagcgagaacaaggtgcgtcctgtccacttctggtttgccacgggcggcgctggcttctgcatcagccgtgggctggctctgaagatgagcccgtgggccagcgggggtcacttcatgaatacggctgagcggatccggctgcctgatgactgcaccatcggctacatcgtggaggccctgctgggtgtgcccctcatccgcagcggcctcttccactcccacctggagaacctgcagcaggtgcccacctcggagctccacgagcaggtgacgctgagctacggtatgtttgaaaacaagcggaacgccgtccacgtgaaggggcccttctcggtggaggccgacccatccaggttccgctccatccactgccacctgtacccggacacaccctggtgtccccgcactgccatcttctagtggccatggctgagacccaatccctgggcgcccctggtatccaaagggcccagggaccctgttgcgctgccctggcctcggcattcgaggctcccctagggccgtgcctgtgcgtgtgcgtgtgcgtgtgtgtgtgtgtgtactgcatgcccacccgggtagcaggctgctgggcagttctgctctgtggaggggcgggcaccagcgccacttatgtgcctctgctccgagggccagtgggctgcagggcctgcttggaggaaggatttgtgtgtcggaggccactccgagggcaattctgttaggatttttggatctttctacagctacggggctccgggctactttgcagggatgcgatgcgtaggtgcctttctcttcctgctgaccacaagctctgtgctgggggtacctgtgccctgaagtcctggcccctgtgtcatagccccaagtacgactcactgagccatgctcattgcaggggaggctgggtctgggggtgcgtgacccaatccccttcctcctggcctggacgctgtggcttaagagtaacagcagccaccgcccagttccagtggccccacgaagcccccagtggctggctgtccagctgggcaaacagtggcacccctcccagctcttctgagtggggagtcttccaggcctcctcagaggtcttccctttgcctccccaggacagggtgagtcagagctcagcatttaatctcctctccaaagtagagagcaagtcgcccacagtgggcgtgtctgtaaatattgtgacagtatttttttactgtgctgttttttttgaaaggggatgggtaaaaagtagggtgttcttgttttttgcttgggagggtgggggtgggggagggtcttattttatcttatcttttctgtggatcagaaaaaacagaagccaaactcggggtcatctttgtttttaaagctgaagtgggactgtctggcactctgtgtatttatgcgttccagcatctggaacctcccatccctgccctcctcctgtgtagctgccacctccccgctgggcccagcatggctcacctgtcccgtgggctgtgtttcttgttgtttttctctttgcaaagacatagctaggaaagcgaatgataagggaaaagttctcagggaattgaagtgttgttgctatggtgacgtccttttgctgtgaataaaggtgctctttgcagcaa

SEQ ID NO: 11206 - DNA, 2377 bp, Homo sapiens
  source 1..2377: mol_type = unassigned DNA
cgcgcggccgccaccccaccatgctcaagcgctgcggccggcgcctgctgctggcgctggcgggcgcgctgctcgcctgcctgctggtgctcaccgccgacccgccgccgcctccactgcccgccgagcgcggccggcgcgcgctgcgcagcctggcgggccccgcgggggctgccccggcgcccgggctgggggcggcggcggcggcgcccggggcgctggtccgcgacgtgcacagtctgtccgagtacttcagcctgctcacccgcgcgcgcagagatgcgggcccgccgcccggggctgccccccgccccgccgacggccacccgcgccccctggccgagccgctcgcgccccgagacgtcttcatcgctgtcaagaccaccaaaaagttccaccgcgcgcgcctcgacctgctgctggagacctggatctcgcgccacaaggagatgacgttcatcttcactgacggggaagatgaggccctggccaggcacacgggcaacgtggtcatcacaaactgctcggccgcccacagccgccaggcgctgtcctgcaagatggccgtggagtatgaccgcttcatcgagtccggcaggaagtggttctgccacgtggacgatgacaactacgtcaacctgcgggccctgctgcggctgctggccagctacccgcacacgcgggacgtctacgtcggcaagcccagcctggacaggcccatccaggccatggagcgggtcagcgagaacaaggtgcgtcctgtccacttctggtttgccacgggcggcgctggcttctgcatcagccgtgggctggctctgaagatgagcccgtgggccagcgggggtcacttcatgaatacggctgagcggatccggctgcctgatgactgcaccatcggctacatcgtggaggccctgctgggtgtgcccctcatccgcagcggcctcttccactcccacctggagaacctgcagcaggtgcccacctcggagctccacgagcaggtgacgctgagctacggtatgtttgaaaacaagcggaacgccgtccacgtgaaggggcccttctcggtggaggccgacccatccaggttccgctccatccactgccacctgtacccggacacaccctggtgtccccgcactgccatcttctagtggccatggctgagacccaatccctgggcgcccctggtatccaaagggcccagggaccctgttgcgctgccctggcctcggcattcgaggctcccctagggccgtgcctgtgcgtgtgcgtgtgcgtgtgtgtgtgtgtgtactgcatgcccacccgggtagcaggctgctgggcagttctgctctgtggaggggcgggcaccagcgccacttatgtgcctctgctccgagggccagtgggctgcagggcctgcttggaggaaggatttgtgtgtcggaggccactccgagggcaattctgttaggatttttggatctttctacagctacggggctccgggctactttgcagggatgcgatgcgtaggtgcctttctcttcctgctgaccacaagctctgtgctgggggtacctgtgccctgaagtcctggcccctgtgtcatagccccaagtacgactcactgagccatgctcattgcaggggaggctgggtctgggggtgcgtgacccaatccccttcctcctggcctggacgctgtggcttaagagtaacagcagccaccgcccagttccagtggccccacgaagcccccagtggctggctgtccagctgggcaaacagtggcacccctcccagctcttctgagtggggagtcttccaggcctcctcagaggtcttccctttgcctccccaggacagggtgagtcagagctcagcatttaatctcctctccaaagtagagagcaagtcgcccacagtgggcgtgtctgtaaatattgtgacagtatttttttactgtgctgttttttttgaaaggggatgggtaaaaagtagggtgttcttgttttttgcttgggagggtgggggtgggggagggtcttattttatcttatcttttctgtggatcagaaaaaacagaagccaaactcggggtcatctttgtttttaaagctgaagtgggactgtctggcactctgtgtatttatgcgttccagcatctggaacctcccatccctgccctcctcctgtgtagctgccacctccccgctgggcccagcatggctcacctgtcccgtgggctgtgtttcttgttgtttttctctttgcaaagacatagctaggaaagcgaatgataagggaaaagttctcagggaattgaagtgttgttgctatggtgacgtccttttgctgtgaataaaggtgctctttgcagcaa

SEQ ID NO: 11207 - DNA, 1377 bp, Homo sapiens
  source 1..1377: mol_type = unassigned DNA
atgctcaagcgctgcggccggcgcctgctgctggcgctggcgggcgcgctgctcgcctgcctgctggtgctcaccgccgacccgccgccgcctccactgcccgccgagcgcggccggcgcgcgctgcgcagcctggcgggccccgcgggggctgccccggcgcccgggctgggggcggcggcggcggcgcccggggcgctggtccgcgacgtgcacagtctgtccgagtacttcagcctgctcacccgcgcgcgcagagatgcgggcccgccgcccggggctgccccccgccccgccgacggccacccgcgccccctggccgagccgctcgcgccccgagacgtcttcatcgctgtcaagaccaccaaaaagttccaccgcgcgcgcctcgacctgctgctggagacctggatctcgcgccacaaggagatgacgttcatcttcactgacggggaagatgaggccctggccaggcacacgggcaacgtggtcatcacaaactgctcggccgcccacagccgccaggcgctgtcctgcaagatggccgtggagtatgaccgcttcatcgagtccggcaggaagtggttctgccacgtggacgatgacaactacgtcaacctgcgggccctgctgcggctgctggccagctacccgcacacgcgggacgtctacgtcggcaagcccagcctggacaggcccatccaggccatggagcgggtcagcgagaacaaggtgcgtcctgtccacttctggtttgccacgggcggcgctggcttctgcatcagccgtgggctggctctgaagatgagcccgtgggccagcgggggtcacttcatgaatacggctgagcggatccggctgcctgatgactgcaccatcggctacatcgtggaggccctgctgggtgtgcccctcatccgcagcggcctcttccactcccacctggagaacctgcagcaggtgcccacctcggagctccacgagcaggtgacgctgagctacggtatgtttgaaaacaagcggaacgccgtccacgtgaaggggcccttctcggtggaggccgacccatccaggtggggaaactgaggcacggagcagctgatgcccaaggtccagcagccatgctggtgggctggggaggcgctcagactccaagccaggcaggccgtgggtccggccgccccacagctggtaatgctgcacctccctctcctgtgatgtggccccaggccccgaccccgctcaggggtggtgggaagagtcctggagagcaggagcagtgccggagcccccactgcagctggtcccagcccctgcagagatccagacgcttgttttttaaatacagcagctctgcggtgcttttccttcctcaaa

SEQ ID NO: 11208 - DNA, 804 bp, Homo sapiens
  source 1..804: mol_type = unassigned DNA
attcctccccgtgtgccggcaggcccaggcgggcgccggcgactcctggccccgccctggcggccccctcctcttccgcagagcgctcctggcagggggcggccgcgtgctggcacagacgttcatcttcactgacggggaagatgaggccctggccaggcacacgggcaacgtggtcatcacaaactgctcggccgcccacagccgccaggcgctgtcctgcaagatggccgtggagtatgaccgcttcatcgagtccggcaggaagtgagtgtggccccgggggacccccatctccctgcccgagcctggcagcgcccgccccggcatgccctcccccgatggccctgccttgtcctcaggtggttctgccacgtggacgatgacaactacgtcaacctgcgggccctgctgcggctgctggccagctacccgcacacgcgggacgtctacgtcggcaagcccagcctggacaggcccatccaggccatggagcgggtcagcgagaacaaggtgcgtcctgtccacttctggtttgccacgggcggcgctggcttctgcatcagccgtgggctggctctgaagatgagcccgtgggccagcgggggtcacttcatgaatacggctgagcggatccggctgcctgatgactgcaccatcggctacatcgtggaggccctgctgggtgtgcccctcatccgcagcggcctcttccactcccacctggagaacctgcagcaggtgcccacctcggagctccacgagcaggtgacgctgagctacggtatgtttgaaaacaagcgg

SEQ ID NO: 11209 - DNA, 1968 bp, Homo sapiens
  source 1..1968: mol_type = unassigned DNA
atgacaccaggtcgctgctgtcttgcggctgacattcaggtagagacgttcatcttcactgacggggaagatgaggccctggccaggcacacgggcaacgtggtcatcacaaactgctcggccgcccacagccgccaggcgctgtcctgcaagatggccgtggagtatgaccgcttcatcgagtccggcaggaagtggttctgccacgtggacgatgacaactacgtcaacctgcgggccctgctgcggctgctggccagctacccgcacacgcgggacgtctacgtcggcaagcccagcctggacaggcccatccaggccatggagcgggtcagcgagaacaaggtgcgtcctgtccacttctggtttgccacgggcggcgctggcttctgcatcagccgtgggctggctctgaagatgagcccgtgggccagcgggggtcacttcatgaatacggctgagcggatccggctgcctgatgactgcaccatcggctacatcgtggaggccctgctgggtgtgcccctcatccgcagcggcctcttccactcccacctggagaacctgcagcaggtgcccacctcggagctccacgagcaggtgacgctgagctacggtatgtttgaaaacaagcggaacgccgtccacgtgaaggggcccttctcggtggaggccgacccatccaggttccgctccatccactgccacctgtacccggacacaccctggtgtccccgcactgccatcttctagtggccatggctgagacccaatccctgggcgcccctggtatccaaagggcccagggaccctgttgcgctgccctggcctcggcattcgaggctcccctagggccgtgcctgtgcgtgtgcgtgtgcgtgtgtgtgtgtgtgtactgcatgcccacccgggtagcaggctgctgggcagttctgctctgtggaggggcgggcaccagcgccacttatgtgcctctgctccgagggccagtgggctgcagggcctgcttggaggaaggatttgtgtgtcggaggccactccgagggcaattctgttaggatttttggatctttctacagctacggggctccgggctactttgcagggatgcgatgcgtaggtgcctttctcttcctgctgaccacaagctctgtgctgggggtacctgtgccctgaagtcctggcccctgtgtcatagccccaagtacgactcactgagccatgctcattgcaggggaggctgggtctgggggtgcgtgacccaatccccttcctcctggcctggacgctgtggcttaagagtaacagcagccaccgcccagttccagtggccccacgaagcccccagtggctggctgtccagctgggcaaacagtggcacccctcccagctcttctgagtggggagtcttccaggcctcctcagaggtcttccctttgcctccccaggacagggtgagtcagagctcagcatttaatctcctctccaaagtagagagcaagtcgcccacagtgggcgtgtctgtaaatattgtgacagtatttttttactgtgctgttttttttgaaaggggatgggtaaaaagtagggtgttcttgttttttgcttgggagggtgggggtgggggagggtcttattttatcttatcttttctgtggatcagaaaaaacagaagccaaactcggggtcatctttgtttttaaagctgaagtgggactgtctggcactctgtgtatttatgcgttccagcatctggaacctcccatccctgccctcctcctgtgtagctgccacctccccgctgggcccagcatggctcacctgtcccgtgggctgtgtttcttgttgtttttctctttgcaaagacatagctaggaaagcgaatgataagggaaaagttctcagggaattgaagtgttgttgctatggtgacgtccttttgctgtgaataaaggtgctctttgcagc

SEQ ID NO: 11210 - DNA, 1969 bp, Homo sapiens
  source 1..1969: mol_type = unassigned DNA
ggtggggatgaagggctgcctgctgaaggccgattttctccttcagacgttcatcttcactgacggggaagatgaggccctggccaggcacacgggcaacgtggtcatcacaaactgctcggccgcccacagccgccaggcgctgtcctgcaagatggccgtggagtatgaccgcttcatcgagtccggcaggaagtggttctgccacgtggacgatgacaactacgtcaacctgcgggccctgctgcggctgctggccagctacccgcacacgcgggacgtctacgtcggcaagcccagcctggacaggcccatccaggccatggagcgggtcagcgagaacaaggtgcgtcctgtccacttctggtttgccacgggcggcgctggcttctgcatcagccgtgggctggctctgaagatgagcccgtgggccagcgggggtcacttcatgaatacggctgagcggatccggctgcctgatgactgcaccatcggctacatcgtggaggccctgctgggtgtgcccctcatccgcagcggcctcttccactcccacctggagaacctgcagcaggtgcccacctcggagctccacgagcaggtgacgctgagctacggtatgtttgaaaacaagcggaacgccgtccacgtgaaggggcccttctcggtggaggccgacccatccaggttccgctccatccactgccacctgtacccggacacaccctggtgtccccgcactgccatcttctagtggccatggctgagacccaatccctgggcgcccctggtatccaaagggcccagggaccctgttgcgctgccctggcctcggcattcgaggctcccctagggccgtgcctgtgcgtgtgcgtgtgcgtgtgtgtgtgtgtgtactgcatgcccacccgggtagcaggctgctgggcagttctgctctgtggaggggcgggcaccagcgccacttatgtgcctctgctccgagggccagtgggctgcagggcctgcttggaggaaggatttgtgtgtcggaggccactccgagggcaattctgttaggatttttggatctttctacagctacggggctccgggctactttgcagggatgcgatgcgtaggtgcctttctcttcctgctgaccacaagctctgtgctgggggtacctgtgccctgaagtcctggcccctgtgtcatagccccaagtacgactcactgagccatgctcattgcaggggaggctgggtctgggggtgcgtgacccaatccccttcctcctggcctggacgctgtggcttaagagtaacagcagccaccgcccagttccagtggccccacgaagcccccagtggctggctgtccagctgggcaaacagtggcacccctcccagctcttctgagtggggagtcttccaggcctcctcagaggtcttccctttgcctccccaggacagggtgagtcagagctcagcatttaatctcctctccaaagtagagagcaagtcgcccacagtgggcgtgtctgtaaatattgtgacagtatttttttactgtgctgttttttttgaaaggggatgggtaaaaagtagggtgttcttgttttttgcttgggagggtgggggtgggggagggtcttattttatcttatcttttctgtggatcagaaaaaacagaagccaaactcggggtcatctttgtttttaaagctgaagtgggactgtctggcactctgtgtatttatgcgttccagcatctggaacctcccatccctgccctcctcctgtgtagctgccacctccccgctgggcccagcatggctcacctgtcccgtgggctgtgtttcttgttgtttttctctttgcaaagacatagctaggaaagcgaatgataagggaaaagttctcagggaattgaagtgttgttgctatggtgacgtccttttgctgtgaataaaggtgctctttgcagc

SEQ ID NO: 11211 - DNA, 319 bp, Homo sapiens
  source 1..319: mol_type = unassigned DNA
aaaccaaatactcagctgcgttaggaattccttctgattcttgctgcaggaaaatggcagacaatttttcgctccatgatgcgttatctgggtctggaaacccaaaccctcaaggatggcctggcgcatgggggaaccagcctgctggggcagggggctacccaggggcttcctatcctggggcctaccccgggcaggcacccccaggggcttatcctggacaggcacctccaggcgcctaccctggagcacctggagcttatcccggagcacctgcacctggagtctacccagggccacccagcggccctggggccta

SEQ ID NO: 11212 - DNA, 1146 bp, Homo sapiens
  source 1..1146: mol_type = unassigned DNA
aggtcgcgcccctcagtgcccgcgctctccccgtcgggagcttcctggtcgcccctgcggcggcggctcggggtgtctggccggcgcggggctcgcccagcctggtccggggagaggactggctgggcaggggcgccgccccgcctcgggagaggcgggccgggcggggctgggagtatttgaggctcggagccaccgccccgccggcgcccgcagcacctcctcgccagcagccgtccggagccagccaacgagcggaaaatggcagacaatttttcgctccatgatgcgttatctgggtctggaaacccaaaccctcaaggatggcctggcgcatgggggaaccagcctgctggggcagggggctacccaggggcttcctatcctggggcctaccccgggcaggcacccccaggggcttatcctggacaggcacctccaggcgcctaccctggagcacctggagcttatcccggagcacctgcacctggagtctacccagggccacccagcggccctggggcctacccatcttctggacagccaagtgccaccggagcctaccctgccactggcccctatggcgcccctgctgggccactgattgtgccttataacctgcctttgcctgggggagtggtgcctcgcatgctgataacaattctgggcacggtgaagcccaatgcaaacagaattgctttagatttccaaagagggaatgatgttgccttccactttaacccacgcttcaatgagaacaacaggagagtcattgtttgcaatacaaagctggataataactggggaagggaagaaagacagtcggttttcccatttgaaagtgggaaaccattcaaaatacaagtactggttgaacctgaccacttcaaggttgcagtgaatgatgctcacttgttgcagtacaatcatcgggttaaaaaactcaatgaaatcagcaaactgggaatttctggtgacatagacctcaccagtgcttcatataccatgatataatctgaaaggggcagattaaaaaaaaaaaaagaatctaaaccttacatgtgtaaaggtttcatgttcactgtgagtgaaaatttttacattcatcaatatccctcttgtaagtcatctacttaataaatatta

SEQ ID NO: 11213 - DNA, 630 bp, Homo sapiens
  source 1..630: mol_type = unassigned DNA
gcagcacctcctcgccagcagccgtccggagccagccaacgagcgctccatgatgcgttatctgggtctggaaacccaaaccctcaaggatggcctggcgcatgggggaaccagcctgctggggcagggggctacccaggggcttcctatcctggggcctaccccgggcaggcacccccaggggcttatcctggacaggcacctccaggcgcctaccctggagcacctggagcttatcccggagcacctgcacctggagtctacccagggccacccagcggccctggggcctacccatcttctggacagccaagtgccaccggagcctaccctgccactggcccctatggcgcccctgctgggccactgattgtgccttataacctgcctttgcctgggggagtggtgcctcgcatgctgataacaattctgggcacggtgaagcccaatgcaaacagaattgctttagatttccaaagagggaatgatgttgccttccactttaacccacgcttcaatgagaacaacaggagagtcattgtttgcaatacaaagctggataataactggggaagggaagaaagacagtcggttttcccatttgaaagtgggaaaccattcaaagtaagt

SEQ ID NO: 11214 - DNA, 916 bp, Homo sapiens
  source 1..916: mol_type = unassigned DNA
cacctcctcgccagcagccgtccggagccagccaacgagcggaaaatggcagacaatttttcgctccatgatgcgttatctgggtctggaaacccaaaccctcaaggatggcctggcgcatgggggaaccagcctgctggggcagggggctacccaggggcttcctatcctggggcctaccccgggcaggcacccccaggggcttatcctggacaggcacctccaggcgcctaccctggagcacctggagcttatcccggagcacctgcacctggagtctacccagggccacccagcggccctggggcctacccatcttctggacagccaagtgccaccggagcctaccctgccactggcccctatggcgcccctgctgggccactgattgtgccttataacctgcctttgcctgggggagtggtgcctcgcatgctgataacaattctgggcacggtgaagcccaatgcaaacagaattgctttagatttccaaagagggaatgatgttgccttccactttaacccacgcttcaatgagaacaacaggagagtcattgtttgcaatacaaagctggataataactggggaagggaagaaagacagtcggttttcccatttgaaagtgggaaaccattcaaaagtctcgctctgtcgccaggctggagtacagtggcacgatcttggctcactacaacctccgcctcctgggttcaagcgatgctcctgcctcagcctcccaagtagctgggattataggcgtgcgctaccatgcccagctaacttttgtattttctgtagagacggggtttcaccatgttggccaggatggtcttgatctcttgacctcgtgatccgcccacctcagcttcccaaagtgctgggaggattacaggcatgagccaccatgcctggc

SEQ ID NO: 11215 - DNA, 1734 bp, Homo sapiens
  source 1..1734: mol_type = unassigned DNA
tggcaatctagctggatagcatccctgccccttgaagagatgtttttgtggcgccacactactgacttaggcataatgcctagagatggattagaactgcacaatgaactagtggtgaggttcagtttaatggaaattggtgaaagcttttaggataaaatgataatctttgtttctttcaggaaaatggcagacaatttttcggtaagtgttttatgcctgtttcttccccttgatcagctccacatggttgagggttgggggttttgtttttaccatgactttcccttttcactctcccactgcgtggcttcccctggactcatttgtccaatgagggcttgcaagctggagccttgtttttccagcagcagatttgggaagaaagccaggcagagcgaggcctgggactcactcacagtaaccctttcaccaaaaggcccagggcggaagggagtggactctgccggcaggagctgagaaatcctctgagtagcgggaagtgcggtacagtctgggcattctgatgtttgtgattgtttttctcacggtgatgaaaaagtatgtgctataagtagaggagcgctaactcctgacttgagctaattatgaaaatgcagccctccctgatctgagacgttgggaggcaagaataaagtgaaaaagtatatgtaatcccaacatctaattttagtcttagaaactcaaactattaataagtggaaaaagtttaatgatatgcatgtaatgcctttgccatattcctctccttcttagatcacatattcctattttcctgaaaattctgcttttgagaatgctttctgtcccgtaattgtgtatgtctttctttccagctccatgatgcgttatctgggtctggaaacccaaaccctcaaggatggcctggcgcatgggggaaccagcctgctggggcagggggctacccaggggcttcctatcctggggcctaccccgggcaggcacccccaggggcttatcctggacaggcacctccaggcgcctaccctggagcacctggagcttatcccggagcacctgcacctggagtctacccagggccacccagcggccctggggcctacccatcttctggacagccaagtgccaccggagcctaccctgccactggcccctatggcgcccctgctgggccactgattgtgccttataacctgcctttgcctgggggagtggtgcctcgcatgctgataacaattctgggcacggtgaagcccaatgcaaacagaattgctttagatttccaaagagggaatgatgttgccttccactttaacccacgcttcaatgagaacaacaggagagtcattgtttgcaatacaaagctggataataactggggaagggaagaaagacagtcggttttcccatttgaaagtgggaaaccattcaaaatacaagtactggttgaacctgaccacttcaaggttgcagtgaatgatgctcacttgttgcagtacaatcatcgggttaaaaaactcaatgaaatcagcaaactgggaatttctggtgacatagacctcaccagtgcttcatataccatgatataatctgaaaggggcagattaaaaaaaaaaaaagaatctaaaccttacatgtgtaaaggtttcatgttcactgtgagtgaaaatttttacattcatcaatatccctcttgtaagtcatctacttaataaatattacagtgaatta

SEQ ID NO: 11216 - DNA, 599 bp, Homo sapiens
  source 1..599: mol_type = unassigned DNA
ggaaaatggcagacaatttttcggcccagggcggaagggagtggactctgccggcaggagctgagaaatcctctgagtagcgggaagtgcgctccatgatgcgttatctgggtctggaaacccaaaccctcaaggatggcctggcgcatgggggaaccagcctgctggggcagggggctacccaggggcttcctatcctggggcctaccccgggcaggcacccccaggggcttatcctggacaggcacctccaggcgcctaccctggagcacctggagcttatcccggagcacctgcacctggagtctacccagggccacccagcggccctggggcctacccatcttctggacagccaagtgccaccggagcctaccctgccactggcccctatggcgcccctgctgggccactgattgtgccttataacctgcctttgcctgggggagtggtgcctcgcatgctgataacaattctgggcacggtgaagcccaatgcaaacagaattgctttagatttccaaagagggaatgatgttgccttccactttaacccacgcttcaatgagaacaacaggagagtcattgtttgcaatacaa

SEQ ID NO: 11217 - DNA, 491 bp, Homo sapiens
  source 1..491: mol_type = unassigned DNA
gctccatgatgcgttatctgggtctggaaacccaaaccctcaaggatggcctggcgcatgggggaaccagcctgctggggcagggggctacccaggggcttcctatcctggggcctaccccgggcaggcacccccaggggcttatcctggacaggcacctccaggcgcctaccctggagcacctggagcttatcccggagcacctgcacctggagtctacccagggccacccagcggccctggggcctacccatcttctggacagccaagtgccaccggagcctaccctgccactggcccctatggcgcccctgctgggccactgattgtgccttataacctgcctttgcctgggggagtggtgcctcgcatgctgataacaattctgggcacggtgaagcccaatgcaaacaggtaaggagagcaaaattaacaagtctactctatttgtagattggtttttgaataaagaatggcctactttttttctt

SEQ ID NO: 11218 - DNA, 6428 bp, Homo sapiens
  source 1..6428: mol_type = unassigned DNA
gagtgggggtggcggccagcatgctgctcggctgcggctcggcctcccacacccgcggctccctagtcctcgccagcagcggcggcggcagagcagcgagcggcgcccgcgtctgcagcggcgccgggtccgagcgcgcggcgcggcggtgggggtcggggcccgggcggggagcggggaccgggcatggcgctgcggagaggcggctgcggagcgctcgggctgctgctgctgctgctgggcgccgcgtgcctgataccgcggagcgcgcaggtgaggcggctggcgcgctgccccgccacttgcagctgtaccaaggagtctatcatctgcgtgggctcttcctgggtgcccaggatcgtgccgggcgacatcagctccctgagcctggtaaatgggacgttttcagaaatcaaggaccgaatgttttcccatctgccttctctgcagctgctattgctgaattctaactcattcacgatcatccgggatgatgcttttgctggactttttcatcttgaatacctgttcattgaagggaacaaaatagaaaccatttcaagaaatgcctttcgtggcctccgtgacctgactcacctttctttggccaataaccacataaaagcactaccaagggatgtcttcagtgatttagactctctgattgaactagatttgaggggtaataaatttgaatgtgactgcaaagccaagtggctatacctgtggttgaagatgacaaattccaccgtttctgatgtgctgtgtattggtccaccagagtatcaggaaaagaagctaaatgacgtgaccagctttgactatgaatgcacaactacagattttgttgttcatcagactttaccctaccagtcggtttcagtggatacgttcaactccaagaacgatgtgtacgtggccatcgcgcagcccagcatggagaactgcatggtgctggagtgggaccacattgaaatgaatttccggagctatgacaacattacaggtcagtccatcgtgggctgtaaggccattctcatcgatgatcaggtctttgtggtggtagcccagctcttcggtggctctcacatttacaaatacgacgagagttggaccaaatttgtcaaattccaagacatagaggtctctcgcatttccaagcccaatgacatcgagctgtttcagatcgacgacgagacgttctttgtcatcgcagacagctcaaaggctggtctgtccacagtttataaatggaacagcaaaggattctattcttaccagtcactgcacgagtggttcagggacacggatgcggagtttgttgatatcgatggaaaatcgcatctcatcctgtccagccgctcccaggtccccatcatcctccagtggaataaaagctctaagaagtttgtcccccatggtgacatccccaacatggaggacgtactggctgtgaagagcttccgaatgcaaaataccctctacctttcccttacccgcttcatcggggactcccgggtcatgaggtggaacagtaagcagtttgtggagatccaagctcttccatcccggggggccatgaccctgcagcccttttcttttaaagataatcactacctggccctggggagtgactatacattctctcagatataccagtgggataaagagaagcagctattcaaaaagtttaaggagatttacgtgcaggcgcctcgttcattcacagctgtctccaccgacaggagagatttcttttttgcatccagtttcaaagggaaaacaaagatttttgaacatataattgttgacttaagtttgtgaaggtgtggtgggtgaaactaagagaaatgtagcattagctctcacaaaagaggaccaagaaaaatcaacaaacaaatcaaagccaggctcagagctctgaaattaaaaagcactgaaatagttagatgttttcaaacttttagaactcacattttaatcagggattgcatttattggctaactgcatgacatgcccattctaccatttaaaaaaaaatcttaaagcctgtaatttctgagaaaagagtacagcatttactcttatcatctagaaatgtaatatgcttcccccccgctttttgatgaggaagaagacaattggataagatgggacagcacttataatgaaataaaaaaaaactttgagcccctctcattccactttagcaatctttttggtaagaactcttaaagccaaaagtctgctgaaaagatttgctgattattagtttaaaaatcttgtaacactcagcagtgctattttgagtcatcccagtttcctgaaagtaatgcccagtcttcctgaatcctccttaatagcagaaccttggtgattttgttggctcatatgaatgcttgtcatggatatgttaacaatttagtgtttgacattgcttcctctgccacaaagacaatactctggtgacacatgtctagacccagcacaggctgtaggcccaggagtgactcaaaggagtttttccctctttcttacggttcaaaggtgaccctggtggtggccagagcagtaatgcttgtttgatgctcttcatggctcatctgcttctcagaacccacccgttgagtttgtgggtaaccagcaggcaggccaaagactggtgcttttcatttcatcctttagagggatgaaacagttatttccgtctgatgagcattcggtagaatttttgaagtgagattttatgaagtcaaaggggactttacacagatctcgacctgctttgaaacctagaggtggccctttgatttgtgcgtgtccttgccctctggacaacttaatatttcaagtaatcgaataccaacttccctgccagcccacctgccttccgccccgcttgtgtaacagtcctgttttgttgagttgctgctattgcactgccagtgcagcccacaccaaatcacaacccaagatactcagataggaagactccttcctctcccagtactttaccaaaggaacccccgccaggacccacatggggccacgtgttggcagtggaatcagcctgtgcaggctggggatctcaggctgatcagtaggggccagctttggagccagccaagctgaatcccacactccaggtctgtgctcaagagaccagatggtgtatttccaaatgggcctctctggtatgggcaataggcaagctcctggggtctggttatgtggaagattcttagtggatgttccgcctggttagctggttctcttcagagaatataaagtgaatgcctttaggggtagctctgaaagagaaacccaacaacttcattcctagccatgaaagtagcacgatcatattgtactgtattgttattgtaaaatgactatttgccatgtcatgagtaggtagatgttttgccacaaatatgaatgtgtttgttgtttcctgactttaagcaatgaagattgagacaataaatagcactcagagaatgaagcattgatgttacatcagcactcttgggtacattctgggactgtaggctgaggcttctagcctcagaaaccacggattttaatgaacgaactcacccacgcatagtagtgttgttacttgaaacttctgcaaaataccaagcaaacaggagaaaagtggtttgttttcatttttaagtgcaaattacttttcttctgcacttttttttccctcttggtttctttgaacaggctacaaatgcccaggtccccccattggaggctgaaagggaaagagctttgccattcctccagtcctaaagatggcaagctattctttctgttgcatggaaccactcagataaacctgggcagaaaaatgggtacttggcaaactgtaggagatatttagacagtcccagcaactatgccagatcaaagtgatgttcccaattccagccacctgtagagatggcaaggtggcatcttttcacagtgttgctactgcagagaggtatcacattcccagctgcccctctgagggtaaatgagcgactgaccccctgcactcactattctgctcacattgccagattctgggaaaccaggaaacacaggatgctgggcttaggatggggagagctgttgagtccagatggggaattaggaggtgaaagaacgatctaaacaggtgatgggtggggtgtgagaagggggtgacccactcaactgcaatcaggttttccttttttataatgttattttatacaagactaaagcctgtagtctacagagcgcctgtgctgtggaaggagatatttgttctggccaacttactaaaggagcatagatgttcttggcacggggtggtgatatctttgcttcattaatcttactgctccatcccaagaatccctgaagttttaaacaacttctgcaagaagcattcttccagtaataatgtaaaacaaaaaaccaaccaagcaacagcaaaaatgcaaagcagagaaatatgtggaccgtccccagtggagatcagcttgaaggagggggtggatctttcttctactttccctcccatcacccactgggtggtcgtctgctcagcttatttcttctttatgaactttgtggcgaggctcctggactgatccctctgtgcggccatgtggctttaaggcctttccttaaagggggcttgtccccatactccatggggtcgggaatgggtctattatcaagactctaaaaataactcttagacatgaagagcactgtgttattggacagtggatgataaggccaccttacatttagcaaagctttatatttttccaatgcacattagtactcacctcatttgttcataaatagctctgaagtttattgcagggcaggtattattctaatttcagagagaaggaaatagacatgaaaactatatgaattgcctgccatggttatccaatagggactggcaaagcaataactttccctctgatcagcagacattgtattttctttctaagacaccctgctatactctcccagagaaagactttcatttctagcatgattttgaatttggcagcaccttgagataaagtaaaaagtgcaataaaatatgcatagccagaagaaaaatcatactgaatagacaccattcaatcaactggtccatttaacaattaacaaacatgcaattgcatgccccactctttttacattcaaggccccactcttgaaagtggtccagaaattttggatagttttctgttgtactaaggaggatatctagctggtctggttgtttctccccctgcatagctatggggaggatgttgaggttgagacacatctggttcttgtcacattgtccaccagataaacaagaagagatctgtgaaggaaaaattcaaaacctgaatgcacgagtggtgatgaattgctctcggccgtcatcagccttcaggaagcacactggaaatggcagagttgcattttttcttccccatggagtgagagtctgtgtatttttaggaaagaaatcagcatgggatgccagaggtttggcggtcaggagtgctcatgatggaaatttctctggcctggggtataatgaaggtgagatgaagatctgcaggaggggagtctatttgcatgccacctaaagaaaacctcttaagctggcttcctgattcttctgcagaggtatcagcctctccttcgcagctgcggaaggaagttctttaattaggcagcggccaaagattctgttcaacagcttcctggagtggaatacaataatctagttgtatgcaatgatgcaattagaaagtggtccggatttgggtggcaatggaaggggaatggcaaagtggggcagatggctctggaggaaacttgggaaagtaaaaacaaactgaaagaaaaggaaaaaaggatgatgatttcttttgcctcagccaggcaagcagagggtagaatgaccaggaagattaacaacatctcaattattaatgaagagagccaactgtaatgctcattcaaataagaagcatattgtaaagctactgagatcgaaaccaagttattattatccttactgtattccattgcttgtatcaaaatctactttttttctagtaggaaactatgcattccctatcagtccctttgattatcaggaatgtataagaattgtgataaaataggccaatatgctatttggtaccatttgtatgtattttaagtgcataacctaggtaaaataagaatagtttctatgtgtaaagaagcaagttttacagtatgcagactacagtggatgtattttaggctgtatacatatttagctctttttggtaaatagggtatacaaactatatgcctcttaattcaatatattcggtaagcctatgaataaaaagtggttcatgcctaa

SEQ ID NO: 11219 - DNA, 767 bp, Homo sapiens
  source 1..767: mol_type = unassigned DNA
cgctcgggctgctgctgctgctgctgggcgccgcgtgcctgataccgcggagcgcgcaggtgaggcggctggcgcgctgccccgccacttgcagctgtaccaaggagtctatcatctgcgtgggctcttcctgggtgcccaggatcgtgccgggcgacatcagctccctgagcctggtaaatgggacgttttcagaaatcaaggaccgaatgttttcccatctgccttctctgcagctgctattgctgaattctaactcattcacgatcatccgggatgatgcttttgctggactttttcatcttgaatacctgttcattgaagggaacaaaatagaaaccatttcaagaaatgcctttcgtggcctccgtgacctgactcacctttctttggccaataaccacataaaagcactaccaagggatgtcttcagtgatttagactctctgattgaactagatttgaggggtaataaatttgaatgtgactgcaaagccaagtggctatacctgtggttgaagatgacaaattccaccgtttctgatgtgctgtgtattggtccaccagagtatcaggaaaagaagctaaatgacgtgaccagctttgactatgaatgcacaactacagataaacaagaagagatctgtgaaggaaaaattcaaaacctgaatgcacgagtggtgatgaattgctctcggccgtcatcagccttcaggaagcacactggaaatggcagagttgcattttttcttccccatggagtgaga

SEQ ID NO: 11220 - DNA, 2814 bp, Homo sapiens
  source 1..2814: mol_type = unassigned DNA
gccgggtgtccagcgaacccctttcccaaaccttcggggagaagggaggtgggaggaggcaaagaaactacaggcagggagctggaagggggggtggggggggcaggagacaagaaatcaagacaccaggcagcaggacacacacacactcacatacactcacacacatagagaccaacagatagacagctacctaaagcctgaaagactgacagcaacacagaaaaaaagaaacaggcagaaagagagacaaagacagaaatagaaacagactaacacacagagtcaaaaatacagagacagaaagacagggagaaagagaaacagaaaattagacaccaaagacatacgaacagggaggaaggccgactgaaagaaagacggagaagaggagagagaagccagggccgagcgtgccagcaggcggatggagggcggcctggtggaggaggagacgtagtggcctgggctgagctgggtgggccgggagaagcgggtgcctcagagtgggggtgggggcatgggaggggcaggcattctgctgctgctgctggctggggcgggggtggtggtggcctggagacccccaaagggaaagtgtcccctgcgctgctcctgctctaaagacagcgccctgtgtgagggctccccggacctgcccgtcagcttctctccgaccctgctgtcactctcactcgtcaggacgggagtcacccagctgaaggccggcagcttcctgagaattccgtctctgcacctgctcctcttcacctccaactccttctccgtgattgaggacgatgcatttgcgggcctgtcccacctgcagtacctcttcatcgaggacaatgagattggctccatctctaagaatgccctcagaggacttcgctcgcttacacacctaagcctggccaataaccatctggagaccctccccagattcctgttccgaggcctggacacccttactcatgtggacctccgcgggaacccgttccagtgtgactgccgcgtcctctggctcctgcagtggatgcccaccgtgaatgccagcgtggggaccggcgcctgtgcgggccccgcctccctgagccacatgcagctccaccacctcgaccccaagactttcaagtgcagagccatagagctgtcctggttccagacggtgggggagtcggcactgagcgtagagcccttctcctaccaaggggagcctcacattgtgctggcacagcccttcgccggccgctgcctgattctctcctgggactacagcctgcagcgcttccggcccgaggaagagctgcccgcggcctccgtggtgtcctgcaagccactggtgctgggcccgagcctcttcgtgctggctgcccgcctgtgggggggctcacagctgtgggcccggcccagtcccggcctgcgcctggccccaacgcagaccctggccccgcggcggctgctgcggcccaatgacgccgagctcctgtggctggaagggcaaccctgcttcgtggtggccgatgcctccaaggcgggcagcaccacgctgctgtgccgcgacgggcccggcttttacccgcaccagagcctgcacgcctggcaccgggacacggacgctgaggccctggagctggacggccggccccacctgctgctggcctcggcttcccagcggcccgtgctcttccactggaccggtggccgcttcgagagacgcacagacatccccgaggccgaggatgtctatgccacacgccacttccaggctggtggggacgtgttcctgtgcctcacacgctacattggggactccatggtcatgcgctgggacggctccatgtttcgtctgctgcagcaacttccctcgcgcggtgcccacgtcttccagccactgctcatcgccagggaccagctggccatcctaggcagcgacttcgccttcagccaggtcctccgccttgagcctgacaaggggctcctggagccactgcaggagctggggcctccggccctggtggccccccgtgcctttgcccacatcactatggccggcagacgcttcctctttgctgcttgctttaagggccccacacagatctaccagcatcacgagatcgacctcagtgcctgagaccaccaacgggactctgggcatggctggggcccctggacggccccttggctggctcctggccctacttggggtgatggcccgcctgtgagctgctgaccgtgggccacgttcatcagccacacgtctaggccttaagcccacttcttaaaggatctgcacccatggggggacatagagggtcccagcctactggacctcccgagctgcccttcaggtctaaagcaacatctggacatctcggctggggcagattccccatcaaaggcaacctggggggtgcaggctggtgcactgcatggagtcgaggtggaggtcacgtgcagagctccatgaggtcccggagcccccctctcaacccgctcctaccccgctggtccctctgaaagcaccgaggggttgatggcattcctttcccattctaaactccacgcagccaatcgctttcctggaggagcgccaacctcgaagacaactcagcactgggcgggttcccctctgctgcttgtgcgcatgcgtgcggccgcccagcaagctgtgccttttgcgcctcttgcgcgtgcgccggggcacagggagggacagcgggaggtgtcgcggggagcctggtgcccttctagatgggcgacggaggcaaggacaagacgagtccgagctcaataaatgcgctgtgcaccctc

SEQ ID NO: 11221 - DNA, 2891 bp, Homo sapiens
  source 1..2891: mol_type = unassigned DNA
gccgggtgtccagcgaacccctttcccaaaccttcggggagaagggaggtgggaggaggcaaagaaactacaggcagggagctggaagggggggtggggggggcaggagacaagaaatcaagacaccaggcagcaggacacacacacactcacatacactcacacacatagagaccaacagatagacagctacctaaagcctgaaagactgacagcaacacagaaaaaaagaaacaggcagaaagagagacaaagacagaaatagaaacagactaacacacagagtcaaaaatacagagacagaaagacagggagaaagagaaacagaaaattagacaccaaagacatacgaacagggaggaaggccgactgaaagaaagacggagaagaggagagagaagccagggccgagcgtgccagcaggcggatggagggcggcctggtggaggaggagacgtagtggcctgggctgagctgggtgggccgggagaagcgggtgcctcagagtgggggtgggggcatgggaggggcaggcattctgctgctgctgctggctggggcgggggtggtggtggcctggagacccccaaagggaaagtgtcccctgcgctgctcctgctctaaagacagcgccctgtgtgagggctccccggacctgcccgtcagcttctctccgaccctgctgtcactctcactcgtcaggacgggagtcacccagctgaaggccggcagcttcctgagaattccgtctctgcacctgctcctcttcacctccaactccttctccgtgattgaggacgatgcatttgcgggcctgtcccacctgcagtacctcttcatcgaggacaatgagattggctccatctctaagaatgccctcagaggacttcgctcgcttacacacctaagcctggccaataaccatctggagaccctccccagattcctgttccgaggcctggacacccttactcatgtggacctccgcgggaacccgttccagtgtgactgccgcgtcctctggctcctgcagtggatgcccaccgtgaatgccagcgtggggaccggcgcctgtgcgggccccgcctccctgagccacatgcagctccaccacctcgaccccaagactttcaagtgcagagccatagagctgtcctggttccagacggtgggggagtcggcactgagcgtagagcccttctcctaccaaggggagcctcacattgtgctggcacagcccttcgccggccgctgcctgattctctcctgggactacagcctgcagcgcttccggcccgaggaagagctgcccggtgagccccctccccgtccttctgcctgtccagcagcctgcctggctggcctgacctgcctccccacctccccacagcggcctccgtggtgtcctgcaagccactggtgctgggcccgagcctcttcgtgctggctgcccgcctgtgggggggctcacagctgtgggcccggcccagtcccggcctgcgcctggccccaacgcagaccctggccccgcggcggctgctgcggcccaatgacgccgagctcctgtggctggaagggcaaccctgcttcgtggtggccgatgcctccaaggcgggcagcaccacgctgctgtgccgcgacgggcccggcttttacccgcaccagagcctgcacgcctggcaccgggacacggacgctgaggccctggagctggacggccggccccacctgctgctggcctcggcttcccagcggcccgtgctcttccactggaccggtggccgcttcgagagacgcacagacatccccgaggccgaggatgtctatgccacacgccacttccaggctggtggggacgtgttcctgtgcctcacacgctacattggggactccatggtcatgcgctgggacggctccatgtttcgtctgctgcagcaacttccctcgcgcggtgcccacgtcttccagccactgctcatcgccagggaccagctggccatcctaggcagcgacttcgccttcagccaggtcctccgccttgagcctgacaaggggctcctggagccactgcaggagctggggcctccggccctggtggccccccgtgcctttgcccacatcactatggccggcagacgcttcctctttgctgcttgctttaagggccccacacagatctaccagcatcacgagatcgacctcagtgcctgagaccaccaacgggactctgggcatggctggggcccctggacggccccttggctggctcctggccctacttggggtgatggcccgcctgtgagctgctgaccgtgggccacgttcatcagccacacgtctaggccttaagcccacttcttaaaggatctgcacccatggggggacatagagggtcccagcctactggacctcccgagctgcccttcaggtctaaagcaacatctggacatctcggctggggcagattccccatcaaaggcaacctggggggtgcaggctggtgcactgcatggagtcgaggtggaggtcacgtgcagagctccatgaggtcccggagcccccctctcaacccgctcctaccccgctggtccctctgaaagcaccgaggggttgatggcattcctttcccattctaaactccacgcagccaatcgctttcctggaggagcgccaacctcgaagacaactcagcactgggcgggttcccctctgctgcttgtgcgcatgcgtgcggccgcccagcaagctgtgccttttgcgcctcttgcgcgtgcgccggggcacagggagggacagcgggaggtgtcgcggggagcctggtgcccttctagatgggcgacggaggcaaggacaagacgagtccgagctcaataaatgcgctgtgcaccctc

SEQ ID NO: 11222 - DNA, 2200 bp, Homo sapiens
  source 1..2200: mol_type = unassigned DNA
ggatttcgggatggaaagggggagaggctgcccttctaggaaccccccagtacaagcctcctttcccagattggtgtaactaggcccagatatggacgaagagcaggctcggggtccgccagaaatgaggagcacccaggagcagcttatgtgctggcagggggcttctaagctggttaacaggctccccggacctgcccgtcagcttctctccgaccctgctgtcactctcactcgtcaggacgggagtcacccagctgaaggccggcagcttcctgagaattccgtctctgcacctgctcctcttcacctccaactccttctccgtgattgaggacgatgcatttgcgggcctgtcccacctgcagtacctcttcatcgaggacaatgagattggctccatctctaagaatgccctcagaggacttcgctcgcttacacacctaagcctggccaataaccatctggagaccctccccagattcctgttccgaggcctggacacccttactcatgtggacctccgcgggaacccgttccagtgtgactgccgcgtcctctggctcctgcagtggatgcccaccgtgaatgccagcgtggggaccggcgcctgtgcgggccccgcctccctgagccacatgcagctccaccacctcgaccccaagactttcaagtgcagagccatagagctgtcctggttccagacggtgggggagtcggcactgagcgtagagcccttctcctaccaaggggagcctcacattgtgctggcacagcccttcgccggccgctgcctgattctctcctgggactacagcctgcagcgcttccggcccgaggaagagctgcccgcggcctccgtggtgtcctgcaagccactggtgctgggcccgagcctcttcgtgctggctgcccgcctgtgggggggctcacagctgtgggcccggcccagtcccggcctgcgcctggccccaacgcagaccctggccccgcggcggctgctgcggcccaatgacgccgagctcctgtggctggaagggcaaccctgcttcgtggtggccgatgcctccaaggcgggcagcaccacgctgctgtgccgcgacgggcccggcttttacccgcaccagagcctgcacgcctggcaccgggacacggacgctgaggccctggagctggacggccggccccacctgctgctggcctcggcttcccagcggcccgtgctcttccactggaccggtggccgcttcgagagacgcacagacatccccgaggccgaggatgtctatgccacacgccacttccaggctggtggggacgtgttcctgtgcctcacacgctacattggggactccatggtcatgcgctgggacggctccatgtttcgtctgctgcagcaacttccctcgcgcggtgcccacgtcttccagccactgctcatcgccagggaccagctggccatcctaggcagcgacttcgccttcagccaggtcctccgccttgagcctgacaaggggctcctggagccactgcaggagctggggcctccggccctggtggccccccgtgcctttgcccacatcactatggccggcagacgcttcctctttgctgcttgctttaagggccccacacagatctaccagcatcacgagatcgacctcagtgcctgagaccaccaacgggactctgggcatggctggggcccctggacggccccttggctggctcctggccctacttggggtgatggcccgcctgtgagctgctgaccgtgggccacgttcatcagccacacgtctaggccttaagcccacttcttaaaggatctgcacccatggggggacatagagggtcccagcctactggacctcccgagctgcccttcaggtctaaagcaacatctggacatctcggctggggcagattccccatcaaaggcaacctggggggtgcaggctggtgcactgcatggagtcgaggtggaggtcacgtgcagagctccatgaggtcccggagcccccctctcaacccgctcctaccccgctggtccctctgaaagcaccgaggggttgatggcattcctttcccattctaaactccacgcagccaatcgctttcctggaggagcgccaacctcgaagacaactcagcactgggcgggttcccctctgctgcttgtgcgcatgcgtgcggccgc

SEQ ID NO: 11223 - DNA, 2630 bp, Homo sapiens
  source 1..2630: mol_type = unassigned DNA
ccgtgattgaggacgatgcatttgcgggcctgtcccacctgcagtacctcttcatcgaggacaatgagattggctccatctctaagaatgccctcagaggacttcgctcgcttacacacctaagcctggccaataaccatctggagaccctccccagattcctgttccgaggcctggacacccttactcatgtggacctccgcgggaacccgttccagtgtgactgccgcgtcctctggctcctgcagtggatgcccaccgtgaatgccagcgtggggaccggcgcctgtgcgggccccgcctccctgagccacatgcagctccaccacctcgaccccaagactttcaagtgcagagccatagagctgtcctggttccagacggtgggggagtcggcactgagcgtagagcccttctcctaccaaggggagcctcacattgtgctggcacagcccttcgccggccgctgcctgattctctcctgggactacagcctgcagcgcttccggcccgaggaagagctgcccgcggcctccgtggtgtcctgcaagccactggtgctgggcccgagcctcttcgtgctggctgcccgcctgtgggggggctcacagctgtgggcccggcccagtcccggcctgcgcctggccccaacgcagaccctggccccgcggcggctgctgcggcccaatgacgccgagctcctgtggctggaagggcaaccctgcttcgtggtggccgatgcctccaaggcgggcagcaccacgctgctgtgccgcgacgggcccggcttttacccgcaccagagcctgcacgcctggcaccgggacacggacgctgaggccctggagctggacggccggccccacctgctgctggcctcggcttcccagcggcccgtgctcttccactggaccggtggccgcttcgagagacgcacagacatccccgaggccgaggatgtctatgccacacgccacttccaggctggtggggacgtgttcctgtgcctcacacgctacattggggactccatggtgaggctgggcctgggggcggggggctggcttttcagcactgacccaatcttgcacactaagcctctaaactctgacctaccctcacatgccgacctttgaaccaggaccccaccccacactgatgccaagactctgaccccctcaaggctggctgactccgaaccactccccagtccccgacactgatgctggccccaacatcctgattctacccccaaatgctggctctgtgactcggatgcattccagacttcaccacagccacacctgtccccaccctgacactgagcccccaaggctgatgctagggttaagcactgcccactgtttctggagtgaggtgcaggcaggggagggttctgagtctggaagggccctgatctgactcaggtgttcacaaggtctctgggtggggaacagactgggggagcagggagaggagcctagaggccagggaagaggctgccaggatggtccagtcaggaggggatggagttcagccagaggtggtgggagaaatgtacaactgtagaaggtgaaactgacagagtccatggctgagtgcttctgtgtggggcgtgagggcaagggaagggctcagaacaactgcatgtgtgtggccgaacaggtgggtggtgacttttatgaagataagaaagctatgggagttttgggaccgacaggcttctgcttccaagctgttccacggcccccagagacccccgggaccccaggccctcactggccacacccccacaggtcatgcgctgggacggctccatgtttcgtctgctgcagcaacttccctcgcgcggtgcccacgtcttccagccactgctcatcgccagggaccagctggccatcctaggcagcgacttcgccttcagccaggtcctccgccttgagcctgacaaggggctcctggagccactgcaggagctggggcctccggccctggtggccccccgtgcctttgcccacatcactatggccggcagacgcttcctctttgctgcttgctttaagggccccacacagatctaccagcatcacgagatcgacctcagtgcctgagaccaccaacgggactctgggcatggctggggcccctggacggccccttggctggctcctggccctacttggggtgatggcccgcctgtgagctgctgaccgtgggccacgttcatcagccacacgtctaggccttaagcccacttcttaaaggatctgcacccatggggggacatagagggtcccagcctactggacctcccgagctgcccttcaggtctaaagcaacatctggacatctcggctggggcagattccccatcaaaggcaacctggggggtgcaggctggtgcactgcatggagtcgaggtggaggtcacgtgcagagctccatgaggtcccggagcccccctctcaacccgctcctaccccgctggtccctctgaaagcaccgaggggttgatggcattcctttcccattctaaactccacgcagccaatcgctttcctggaggagcgccaacctcgaagacaactcagcactgggcgggttcccctctgctgcttgtgcgcatgcgt

SEQ ID NO: 11224 - DNA, 612 bp, Homo sapiens
  source 1..612: mol_type = unassigned DNA
gggcgggggtggtggtggcctggagacccccaaagggaaagtgtcccctgcgctgctcctgctctaaagacagcgccctgtgtgagggctccccggacctgcccgtcagcttctctccgaccctgctgtcactctcactcgtcaggacgggagtcacccagctgaaggccggcagcttcctgagaattccgtctctgcacctgctcctcttcacctccaactccttctccgtgattgaggacgatgcatttgcgggcctgtcccacctgcagtacctcttcatcgaggacaatgagattggctccatctctaagaatgccctcagaggacttcgctcgcttacacacctaagcctggccaataaccatctggagaccctccccagattcctgttccgaggcctggacacccttactcatagctccatgaggtcccggagcccccctctcaacccgctcctaccccgctggtccctctgaaagcaccgaggggttgatggcattcctttcccattctaaactccacgcagccaatcgctttcctggaggagcgccaacctcgaagacaactcagcactgggcgggttcccctctgctgcttgtgcgcatgcgt

SEQ ID NO: 11225 - DNA, 1076 bp, Homo sapiens
  source 1..1076: mol_type = unassigned DNA
ccgacaaccagctcaagggagtgtgcgtttatgcacatgtgtgggagtgtatgctcacacagatgtcaggtgggcattgatgcacgtgtgtgggggtgtatgcacacgtctgtacaaaagcatttgtgtccatgcacatactcacacctgcgtgcccatgcccacctaggctgagggtggaggccagggttaaaatgtcagatgggggctgcaattctggaaaaatttctttcttgcccccttgccagcctcttcacctccaactccttctccgtgattgaggacgatgcatttgcgggcctgtcccacctgcagtacctatctacaaagggcccggataaccagagcctgattctggctctccctgactcatagaaacccaggaagggtgtacagaagtcagagacaagaaacgtttcaaatgaccaggaaacaactctgaattagcttcatcgaggacaatgagattggctccatctctaagaatgccctcagaggacttcgctcgcttacacacctaagcctggccaataaccatctggagaccctccccagattcctgttccgaggcctggacacccttactcatggacctccgcgggaacccgttccagtgtgactgccgcgtcctctggctcctgcagtggatgcccaccgtgaatgccagcgtggggaccggcgcctgtgcgggccccgcctccctgagccacatgcagctccaccacctcgaccccaagactttcaagtgcagagccatagagctgtcctggttccagacggtgggggagtcggcactgagcgtagagcccttctcctaccaaggggagcctcacattgtgctggcacagcccttcgccggccgctgcctgattctctcctgggactacagcctgcagcgcttccggcccgaggaagagctgcccggtgagccccctccccgtccttctgcctgtccagcagcctgcctggctggcctgacctgcctccccacctccccacagcggcctccgtggtgtcctgcaagccactggtgctgggcccgagcctcttcgtgctggctgcccgcctgtgggggg

SEQ ID NO: 11226 - DNA, 1113 bp, Homo sapiens
  source 1..1113: mol_type = unassigned DNA
accaaagacatacgaacagggaggaaggccgactgaaagaaagacggagaagaggagagagaagccagggccgagcgtgccagcaggcggatggagggcggcctggtggaggaggagacgtagtggcctgggctgagctgggtgggccgggagaagcgggtgcctcagagtgggggtgggggcatgggaggggcaggcattctgctgctgctgctggctggggcgggggtggtggtggcctggagacccccaaagggaaagtgtcccctgcgctgctcctgctctaaagacagcgccctgtgtgagggctccccggacctgcccgtcagcttctctccgaccctgctgtcactctcactcgtcaggacgggagtcacccagctgaaggccggcagcttcctgagaattccgtctctgcacctgctcctcttcacctccaactccttctccgtgattgaggacgatgcatttgcgggcctgtcccacctgcagtacctcttcatcgaggacaatgagattggctccatctctaagaatgccctcagaggacttcgctcgcttacacacctaagcctggccaataaccatctggagaccctccccagattcctgttccgaggcctggacacccttactcatgtggacctccgcgggaacccgttccagtgtgactgccgcgtcctctggctcctgcagtggatgcccaccgtgaatgccagcgtggggaccggcgcctgtgcgggccccgcctccctgagccacatgcagctccaccacctcgaccccaagactttcaagtgcagagccataggtggggggctttcccgatggggtgggaggcgggagatctgggggaaaggctgccagggccaagaggctcgtctcactccctgccctgccatttcccggagtgggaagaccctgagcaagcagcactgccttcctgagccccagttttctcatctgtaaagtgggggtaataaacagtgatataggagtgccatgggaattcaatgatacatcttcacgtgttcggcatttggcgccgggcctgggacaggaggtccttataaacgttcacccttgttaacataaaagcaaccaatttaaaaa

SEQ ID NO: 11227 - DNA, 1102 bp, Homo sapiens
  source 1..1102: mol_type = unassigned DNA
ggggtggtggtggcctggagacccccaaagggaaagtgtcccctgcgctgctcctgctctaaagacagcgccctgtgtgagggctccccggacctgcccgtcagcttctctccgaccctgctgtcactctcactcgtcaggacgggagtcacccagctgaaggccggcagcttcctgagaattccgtctctgcacctgctgtgagtggggcctggctgggccgacaaccagctcaagggagtgtgcgtttatgcacatgtgtgggagtgtatgctcacacagatgtcaggtgggcattgatgcacgtgtgtgggggtgtatgcacacgtctgtacaaaagcatttgtgtccatgcacatactcacacctgcgtgcccatgcccacctaggctgagggtggaggccagggttaaaatgtcagatgggggctgcaattctggaaaaatttctttcttgcccccttgccagcctcttcacctccaactccttctccgtgattgaggacgatgcatttgcgggcctgtcccacctgcagtacctcttcatcgaggacaatgagattggctccatctctaagaatgccctcagaggacttcgctcgcttacacacctaagcctggccaataaccatctggagaccctccccagattcctgttccgaggcctggacacccttactcatgtggacctccgcgggaacccgttccagtgtgactgccgcgtcctctggctcctgcagtggatgcccaccgtgaatgccagcgtggggaccggcgcctgtgcgggccccgcctccctgagccacatgcagctccaccacctcgaccccaagactttcaagtgcagagccataggtggggggctttcccgatggggtgggaggcgggagatctgggggaaaggctgccagggccaagaggctcgtctcactccctgccctgccatttcccggagtgggaagaccctgagcaagcagcactgccttcctgagccccagttttctcatctgtaaagtgggggtaataaacagtgatataggagtgccatgggaattcaatgatacatcttcacgtgttcggcatttggcgccgggcctgggaca

SEQ ID NO: 11228 - DNA, 557 bp, Homo sapiens
  source 1..557: mol_type = unassigned DNA
tggcctggagacccccaaagggaaagtgtcccctgcgctgctcctgctctaaagacagcgccctgtgtgagggctccccggacctgcccgtcagcttctctccgaccctgctgtcactctcactcgtcaggacgggagtcacccagctgaaggccggcagcttcctgagaattccgtctctgcacctgctcctcttcacctccaactccttctccgtgattgaggacgatgcatttgcgggcctgtcccacctgcagtacctatctacaaagggcccggataaccagagcctgattctggctctccctgactcatagaaacccaggaagggtgtacagaagtcagagacaagaaacgtttcaaatgaccaggaaacaactctgaattagcttcatcgaggacaatgagattggctccatctctaagaatgccctcagaggacttcgctcgcttacacacctaagcctggccaataaccatctggagaccctccccagattcctgttccgaggcctggacacccttactcatgtggacctccgcgggaacccgttcca

SEQ ID NO: 11229 - DNA, 4611 bp, Homo sapiens
  source 1..4611: mol_type = unassigned DNA
aaaaaacgagcgtgcaagcagagatgctgctccacaccgctcaggccgcgagcagcagcaaggcgcaccgccactgtcgccgctgcagccagggctgctccgaaggccggcgtggcggcaaccggcacctctgtccccgccgcgcttctcctcgccgcccacgccgtggggtcaggaacgcggcgtctggcgctgcagacgcccgctgagttgcagaagcccacggagcggcgcccggcgcgccacggcccgtagcagtccggtgctgctctccgcccgcgtccggctcgtggccccctacttcgggcaccatggacacctcccggctcggtgtgctcctgtccttgcctgtgctgctgcagctggcgaccgggggcagctctcccaggtctggtgtgttgctgaggggctgccccacacactgtcattgcgagcccgacggcaggatgttgctcagggtggactgctccgacctggggctctcggagctgccttccaacctcagcgtcttcacctcctacctagacctcagtatgaacaacatcagtcagctgctcccgaatcccctgcccagtctccgcttcctggaggagttacgtcttgcgggaaacgctctgacatacattcccaagggagcattcactggcctttacagtcttaaagttcttatgctgcagaataatcagctaagacacgtacccacagaagctctgcagaatttgcgaagccttcaatccctgcgtctggatgctaaccacatcagctatgtgcccccaagctgtttcagtggcctgcattccctgaggcacctgtggctggatgacaatgcgttaacagaaatccccgtccaggcttttagaagtttatcggcattgcaagccatgaccttggccctgaacaaaatacaccacataccagactatgcctttggaaacctctccagcttggtagttctacatctccataacaatagaatccactccctgggaaagaaatgctttgatgggctccacagcctagagactttagatttaaattacaataaccttgatgaattccccactgcaattaggacactctccaaccttaaagaactaggatttcatagcaacaatatcaggtcgatacctgagaaagcatttgtaggcaacccttctcttattacaatacatttctatgacaatcccatccagtttgttgggagatctgcttttcaacatttacctgaactaagaacactgactctgaatggtgcctcacaaataactgaatttcctgatttaactggaactgcaaacctggagagtctgactttaactggagcacagatctcatctcttcctcaaaccgtctgcaatcagttacctaatctccaagtgctagatctgtcttacaacctattagaagatttacccagtttttcagtctgccaaaagcttcagaaaattgacctaagacataatgaaatctacgaaattaaagttgacactttccagcagttgcttagcctccgatcgctgaatttggcttggaacaaaattgctattattcaccccaatgcattttccactttgccatccctaataaagctggacctatcgtccaacctcctgtcgtcttttcctataactgggttacatggtttaactcacttaaaattaacaggaaatcatgccttacagagcttgatatcatctgaaaactttccagaactcaaggttatagaaatgccttatgcttaccagtgctgtgcatttggagtgtgtgagaatgcctataagatttctaatcaatggaataaaggtgacaacagcagtatggacgaccttcataagaaagatgctggaatgtttcaggctcaagatgaacgtgaccttgaagatttcctgcttgactttgaggaagacctgaaagcccttcattcagtgcagtgttcaccttccccaggccccttcaaaccctgtgaacacctgcttgatggctggctgatcagaattggagtgtggaccatagcagttctggcacttacttgtaatgctttggtgacttcaacagttttcagatcccctctgtacatttcccccattaaactgttaattggggtcatcgcagcagtgaacatgctcacgggagtctccagtgccgtgctggctggtgtggatgcgttcacttttggcagctttgcacgacatggtgcctggtgggagaatggggttggttgccatgtcattggttttttgtccatttttgcttcagaatcatctgttttcctgcttactctggcagccctggagcgtgggttctctgtgaaatattctgcaaaatttgaaacgaaagctccattttctagcctgaaagtaatcattttgctctgtgccctgctggccttgaccatggccgcagttcccctgctgggtggcagcaagtatggcgcctcccctctctgcctgcctttgccttttggggagcccagcaccatgggctacatggtcgctctcatcttgctcaattccctttgcttcctcatgatgaccattgcctacaccaagctctactgcaatttggacaagggagacctggagaatatttgggactgctctatggtaaaacacattgccctgttgctcttcaccaactgcatcctaaactgccctgtggctttcttgtccttctcctctttaataaaccttacatttatcagtcctgaagtaattaagtttatccttctggtggtagtcccacttcctgcatgtctcaatccccttctctacatcttgttcaatcctcactttaaggaggatctggtgagcctgagaaagcaaacctacgtctggacaagatcaaaacacccaagcttgatgtcaattaactctgatgatgtcgaaaaacagtcctgtgactcaactcaagccttggtaacctttaccagctccagcatcacttatgacctgcctcccagttccgtgccatcaccagcttatccagtgactgagagctgccatctttcctctgtggcatttgtcccatgtctctaattaatatgtgaaggaaaatgttttcaaaggttgagaacctgaaaatgtgagattgagtatatcagagcagtaattaataagaagagctgaggtgaaactcggtttaaaaaccaaaaaagaatctctcagttagtaagaaaaggctgaaaacctcttgatacttgagagtgaatataagtctaaatgctgctttgtataatttgttcagctaagggatagatcgatcacactatttaagtgagcccagatcaaaaaagcagattgaaattttctttagaaaagattctccatgatttgaattgcattctctttaaactcaccaatgtaatcattttgggaggagggagaacccacttgctttccaaatgggtttatttaaacccacaaactcaagaggttgttgggggaattaggaaaataagggttttcaatgacctacattgctaggtagaggctgtgatccatgggatttcattctaatgaccatgtgaagatgtttgagtcctcctttgcctttcctcagaaagaatccttctaaggcacaaatcccttagatggataatgtaaggtattgttaactcactcatattgagatcatttttagagataccaggttttatgtatcagcactagatggttccaccctcatgggataaaactgcttacaagtattttgaaagaaaaactgaccaaaattcttaaattgttactaaggcaatcatgcacaggtgacgtatgtcttatctgatttgtttttaactccttggtgcccaaagctcagaagggaattccactgccagcaatgaacatacctggaaaagaaagtaagcaatctgggattttttttctgggttagtaaagaatttttgcaataagttttatcagttgattcaaactgatgtgcatcttaatgatcaaatgtgcacattacataaattaagtccactgatacaacttcttacacatgtatctctagtagctctggcaaacccaatatctgacaccactttggactcaagagactcagtaacgtattatcctgtttatttagcttggttttagctgtgttctctctggataacccacttgatgttaggaacattacttctctgcttattccatattaatactgtgttaggtattttaagaagcaagttattaaataagaaaagtcaaagtattaattcttaccttctattatcctatattagcttcaatacatccaaaccaaatggctgttaggtagatttatttttatataagcatgtttattttgatcagatgttttaacttggatttgaaaaaatacatttatgagatgttttataagatgtgtaaatatagaactgtatttattactatagtaaaggttcagtaacattaaggaccatgataatgataataaaccttgtacagtggcatattctttgatttatattgtgtttctctgcccattttctttaaattcattaactgtatatatgtaaatatatagtacttgtaaatagattccaaatttgcttttctattgggtaaaaaataaatttgtaataaaatgtgtgactatgaaacaaaa

SEQ ID NO: 11230 - DNA, 4095 bp, Homo sapiens
  source 1..4095: mol_type = unassigned DNA
agaagcccacggagcggcgcccggcgcgccacggcccgtagcagtccggtgctgctctccgcccgcgtccggctcgtggccccctacttcgggcaccatggacacctcccggctcggtgtgctcctgtccttgcctgtgctgctgcagctggcgaccgggggcagctctcccaggtctggtgtgttgctgaggggctgccccacacactgtcattgcgagcccgacggcaggatgttgctcagggtggactgctccgacctggggctctcggagctgccttccaacctcagcgtcttcacctcctacctagacctcagtatgaacaacatcagtcagctgctcccgaatcccctgcccagtctccgcttcctggaggagttacgtcttgcgggaaacgctctgacatacattcccaagggagcattcactggcctttacagtcttaaagttcttatgctgcagaataatcagctaagacacgtacccacagaagctctgcagaatttgcgaagccttcaatccctgcgtctggatgctaaccacatcagctatgtgcccccaagctgtttcagtggcctgcattccctgaggcacctgtggctggatgacaatgcgttaacagaaatccccgtccaggcttttagaagtttatcggcattgcaagccatgaccttggccctgaacaaaatacaccacataccagactatgcctttggaaacctctccagcttggtagttctacatctccataacaatagaatccactccctgggaaagaaatgctttgatgggctccacagcctagagactttagatttaaattacaataaccttgatgaattccccactgcaattaggacactctccaaccttaaagaactaggatttcatagcaacaatatcaggtcgatacctgagaaagcatttgtaggcaacccttctcttattacaatacatttctatgacaatcccatccagtttgttgggagatctgcttttcaacatttacctgaactaagaacactgactctgaatggtgcctcacaaataactgaatttcctgatttaactggaactgcaaacctggagagtctgactttaactggagcacagatctcatctcttcctcaaaccgtctgcaatcagttacctaatctccaagtgctgtgcgtatcagtaaggcaataatgttgtgtaaacaggcaacttccatttaggggtgaaatggcagacatgatttcaataatctctttaaaagaggagaaagtttttcctttcaggtctgcaggaggtcaagcctcctttgccctctttggtccaggctctctgacatgatcctggtaacaaatggctttgcagagcagaacaaaataacataatggatcaaccacccaatatggatgccaaaatcaaaaactgagatctcagatccacacaatccttgataaagagatctgtcttacaacctattagaagatttacccagtttttcagtctgccaaaagcttcagaaaattgacctaagacataatgaaatctacgaaattaaagttgacactttccagcagttgcttagcctccgatcgctgaatttggcttggaacaaaattgctattattcaccccaatgcattttccactttgccatccctaataaagctggacctatcgtccaacctcctgtcgtcttttcctataactgggttacatggtttaactcacttaaaattaacaggaaatcatgccttacagagcttgatatcatctgaaaactttccagaactcaaggttatagaaatgccttatgcttaccagtgctgtgcatttggagtgtgtgagaatgcctataagatttctaatcaatggaataaaggtgacaacagcagtatggacgaccttcataagaaagatgctggaatgtttcaggctcaagatgaacgtgaccttgaagatttcctgcttgactttgaggaagacctgaaagcccttcattcagtgcagtgttcaccttccccaggccccttcaaaccctgtgaacacctgcttgatggctggctgatcagaattggagtgtggaccatagcagttctggcacttacttgtaatgctttggtgacttcaacagttttcagatcccctctgtacatttcccccattaaactgttaattggggtcatcgcagcagtgaacatgctcacgggagtctccagtgccgtgctggctggtgtggatgcgttcacttttggcagctttgcacgacatggtgcctggtgggagaatggggaggatctggtgagcctgagaaagcaaacctacgtctggacaagatcaaaacacccaagcttgatgtcaattaactctgatgatgtcgaaaaacagtcctgtgactcaactcaagccttggtaacctttaccagctccagcatcacttatgacctgcctcccagttccgtgccatcaccagcttatccagtgactgagagctgccatctttcctctgtggcatttgtcccatgtctctaattaatatgtgaaggaaaatgttttcaaaggttgagaacctgaaaatgtgagattgagtatatcagagcagtaattaataagaagagctgaggtgaaactcggtttaaaaaccaaaaaagaatctctcagttagtaagaaaaggctgaaaacctcttgatacttgagagtgaatataagtctaaatgctgctttgtataatttgttcagctaagggatagatcgatcacactatttaagtgagcccagatcaaaaaagcagattgaaattttctttagaaaagattctccatgatttgaattgcattctctttaaactcaccaatgtaatcattttgggaggagggagaacccacttgctttccaaatgggtttatttaaacccacaaactcaagaggttgttgggggaattaggaaaataagggttttcaatgacctacattgctaggtagaggctgtgatccatgggatttcattctaatgaccatgtgaagatgtttgagtcctcctttgcctttcctcagaaagaatccttctaaggcacaaatcccttagatggataatgtaaggtattgttaactcactcatattgagatcatttttagagataccaggttttatgtatcagcactagatggttccaccctcatgggataaaactgcttacaagtattttgaaagaaaaactgaccaaaattcttaaattgttactaaggcaatcatgcacaggtgacgtatgtcttatctgatttgtttttaactccttggtgcccaaagctcagaagggaattccactgccagcaatgaacatacctggaaaagaaagtaagcaatctgggattttttttctgggttagtaaagaatttttgcaataagttttatcagttgattcaaactgatgtgcatcttaatgatcaaatgtgcacattacataaattaagtccactgatacaacttcttacacatgtatctctagtagctctggcaaacccaatatctgacaccactttggactcaagagactcagtaacgtattatcctgtttatttagcttggttttagctgtgttctctctggataacccacttgatgttaggaacattacttctctgcttattccatattaatactgtgttaggtattttaagaagcaagttattaaataagaaaagtcaaagtattaattcttaccttctattatcctatattagcttcaatacatccaaaccaaatggctgttaggtagatttatttttatataagcatgtttattttgatcagatgttttaacttggatttgaaaaaatacatttatgagatgttttataagatgtgtaaatatagaactgtatttattactatagtaaaggttcagtaacattaaggaccatgataatgataataaaccttgtacagtggcatattctttgatttatattgtgtttctctgcccattttctttaaattcattaactgtatatatgtaaatatatagtacttgtaaatagattccaaatttgcttttctattgggtaaaaaataaatttgtaataaaatgtgtgactatgaaac

SEQ ID NO: 11231 - DNA, 2664 bp, Homo sapiens
  source 1..2664: mol_type = unassigned DNA
tgctgctctccgcccgcgtccggctcgtggccccctacttcgggcaccatggacacctcccggctcggtgtgctcctgtccttgcctgtgctgctgcagctggcgaccgggggcagctctcccaggtctggtgtgttgctgaggggctgccccacacactgtcattgcgagcccgacggcaggatgttgctcagggtggactgctccgacctggggctctcggagctgccttccaacctcagcgtcttcacctcctacctagacctcagtatgaacaacatcagtcagctgctcccgaatcccctgcccagtctccgcttcctggaggagttacgtcttgcgggaaacgctctgacatacattcccaagggagcattcactggcctttacagtcttaaagttcttatgctgcagaataatcagctaagacacgtacccacagaagctctgcagaatttgcgaagccttcaatccctacatctccataacaatagaatccactccctgggaaagaaatgctttgatgggctccacagcctagagactttagatttaaattacaataaccttgatgaattccccactgcaattaggacactctccaaccttaaagaactaggatttcatagcaacaatatcaggtcgatacctgagaaagcatttgtaggcaacccttctcttattacaatacatttctatgacaatcccatccagtttgttgggagatctgcttttcaacatttacctgaactaagaacactgactctgaatggtgcctcacaaataactgaatttcctgatttaactggaactgcaaacctggagagtctgactttaactggagcacagatctcatctcttcctcaaaccgtctgcaatcagttacctaatctccaagtgctagatctgtcttacaacctattagaagatttacccagtttttcagtctgccaaaagcttcagaaaattgacctaagacataatgaaatctacgaaattaaagttgacactttccagcagttgcttagcctccgatcgctgaatttggcttggaacaaaattgctattattcaccccaatgcattttccactttgccatccctaataaagctggacctatcgtccaacctcctgtcgtcttttcctataactgggttacatggtttaactcacttaaaattaacaggaaatcatgccttacagagcttgatatcatctgaaaactttccagaactcaaggttatagaaatgccttatgcttaccagtgctgtgcatttggagtgtgtgagaatgcctataagatttctaatcaatggaataaaggtgacaacagcagtatggacgaccttcataagaaagatgctggaatgtttcaggctcaagatgaacgtgaccttgaagatttcctgcttgactttgaggaagacctgaaagcccttcattcagtgcagtgttcaccttccccaggccccttcaaaccctgtgaacacctgcttgatggctggctgatcagaattggagtgtggaccatagcagttctggcacttacttgtaatgctttggtgacttcaacagttttcagatcccctctgtacatttcccccattaaactgttaattggggtcatcgcagcagtgaacatgctcacgggagtctccagtgccgtgctggctggtgtggatgcgttcacttttggcagctttgcacgacatggtgcctggtgggagaatggggttggttgccatgtcattggttttttgtccatttttgcttcagaatcatctgttttcctgcttactctggcagccctggagcgtgggttctctgtgaaatattctgcaaaatttgaaacgaaagctccattttctagcctgaaagtaatcattttgctctgtgccctgctggccttgaccatggccgcagttcccctgctgggtggcagcaagtatggcgcctcccctctctgcctgcctttgccttttggggagcccagcaccatgggctacatggtcgctctcatcttgctcaattccctttgcttcctcatgatgaccattgcctacaccaagctctactgcaatttggacaagggagacctggagaatatttgggactgctctatggtaaaacacattgccctgttgctcttcaccaactgcatcctaaactgccctgtggctttcttgtccttctcctctttaataaaccttacatttatcagtcctgaagtaattaagtttatccttctggtggtagtcccacttcctgcatgtctcaatccccttctctacatcttgttcaatcctcactttaaggaggatctggtgagcctgagaaagcaaacctacgtctggacaagatcaaaacacccaagcttgatgtcaattaactctgatgatgtcgaaaaacagtcctgtgactcaactcaagccttggtaacctttaccagctccagcatcacttatgacctgcctcccagttccgtgccatcaccagcttatccagtgactgagagctgccatctttcctctgtggcatttgtcccatgtctctaattaatatgtgaaggaaaatgttttcaaaggttgagaacctgaaaatgtgagattgagtatatcagagcagtaattaataagaagagctgaggtgaaactcggtttaaa

SEQ ID NO: 11232 - DNA, 2800 bp, Homo sapiens
  source 1..2800: mol_type = unassigned DNA
ctgctctccgcccgcgtccggctcgtggccccctacttcgggcaccatggacacctcccggctcggtgtgctcctgtccttgcctgtgctgctgcagctggcgaccgggggcagctctcccaggtctggtgtgttgctgaggggctgccccacacactgtcattgcgagcccgacggcaggatgttgctcagggtggactgctccgacctggggctctcggagctgccttccaacctcagcgtcttcacctcctacctagacctcagtatgaacaacatcagtcagctgctcccgaatcccctgcccagtctccgcttcctggaggagttacgtcttgcgggaaacgctctgacatacattcccaagggagcattcactggcctttacagtcttaaagttcttatgctgcagaataatcagctaagacacgtacccacagaagctctgcagaatttgcgaagccttcaatccctgcgtctggatgctaaccacatcagctatgtgcccccaagctgtttcagtggcctgcattccctgaggcacctgtggctggatgacaatgcgttaacagaaatccccgtccaggcttttagaagtttatcggcattgcaagccatgaccttggccctgaacaaaatacaccacataccagactatgcctttggaaacctctccagcttggtagttctacatctccataacaatagaatccactccctgggaaagaaatgctttgatgggctccacagcctagagactttagatttaaattacaataaccttgatgaattccccactgcaattaggacactctccaaccttaaagaactacatttctatgacaatcccatccagtttgttgggagatctgcttttcaacatttacctgaactaagaacactgactctgaatggtgcctcacaaataactgaatttcctgatttaactggaactgcaaacctggagagtctgactttaactggagcacagatctcatctcttcctcaaaccgtctgcaatcagttacctaatctccaagtgctagatctgtcttacaacctattagaagatttacccagtttttcagtctgccaaaagcttcagaaaattgacctaagacataatgaaatctacgaaattaaagttgacactttccagcagttgcttagcctccgatcgctgaatttggcttggaacaaaattgctattattcaccccaatgcattttccactttgccatccctaataaagctggacctatcgtccaacctcctgtcgtcttttcctataactgggttacatggtttaactcacttaaaattaacaggaaatcatgccttacagagcttgatatcatctgaaaactttccagaactcaaggttatagaaatgccttatgcttaccagtgctgtgcatttggagtgtgtgagaatgcctataagatttctaatcaatggaataaaggtgacaacagcagtatggacgaccttcataagaaagatgctggaatgtttcaggctcaagatgaacgtgaccttgaagatttcctgcttgactttgaggaagacctgaaagcccttcattcagtgcagtgttcaccttccccaggccccttcaaaccctgtgaacacctgcttgatggctggctgatcagaattggagtgtggaccatagcagttctggcacttacttgtaatgctttggtgacttcaacagttttcagatcccctctgtacatttcccccattaaactgttaattggggtcatcgcagcagtgaacatgctcacgggagtctccagtgccgtgctggctggtgtggatgcgttcacttttggcagctttgcacgacatggtgcctggtgggagaatggggttggttgccatgtcattggttttttgtccatttttgcttcagaatcatctgttttcctgcttactctggcagccctggagcgtgggttctctgtgaaatattctgcaaaatttgaaacgaaagctccattttctagcctgaaagtaatcattttgctctgtgccctgctggccttgaccatggccgcagttcccctgctgggtggcagcaagtatggcgcctcccctctctgcctgcctttgccttttggggagcccagcaccatgggctacatggtcgctctcatcttgctcaattccctttgcttcctcatgatgaccattgcctacaccaagctctactgcaatttggacaagggagacctggagaatatttgggactgctctatggtaaaacacattgccctgttgctcttcaccaactgcatcctaaactgccctgtggctttcttgtccttctcctctttaataaaccttacatttatcagtcctgaagtaattaagtttatccttctggtggtagtcccacttcctgcatgtctcaatccccttctctacatcttgttcaatcctcactttaaggaggatctggtgagcctgagaaagcaaacctacgtctggacaagatcaaaacacccaagcttgatgtcaattaactctgatgatgtcgaaaaacagtcctgtgactcaactcaagccttggtaacctttaccagctccagcatcacttatgacctgcctcccagttccgtgccatcaccagcttatccagtgactgagagctgccatctttcctctgtggcatttgtcccatgtctctaattaatatgtgaaggaaaatgttttcaaaggttgagaacctgaaaatgtgagattgagtatatcagagcagtaattaataagaagagctgaggtgaaactcgg

SEQ ID NO: 11233 - DNA, 298 bp, Homo sapiens
  source 1..298: mol_type = unassigned DNA
atggatgccaaaatcaaaaactgagatctcagatccacacaatccttgataaagagatctgtcttacaacctattagaagatttacccagtttttcagtctgccaaaagcttcagaaaattgacctaagacataatgaaatctacgaaattaaagttgacactttccagcagttgcttagcctccgatcgctgtgagtatcacctcccagtgcgttccccagcacagagcattttctttctctttggggccttcccctaatgttttcttttcattgtgtactattgtggtgggacttt

SEQ ID NO: 11234 - DNA, 576 bp, Homo sapiens
  source 1..576: mol_type = unassigned DNA
tataaatgaattcattaagtaaactatttaaatcaattaaagaagtataacagttacatttcagtaaacatttgaatctactggttaatccaataatggctgtgactacctgctccatgtcagggctatgaaaatgttcagagtctgcctttgggagatataacatcttggagggaaaaggagagcaaagcatgtttctttatgatttatttgtaacagattttccctttttgcaccttctgtttttcagagatctgtcttacaacctattagaagatttacccagtttttcagtctgccaaaagcttcagaaaattgacctaagacataatgaaatctacgaaattaaagttgacactttccagcagttgcttagcctccgatcgctgaatttggcttggaacaaaattgctattattcaccccaatgcattttccactttgccatccctaataaagctggacctatcgtccaacctcctgtcgtcttttcctataactgggttacatggtttaactcacttaaaattaacaggaaatcatgccttacagagcttgatatcatctgaaaactttc

SEQ ID NO: 11235 - DNA, 3567 bp, Homo sapiens
  source 1..3567: mol_type = unassigned DNA
gcccgccgggaccgggaggaagcagctgcggccatcgcgccgtgcgtccgcgcccggccgccaggtgccccagtagcccgaccgccgagatgcccagcccgccggggctccgggcgctatggctttgcgccgcgctgtgcgcttcccggagggccggcggcgccccccagcccggcccggggcccaccgcctgcccggccccctgccactgccaggaggacggcatcatgctgtctgccgactgctctgagctcgggctgtccgccgttccgggggacctggaccccctgacggcttacctggacctcagcatgaacaacctcacagagcttcagcctggcctcttccaccacctgcgcttcttggaggagctgcgtctctctgggaaccatctctcacacatcccaggacaagcattctctggtctctacagcctgaaaatcctgatgctgcagaacaatcagctgggaggaatccccgcagaggcgctgtgggagctgccgagcctgcagtcgctgcgcctagatgccaacctcatctccctggtcccggagaggagctttgaggggctgtcctccctccgccacctctggctggacgacaatgcactcacggagatccctgtcagggccctcaacaacctccctgccctgcaggccatgaccctggccctcaaccgcatcagccacatccccgactacgcgttccagaatctcaccagccttgtggtgctgcatttgcataacaaccgcatccagcatctggggacccacagcttcgaggggctgcacaatctggagacactagacctgaattataacaagctgcaggagttccctgtggccatccggaccctgggcagactgcaggaactggggttccataacaacaacatcaaggccatcccagaaaaggccttcatggggaaccctctgctacagacgatacacttttatgataacccaatccagtttgtgggaagatcggcattccagtacctgcctaaactccacacactatctctgaatggtgccatggacatccaggagtttccagatctcaaaggcaccaccagcctggagatcctgaccctgacccgcgcaggcatccggctgctcccatcggggatgtgccaacagctgcccaggctccgagtcctggaactgtctcacaatcaaattgaggagctgcccagcctgcacaggtgtcagaaattggaggaaatcggcctccaacacaaccgcatctgggaaattggagctgacaccttcagccagctgagctccctgcaagccctggatcttagctggaacgccatccggtccatccaccccgaggccttctccaccctgcactccctggtcaagctggacctgacagacaaccagctgaccacactgcccctggctggacttgggggcttgatgcatctgaagctcaaagggaaccttgctctctcccaggccttctccaaggacagtttcccaaaactgaggatcctggaggtgccttatgcctaccagtgctgtccctatgggatgtgtgccagcttcttcaaggcctctgggcagtgggaggctgaagaccttcaccttgatgatgaggagtcttcaaaaaggcccctgggcctccttgccagacaagcagagaaccactatgaccaggacctggatgagctccagctggagatggaggactcaaagccacaccccagtgtccagtgtagccctactccaggccccttcaagccctgtgagtacctctttgaaagctggggcatccgcctggccgtgtgggccatcgtgttgctctccgtgctctgcaatggactggtgctgctgaccgtgttcgctggcgggcctgtccccctgcccccggtcaagtttgtggtaggtgcgattgcaggcgccaacaccttgactggcatttcctgtggccttctagcctcagtcgatgccctgacctttggtcagttctctgagtacggagcccgctgggagacggggctaggctgccgggccactggcttcctggcagtacttgggtcggaggcatcggtgctgctgctcactctggccgcagtgcagtgcagcgtctccgtctcctgtgtccgggcctatgggaagtccccctccctgggcagcgttcgagcaggggtcctaggctgcctggcactggcagggctggccgccgcgctgcccctggcctcagtgggagaatacggggcctccccactctgcctgccctacgcgccacctgagggtcagccagcagccctgggcttcaccgtggccctggtgatgatgaactccttctgtttcctggtcgtggccggtgcctacatcaaactgtactgtgacctgccgcggggcgactttgaggccgtgtgggactgcgccatggtgaggcacgtggcctggctcatcttcgcagacgggctcctctactgtcccgtggccttcctcagctttgcctccatgctgggcctcttccctgtcacgcccgaggccgtcaagtctgtcctgctggtggtgctgcccctgcctgcctgcctcaacccactgctgtacctgctcttcaacccccacttccgggatgaccttcggcggcttcggccccgcgcaggggactcagggcccctagcctatgctgcggccggggagctggagaagagctcctgtgattctacccaggccctggtagccttctctgatgtggatctcattctggaagcttctgaagctgggcggccccctgggctggagacctatggcttcccctcagtgaccctcatctcctgtcagcagccaggggcccccaggctggagggcagccattgtgtagagccagaggggaaccactttgggaacccccaaccctccatggatggagaactgctgctgagggcagagggatctacgccagcaggtggaggcttgtcagggggtggcggctttcagccctctggcttggcctttgcttcacacgtgtaaatatccctccccattcttctcttcccctctcttccctttcctctctccccctcggtgaatgatggctgcttctaaaacaaatacaaccaaaactcagcagtgtgatctatagcaggatggcccagtccctggctccactgatcacctctctcctgtgaccatcaccaacgggtgcctcttggcctggctttcccttggccttcctcagcttcaccttgatactgggcctcttccttgtcatgtctgaagctgtggaccagagacctggacttttgtctgcttaagggaaatgagggaagtaaagacagtgaaggggtggagggttgatcagggcacagtggacagggagacctcacagagaaaggcctggaaggtgatttcccgtgtgactcatggataggatacaaaatgtgttccatgtaccattaatcttgacatatgccatgcataaagacttcctattaaaataagctttggaagagattacacatgatgtctttttcttagagattcacagtgcatgttagtgtaataaagagataagtcctacagtagtaaaatctattgaactttg

SEQ ID NO: 11236 - DNA, 3406 bp, Homo sapiens
  source 1..3406: mol_type = unassigned DNA
gaacgcttgtgtctaactgatgctcctaatgcggaagcccctgaaaggcggttgtggtgcaaaggaaaacccacaggccaaggaatgggaagaccaaggttgacacttgtttgtcaagtgtcaataatcatctctgcccgggacctcagcatgaacaacctcacagagcttcagcctggcctcttccaccacctgcgcttcttggaggagctgcgtctctctgggaaccatctctcacacatcccaggacaagcattctctggtctctacagcctgaaaatcctgatgctgcagaacaatcagctgggaggaatccccgcagaggcgctgtgggagctgccgagcctgcagtcgctgcgcctagatgccaacctcatctccctggtcccggagaggagctttgaggggctgtcctccctccgccacctctggctggacgacaatgcactcacggagatccctgtcagggccctcaacaacctccctgccctgcaggccatgaccctggccctcaaccgcatcagccacatccccgactacgcgttccagaatctcaccagccttgtggtgctgcatttgcataacaaccgcatccagcatctggggacccacagcttcgaggggctgcacaatctggagacactagacctgaattataacaagctgcaggagttccctgtggccatccggaccctgggcagactgcaggaactggggttccataacaacaacatcaaggccatcccagaaaaggccttcatggggaaccctctgctacagacgatacacttttatgataacccaatccagtttgtgggaagatcggcattccagtacctgcctaaactccacacactatctctgaatggtgccatggacatccaggagtttccagatctcaaaggcaccaccagcctggagatcctgaccctgacccgcgcaggcatccggctgctcccatcggggatgtgccaacagctgcccaggctccgagtcctggaactgtctcacaatcaaattgaggagctgcccagcctgcacaggtgtcagaaattggaggaaatcggcctccaacacaaccgcatctgggaaattggagctgacaccttcagccagctgagctccctgcaagccctggatcttagctggaacgccatccggtccatccaccccgaggccttctccaccctgcactccctggtcaagctggacctgacagacaaccagctgaccacactgcccctggctggacttgggggcttgatgcatctgaagctcaaagggaaccttgctctctcccaggccttctccaaggacagtttcccaaaactgaggatcctggaggtgccttatgcctaccagtgctgtccctatgggatgtgtgccagcttcttcaaggcctctgggcagtgggaggctgaagaccttcaccttgatgatgaggagtcttcaaaaaggcccctgggcctccttgccagacaagcagagaaccactatgaccaggacctggatgagctccagctggagatggaggactcaaagccacaccccagtgtccagtgtagccctactccaggccccttcaagccctgtgagtacctctttgaaagctggggcatccgcctggccgtgtgggccatcgtgttgctctccgtgctctgcaatggactggtgctgctgaccgtgttcgctggcgggcctgtccccctgcccccggtcaagtttgtggtaggtgcgattgcaggcgccaacaccttgactggcatttcctgtggccttctagcctcagtcgatgccctgacctttggtcagttctctgagtacggagcccgctgggagacggggctaggctgccgggccactggcttcctggcagtacttgggtcggaggcatcggtgctgctgctcactctggccgcagtgcagtgcagcgtctccgtctcctgtgtccgggcctatgggaagtccccctccctgggcagcgttcgagcaggggtcctaggctgcctggcactggcagggctggccgccgcgctgcccctggcctcagtgggagaatacggggcctccccactctgcctgccctacgcgccacctgagggtcagccagcagccctgggcttcaccgtggccctggtgatgatgaactccttctgtttcctggtcgtggccggtgcctacatcaaactgtactgtgacctgccgcggggcgactttgaggccgtgtgggactgcgccatggtgaggcacgtggcctggctcatcttcgcagacgggctcctctactgtcccgtggccttcctcagctttgcctccatgctgggcctcttccctgtcacgcccgaggccgtcaagtctgtcctgctggtggtgctgcccctgcctgcctgcctcaacccactgctgtacctgctcttcaacccccacttccgggatgaccttcggcggcttcggccccgcgcaggggactcagggcccctagcctatgctgcggccggggagctggagaagagctcctgtgattctacccaggccctggtagccttctctgatgtggatctcattctggaagcttctgaagctgggcggccccctgggctggagacctatggcttcccctcagtgaccctcatctcctgtcagcagccaggggcccccaggctggagggcagccattgtgtagagccagaggggaaccactttgggaacccccaaccctccatggatggagaactgctgctgagggcagagggatctacgccagcaggtggaggcttgtcagggggtggcggctttcagccctctggcttggcctttgcttcacacgtgtaaatatccctccccattcttctcttcccctctcttccctttcctctctccccctcggtgaatgatggctgcttctaaaacaaatacaaccaaaactcagcagtgtgatctatagcaggatggcccagtccctggctccactgatcacctctctcctgtgaccatcaccaacgggtgcctcttggcctggctttcccttggccttcctcagcttcaccttgatactgggcctcttccttgtcatgtctgaagctgtggaccagagacctggacttttgtctgcttaagggaaatgagggaagtaaagacagtgaaggggtggagggttgatcagggcacagtggacagggagacctcacagagaaaggcctggaaggtgatttcccgtgtgactcatggataggatacaaaatgtgttccatgtaccattaatcttgacatatgccatgcataaagacttcctattaaaataagctttggaagagattacacatgatgtctttttcttagagattcacagtgcatgttagtgtaataaagagataagtcctacagtagtaaaatctattgaactttg

SEQ ID NO: 11237 - DNA, 3377 bp, Homo sapiens
  source 1..3377: mol_type = unassigned DNA
tgaaaggcggttgtggtgcaaaggaaaacccacaggccaaggaatgggaagaccaaggttgacacttgtttgtcaagtgtcaataatcatctctgcccgggacctcagcatgaacaacctcacagagcttcagcctggcctcttccaccacctgcgcttcttggaggagctgcgtctctctgggaaccatctctcacacatcccaggacaagcattctctggtctctacagcctgaaaatcctgatgctgcagaacaatcagctgggaggaatccccgcagaggcgctgtgggagctgccgagcctgcagtcgctgcgcctagatgccaacctcatctccctggtcccggagaggagctttgaggggctgtcctccctccgccacctctggctggacgacaatgcactcacggagatccctgtcagggccctcaacaacctccctgccctgcaggccatgaccctggccctcaaccgcatcagccacatccccgactacgcgttccagaatctcaccagccttgtggtgctgcatttgcataacaaccgcatccagcatctggggacccacagcttcgaggggctgcacaatctggagacactagacctgaattataacaagctgcaggagttccctgtggccatccggaccctgggcagactgcaggaactggggttccataacaacaacatcaaggccatcccagaaaaggccttcatggggaaccctctgctacagacgatacacttttatgataacccaatccagtttgtgggaagatcggcattccagtacctgcctaaactccacacactatctctgaatggtgccatggacatccaggagtttccagatctcaaaggcaccaccagcctggagatcctgaccctgacccgcgcaggcatccggctgctcccatcggggatgtgccaacagctgcccaggctccgagtcctggaactgtctcacaatcaaattgaggagctgcccagcctgcacaggtgtcagaaattggaggaaatgagaagtggggggctctactttcttcctcccagtgctcggggggcatggagcggagccagggtctgagcctgccggctcatccagcctctcttgctgccctagcggcctccaacacaaccgcatctgggaaattggagctgacaccttcagccagctgagctccctgcaagccctggatcttagctggaacgccatccggtccatccaccccgaggccttctccaccctgcactccctggtcaagctggacctgacagacaaccagctgaccacactgcccctggctggacttgggggcttgatgcatctgaagctcaaagggaaccttgctctctcccaggccttctccaaggacagtttcccaaaactgaggatcctggaggtgccttatgcctaccagtgctgtccctatgggatgtgtgccagcttcttcaaggcctctgggcagtgggaggctgaagaccttcaccttgatgatgaggagtcttcaaaaaggcccctgggcctccttgccagacaagcagagaaccactatgaccaggacctggatgagctccagctggagatggaggactcaaagccacaccccagtgtccagtgtagccctactccaggccccttcaagccctgtgagtacctctttgaaagctggggcatccgcctggccgtgtgggccatcgtgttgctctccgtgctctgcaatggactggtgctgctgaccgtgttcgctggcgggcctgtccccctgcccccggtcaagtttgtggtaggtgcgattgcaggcgccaacaccttgactggcatttcctgtggccttctagcctcagtcgatgccctgacctttggtcagttctctgagtacggagcccgctgggagacggggctaggctgccgggccactggcttcctggcagtacttgggtcggaggcatcggtgctgctgctcactctggccgcagtgcagtgcagcgtctccgtctcctgtgtccgggcctatgggaagtccccctccctgggcagcgttcgagcaggggtcctaggctgcctggcactggcagggctggccgccgcgctgcccctggcctcagtgggagaatacggggcctccccactctgcctgccctacgcgccacctgagggtcagccagcagccctgggcttcaccgtggccctggtgatgatgaactccttctgtttcctggtcgtggccggtgcctacatcaaactgtactgtgacctgccgcggggcgactttgaggccgtgtgggactgcgccatggtgaggcacgtggcctggctcatcttcgcagacgggctcctctactgtcccgtggccttcctcagctttgcctccatgctgggcctcttccctgtcacgcccgaggccgtcaagtctgtcctgctggtggtgctgcccctgcctgcctgcctcaacccactgctgtacctgctcttcaacccccacttccgggatgaccttcggcggcttcggccccgcgcaggggactcagggcccctagcctatgctgcggccggggagctggagaagagctcctgtgattctacccaggccctggtagccttctctgatgtggatctcattctggaagcttctgaagctgggcggccccctgggctggagacctatggcttcccctcagtgaccctcatctcctgtcagcagccaggggcccccaggctggagggcagccattgtgtagagccagaggggaaccactttgggaacccccaaccctccatggatggagaactgctgctgagggcagagggatctacgccagcaggtggaggcttgtcagggggtggcggctttcagccctctggcttggcctttgcttcacacgtgtaaatatccctccccattcttctcttcccctctcttccctttcctctctccccctcggtgaatgatggctgcttctaaaacaaatacaaccaaaactcagcagtgtgatctatagcaggatggcccagtccctggctccactgatcacctctctcctgtgaccatcaccaacgggtgcctcttggcctggctttcccttggccttcctcagcttcaccttgatactgggcctcttccttgtcatgtctgaagctgtggaccagagacctggacttttgtctgcttaagggaaatgagggaagtaaagacagtgaaggggtggagggttgatcagggcacagtggacagggagacctcacagagaaaggcctggaaggtgatttcccgtgtgactcatggataggatacaaaatgtgttccatgtaccattaatcttgacatatgccatgcataaagacttcctattaaaataagctttggaagaga

SEQ ID NO: 11238 - DNA, 792 bp, Homo sapiens
  source 1..792: mol_type = unassigned DNA
tcctattcattctcttgattttttttaaagaaaacttcttttgaaaatttccatccaattccaaacaagctaggacgaacaaagggacctcagcatgaacaacctcacagagcttcagcctggcctcttccaccacctgcgcttcttggaggagctgcgtctctctgggaaccatctctcacacatcccaggacaagcattctctggtctctacagcctgaaaatcctgatgctgcagaacaatcagctgggaggaatccccgcagaggcgctgtgggagctgccgagcctgcagtcgctgcgcctagatgccaacctcatctccctggtcccggagaggagctttgaggggctgtcctccctccgccacctctggctggacgacaatgcactcacggagatccctgtcagggccctcaacaacctccctgccctgcaggccatgaccctggccctcaaccgcatcagccacatccccgactacgcgttccagaatctcaccagccttgtggtgctagacctgaattataacaagctgcaggagttccctgtggccatccggaccctgggcagactgcaggaactatctctgaatggtgccatggacatccaggagtttccagatctcaaaggcaccaccagcctggagatcctgaccctgacccgcgcaggcatccggctgctcccatcggggatgtgccaacagctgcccaggctccgagtcctggaactgtctcacaatcaaattgaggagctgcccagcctgcacaggtgtcagaaattggaggaaat

SEQ ID NO: 11239 - DNA, 2487 bp, Homo sapiens
  source 1..2487: mol_type = unassigned DNA
atgcgcttggagggagagggccgctcagcgagggcgggacagaacctctcccgggctgggagtgcacggcgcggtgcgcccagggacctcagcatgaacaacctcacagagcttcagcctggcctcttccaccacctgcgcttcttggaggagctgcgtctctctgggaaccatctctcacacatcccaggacaagcattctctggtctctacagcctgaaaatcctgatgctgcagaacaatcagctgggaggaatccccgcagaggcgctgtgggagctgccgagcctgcagtcgctagacctgaattataacaagctgcaggagttccctgtggccatccggaccctgggcagactgcaggaactggggttccataacaacaacatcaaggccatcccagaaaaggccttcatggggaaccctctgctacagacgatacacttttatgataacccaatccagtttgtgggaagatcggcattccagtacctgcctaaactccacacactatctctgaatggtgccatggacatccaggagtttccagatctcaaaggcaccaccagcctggagatcctgaccctgacccgcgcaggcatccggctgctcccatcggggatgtgccaacagctgcccaggctccgagtcctggaactgtctcacaatcaaattgaggagctgcccagcctgcacaggtgtcagaaattggaggaaatcggcctccaacacaaccgcatctgggaaattggagctgacaccttcagccagctgagctccctgcaagccctggatcttagctggaacgccatccggtccatccaccccgaggccttctccaccctgcactccctggtcaagctggacctgacagacaaccagctgaccacactgcccctggctggacttgggggcttgatgcatctgaagctcaaagggaaccttgctctctcccaggccttctccaaggacagtttcccaaaactgaggatcctggaggtgccttatgcctaccagtgctgtccctatgggatgtgtgccagcttcttcaaggcctctgggcagtgggaggctgaagaccttcaccttgatgatgaggagtcttcaaaaaggcccctgggcctccttgccagacaagcagagaaccactatgaccaggacctggatgagctccagctggagatggaggactcaaagccacaccccagtgtccagtgtagccctactccaggccccttcaagccctgtgagtacctctttgaaagctggggcatccgcctggccgtgtgggccatcgtgttgctctccgtgctctgcaatggactggtgctgctgaccgtgttcgctggcgggcctgtccccctgcccccggtcaagtttgtggtaggtgcgattgcaggcgccaacaccttgactggcatttcctgtggccttctagcctcagtcgatgccctgacctttggtcagttctctgagtacggagcccgctgggagacggggctaggctgccgggccactggcttcctggcagtacttgggtcggaggcatcggtgctgctgctcactctggccgcagtgcagtgcagcgtctccgtctcctgtgtccgggcctatgggaagtccccctccctgggcagcgttcgagcaggggtcctaggctgcctggcactggcagggctggccgccgcgctgcccctggcctcagtgggagaatacggggcctccccactctgcctgccctacgcgccacctgagggtcagccagcagccctgggcttcaccgtggccctggtgatgatgaactccttctgtttcctggtcgtggccggtgcctacatcaaactgtactgtgacctgccgcggggcgactttgaggccgtgtgggactgcgccatggtgaggcacgtggcctggctcatcttcgcagacgggctcctctactgtcccgtggccttcctcagctttgcctccatgctgggcctcttccctgtcacgcccgaggccgtcaagtctgtcctgctggtggtgctgcccctgcctgcctgcctcaacccactgctgtacctgctcttcaacccccacttccgggatgaccttcggcggcttcggccccgcgcaggggactcagggcccctagcctatgctgcggccggggagctggagaagagctcctgtgattctacccaggccctggtagccttctctgatgtggatctcattctggaagcttctgaagctgggcggccccctgggctggagacctatggcttcccctcagtgaccctcatctcctgtcagcagccaggggcccccaggctggagggcagccattgtgtagagccagaggggaaccactttgggaacccccaaccctccatggatggagaactgctgctgagggcagagggatctacgccagcaggtggaggcttgtcagggggtggcggctttcagccctctggcttggcctttgcttcacacgtgtaa

SEQ ID NO: 11240 - DNA, 557 bp, Homo sapiens
  source 1..557: mol_type = unassigned DNA
ggacctcagcatgaacaacctcacagagcttcagcctggcctcttccaccacctgcgcttcttggaggagctgcgtctctctgggaaccatctctcacacatcccaggacaagcattctctggtctctacagcctgaaaatcctgatgctgcagaacaatcagctgggaggaatccccgcagaggcgctgtgggagctgccgagcctgcagtcgctgtgagtcattagagggctggtctgggagtcaccagcttcctggggcctgagtcacagcccagggccccctgcctcagctttcccttccctctgcaggcgccccctctcccagtccacgttccagacagcatgccgctcctggctttggtttctccggggttttctgttgtcatcagtgtgtggctgtgtacactcctatgcatatttcaggaaaagagtgctcccacgccccactgggggactgtgggaatgggacctccctaggtgaggccaccaggccagcggtcctggggcgactggtgttctgccattggagcctgggtttaggggtggagactgcc

SEQ ID NO: 11241 - DNA, 866 bp, Homo sapiens
  source 1..866: mol_type = unassigned DNA
cctggattgacccctctccatcctctcttccaccaggcgcctagatgccaacctcatctccctggtcccggagaggagctttgaggggctgtcctccctccgccacctctggctggacgacaatgcactcacggagatccctgtcagggccctcaacaacctccctgccctgcaggccatgaccctggccctcaaccgcatcagccacatccccgactacgcgttccagaatctcaccagccttgtggtgctgcatttgcataacaaccgcatccagcatctggggacccacagcttcgaggggctgcacaatctggagacactagacctgaattataacaagctgcaggagttccctgtggccatccggaccctgggcagactgcaggaactgttcaagcgattctcctgcctcagcctcccgagttgctgggactacaggcacgcaccaccatgcccagggggttccataacaacaacatcaaggccatcccagaaaaggccttcatggggaaccctctgctacagacgatacacttttatgataacccaatccagtttgtgggaagatcggcattccagtacctgcctaaactccacacactatctctgaatggtgccatggacatccaggagtttccagatctcaaaggcaccaccagcctggagatcctgaccctgacccgcgcaggcatccggctgctcccatcggggatgtgccaacagctgcccaggctccgagtcctggaactgtctcacaatcaaattgaggagctgcccagcctgcacaggtgtcagaaattggaggaaatcggcctccaacacaaccgcatctgggaaattggagctgacaccttcagccagct

SEQ ID NO: 11242 - DNA, 454 bp, Homo sapiens
  source 1..454: mol_type = unassigned DNA
accaggcgcctagatgccaacctcatctccctggtcccggagaggagctttgaggggctgtcctccctccgccacctctggctggacgacaatgcactcacggagatccctgtcagggccctcaacaacctccctgccctgcaggccatgaccctggccctcaaccgcatcagccacatccccgactacgcgttccagaatctcaccagccttgtggtgctgcatttgcataacaaccgcatccagcatctggggacccacagcttcgaggggctgcacaatctggagacactgtgagttttgaggtcttggtcaaactctgtcctgcctggtgatgaaagcctggagtcttggagtggagggagcacacagagggaagagccagcagtcctgggatgctggggtctggccccgggcttgtttacccacatgcccctccctggcactttctctg

SEQ ID NO: 11243 - DNA, 2110 bp, Homo sapiens
  source 1..2110: mol_type = unassigned DNA
gtgcgatccccggcgcccgcgcgcgcccacagcgctccgccagagctgccgccgcggactcgccgggagtgggggtctccgctggtgccagcccgcttctggagaccctccgcctcctgccaacccctgctcttccaggtcgggccccggggttctgcggctgttagggacagaggcaaagaagggcaggacggtccggtttcccgtggatgttcccgcccgagaaagacagcaagttgtgtgtgcgcccgggacgcgggagggaaggtggccgccgcccgccagccatggaccatcatctttagtgcagaggatggaaagttgatgcccagtaagactgaagatccattctgcattacggaactgtggattatctgtgggtccctggtgatttcacaccttcattcactcctgcagtccctgaacacttacttggggtcctcattgccctatctggtgaaagatggcatccagcctgacttgtactggagtaatctgggctttgctgtcttttctttgtgctgccacctcctgcgtggggttctttatgccttactggctctggggatcacagctgggcaagcctgtgtccttcggtaccttccggaggtgctcatatcctgtgcatgatgagagtcggcagatgatggtgatggtggaggaatgtgggcgctatgcctccttccagggcatccccagcgcagaatggaggatctgcaccatagtgaccggcctgggttgtggcctcctcctcctggtggcgctcactgccctcatgggttgctgtgtttccgacctcatctccaggacagtgggaagagtggctggaggaattcagtttcttgggggcttgttgattggtgctggctgtgccctctaccccttgggctgggacagtgaggaagtccggcagacttgtggctacacttctggccagtttgacctggggaagtgtgaaatcggctgggcctactactgcacgggagcaggtgccactgccgccatgctgctgtgcacgtggctggcttgcttttcgggcaagaaacagaagcactacccatactgagatggagctaccaagagcagacagaggagaagatgggccaaaggggcttggagaggtcaaaacatccacctaccttcaaaaggtgggatagtagttctaatccaatacaatgctaataaaatgaaacccgataaaatcaggaacatgatataggaaggaaggattgtaggagatttgtgggggaaaaaaaaggagagtatagaatgatggagaaaaatggaccaaaggctaaaaatattgcagggcatcgggtgtttctattccacagagtattgttaatgtacaacacacacacacacacacacacacacacacacacacacacacacacaacaaatctacatatacaaacaagggtttgggttttagttttttttttttaaggtgaggactcagaaaatcaaagggctagtagaaacagtgttatgttgggaagcagggtacccccaaagatgttccctgtaggtcacggcactcccaaaagcacacaagcacatacagacatatgcatccccacacacgcctatgcacaaacgtggattatcgcacagactgggaggtttagtggtgcatttctcctctgttttctttttaatatacatttaaaatacagtattatcactttataaaacatacattaagcctaataaatggaccaataagccaaactatcagtattttgtatatcctgcataaactctaatttagttcctcaacatattttcagtgtttatgcagacctttagagttaagcctttgtatttccatgttattccacaatatgcaatatttctctgagtagcttctgctatgatattcttatgaagaaaaggggcaactttctgtccactataggagagaattcagccgaagatatgagagtaatgagagacattttccagtcattggatcgtgttttcttttgtccattattgtactgtgctgtaccacatttatttctatattcattttgtaaaaaatttaaaagtgctattttgtttgtatttgaaaatctctgtgaataaattctctctttgatcaata

SEQ ID NO: 11244 - DNA, 446 bp, Homo sapiens
  source 1..446: mol_type = unassigned DNA
cgtggctcctcggggtcacccaggaagacaagcaactttctcccatacttctcggtctgtctgccttccccactcagctttgaatgagacgcagggagagggggcgcgagggggctcggggctaggggaggagccgcgaaagctgcccccgggggtgggcctggacccgcgcggacagcggggcacccccccactcccttcccggcgctccaggaacgtcgggccccggggttctgcggctgttagggacagaggcaaagaagggcaggacggtccggtttcccgtggatgttcccgcccgagaaagacagcaagttgtgtgtgcgcccgggacgcgggagggaaggtggccgccgcccgccagccatggaccatcatctttagtgcagaggatggaaagttgatgcccagtaagactgaagatccattctgcattacggaactgt

SEQ ID NO: 11245 - DNA, 4680 bp, Homo sapiens
  source 1..4680: mol_type = unassigned DNA
acacgtgaaggaagcctttgtgggccttcctgcgcagctgactagctgaaagccatcgtgagccagcccaggagaaaccagcagaggaacagccagccgaaccctgggattgtgagaaataatcaggtgaggccgcaggcggtgctctgggtccgggagcgctgtccccagcatgaacgcggccggcggcgggagtgaatgactgcagctgcgacttccttcccgggccgcccgagcctccttccccaccgactttcttgttttgattaactccgtggactcctgactctttcttcgcccggaacatcaatatgtgtcatgtcattgtcacctgtcgctcgatgctctggaccttgctgagtattgtggtggcttttgccgagctcattgccttcatgagtgcagactggctgatcgggaaagcgaggagccgcggcggcgtggagccggcgggcccgggcgggggctccccggagccctaccaccccaccctgggcatctacgcccgctgcatccggaacccaggggtgcagcacttccagcgggacacgctgtgcgggccctacgccgagagcttcggcgagatcgccagcggcttctggcaggccacagctattttcctggctgtgggaatctttattctctgcatggtggccttggtgtccgtcttcaccatgtgtgtacagagcatcatgaagaaaagcatcttcaatgtctgtgggctgttgcaaggaattgcaggtctattccttatcctcggtttgatactctaccctgctggctggggttgccagaaggccatagactactgtggacattatgcatctgcctacaaacctggagactgctccttgggctgggccttttataccgccattgggggcacagtcctcactttcatctgtgctgtcttctctgcacaagcagaaattgcaacctctagtgacaaagtacaggaagaaattgaagaggggaaaaatctgatctgcctcctttagtttggaagagacaatgccattttctcccttgagtaatcttgtgaaacagtccacagtttcatcatttgagtcaagtggagaactaacctttacctaccaaagccacgttccacggcccgaggcttaaacaggaccaatgagaggccacatccagctacgcaaagttactggacatgcggtctgcagtgcacattataaggaatggaacatgaaaatagtatataatcctagacctggagttgccaagttctgtcagactccatctcccccaggttcaatgaaggataataatctaaatcattagggcagcagtttctctggtaacggaagagaccgtccgccagatctgcaggctgtttctgctccaacactgcttgcttgtgagcatctctgcctcagaatggggttttgggttggagttcttgttttcctctgttctttcaagttgtctccaacgaacagaaaactataaacttactggggacaggatgtgtgctaaagggcacagcaagacactgtcttttgcttagctgaccaaaggggtcagcagggatggcgtggagtcatgctgtggaacttattctaggctgaatcctagggtaaggtggatcaactgaactgtcactccagagattttagaaatttgagtaaagaaacaataaggacctatacaatcatatgagaacaaaaatatgaaatcttgctagtgaagacgtattttttcttcttcccagcagccaggctagcaccagttctggcccagtctcctcttcttctggagatcacatgtttttcttctaaggttaggattgtgctttgactgcgaaaggaaacctcactgtttcctccttccagggactgaggtctccaagctagctgtggcttatgcagatgttcactgggaggacctgccagaatctcggcacttggggggagacctttactcccagtttggtgaccatgctgtagtcagctctatttccaatcccgacagtagcagaatggcattctacaacaaaaagaagctagttatgggagttaagtttttgtagttactggtgttgatcctgaaagcagactgagataacattaaattgctgcaactgaagaactgcagccaagaccttaattccaggaaagcacagaggacaaagttaattcaaaaagaggcgctagatcaaggtcacagcactgcctacacctgtttacaaaaagaatcaaataccactatgaataaggattcaggggtttttaatctactttccataaattaccaatatcactgattcaggaagatagtatctcagaatgaccagagcagcacagaaacaagctactctgacattatgggagcttcaaaattgtatcatgatacagaaacactccttagcactttaagaaagtgagatggaactgccagatttctggaaggagaaaaagtgtaggtatttgggttcattaatctgctcacttgaggactttgttttgaaaaagtaccttctgtggacaaggtattgtgctaccagctatacaaccctgacttcagagtttgcaaccttgccctgagtgaatcatgttaaagctgtctgagtctaaagcaccgtatcttggtgcagaacagataattatacagagatggaatgggacaaccgcagttttactacattctggtgtttggcctatatgagaaaccatcttctcacagattaagggctaagggcaaaaggggtgggaggtgtggaactagccttaatgagtttcccattcctgaaccaaaattcaaagtgagtgagatgtaaatcctgtgattttggtgaagaaaaaaacgggtatcttcatagcagcctaggaaaccttaaccatatctctaacaccacacagaaagaggctggaggagccactggacaaagcttctgtctctgtgtgtacatttataatgttctaaccaagtctcaaaccttgatgaaaaacacaaaatttttccataaacttatcagaagactcacttttctttctttcttggatagagaaaccattttctgacactaggtttacaatctcagtgtccttacaagttaagtcctaagctcacaggatcctccgagcatgtccatcacctgctctttggctaaggtggcagtgtacctctagatcaacctgggaacagtcacaagggagtgtgacttcttggccataataaactcactcgatagtgtttatgttattaatctgaatgcaacagaagacaaaagcacaggcatgcacacacacagaaccccaaaccactaaaaactacctaaacactgacttagtaaatagtaaaaaggtaatgttgggacttttaaaccttgaatccattagccaggcttgggatgaaaggaccatctaaaatcatgctagtctaaaccatgctcttccacacagctgtttaaaaaccactgggtatgaggaatatgctagaaagaaatgttaaaaatagattgttggctcacacttatttttctaataaataggaccattattactaccaggaaagtcttatttattttgcctgaaattggcttaaagaaagtctcatgacgggatgggatgggctgcgcttctcaatgaactctgaggcagaaatatttgccttggattctgtggattctttaaacctgtgtgctaataattcaaacaatgttgcattaattgtataagggtttttgtatagttttcaaacatctgtggtgtaatgatctttgttaaacatatattctgtaaagtgccatagtctttttttatgtgtagcatatttaaaaatatatatgtatattatacatacacaagtttgtgtgaaagatgtgcaataacaaaggtgtatgtatgttttgttgttttgttttggaaactggacaggagtcaaaacagggatgtttgtttctgttttggcaaggagagttccacatttttgccttcatggcttattcagtaacccataattttaatgctacacaaatcttatgtgaagaaaagactggtatgaaatcattttttcctgggtctaaaataatcgctagtgttatgtcaaagttaagcccgcacgccaggcccagttaatgctagtctttcatgtgaaatgtgaagctgccatgttgccttttctcttagtaggataactagtagctggtacataatcactgaggagctatttcttaacatgcttttatagaccatgctaatgctagaccagtatttaagggctaatctcacacctccttagctgtaagagtctggcttagaacagacctctctgtgcaataacttgtggccactggaaatccctgggccggcatttgtattggggttgcaatgactcccaagggccaaaagagttaaaggcacgactgggatttcttctgagactgtggtgaaactccttccaaggctgagggggtcagtaggtgctctggagggactcggcaccacttgatattcaacagccacttgagccaaatataaaattgtatttacagctgatggactcaatttgagccttcaaacttgtagttatcctattatattgtaaactaatacattgtctagcattgatttggttcctgtgcatatgtattttcactatgtgctcccctccccagatcttaattaaaccagattttgcaattcattcttattctttcaa

SEQ ID NO: 11246 - DNA, 570 bp, Homo sapiens
  source 1..570: mol_type = unassigned DNA
atagagagggccgtggggttagaaagacttccttgtgaatcacccctcttcaaacaatgagcatctgaattgattccctctactccacccctgctacaaagtcccttgaggccatctgagaagaacaatgggatggggtggagacactgaaatcccaaaatgccctggtagtgacatgccaagctggacaccatcacaggatgaagaccactgtgaaagttgtgatgtgtctattccttatcctcggtttgatactctaccctgctggctggggttgccagaaggccatagactactgtggacattatgcatctgcctacaaacctggagactgctccttgggctgggccttttataccgccattgggggcacagtcctcactttcatctgtgctgtcttctctgcacaagcagaaattgcaacctctagtgacaaagtacaggaagaaattgaagaggggaaaaatctgatctgcctcctttagtttggaagagacaatgccattttctcccttgagtaatcttgtgaaacagtccacagtttcatcatttgagtcaagtggagaacta

SEQ ID NO: 11247 - DNA, 577 bp, Homo sapiens
  source 1..577: mol_type = unassigned DNA
ccttcttccaggcgcggccagcgggggcaagagcgaggtggctgcgaggaggcgtcactgaaagccctgacttggggaaggctgcgggctcggagccggagacgccgagctggggccgggtggcatttttctgaagttgttcattaagacttcccagcattcctacagatataaataggtgaggccgcaggcggtgctctgggtccgggagcgctgtccccagcatgaacgcggccggcggcgggagtgaatgactgcagctgcgacttccttcccgggccgcccgagcctccttccccaccgactttcttgttttgattaactccgtggactcctgactctttcttcgcccggaacatcaatatgtgtcatgtcattgtcacctgtcgctcgatgctctggaccttgctgagtattgtggtggcttttgccgagctcattgccttcatgagtgcagactggctgatcgggaaagcgaggagccgcggcggcgtggagccggcgggcccgggcgggggctccccggagccctaccaccccaccctgggcatctacgcccgctgcatccggaacccag

SEQ ID NO: 11248 - DNA, 933 bp, Homo sapiens
  source 1..933: mol_type = unassigned DNA
ccggacgcccggcccgctcgcgggacggaggcggcgatggtgactgggcagcggcgcggggccggggcctgggcagggcggctcggccgcctctttctctcgctgcccccgcccctcctcctcctccctctccccgagtgctagcccgggcggccgccgagcttggcgctctctcgcctcgctgcctcctcccccgcgccgcggaccctctcccctcccttgcgttgcccccctctcccgccgcctcctcccgctctcctctcgctctcctcccgcctccttcttccaggcgcggccagcgggggcaagagcgaggtggctgcgaggaggcgtcactgaaagccctgacttggggaaggctgcgggctcggagccggagacgccgagctggggccgggtgagttgggaatcagactcttgagttgacagctggcctatggtttctgcattttgttaagaagcacctcatgcaagcgagggacctgggactgctcacagccaggtggcatttttctgaagttgttcattaagacttcccagcattcctacagatataaataggtgaggccgcaggcggtgctctgggtccgggagcgctgtccccagcatgaacgcggccggcggcgggagtgaatgactgcagctgcgacttccttcccgggccgcccgagcctccttccccaccgactttcttgttttgattaactccgtggactcctgactctttcttcgcccggaacatcaatatgtgtcatgtcattgtcacctgtcgctcgatgctctggaccttgctgagtattgtggtggcttttgccgagctcattgccttcatgagtgcagactggctgatcgggaaagcgaggagccgcggcggcgtggagccggcgggcccgggcgggggctccccggagccctaccaccccaccctgggca

SEQ ID NO: 11249 - DNA, 534 bp, Homo sapiens
  source 1..534: mol_type = unassigned DNA
gtcttcctggaccaaaagggatgaaaaagagctatcatgaggaacgagctctagtagagccatgtgtgtgaaagtgtgggtgtttgtataatgatgcaagagcatttcgtagcaggtggcatttttctgaagttgttcattaagacttcccagcattcctacagatataaataggtgaggccgcaggcggtgctctgggtccgggagcgctgtccccagcatgaacgcggccggcggcgggagtgaatgactgcagctgcgacttccttcccgggccgcccgagcctccttccccaccgactttcttgttttgattaactccgtggactcctgactctttcttcgcccggaacatcaatatgtgtcatgtcattgtcacctgtcgctcgatgctctggaccttgctgagtattgtggtggcttttgccgagctcattgccttcatgagtgcagactggctgatcgggaaagcgaggagccgcggcggcgtggagccggcgggcccgggcgggggctccccggagccctaccacc

SEQ ID NO: 11250 - DNA, 2093 bp, Homo sapiens
  source 1..2093: mol_type = unassigned DNA
attatgagaaaaggaagagagaccagagctcactctccagtgtgtgaggatgcagcaaaaaggcgactgtctgtctgcaagccaggaagagggccctcatcaggaaccaaatctcctggcaccttaatcttggacttcccagccttcagaactgtgagttgggaatcagactcttgagttgacagctggcctatggtttctgcattttgttaagaagcacctcatgcaagcgagggacctgggactgctcacagccaggagctggtattttcccctgccagttgatgatggagactgcggacacctccctttcagttggatgcggtgccctcagaaactcccagaaggcaagactccagccaggggttctcctgaaatgtctgaagggaattgctgggggtggggcgtggagagggaagaatgtgcacttgatcgcttaaggcttctccgtatcctgtacgtgaatctttgcccttctctacgcggatgcaagagtcctcttgctttggccacgtgctgctcctttccttcaggactgtggctaatcagaagttggctgcacttcagtgcctcttaaaagcttttttccctggctgtgttcaggatgttgaagtgcagtgtcagaaatgatgtgagttgatgaagaagaaataaacaaacccaggcagcatgtgaggaaggcttggcagccctgctcctgtttttctttagtttggatctgaaggaaccagatttcctcattggaaggaatggggctatgagggtccctgtgccatggagcctgagatgtgcatgccagtgggccttctggactagggcaccggttagtttaataactctgggatgaaaatgtgtagtttatggttggcagaatggagagaagtcacctggccgcaacccgacctatatgtctatatgtaagtggagttaaaatagcatctgttcagggaggcggaacattccagaatgcttcagtcccctcttggcgccaatgcagagagtggagaataggaaagctgggagagacttcacagagcttcttgtctaagccccttaatttcagtttaggacactgaataacttggctaaagccccgtgaggccaggggctcttgtctgtcttgtttgttcaccttcatacctttggtgcctgcattgtattaggtacttaaacatgcatttgtttggtgaatgaatgacataaatgaagatacgacttccgactcctaatccagtgctctctctgagatatttgtaggcagaaaagtctgtagaagtgttgccaaataacttgtatgtagttgaggctatcttgagattatatataggttagaaaatggagatgtagcaaaatcaaactggctccttaaagttggtggtgaagacaggcttgttcaggtttgggggtgggtaggaggcaggactgccactttgctcagcagatggggctcctttcacattggattgtgtgtgagtggtgccctctgaagttggacgatggccccaatagctcagcttccccagaagaatcaagatgactgtggaaaaaataggcttgaagttgcccctttccttaccagcagctaggagcctaccctcgttttgcagcccagtccccgccttttcagagggatgtgtgacttggagctcatcagacttaccctctgtttgtagaggggtgtgtgtgtgtgtgtgtgtgtgtgtacgtatagaatgctgcaggtgtgactggaaggtcacgtttggtcactgtagcaacaggagtaggatgaagtcctgcacacagggtctctgccactgtccaactccatttggagaattgcaactctgttgccatgggccccaaccaaggaaaccaggtcttacagtgggctgcacttagaaaaccagggtagtcctggccagcatggtgaaaccccatctctactaaaaatacaataattagctgggcgtggtggcaggcacctgtaatcccagctacttgggaggctgaggcaggagaatcgcttgaacccaggagacgaggttgcagtgagccgagattgcgccactgtactccagcctgggtgacgagcgaaactccatctcaaaaag

SEQ ID NO: 11251 - DNA, 510 bp, Homo sapiens
  source 1..510: mol_type = unassigned DNA
ggccatctgtgccatcttcccagtgaacttgcagacaaaaccaacagcacaatgctgatatgaagaacagatgaaatttacagatgtttgcacttttccatgtgtttattggcccccatggctctttcctgagtggcctgaccagccctctcccccagtctcctgggccccatagtagagggagcagaagagggtgggaaggagccccagctgggaggagacaggaaggaaaaaccagcctttgtttgaacctgaaccctcgtcccaggctggctaccagtcctcctgttccagccttccttttccagtatgaataatcccagtttctttcatctgaactcctgaacctccttcagctcttccagtccaccagcaccctcgtgattctgggcttaacacaggtgagttgggaatcagactcttgagttgacagctggcctatggtttctgcattttgttaagaagcacctcatgcaagcgagggacctgggactgctcacagccaggtgg

SEQ ID NO: 11252 - DNA, 5043 bp, Homo sapiens
  source 1..5043: mol_type = unassigned DNA
gggcagggcggctcggccgcctctttctctcgctgcccccgcccctcctcctcctccctctccccgagtgctagcccgggcggccgccgagcttggcgctctctcgcctcgctgcctcctcccccgcgccgcggaccctctcccctcccttgcgttgcccccctctcccgccgcctcctcccgctctcctctcgctctcctcccgcctccttcttccaggcgcggccagcgggggcaagagcgaggtggctgcgaggaggcgtcactgaaagccctgacttggggaaggctgcgggctcggagccggagacgccgagctggggccgggtgagttgggaatcagactcttgagttgacagctggcctatggtttctgcattttgttaagaagcacctcatgcaagcgagggacctgggactgctcacagccaggtggcatttttctgaagttgttcattaagacttcccagcattcctacagatataaataggtgaggccgcaggcggtgctctgggtccgggagcgctgtccccagcatgaacgcggccggcggcgggagtgaatgactgcagctgcgacttccttcccgggccgcccgagcctccttccccaccgactttcttgttttgattaactccgtggactcctgactctttcttcgcccggaacatcaatatgtgtcatgtcattgtcacctgtcgctcgatgctctggaccttgctgagtattgtggtggcttttgccgagctcattgccttcatgagtgcagactggctgatcgggaaagcgaggagccgcggcggcgtggagccggcgggcccgggcgggggctccccggagccctaccaccccaccctgggcatctacgcccgctgcatccggaacccaggggtgcagcacttccagcgggacacgctgtgcgggccctacgccgagagcttcggcgagatcgccagcggcttctggcaggccacagctattttcctggctgtgggaatctttattctctgcatggtggccttggtgtccgtcttcaccatgtgtgtacagagcatcatgaagaaaagcatcttcaatgtctgtgggctgttgcaaggaattgcaggtctattccttatcctcggtttgatactctaccctgctggctggggttgccagaaggccatagactactgtggacattatgcatctgcctacaaacctggagactgctccttgggctgggccttttataccgccattgggggcacagtcctcactttcatctgtgctgtcttctctgcacaagcagaaattgcaacctctagtgacaaagtacaggaagaaattgaagaggggaaaaatctgatctgcctcctttagtttggaagagacaatgccattttctcccttgagtaatcttgtgaaacagtccacagtttcatcatttgagtcaagtggagaactaacctttacctaccaaagccacgttccacggcccgaggcttaaacaggaccaatgagaggccacatccagctacgcaaagttactggacatgcggtctgcagtgcacattataaggaatggaacatgaaaatagtatataatcctagacctggagttgccaagttctgtcagactccatctcccccaggttcaatgaaggataataatctaaatcattagggcagcagtttctctggtaacggaagagaccgtccgccagatctgcaggctgtttctgctccaacactgcttgcttgtgagcatctctgcctcagaatggggttttgggttggagttcttgttttcctctgttctttcaagttgtctccaacgaacagaaaactataaacttactggggacaggatgtgtgctaaagggcacagcaagacactgtcttttgcttagctgaccaaaggggtcagcagggatggcgtggagtcatgctgtggaacttattctaggctgaatcctagggtaaggtggatcaactgaactgtcactccagagattttagaaatttgagtaaagaaacaataaggacctatacaatcatatgagaacaaaaatatgaaatcttgctagtgaagacgtattttttcttcttcccagcagccaggctagcaccagttctggcccagtctcctcttcttctggagatcacatgtttttcttctaaggttaggattgtgctttgactgcgaaaggaaacctcactgtttcctccttccagggactgaggtctccaagctagctgtggcttatgcagatgttcactgggaggacctgccagaatctcggcacttggggggagacctttactcccagtttggtgaccatgctgtagtcagctctatttccaatcccgacagtagcagaatggcattctacaacaaaaagaagctagttatgggagttaagtttttgtagttactggtgttgatcctgaaagcagactgagataacattaaattgctgcaactgaagaactgcagccaagaccttaattccaggaaagcacagaggacaaagttaattcaaaaagaggcgctagatcaaggtcacagcactgcctacacctgtttacaaaaagaatcaaataccactatgaataaggattcaggggtttttaatctactttccataaattaccaatatcactgattcaggaagatagtatctcagaatgaccagagcagcacagaaacaagctactctgacattatgggagcttcaaaattgtatcatgatacagaaacactccttagcactttaagaaagtgagatggaactgccagatttctggaaggagaaaaagtgtaggtatttgggttcattaatctgctcacttgaggactttgttttgaaaaagtaccttctgtggacaaggtattgtgctaccagctatacaaccctgacttcagagtttgcaaccttgccctgagtgaatcatgttaaagctgtctgagtctaaagcaccgtatcttggtgcagaacagataattatacagagatggaatgggacaaccgcagttttactacattctggtgtttggcctatatgagaaaccatcttctcacagattaagggctaagggcaaaaggggtgggaggtgtggaactagccttaatgagtttcccattcctgaaccaaaattcaaagtgagtgagatgtaaatcctgtgattttggtgaagaaaaaaacgggtatcttcatagcagcctaggaaaccttaaccatatctctaacaccacacagaaagaggctggaggagccactggacaaagcttctgtctctgtgtgtacatttataatgttctaaccaagtctcaaaccttgatgaaaaacacaaaatttttccataaacttatcagaagactcacttttctttctttcttggatagagaaaccattttctgacactaggtttacaatctcagtgtccttacaagttaagtcctaagctcacaggatcctccgagcatgtccatcacctgctctttggctaaggtggcagtgtacctctagatcaacctgggaacagtcacaagggagtgtgacttcttggccataataaactcactcgatagtgtttatgttattaatctgaatgcaacagaagacaaaagcacaggcatgcacacacacagaaccccaaaccactaaaaactacctaaacactgacttagtaaatagtaaaaaggtaatgttgggacttttaaaccttgaatccattagccaggcttgggatgaaaggaccatctaaaatcatgctagtctaaaccatgctcttccacacagctgtttaaaaaccactgggtatgaggaatatgctagaaagaaatgttaaaaatagattgttggctcacacttatttttctaataaataggaccattattactaccaggaaagtcttatttattttgcctgaaattggcttaaagaaagtctcatgacgggatgggatgggctgcgcttctcaatgaactctgaggcagaaatatttgccttggattctgtggattctttaaacctgtgtgctaataattcaaacaatgttgcattaattgtataagggtttttgtatagttttcaaacatctgtggtgtaatgatctttgttaaacatatattctgtaaagtgccatagtctttttttatgtgtagcatatttaaaaatatatatgtatattatacatacacaagtttgtgtgaaagatgtgcaataacaaaggtgtatgtatgttttgttgttttgttttggaaactggacaggagtcaaaacagggatgtttgtttctgttttggcaaggagagttccacatttttgccttcatggcttattcagtaacccataattttaatgctacacaaatcttatgtgaagaaaagactggtatgaaatcattttttcctgggtctaaaataatcgctagtgttatgtcaaagttaagcccgcacgccaggcccagttaatgctagtctttcatgtgaaatgtgaagctgccatgttgccttttctcttagtaggataactagtagctggtacataatcactgaggagctatttcttaacatgcttttatagaccatgctaatgctagaccagtatttaagggctaatctcacacctccttagctgtaagagtctggcttagaacagacctctctgtgcaataacttgtggccactggaaatccctgggccggcatttgtattggggttgcaatgactcccaagggccaaaagagttaaaggcacgactgggatttcttctgagactgtggtgaaactccttccaaggctgagggggtcagtaggtgctctggagggactcggcaccacttgatattcaacagccacttgagccaaatataaaattgtatttacagctgatggactcaatttgagccttcaaacttgtagttatcctattatattgtaaactaatacattgtctagcattgatttggttcctgtgcatatgtattttcactatgtgctcccctccccagatcttaattaaaccagattttgcaattcattcttattctttc

SEQ ID NO: 11253 - DNA, 1852 bp, Homo sapiens
  source 1..1852: mol_type = unassigned DNA
ctgggctgaggcggaggcaggggagttgcagcgcgcgaggctccgtgagtgtgtctcctgcgcgctgagaggcggggggaggcggaggaccaggaggaggaggaggaggaggaggagggggagaatgcccggagccgccgccgctgccgccgccgccgccgccgcgatgctcccggctcaggaggctgccaagctgtaccacaccaactatgtgcggaactcgcgggccatcggcgtgctgtgggccatcttcaccatctgctttgccatcgtcaacgtggtgtgcttcatccagccctactggataggcgacggcgtggacaccccgcaagccggctatttcgggctcttccactactgcatcggcaacggcttctcccgggagctgacctgcaggggcagcttcacggacttctccacgctgccctcgggcgccttcaaagccgcctccttctttatcggcctctccatgatgctcatcattgcctgcatcatttgctttaccctcttcttcttctgcaacacggccactgtgtacaagatatgtgcctggatgcagctcacctccgctgcctgccttgtgcttggctgtatgattttccctgatggctgggactcagatgaagtaaaacggatgtgtggagaaaagacagacaagtacactcttggggcttgctcagtccgctgggcatacatcctggctattattggaattttggatgccctgatcctctcatttctagcatttgtgcttggtaatcgacaagacagcttgatggcagaggaactgaaggcagaaaacaaagttctgctaagccaatattctctagaatgagcacaaaacaaatcgaataacagctaaacaaatcgaataacagctaaacgaatcgaataacagcttttgtacatcaacatcaagaaggaatacgcctgagagagatcagagtatatagatgaatatgaacaagaatggaacattcacttgtcaacgcactttctaaatctagatcagcagagatgggagtgattttctggaaagagatgtgatcatggattaaacaccagctcattggaaactcattggatgagatcagaaaacgttcatgaaaaatcatattcaggaaataaggaagaggaatataaatgctctagagttaacatgtaaaatatatacgtactgaggtttgtaaactgtcctttttaaatcaaactgaaaacaaaaagctttaacctttcaacagaatttttaaaaaggcagttagttctaaattattcctatctcaatagccaagaggctgatcaagcgtcatttattgaggaagcatcttagaaaatgcctctgaatgttttcataggagccgtgacctttggttcttcatctctaccattcatttacttcactgtgtaattagttacaaccactcagttattaagagacgtaacgcttcaaactttttaccaagtctgtgttctgtttaatctgtccatacaagttattactgagaaagtgtttatgccatatactattactccatcaagctgtatattacaggaagtacatctttacatcataggttcccaagcaacatagatttccctatctttcaggaaacagcatcaaggaactctgaaaaatatagaaaaagttcattttcaccttggaagctcacgtgtaatattataggctactatcaaataaacactttttttctaattctccctagtatatgcataggaatttaatatactttataaataagtatctaaaatgtctcctacttttttcctatttctttgccatacatgttatcagaaatccatgtcttctatttcccttactgatgggcactca

SEQ ID NO: 11254 - DNA, 1378 bp, Homo sapiens
  source 1..1378: mol_type = unassigned DNA
gtgagtgtgtctcctgcgcgctgagaggcggggggaggcggaggaccaggaggaggaggaggaggaggaggagggggagaatgcccggagccgccgccgctgccgccgccgccgccgccgcgatgctcccggctcaggaggctgccaagctgtaccacaccaactatgtgcggaactcgcgggccatcggcgtgctgtgggccatcttcaccatctgctttgccatcgtcaacgtggtgtgcttcatccagccctactggataggcgacggcgtggacaccccgcaagccggctatttcgggctcttccactactgcatcggcaacggcttctcccgggagctgacctgcaggggcagcttcacggacttctccacgctgccctcgggcgccttcaaagccgcctccttctttatcggcctctccatgatgctcatcattgcctgcatcatttgctttaccctcttcttcttctgcaacacggccactgtgtacaagatatgtgcctggatgcagctcacctccgctgcctgccttgtgcttggctgtatgattttccctgatggctgggactcagatgaagtaaaacggatgtgtggagaaaagacagacaagtacactcttggggcttgctcagtccgctgggcatacatcctggctattattggaattttggatgccctgatcctctcatttctagcatttgtgcttggtaatcgacaagacagcttgatggcagaggaactgaaggcagaaaacaaagatgatggaaatgcttaaggcaaactaaggtagtgtgagaccacaccatttctgctaagccaatattctctagaatgagcacaaaacaaatcgaataacagctaaacaaatcgaataacagctaaacgaatcgaataacagcttttgtacatcaacatcaagaaggaatacgcctgagagagatcagagtatatagatgaatatgaacaagaatggaacattcacttgtcaacgcactttctaaatctagatcagcagagatgggagtgattttctggaaagagatgtgatcatggattaaacaccagctcattggaaactcattggatgagatcagaaaacgttcatgaaaaatcatattcaggaaataaggaagaggaatataaatgctctagagttaacatgtaaaatatatacgtactgaggtttgtaaactgtcctttttaaatcaaactgaaaacaaaaagctttaacctttcaacagaatttttaaaaaggcagttagttctaaattattcctatctcaatagccaagaggctgatcaagcgtcatttattgaggaagcatcttagaaaatgcctctgaatgttttcataggagccgtgacctttggttc

SEQ ID NO: 11255 - DNA, 567 bp, Homo sapiens
  source 1..567: mol_type = unassigned DNA
aacagccaggagcagtgaccaagccgccggagctggggagagacgcaccggggcggcgactgggccaggagaccagggactgagggacgcgcccggggagggccagcaacaagccgcggcccgggcgcgacagcggcggtccgcgccgagccgttccagccgccggcctactgtagccgctgcgccaggacatttttttttaaagctctccaagctgcccccctcctccccgactcctcccgctgcaaaagaaaaacaaaaaaaaaaaaggaaggaggctagaaaggaaacccagatttgccaccacaacgaaaaaaagaaggggaaaaggaaaaggagagaaagtcgagcgactgtggggttagacggaggcagacagagcgtgggccgagcgatgcggggctgtgcgcccaggcggccgcgagttgtgactggagccacgatgcacggccaggcgcgctctacctcaagccccggagaactcagcggcgctttcctcgcaacccgagctcggcgagtcgtcgtcttcttcttctccgtttttatttatttatttccgttcccgcc

SEQ ID NO: 11256 - DNA, 3428 bp, Homo sapiens
  source 1..3428: mol_type = unassigned DNA
ccaagatcttcctcctaccctcccctctttcccttctcccgcggtcggccctcgccccctcccccaggcccagcgcgggcgctcggcgcgtccagacccgcggcgcgatgccggcagtttaggatccaaagcttctctgctccttttgttctttccttcccttttttaaaaaaagaggggggaaatcccagtggtgggcagcctggcacgcacacagtcgccctcataccccgacaaaagcagatgcactttgacttctgacagctctacctcaagccccggagaactcagcggcgctttcctcgcaacccgagctcggcgagtcgtcgtcttcttcttctccgtttttatttatttatttccgttcccgccgccgttctcgctgaccttcactcctccgcgggctctgagcagaagggtcgcattctctcccgcctgagacttcttttcctcgccccgggagctcaggcggcgccgctccagcccggggccccgggactccccggctgcacacttcactgagacgcccccccaggccccgatcagcctcgtttcctccaccctactttgatttcctggtgcgagttttggcttgcacggccgagtgtgtgtcctctttttggagagactggggagctcgtgccgattgtcttcaggagtcatcccctgggctctactttgcccctctctctctctgggcctcatcagaccaaaccaaagaccatggttcactgtgccggctgcaaaaggcccatcctggaccgctttctcttgaacgtgctggacagggcctggcacgtcaagtgcgtccagtgctgtgaatgtaaatgcaacctgaccgagaagtgcttctccagggaaggcaaactctactgcaagaacgacttcttccggtgtttcggtaccaaatgcgcaggctgcgctcagggcatctcccctagcgacctggtgcggagagcgcggagcaaagtgtttcacctgaactgcttcacctgcatgatgtgtaacaagcagctctccactggcgaggaactctacatcatcgacgagaataagttcgtctgcaaagaggattacctaagtaacagcagtgttgccaaagagaacagccttcactcggccaccacgggcagtgaccccagtttgtctccggattcccaagacccgtcgcaggacgacgccaaggactcggagagcgccaacgtgtcggacaaggaagcgggtagcaacgagaatgacgaccagaacctgggcgccaagcggcggggaccgcgcaccaccatcaaagccaagcagctggagacgctgaaggccgccttcgctgctacacccaagcccacccgccacatccgcgagcagctggcgcaggagaccggcctcaacatgcgcgtcattcaggtctggttccagaaccggcgctccaaggagcggaggatgaagcagctgagcgccctgggcgcccggcgccacgccttcttccgcagtccgcgccggatgcggccgctggtggaccgcctggagccgggcgagctcatccccaatggtcccttctccttctacggagattaccagagcgagtactacgggcccgggggcaactacgacttcttcccgcaaggccccccgtcctcgcaggcccagacaccagtggacctacccttcgtgccgtcatctgggccgtccgggacgcccctgggtggcctggagcacccgctgccgggccaccacccgtcgagcgaggcgcagcggtttaccgacatcctggcgcacccacccggggactcgcccagccccgagcccagcctgcccgggcctctgcactccatgtcggccgaggtcttcggacccagcccgcccttctcgtcgctgtcggtcaacggtggggcgagctacggaaaccacctgtcccacccccccgaaatgaacgaggcggccgtgtggtagcggggtctcgcacggtctgcggagttcgtggttgtacagaaatgaacctttatttaagaaaaatagaaaaaaaaaaaaacataaaaagcaagtccccacccccttcctccagcctcgagaaccattctccttctggggagaccggatggaaaagggggacacgaaataggatccaaatcggcctcgaggtgggactgggatccgcgcactggctgtcgacgtgcagaactggggctccccaaaggaaacgcagacctctccccaactcccacctggacccggatccgtagacagaccccgcgggcgtgtgcgcctggcaggcgggcggcgaaaagacgtccagggcagccgcgggtgcgcacagccgttggcgatgccaggagccgtggggagggaggccgtgagcacagccgggtgaaggaagtgaagcggcccagggcgctcccgggccagccaggagggttctagctctgggatatcccttattagtgttgtctcagagttcaacaacagcgacaaaaaactcttatagcttcagaaacgccgacctgccgtgcatcaggtgggactatatatatattttttgtctatctggatttttggtttttgtttttgccaaaattgcaaaattctaaatgtaaagccctccgtatcaactcttctaccttcgcaaaactacacatacacacatacacacgtacacggacacactcggtaagatggtctccagccagaccgctcagtaaaatgacttgaacatcagctgtacaagaaaagtattctaccttcacacacaaaaagttaaaaaaaaaaaaaaaagactattgaactaaaaacagtcaactgtttacgtataatgttaaattcaggagttcagtgttttactaatatatcctgttttgaaacctcttgttcgaaaacaaaatgttttgagcaatcaaccaaaattgttccttttcttttcctgtagatgttctgacagatttgcagggctttcggctcactgtgctagtatgtaaaaaggtgttgtttacacgaggcaaagagaaaacatgctattcagacagttgccaaatagaataattatagcacaaatactgtaaaggtgcctggcaccagcaacctgagaaagtgttaaaaaaaaaaaaaaaaaagtgttacaagatttaaaaaaaaacatctttgctaatttttttgtcctgttgaacattcatggaattgttaatatgacttatatagacccacacaggttttatttttgtgtctttaaaataaaagtccaaaatatttaaattttatggtcaaatatgcagtcaacagctgctactttttctttatatattaaatttctcatatgtcttttattgttctaataaacctaagcttgtgtgacctccagtgcatattagaccattcactgtatgaaagaaaacatgttgaataaatttgtgagtttttaataaaaatagaaaatctgatgttta

SEQ ID NO: 11257 - DNA, 1840 bp, Homo sapiens
  source 1..1840: mol_type = unassigned DNA
cttttttaaaaaaagaggggggaaatcccagtggtgggcagcctggcacgcacacagtcgccctcataccccgacaaaagcagatgcactttgacttctgacagctctacctcaagccccggagaactcagcggcgctttcctcgcaacccgagctcggcgagtcgtcgtcttcttcttctccgtttttatttatttatttccgttcccgccgccgttctcgctgaccttcactcctccgcgggctctgagcagaagggtcgcattctctcccgcctgagacttcttttcctcgccccgggagctcaggcggcgccgctccagcccggggccccgggactccccggctgcacacttcactgagacgcccccccaggccccgatcagcctcgtttcctccaccctactttgatttcctggtgcgagttttggcttgcacggccgagtgtgtgtcctctttttggagagactggggagctcgtgccgattgtcttcaggagtcatcccctgggctctactttgcccctctctctctctgggcctcatcagaccaaaccaaagaccatggttcactgtgccggctgcaaaaggcccatcctggaccgctttctcttgaacgtgctggacagggcctggcacgtcaagtgcgtccagtgctgtgaatgtaaatgcaacctgaccgagaagtgcttctccagggaaggcaaactctactgcaagaacgacttcttccggtgtttcggtaccaaatgcgcaggctgcgctcagggcatctcccctagcgacctggtgcggagagcgcggagcaaagtgtttcacctgaactgcttcacctgcatgatgtgtaacaagcagctctccactggcgaggaactctacatcatcgacgagaataagttcgtctgcaaagaggattacctaagtaacagcagtgttgccaaagagaacagccttcactcggacccgtcgcaggacgacgccaaggactcggagagcgccaacgtgtcggacaaggaagcgggtagcaacgagaatgacgaccagaacctgggcgccaagcggcggggaccgcgcaccaccatcaaagccaagcagctggagacgctgaaggccgccttcgctgctacacccaagcccacccgccacatccgcgagcagctggcgcaggagaccggcctcaacatgcgcgtcattcaggtcaggccccggcgcgcctctccatcccacagaggcccacactgccactttgggcacccaggccgagccaggagagcccagaatccagagagaagtgagagatggagtccagaggtggggtgcctagacacatcccgagcctgcgggacctatgaaatgcctgatgccttcgagcatctagaaagtcctcttcccagcccaacagaggtgatcgtggcagtggagggggagggacgggagttcagccagaggctggaggaggagaactgttgaacactctggagagagtggggagccctctttctgcacataccccaccccacctcgggttcggaagggtcagagaagtctcagtgtcccccagagtcaatcagtccctctgccttctgcacaaagtgaactcttcctaagtctgcaactccaactttgtgatcgcttgctccaattagacaagccccagatcagggacttcccctccaaagagaggtggttccgccgggagtcagctctgcttccagcgggttggagtgaaatttgggtatgggagcctacctggaggcagctgggcctgtgggcggaaaggaggtgagactgctgaagctccaggccagggggagtctctggctcagtgctaggtgtccggt

SEQ ID NO: 11258 - DNA, 1364 bp, Homo sapiens
  source 1..1364: mol_type = unassigned DNA
agttaggaactgcttctagagagggcagccaagtcccgcgggcgcccgcctctccgccagctggcgcgctgggagcccgggacgcggccctgcttgcatcctggaaactatgggtctgggtttggctgcatgtgcctgggaagaaagggtctgagcctgactcggcccagaagccccttcaagcttggaagagacagggcagcctcgggcgttgtagcccggactgctgtctttcccggagccaagctctgcagcaactgcattctccaggccttcggggttgtttgccctccaggcagagcccaggctccctcccggccactaccttttccgaccccgagcggtcttggcggtgtttcggtaccaaatgcgcaggctgcgctcagggcatctcccctagcgacctggtgcggagagcgcggagcaaagtgtttcacctgaactgcttcacctgcatgatgtgtaacaagcagctctccactggcgaggaactctacatcatcgacgagaataagttcgtctgcaaagaggattacctaagtaacagcagtgttgccaaagagaacagccttcactcggccaccacgggcagtgaccccagtttgtctccggattcccaagacccgtcgcaggacgacgccaaggactcggagagcgccaacgtgtcggacaaggaagcgggtagcaacgagaatgacgaccagaacctgggcgccaagcggcggggaccgcgcaccaccatcaaagccaagcagctggagacgctgaaggccgccttcgctgctacacccaagcccacccgccacatccgcgagcagctggcgcaggagaccggcctcaacatgcgcgtcattcaggtcaggccccggcgcgcctctccatcccacagaggcccacactgccactttgggcacccaggccgagccaggagagcccagaatccagagagaagtgagagatggagtccagaggtggggtgcctagacacatcccgagcctgcgggacctatgaaatgcctgatgccttcgagcatctagaaagtcctcttcccagcccaacagaggtgatcgtggcagtggagggggagggacgggagttcagccagaggctggaggaggagaactgttgaacactctggagagagtggggagccctctttctgcacataccccaccccacctcgggttcggaagggtcagagaagtctcagtgtcccccagagtcaatcagtccctctgccttctgcacaaagtgaactcttcctaagtctgcaactccaactttgtgatcgcttgctccaattagacaagccccagatcagggacttcccctccaaagagaggtggttccgccgggagtcagc

SEQ ID NO: 11259 - DNA, 512 bp, Homo sapiens
  source 1..512: mol_type = unassigned DNA
gcggccgctggtggaccgcctggagccgggcgagctcatccccaatggtcccttctccttctacggagcctcgagaaccattctccttctggggagaccggatggaaaagggggacacgaaataggatccaaatcggcctcgaggtgggactgggatccgcgcactggctgtcgacgtgcagaactggggctccccaaaggaaacgcagacctctccccaactcccacctggacccggatccgtagacagaccccgcgggcgtgtgcgcctggcaggcgggcggcgaaaagacgtccagggcagccgcgggtgcgcacagccgttggcgatgccaggagccgtggggagggaggccgtgagcacagccgggtgaaggaagtgaagcggcccagggcgctcccgggccagccaggagggttctagctctgggatatcccttattagtgttgtctcagagttcaacaacagcgacaaaaaactcttatagcttcagaaacgccgacctgccgtg

SEQ ID NO: 11260 - DNA, 569 bp, Homo sapiens
  source 1..569: mol_type = unassigned DNA
aacagccaggagcagtgaccaagccgccggagctggggagagacgcaccggggcggcgactgggccaggagaccagggactgagggacgcgcccggggagggccagcaacgagccgcggcccgggcggcgacagcggcggtccgcgccgagccgttccagccgccggcctactgtagccgctgcgccaggacatttttttttaaagctctccaagctgcccccctcctccccgactcctcccgctgcaaaagaaaaacaaaaaaaaaaaaaggaaggaggctagaaaggaaacccagatttgccaccacaacgaaaaaaagaaggggaaaaggaaaaggagagaaagtcgagcgactgtggggttagacggaggcagacagagcgtgggccgagcgatgcggggctgtgcgcccaggcggccgcgagttgtgactggagccacgatgcacggccaggcgcgctctacctcaagccccggagaactcagcggcgctttcctcgcaacccgagctcggcgagtcgtcgtcttcttcttctccgtttttatttatttatttccgttcccgcc

SEQ ID NO: 11261 - DNA, 3425 bp, Homo sapiens
  source 1..3425: mol_type = unassigned DNA
ccaagatcttcctcctaccctcccctctttcccttctcccgcggtcggccctcgccccctcccccaggcccagcgcgggcgctcggcgcgtccagacccgcggcgcgatgccggcagtttaggatccaaagcttctctgctccttttgttctttccttcccttttttaaaaaaagaggggggaaatcccagtggtgggcagcctggcacgcacacagtcgccctcataccccgacaaaagcagatgcactttgacttctgacagctctacctcaagccccggagaactcagcggcgctttcctcgcaacccgagctcggcgagtcgtcgtcttcttcttctccgtttttatttatttatttccgttcccgccgccgttctcgctgaccttcactcctccgcgggctctgagcagaagggtcgcattctctcccgcctgagacttcttttcctcgccccgggagctcaggcggcgccgctccagcccggggccccgggactccccggctgcacacttcactgagacgcccccccaggccccgatcagcctcgtttcctccaccctactttgatttcctggtgcgagttttggcttgcacggccgagtgtgtgtcctctttttggagagactggggagctcgtgccgattgtcttcaggagtcatcccctgggctctactttgcccctctctctctctgggcctcatcagaccaaaccaaagaccatggttcactgtgccggctgcaaaaggcccatcctggaccgctttctcttgaacgtgctggacagggcctggcacgtcaagtgcgtccagtgctgtgaatgtaaatgcaacctgaccgagaagtgcttctccagggaaggcaaactctactgcaagaacgacttcttccggtgtttcggtaccaaatgcgcaggctgcgctcagggcatctcccctagcgacctggtgcggagagcgcggagcaaagtgtttcacctgaactgcttcacctgcatgatgtgtaacaagcagctctccactggcgaggaactctacatcatcgacgagaataagttcgtctgcaaagaggattacctaagtaacagcagtgttgccaaagagaacagccttcactcggccaccacgggcagtgaccccagtttgtctccggattcccaagacccgtcgcaggacgacgccaaggactcggagagcgccaacgtgtcggacaaggaagcgggtagcaacgagaatgacgaccagaacctgggcgccaagcggcggggaccgcgcaccaccatcaaagccaagcagctggagacgctgaaggccgccttcgctgctacacccaagcccacccgccacatccgcgagcagctggcgcaggagaccggcctcaacatgcgcgtcattcaggtctggttccagaaccggcgctccaaggagcggaggatgaagcagctgagcgccctgggcgcccggcgccacgccttcttccgcagtccgcgccggatgcggccgctggtggaccgcctggagccgggcgagctcatccccaatggtcccttctccttctacggagattaccagagcgagtactacgggcccgggggcaactacgacttcttcccgcaaggccccccgtcctcgcaggcccagacaccagtggacctacccttcgtgccgtcatctgggccgtccgggacgcccctgggtggcctggagcacccgctgccgggccaccacccgtcgagcgaggcgcagcggtttaccgacatcctggcgcacccacccggggactcgcccagccccgagcccagcctgcccgggcctctgcactccatgtcggccgaggtcttcggacccagcccgcccttctcgtcgctgtcggtcaacggtggggcgagctacggaaaccacctgtcccacccccccgaaatgaacgaggcggccgtgtggtagcggggtctcgcacggtctgcggagttcgtggttgtacagaaatgaacctttatttaagaaaaatagaaaaaaaaaaacataaaaagcaagtccccacccccttcctccagcctcgagaaccattctccttctggggagaccggatggaaaagggggacacgaaataggatccaaatcggcctcgaggtgggactgggatccgcgcactggctgtcgacgtgcagaactggggctccccaaaggaaacgcagacctctccccaactcccacctggacccggatccgtagacagaccccgcgggcgtgtgcgcctggcaggcgggcggcgaaaagacgtccagggcagccgcgggtgcgcacagccgttggcgatgccaggagccgtggggagggaggccgtgagcacagccgggtgaaggaagtgaagcggcccagggcgctcccgggccagccaggagggttctagctctgggatatcccttattagtgttgtctcagagttcaacaacagcgacaaaaaactcttatagcttcagaaacgccgacctgccgtgcatcaggtgggactatatatatattttttgtctatctggatttttggtttttgtttttgccaaaattgcaaaattctaaatgtaaagccctccgtatcaactcttctaccttcgcaaaactacacatacacacatacacacgtacacggacacactcggtaagatggtctccagccagaccgctcagtaaaatgacttgaacatcagctgtacaagaaaagtattctaccttcacacacaaaaagttaaaaaaaaaaaaaaagactattgaactaaaaacagtcaactgtttacgtataatgttaaattcaggagttcagtgttttactaatatatcctgttttgaaacctcttgttcgaaaacaaaatgttttgagcaatcaaccaaaattgttccttttcttttcctgtagatgttctgacagatttgcagggctttcggctcactgtgctagtatgtaaaaaggtgttgtttacacgaggcaaagagaaaacatgctattcagacagttgccaaatagaataattatagcacaaatactgtaaaggtgcctggcaccagcaacctgagaaagtgttaaaaaaaaaaaaaaaaaagtgttacaagatttaaaaaaaaacatctttgctaatttttttgtcctgttgaacattcatggaattgttaatatgacttatatagacccacacaggttttatttttgtgtctttaaaataaaagtccaaaatatttaaattttatggtcaaatatgcagtcaacagctgctactttttctttatatattaaatttctcatatgtcttttattgttctaataaacctaagcttgtgtgacctccagtgcatattagaccattcactgtatgaaagaaaacatgttgaataaatttgtgagtttttaataaaaatagaaaatctgatgttta

SEQ ID NO: 11262 - DNA, 1840 bp, Homo sapiens; identical to SEQ ID NO: 11257
  source 1..1840: mol_type = unassigned DNA

SEQ ID NO: 11263 - DNA, 1364 bp, Homo sapiens; identical to SEQ ID NO: 11258
  source 1..1364: mol_type = unassigned DNA

SEQ ID NO: 11264 - DNA, 512 bp, Homo sapiens; identical to SEQ ID NO: 11259
  source 1..512: mol_type = unassigned DNA

SEQ ID NO: 11265 - DNA, 2939 bp, Homo sapiens
  source 1..2939: mol_type = unassigned DNA
aaccaggtacaagctaatactcaacaatactgatgccttgttttttttgctctgtccggacagcaacgctgtagccaatttagatatgctataaatttaagaggttgccatggccacggtgcgcccattggccgctgggccccctacgtgcagcgccacgtcaccaaatctgaataaggatgcgcgaattacgcggcgaccagacaaagatgaggatccggaccgcttgaaagtgggggaaagtgccggcgcctccgccaccggggaaagccgctccgcagcgccgaggccagcagccacccgagatacctggggaagcccggaacaggcgccggggcgtgcggcccgtggcatgaggttgtgaacgccacccgccccccaccaccccactccgggcagcccagcgccaggccagagattgcccaaggactggaccggctgagtcttggtccggaccagactcgccctgcagctgctgagacaagaggcgaagggcagcggagggcccggcaggcccgagggccaggggcccaaagggagggcaaggcggccgaagccgccggggcgcggggctatgatggtgcactgcgccggttgcgagcggcccatcctcgaccgctttctgctgaacgtgctggaccgcgcgtggcacatcaaatgtgttcagtgctgcgagtgcaaaaccaacctctcggagaagtgcttctcgcgcgagggcaagctctactgcaaaaatgactttttcaggcgctttggcacgaaatgcgccggctgcgcgcaaggcatctcgcccagcgacctggtgcgcaaggcccggagcaaagtctttcacctcaactgtttcacctgcatggtgtgtaacaagcagctgtccaccggcgaggagctctacgtcatcgacgagaacaagttcgtgtgcaaagacgactacctgagctcatccagcctcaaggagggcagcctcaactcagtgtcatcctgtacggaccgcagtttgtccccggacctccaggacgcactgcaggacgaccccaaagagacggacaactcgacctcgtcggacaaggagacggccaacaacgagaacgaggagcagaactcgggcaccaagcggcgcggcccccgcaccaccatcaaggccaagcagctggagacgctcaaggctgccttcgccgccacgcccaagcccacgcgccacatccgcgagcagctggcgcaggagaccggcctcaacatgcgcgtcatccaggtgtggtttcagaaccgacggtccaaagaacgccggatgaaacagctgagcgccctaggcgcccggaggcacgccttcttccggagtccgcggcgcatgcgtccgctgggcggccgcttggacgagtctgagatgttggggtccaccccgtacacctactacggagactaccaaggcgactactacgcgccgggaagcaactacgacttcttcgcgcacggcccgccttcgcaggcgcagtccccggccgactccagcttcctggcggcctctggccccggctcgacgccgctgggagcgctggaaccgccgctcgccggcccgcacgccgcggacaaccccaggttcaccgacatgatctcgcacccggacacaccgagccccgagccaggcctgccgggcacgctgcaccccatgcccggcgaggtattcagcggcgggcccagcccgcccttcccaatgagcggcaccagcggctacagcggacccctgtcgcatcccaaccccgagctcaacgaagccgccgtgtggtaaggccgccgggccgccccccgcgctcggcccccgggggccccgccccgaagcagcctcctgaaaccaaaacgcccgacgcagacgcggtgggagacgtgggtgtccctcgggggttctctctcgggtccgcactcaactggcagctgctcctcggctgggcgccgagggggggccgacccccatctccaccccgcgggctctccaggagcctcagcccaccgccagtactctcccagcaaccgcgagcaatttcttgggaccaaagtcaatactccggagggtcaagagatttcgagcacgctctagactttccccgggcccccacccacccacccagccaccgccacctctttggactgagagagggtgaggccaaggggcggagacggtgtttttccctctctctgcaatccgagtggcattttgtaatcttatttctcgctgtgctttccccgtctttaaaaaaaaagatgataagaaaaggagagagattgaaagagagggagaggaaagggggcaagatgaggaggagatggagagacagcgtcagccagagggagaagacggagagcgagcgaggaactcgcgtgaaccgggagccaccgagagggagaccgagccacctgcacgctggcgctccctggtggccaatcttgaggctcaaggtcagcttctctaggaatagggctgtgggtcaggaagtggccagccgggtccagctcccgctcttccttactttgacgtttatgttgagcccgagggagcaggccggactcgaacacgcacacatcctgctctccccctgggtggggcgccaggattgctgggctcagacccacagaccaccctccctgcccagggcctggaggctgggccgtcaggatgtacaatattatacttttttggaagttgaacgcttctagtttccttattttgtataaagaagaaacaaataaagtatgtttttgtgtttactgtttatttattgtactctagttatccggggttggacatttttatatttttaagaggaggtagggcagagtgacggaggggaagcagaaagaggtttacctaaaaaaaacaaaaaacaaaaacaaaaaaaatcaactttttttaaagagaaagattaataaaaaaaaatcttttttccctc

SEQ ID NO: 11266 - DNA, 713 bp, Homo sapiens
  source 1..713: mol_type = unassigned DNA
ggggagcgaagtgtggggcgtggggcaacttctgcaagttccagggatggcgaagggggcaggggtacctcccggactaggccttggaacccgtgacccccaaatatttgtgaggagaaagagagaggaagagagacgcaattttcgtttcgcgctgcccccgccccgtcagccccaaactggaagcaacgctgtagccaatttagatatgctataaatttaagaggttgccatggccacggtgcgcccattggccgctgggccccctacgtgcagcgccacgtcaccaaatctgaataaggatgcgcgaattacgcggcgaccagacaaagatgaggatccggaccgcttgaaagtgggggaaagtgccggcgcctccgccaccggggaaagccgctccgcagcgccgaggccagcagccacccgagatacctggggaagcccggaacaggcgccggggcgtgcggcccgtggcatgaggttgtgaacgccacccgccccccaccaccccactccgggcagcccagcgccaggccagagattgcccaaggactggaccggctgagtcttggtccggaccagactcgccctgcagctgctgagacaagaggcgaagggcagcggagggcccggcaggcccgagggccaggggcccaaagggagggcaaggcggccgaagccgccggggcgcggggctatgatggtgcactgcg

SEQ ID NO: 11267 - DNA, 676 bp, Homo sapiens
  source 1..676: mol_type = unassigned DNA
gatgtggacagggaacaggcagcctctccgccctccagtgccctgaggagcagcctccagaggaagaggagttgccagtctccctggcctgccaggaaaagatataacagagtgctgaaaagtttgagtcccctgacgcctatcttcccagctgaagtcgaacaaggcaacgctccgccttcttgtttcaggccaggcgcggtggctcatgcctgtcatcccggcactttgggaggctgaggcaggcggatcacctgaggagcctgtgtgaaatgcagcaaaggggtgtttggggctggccaggcctgtcaggccatggggaacctctaccatgacacatgcttcacctgtgcagcttgcagccggaagctgagaggaaaagccttttattttgtcaacggcaaagtgttttgtgaagaagacttcctgtactctggtttccagcagtcggctgacaggtgttttctttgtggacatctgatcatggacatgatcctgcaagccctggggaagtcctaccaccccggctgtttccgctgtgtcatctgtaatgagtgtttggatggggtgcccttcaccgtggactcagagaacaagatctactgtgtccgagattaccacaaggtgctggcccccaagtgtgcagcctgtgggcttcccatccttccacctgagg

SEQ ID NO: 11268 - DNA, 2773 bp, Homo sapiens
  source 1..2773: mol_type = unassigned DNA
gcagcggaggacccagcgcctggaacgtacctgcgcctcagccgccgcgcgtttgctccggcccgactcgcggcctcggcgccctcccggccgattcagcttcacccggcccagtcggctgctgccttgctgtgagtttccgtgtttggttgcctaaggaggatgtgattttacttttttgctgttttctttttccttttataatttgaagaggagaaaagaactccgctgagcaggcccgggacggcgaagtgccaccagctaccccaacaaggacgtctccaggggaaagggagttggaagcaaacttggtccagctggcgttgaggtctcaacttcggctggactcttaaatcctggggtcatgcccttcacgctaggcaggtggaagtctttacttgtactgggccggacttgagccccgacccttcgccagcatctccccgctgccctcaacacacacacacacacacacacacacacacacacacacacacacacacacacacacacacacacacggcacctgggctaggcccggacacctgtctgcagcatggataagtatgacgacctgggcctggaggccagtaaattcatcgaggacctgaacatgtatgaggcctctaaggatgggctcttccgagtggacaagggtgcaggcaacaaccccgagtttgaggaaactcgcagggtgttcgccaccaagatggccaaaatccacctccagcagcagcagcagcagctcctgcaggaggagactctgcccagggggagtagaggccctgtcaatggagggggccgcctgggcccacaggcccgttgggaagttgtgggcagcaagctgactgtggatggtgctgccaagcctcctcttgctgcctcgacaggggcacctggggcagtcaccaccctcgctgctgggcagcccccgtacccaccgcaggagcagagatccaggccatacctgcatggcacgaggcatggcagccaggactgtggttccagggagagcctggcgacttctgagatgtctgctttccaccagccaggcccctgtgaggatccttcctgcctcactcatggagactattatgacaacctctccttggcaagcccaaagtggggtgacaaaccaggagtgtcccccagcatcggcctgagtgtagggagtgggtggcctagctccccggggagtgacccaccactgcccaaaccctgcggggaccatcccctaaatcaccgacagctctccctgagctccagcaggtcttctgagggtagcctcggtggtcagaatagtggcattggtggccgcagcagcgagaagccaacaggcctttggtccactgcctcctcccagcgggtgagccctggcctgccttccccaaacttggagaacggagcaccagctgtggggcctgttcagcccaggaccccttctgtgtcagcacccttggccctgagctgccccaggcaaggaggtcttccaagatcaaactcggggctggggggtgaggtttcaggtgtgatgtccaaacccaatgtggacccccaaccctggttccaggatgggcccaaatcttacctttccagttctgccccgtcatcctcgccagctggtctggacggttcacagcagggtgcggtccctgggctggggccgaagcctggctgcacagaccttggcactggtcccaagctcagccccaccagtcttgtccatccagtgatgtccaccctgcctgagttatcttgtaaagagggtcccctgggctggtcttctgatggtagcctgggatctgtgctcctggacagccccagctcccctagggtaaggctgccctgccagcccctcgtcccaggtcctgagctgagaccctctgctgctgagttgaaattagaagccctcacccaacgtctggagcgagagatggatgctcacccgaaggctgattactttggagcctgtgtgaaatgcagcaaaggggtgtttggggctggccaggcctgtcaggccatggggaacctctaccatgacacatgcttcacctgtgcagcttgcagccggaagctgagaggaaaagccttttattttgtcaacggcaaagtgttttgtgaagaagacttcctgtactctggtttccagcagtcggctgacaggtgttttctttgtggacatctgatcatggacatgatcctgcaagccctggggaagtcctaccaccccggctgtttccgctgtgtcatctgtaatgagtgtttggatggggtgcccttcaccgtggactcagagaacaagatctactgtgtccgagattaccacaaggtgctggcccccaagtgtgcagcctgtgggcttcccatccttccacctgaggtaagatgcccttccagacatgctcccaggggcttctaagacatgaatatctccctgggctcatttacaagatccatgtcctgtccttacagcttttaaggtatccttttaaaaatctcaactctggcctggtgcagtggctcacgcctgtaatcccaccccttttaggaggcccaggcaggaaaattgcttgaggcctggagtttaagaacagcctgggcaacatagcaagacctcatctctacaaaaaattgttaaaaattggccaagtgtggtggcatgtgcctgtagtcctagctgcttgagcccaagagtttgaggctgcagcgagctatgatggtgctactgcattccagcaggtgacagcaagaccttgtctccaaaaaaaaaaaa

SEQ ID NO: 11269 - DNA, 11331 bp, Homo sapiens
  source 1..11331: mol_type = unassigned DNA
gcccggacacctgtctgcagcatggataagtatgacgacctgggcctggaggccagtaaattcatcgaggacctgaacatgtatgaggcctctaaggatgggctcttccgagtggacaagggtgcaggcaacaaccccgagtttgaggaaactcgcagggtgttcgccaccaagatggccaaaatccacctccagcagcagcagcagcagctcctgcaggaggagactctgcccagggggagtagaggccctgtcaatggagggggccgcctgggcccacaggcccgttgggaagttgtgggcagcaagctgactgtggatggtgctgccaagcctcctcttgctgcctcgacaggggcacctggggcagtcaccaccctcgctgctgggcagcccccgtacccaccgcaggagcagagatccaggccatacctgcatggcacgaggcatggcagccaggactgtggttccagggagagcctggcgacttctgagatgtctgctttccaccagccaggcccctgtgaggatccttcctgcctcactcatggagactattatgacaacctctccttggcaagcccaaagtggggtgacaaaccaggagtgtcccccagcatcggcctgagtgtagggagtgggtggcctagctccccggggagtgacccaccactgcccaaaccctgcggggaccatcccctaaatcaccgacagctctccctgagctccagcaggtcttctgagggtagcctcggtggtcagaatagtggcattggtggccgcagcagcgagaagccaacaggcctttggtccactgcctcctcccagcgggtgagccctggcctgccttccccaaacttggagaacggagcaccagctgtggggcctgttcagcccaggaccccttctgtgtcagcacccttggccctgagctgccccaggcaaggaggtcttccaagatcaaactcggggctggggggtgaggtttcaggtgtgatgtccaaacccaatgtggacccccaaccctggttccaggatgggcccaaatcttacctttccagttctgccccgtcatcctcgccagctggtctggacggttcacagcagggtgcggtccctgggctggggccgaagcctggctgcacagaccttggcactggtcccaagctcagccccaccagtcttgtccatccagtgatgtccaccctgcctgagttatcttgtaaagagggtcccctgggctggtcttctgatggtagcctgggatctgtgctcctggacagccccagctcccctagggtaaggctgccctgccagcccctcgtcccaggtcctgagctgagaccctctgctgctgagttgaaattagaagccctcacccaacgtctggagcgagagatggatgctcacccgaaggctgattactttggagcctgtgtgaaatgcagcaaaggggtgtttggggctggccaggcctgtcaggccatggggaacctctaccatgacacatgcttcacctgtgcagcttgcagccggaagctgagaggaaaagccttttattttgtcaacggcaaagtgttttgtgaagaagacttcctgtactctggtttccagcagtcggctgacaggtgttttctttgtggacatctgatcatggacatgatcctgcaagccctggggaagtcctaccaccccggctgtttccgctgtgtcatctgtaatgagtgtttggatggggtgcccttcaccgtggactcagagaacaagatctactgtgtccgagattaccacaaggtgctggcccccaagtgtgcagcctgtgggcttcccatccttccacctgagggctcagatgagaccatccgtgtcgtgtccatggacagagactaccacgtggagtgttaccactgcgaggactgtggtctggagctcaatgatgaagatggccaccgctgttatccgctggaggaccacctgttctgtcactcctgccacgtgaagaggctggagaagagaccctcatctacagcccttcaccagcaccacttctagccagagccacttgcagacatcacggcaggggatgaggagccggggttgctgctgctgcttccggtggcccctggggtggaagtggggtaggggaagaggaggggcaggagggagagttcctgtgagcatgtggggggtgcctttcctttaaccagggaggtgaacactacctgcctcctgcgtgtattttccaagtgcttttctctgttgccacattttcctcaggttactcaggaaaatgctccagcatgtgcgagcacatgacctgaggttgcatcatagcaccaaaggaatcctcctgtcccctctgggaacatttcatgcttcagagggagaggtttttattgagcttgtttcacaatatccccttgaagggacagctcagctgccaatacattcaaccctttctcttccttcaggaaaatacctatacccaaatgttccctcccccgacatatatcatggcatgatttaaggcttcttttcacctgagagcttcagttcttctgcagaatggctgcaaatttaattgcattaaggcaagaaggaagctctaatgtgtgctttgtatcctaagataaatttgcttagaaaaccagagtcaagatttgaaataggtgaggcagggtttcctccttagacactgacagcattctctgtaccccttcaaatccttactctcctaaaggcagctgagtccgcgacagaaatttgccctatgtgagtaaaacatactttgggagaagaacttggtgcaggcaccaggatttttttttttgcccacgtgtttgcgctgtttttctctggagttctcaagagttggtgacttggaaggccgcttctgcaaggcaagtctcaggaacccatgcaggtacatcgcttgcacctgtttttagcttatttaatgacgggcttttgggaagagctgcccgcatactgagagacagcttcttataaacaaggagagtttttgtgtgtgcgagatctctaagccagcgtgggagggagcgcctcaggataagttattatattcatttcgttggtttctctcctgcccaattcttggcacaggcattatgtttgaagaaaccaggataaggtacactgcttttgtctgtttaatttttttagttgtttcccttcactttcagtcttccacacacaaaaaatacctcacagagcttcaccaaatcacagattcaggaggaatttggctttcacactggactcagataccttcttcagtgtgttggaaatcactggcttcacacaggcccaactccagctggtcagggcagagtgatcgtaactaaaggtcagtggggaatagatccgattcagtgcttttgccttatgcatttcagcatcctggctccccagggtggcaggagctgagggagggccacacactggcaagatttcaagaccactctctgcactgaagaggtaaaatttgcactgcaagtcacatccctgaggccagaggtcagtaccctttggtatttcgattagaagaagctgcaaaagaaaggcagcccattttaccattgccagccaggccggggacacaggagccggtgtgtgcactctgcctcctcaccttgcacccagagcaagaggactgggtgctgggctgcagaggccggtcagtggagcccctagcacgtgtgaactcaggcttttcattgggcccggctccacttctaggccatgttttgactcatttggtaaccattgcctgtaagcagcacagaattggtgccatggattatcttttccatgttgatggaattcattctgttggaatcctttggccagatgtcacttcagccagggtgtgcatcatcattggttctttttcacaggctgagcctcctgaaaacccatgaacgctggggctggggaagtgaaccctgaggtggggaccctctcttcccatcaaatcatccagctcagtgtggggcgtggcaggggggtaaatgaagccagccaatgtgttaacctgtctctgtcaacctaagaatgttggccttactgacacacctttgctccatgttcaagaccagaagtagctgggatttgtttgcaaattgggtaattagtttaaaaatctgtgattacatttttaaatgaaattttcaaagtggcctagattgaggtgattcagataggtttgcgaatataccattttatattgttgagaaagaacaaaaagggaatttccagatgtcctagaaatcctagcaacagatttctctggttgtcagtttccctggagaaggcgccagataggaatctccaatcagttgtttttctcttcgcttcaggcccttacacaaaagccatgaagagatgttcacctacccggtattttaaatgttctgtaaattattagccaaatagaactgtaatggggttgtatttatgggcgcctagaaagaaaacacaaggacttggtaggccaggaagaaaagattttaaaatttagaatgaatagcccttctgggttttctttttgacaattcttggacttgaggtaaaacaaggaggattgtggccggatttcagatcccaaagccagcctccatcttaggcctttgcctcattgtgccttttaggttttcttacccaccgtctcctgttttgtcttttttttcttttctcctacccctatcttgggacattcagaaactgcctgggtggtttgagaagagacaacccagtttgatctgcaatacaaggatccattcgtaatctctctctcactgatgttattcccccatctgccgtcttggttcatctcaccacagaagggcatttagtcctacccagccatcggctgcgtatgacagcaggatggcacttcccatttctctgtggttagtgctcgagtgaaaacctctttcagctgagtcctctgaggttctgctgttgagtcctgggtggctgatggaatgattgaggaggtctggtcaccctcaagcgccgtcatcgccttgtttccatgggcttctgtcacacaaaatgaagaacagaaatgttaggacttaagagaatgtttggaattcacacctctttgcagtcctttcaaggctgctgctctgtgctgtgtcccatgcatgtgaaagtagagctgtgatggctgctgggacgcttgcaaagatcatgtgtgagaattgagcacaagaccacaaattattactgcttgatgcgcttgttaaaactctatctgccaggaaaccaaattttcttttcttttctttttttttttgagacagggcctcactctgttgcccaggctggagtgcagtggcgcgatctcagctcactgcagcctccacctactgggctcaagtgatcctcccacctcagcctcccgagtagccgggaccacaggcgtgtatgactggctacgcctggctaatttttgtatttttaatagagacgagtttcaccatgttgcccaggatggtctggaactcctgggctcaagtgatctgcccacttccgcctcccaaagtgttgggattatggccattagccactgtacctggcacaatttttttttgtaccctcctttatgccaagaatcagtcctaatttctttactatgtgaagtaacttttaaaggtaatagaaaaggccaggcacagtggctcatgcctgtaatcccaggcgccgtggctcacgcctgtaatcccagcactttgagaggctgaggcgggtggatcacttaaggtcaggagttagagaccagcctgaccaacatggtgaaacactgtctctactaaaaatacaaaattagctgggtttggtggcgcacgcctgtaatcccagctacctgagaggttgaggcaggagaatcgcttgaacctgggaggcagaggttgcagtgagccgagatggtgccattgcactccgacctgggcaacagagcgaaacactgtctcaaaaaaaaaaaaaaaagtaacagaaaaaagagtgaaatatattagctatcttttattctgagccaaaacttgacagatgtgggaaatcttcatatagtgtatgaaaatttcattgtacagggaaattattttcctctgtgtcttttcttttactataaagtgattcagaattttactgttactataaaattatgcaaagtattgtgacaaaactgcatcaatttgttgactattaaagtgctccttgaacattatatttcctgggtcttttctgtgtgtggagtcagcaaactgttttttgctacctggactttgtcttcttttacagctctggattcttaaaagtaccacataggtagcaaacctgtgaagggtatgagattttaccctacttgcaggctaataaagtgagcacaccacatgggttcatggatcctggcagaagttatgagactcataggtcagagacaaaggacagtttattatagcaatagcagtggccagattatcagcatttacactggttccctgagccccaggccccaagaagagggccaggtgagacctgcacacgcagtgggctgcattacaagaggaacccccatgcttaggggaccctggtatttgataatgggcagtaagcctgcctgacttttgctccagagacagacactatctctgtcatccaagactgttcactagataaacatccttgaaaatataagtctggaacctggcaattggtgtctattcttaccagatgtataaaaatgtgagaggccttggagaatcatatcccaagaatcagcagtttcttttactggacctttaagattgagacttgtaaggtcctgatgcagtgacttgtaaggtcactttgtctctcttgtgaatgttactgttttttctcttctgaggttatgaccaaagaatcctcaaggcgagtgatccttcaggtttgagacagccacatgcaggaagacaggacttgtagagtgttggggccaagtgtgtggttagaatccttggggtggggaaagagtttgttctagactccagtgtagtccttgtggctaccaggtctgacgtgccaaggacacgggaaagctgggagtgaggatactcatagtcatagcaccttacaccagaataaaagttttttttttctttttaagtgatgagagaatggctagtctgattttgccaacatgggctgctatttgcttaagaccttgatggtataaggagtgaagatgcaatcagggtaaaaggcggtctggagttgtggtgtgctggcaaaccagccctctggggcaaaaaattaaaaagccttgatatggagtgtttgctgatacctatgatgtaaatattcccgccatggccactttccagctaccagcaaggcatcctggcaccagggattgggaggagatggcatagtcctaagagtcagccttgggcattgggccatgtgggactgggcagtggggtatctggtctggttctaagtgctgtgatgaagcagtagcagctgtaatagctggcatttcccgtgtgctcatcacatagcagatgttattccaaggactgtatgttctttatcatccctcatttgatagacaagacaactgagacacaaaagggtgaaataaacagtaagtactccatcccaggccatctcatccagagggtgctgtcttgaccactctactactctggttgatgggaggcagtaaattgtccatcagtatacttcttcatcaaagctacatagtcaaaaagccacaggaggctgtgaggagaagctcactgctgctctgttgaagtctgtattggtttcctatggccactcttaacaaattaccacaacctcagtggcttaaaacaacacaaatatatcattctgtcatcctggacacgagccaaaggttgtcggcagaagcgaattgcttccagaggtgctatagggtgctgcccattccttgccccttttccgcttctagaggctgcccattttccttggcttgtggctgcatcattctggctgcttctattgtcacacctcctctctgaccctccctgcctccttgtaaggacacttgggattacgcccatccagataatctagaataatctcccattttgtgattcttaataacatctgcaaagcctcttttaccttgcagaataagatattcacaggttctggtgaggaggacagggacatctctgaaggggagggaagcaggagatagggtctggaggcatggaattggcttcctaaggccaattcaggctgacttcctagaactaagtcaaaaggaaaaccccaactttccacgctcaagtaacaaaaggaccagaggctactccctttgcaacctccccacccccagccccttttctgcatggcaggtgaaaaattgaaagtatcgctaattgatcccctcccacaaccaatcagactggtcttaggccaagtcttcatttgcctaggagtataactttgtaacttcagcctctgattgggcgttttacacaaccagtcagatgtttgtatagggtggtgtaactttgtaactttgcttcagcctctgattggtcccctcccacaaccaatcaaactgatcatggacctctgcttcatttacatagggtgtacaccaagtaaccaatgggaaacctctagagggtatttaaatcccagaaaattctgtaaccgggttcttgagctgcttgggctgctcccaccctgtggagcgtactttcgtttttcaataaatctcttttgttgcttcattctttacttgctttgtgcgttttgtccatttctttatcaagacgccaagaacctggacaccctccaccggtaacaggaggagcattagtcagcctaccacagactccaacgaacgttttttgagaggaaatgaaagaatattcctaagttattgggtgccttttcttcaggaatccctgaaagtgggggtttgcaattttccctggattgaaaacagaaatgcttcctacacaaacatgattgagaccttgtactctaggtgtaaaaaaacagagtaggtcatactctgtgggttatggtcagagagatctggttagaagttcccaggtaggcgacagccctagatgtgtgacacttctaggagaatctctggctatgtggatacgtccaggtgtgtaaggcagcctcagggactgccaccacttggtcacatacatgtccctccaactaatcctagctctcaaggacaggtggttctgggccctgtgttgcccatgagacttggtccacggcaagcctgtgacggagtgaaagtgaggggacacccaatttgaaaactcggcaggaagccagactccatgacatacaaatagatcaaagtgaatcggctccgttgtttggggaaatacctgaggtttgttgtttcgtgccaagaagattaacaacacggacacacgtgggtgggttaaggagcagaaagtttaacaggcagaaaaaagagaacagctcccccatgcagagggaggaggactccgaatggatctccccattcctggcgggaagcagactgatatatagaggagggggtttgaagaggtggtatttgatttacatagagcccaagggattggtttgaccaggtgtgccatttacatagccctcgaagaaactggccattccaccttgatcttttattatgcagatagggttttttacttggccagagccttgacacctgcacacatggcaacaaacagaagggaggcgaaatcttccatattggatgcacctgtcttccaggtgcagctgccggcatttatctgtgcaagcttctagcttgcttatttatgcttgcagcttgacttttcaggctgctttctgttggaaaagaaatggttttgggggctgctttttattaaaagaaaagccttaccaaggactcctgtaccctatctgcctaaattttttttaactactatattaaaaggtctgtaagtgggagctggccctaaaagtaggttgtagagattatttggatgtgccaacaagcttcatctgcagcttggactgtctccattggaaggcctctggcagattttgtaaaaagttatataacaattttactataggaaaaacttggctacagatatgaatttatattacccatcattggctggttccttatcctgaacattggtttccttggaatctgattttggcttgtttggcctttaaaaaccccagaagaatggggtttctgccagattattttctggttttcagtctcactgaatgtcacaaaggccttggtttatggttcccaactggtaaagaaacgtcaaactttgcctctcttagttccttctacatgacaatgggtggcagttgctcatatggaagcatttcttttccccctaaagcctatgagacaggctgcaacttaaacccctattttattaaaggagaggaaatgtccaagagcccagagatagtgggtaaaagcatcataaggactagaaatggggtcttcttgttgctaattagtaggggtgaggggtaagtggcagatgtgactgccgtccatgcccagacagggaattgtccttgaacctactcatgcggtgtcttctggggtacagtgagtccacagggcaggacggccttggagtcaagagcccagactcacattctatctcaggcttcataactcaattgctccatgaccttaagccaatttagttccctcatctgtaaaaatggggataacaactgaatttacctcatgggattgtgtaatgcccaaccttgtttttactaaccctgtttttagactctccctcttcctttaatcacctagccttgtttccacctgaattgactctcccttagctaagacagccagacagactccatcttggctctttcactggcaccccttcctcaaggacttaacttgtgcaagctgactcccagcacatccaagaatgcaattaactgataagatactgtggcaagctatatccgcaattcccaggaattcgtctgattgataacgcccaaagccccgggtctatcaccttgtaatagtcttaaagcccctgcacctggaactgtttactttcctgtaaccatttatccttttaactttttgcctactttatttctgtaaaattgttttaactagacccccccctcccctttctaaaccaaagtataaaagaaaatctagccctttcctcagggctgagaaaattttgagtgttagccgtctctcggtcgctggctaataaaggactcttaattcgtctt

SEQ ID NO: 11270 - DNA, 513 bp, Homo sapiens
  source 1..513: mol_type = unassigned DNA
ttattttgtcaacggcaaagtgttttgtgaagaagacttcctgtactctggtttccagcagtcggctgacaggtgttttctttgtggacatctgatcatggacatgatcctgcaagccctggggaagtcctaccaccccggctgtttccgctgtgtcatctgtaatgagtgtttggatggggtgcccttcaccgtggactcagagaacaagatctactgtgtccgagattaccacaaggtgctggcccccaagtgtgcagcctgtgggcttcccatccttccacctgagggctcagatgagaccatccgtgtcgtgtccatggacagagactaccacgtggagtgttaccactgcgaggtagacccctccccacccagcccccaaagcccattgtagacatccaagagaaaagcatcctgcgttgactggggcaagaggcagtcaacaagattctggcaagggtcagccctctagagcttctgtaggaaatggaatgaaggctggttcttggg

SEQ ID NO: 11271 - DNA, 1409 bp, Homo sapiens
  source 1..1409: mol_type = unassigned DNA
tgggcgtccccatctgcggggcctgccgccggcccatcgagggccgagtggtcaacgcgctgggcaagcagtggcacgtggaggtgagccaggctggtggacacgtggcctcaggttggggggtgccccagctcagggtcatgcactttgtctgtgccaagtgtgagaagccattcctggggcaccggcactatgagaagaagggcctggcctactgcgagactcactacaaccagctcttcggggacgtctgctacaactgcagccatgtgattgaaggcgatgtggtgtcggccctcaacaaggcctggtgtgtgagctgcttctcctgctccacctgcaacagcaagctcaccctgaagaacaagtttgtggagttcgacatgaagcccgtgtgtaagaggtgctacgagaagttcccgctggagctgaagaagcggctgaagaagctgtcggagctgacctcccgcaaggcccagcccaaggccacagacctcaactctgcctgaaggccctcttgcgcagctgcctctcggcccctccgccttctcccctcctgctgtccatgcttggccccctcgtccccatccacctgtgccctccgcatcttaccctccctttctctttcctcattgccttctcccttcctgttccctcatctctgccttccccatgtctctcctctccttggccgtggcttctgtctgtgaggaggcaggagctggggagtgggagcctatgaccccacgtctgacagccatgtccacctgtgcccacagcttccgcccacagacctccagggacaggagcaaattgcaccacagctccccgcctggcctggccctccccaggcggctcagtggctcatgctgtcctgtgagagcccctgccccagagcggccccactaagcgcatgtggctcctgggctacccacagccagggcagcctgctggagccacagggccagggccatgcagatggaggcctctgggagccacctccaatccctcaccactcactcaaccagtggcacagtgtccttgtgcccacactgagccagcaagtcctgctgtccacacccacaagctacctggagggacaggacccacctccatccttcggaaggccttcctggaatcccaccttggcctccgccctcggttccgccccgcccctctccccccgaccttggggcttgtgtcgagcccttgggtggggccaggaggaggtgatggcgtcagaggaggtgtggtcagaggtgacttgttcccacctccagggaggacgcttcgtcttcggccagcgcagacctggtgtttgtttgttgggctcacgcttgcacaatgaaggcttgttcacacaaccacagcagcctgcgtggtttgtggcgggggtcgggggtggaggg

SEQ ID NO: 11272 - DNA, 4807 bp, Homo sapiens
  source 1..4807: mol_type = unassigned DNA
gatggggttatttctgtccattgtgctggtgtggccactgcacatctcccctcaagtccacatcgatgtcatgttggcagccaggagttggccatgacgggaatattcacaccatggacactggcaaacgccccacagcagggcctgcctctgcgccccagagagctggctgttgagcatttaccagaacatcacttgtgcttgtggtggcggtggtggccaggggtcagatgctggctctgtttcaaggtagagctgatgggactggctggtggatggatgtggggcctgtggtccgcctggcagagcaagagccgctgttcctcacagtgtcttcagcctcctgaggaatgctgtctaagtgtagaggcagcgggaggggtgggcaaagctctaggaggggtggccatatgcccagaacaaagcctctctctctcacacacagcaggtgcccagaagattttcattgctgaaagagtttaagcccttcctgactctacaggtcactgggtagggctatatccagtttagtctaataagacactcattttagagaacagggaaaaaccaattaaaaaacagaaaatacaattgttagaggaaagcagaggcaggctttggccccgcttgtggccagcacaggggccctcgctggcagctgccgcctggagggtgtgcacactggctcctgctggccgcagccctgagctcttcccacttccccgtgcccaggcccttcctgcgttcccttccttctgtctcctatacccgggtcttcatggcctctgagagagctggatactcccacagagaaggtatacgaaataggaccaagtgacactacacttcagactggatctcatccctcctggcttaaaaccgcctcgcccccagcctgttctccggaccaacagggtccagatcctcagtagacaccagtggccctttgacaggtggcctcacggacctctccagcttccacgggggcacctccctttgcaccccaccatcccaaaagggccagtgtcctctctggccaggcctgggacccactgctccagcctcagcccggcatgcccctgcctcagtgcctcatcccctgctgtcaggtcctgacccaacaagggcctgggctgctcatggggatgataggtggtttgcttgtcctctctctgcgacccctttgcagtttgaaggccggaagtactgcgaacacgacttccaaatgctgtttgctccgtgctgtggatcctgcggtgagttcatcattggccgcgtcatcaaggccatgaacaacaactggcacccgggctgcttccgctgcgagctgtgtgatgtggagctggctgacctgggctttgtgaagaatgccggcaggcatctctgccggccttgccacaaccgtgagaaggccaagggcctgggcaagtacatctgccagcggtgccacctggtcatcgacgagcagcccctcatgttcaggagcgacgcctaccaccctgaccacttcaactgcacccactgtgggtaggtgcgcagcccggccctgcagttgtgggggcggggagccagggctggcccagggtaagggcggtggggcctccacctggggaagtgttgaggagggagaggggagcagggtgggcagacagaggggtcccgagagcaaggctgcagggcagaggtgggctgggggctgggaagcagccatggcaggaagcttctctctccagggctctgtttggggggcacttgagactcaggaggcgggtgggctggacccctagactgcagacgagggttgagatggagcagtggaagggacctgagggggcagggcaagagaccgggagtgggcttggtgctggtgttggagagaggagttgcataggcagcccctcagcccccgtcctcgcccacccccaccgtcccctccagtcctctccgtgcctatccagacaccccctctggtttggaggaggaggggggcccaagaacagacctgcttctcagaggcctgggtgcagaacacagcccactcttctgggctgtgcaggaagtctgtgctccagggcctgtctggggcacaggaagtcttcaaagtgcccagagatcagaaggcgctgccgcctcggctctgcagggacagaatgggcccctcggggagccgtgccctggggtggaggcgctgctggcatgaccctgcagaagggcaggggtggcacctgggggctgcacgctgtcttccaggaaggagctgacagccgaggcccgcgagctgaagggtgagctctactgcctgccctgccatgacaagatgggcgtccccatctgcggggcctgccgccggcccatcgagggccgagtggtcaacgcgctgggcaagcagtggcacgtggaggtgagccaggctggtggacacgtggcctcaggttggggggtgccccagctcagggtcatggtaagagccctaaagctcctccacactcccagcccagggcgggtggctggctcccaacgaggcccttcctcaggggtactgcccctccctgtgctcagccagggaccccagcctgcccacgggagccaggagacccgagtgcacacacacggttgggtagctgtgcccacctctcctcttccccctgctggcattctaagagactccaaggtcaggagaaaaccttgggggcagtctgtccagagtgcctgggggttgtggatgacagaacccgctgcatggacagccctgtgcagacacggagctgaagagttcctcaggtgtgagcactgggtcacctggagtgcccccaccgggtggtgggctctcatgttctcatgggtacactgggaacagtgagcccaccacctcccctgatgacctggccagcgctgtgtccggaagctgtgccttgggtggcggcttgggtgggaggccatgcggtcctgccctgatgcaggccccagcccccagccctcatcctcacatgcagatccctgggggaatgcaaggtgctgctcagtgatcccaggcttgcagggggtgcctgcaggaggccccacgtggacaggcagggccgcctctgcctatgagggcccaccatgccgcagcaccaggctggcacctgactcctggggctgaggctgccgagggggaggccagactgggaggggatggtgactcacaaggttaccatcagtgccttagaggaggggtagggtctgctgaccccagggcattcacagaggtgtcagtcccctctgcccagtgtgaatcctgaaaggcctgcacctgcccagactctgctttctgtccccttctgtcactgctgcctcctggggccactgtggtcccctggagtcactggctcctggggtcactgttgtccccgggtcaccactgtccctcggggtcaccgctctagccctgatgccacccggcccgccctttgtccttgcagcactttgtctgtgccaagtgtgagaagccattcctggggcaccggcactatgagaagaagggcctggcctactgcgagactcactacaaccagctcttcggggacgtctgctacaactgcagccatgtgattgaaggcgatggtgaggccctgtgttccctcccccaccccacctgctctcctggggcctgggtgctgcagctgtgagcccagccgggcctgcggcagcctagccaggcctgctgagtcccacgcttccctcacagtggtgtcggccctcaacaaggcctggtgtgtgagctgcttctcctgctccacctgcaacagcaagctcaccctgaagaacaagtttgtggagttcgacatgaagcccgtgtgtaagaggtgctacgagaagttcccgctggagctgaagaagcggctgaagaagctgtcggagctgacctcccgcaaggcccagcccaaggccacagacctcaactctgcctgaaggccctcttgcgcagctgcctctcggcccctccgccttctcccctcctgctgtccatgcttggccccctcgtccccatccacctgtgccctccgcatcttaccctccctttctctttcctcattgccttctcccttcctgttccctcatctctgccttccccatgtctctcctctccttggccgtggcttctgtctgtgaggaggcaggagctggggagtgggagcctatgaccccacgtctgacagccatgtccacctgtgcccacagcttccgcccacagacctccagggacaggagcaaattgcaccacagctccccgcctggcctggccctccccaggcggctcagtggctcatgctgtcctgtgagagcccctgccccagagcggccccactaagcgcatgtggctcctgggctacccacagccagggcagcctgctggagccacagggccagggccatgcagatggaggcctctgggagccacctccaatccctcaccactcactcaaccagtggcacagtgtccttgtgcccacactgagccagcaagtcctgctgtccacacccacaagctacctggagggacaggacccacctccatccttcggaaggccttcctggaatcccaccttggcctccgccctcggttccgccccgcccctctccccccgaccttggggcttgtgtcgagcccttgggtggggccaggaggaggtgatggcgtcagaggaggtgtggtcagaggtgacttgttcccacctccagggaggacgcttcgtcttcggccagcgcagacctggtgtttgtttgttgggctcacgcttgcacaatgaaggcttgttcacacaac

SEQ ID NO: 11273 - DNA, 1137 bp, Homo sapiens
  source 1..1137: mol_type = unassigned DNA
gttggagggccaggctggctgcatgatggccctgggctggggtgtgactgcctgcagctactctgacagcctgctcggcccacagctcttcggggacgtctgctacaactgcagccatgtgattgaaggcgatggaacaagtttgtggagttcgacatgaagcccgtgtgtaagaggtgctacgagaagttcccgctggagctgaagaagcggctgaagaagctgtcggagctgacctcccgcaaggcccagcccaaggccacagacctcaactctgcctgaaggccctcttgcgcagctgcctctcggcccctccgccttctcccctcctgctgtccatgcttggccccctcgtccccatccacctgtgccctccgcatcttaccctccctttctctttcctcattgccttctcccttcctgttccctcatctctgccttccccatgtctctcctctccttggccgtggcttctgtctgtgaggaggcaggagctggggagtgggagcctatgaccccacgtctgacagccatgtccacctgtgcccacagcttccgcccacagacctccagggacaggagcaaattgcaccacagctccccgcctggcctggccctccccaggcggctcagtggctcatgctgtcctgtgagagcccctgccccagagcggccccactaagcgcatgtggctcctgggctacccacagccagggcagcctgctggagccacagggccagggccatgcagatggaggcctctgggagccacctccaatccctcaccactcactcaaccagtggcacagtgtccttgtgcccacactgagccagcaagtcctgctgtccacacccacaagctacctggagggacaggacccacctccatccttcggaaggccttcctggaatcccaccttggcctccgccctcggttccgccccgcccctctccccccgaccttggggcttgtgtcgagcccttgggtggggccaggaggaggtgatggcgtcagaggaggtgtggtcagaggtgacttgttcccacctccagggaggacgcttcgtcttcggccagcgcagacctggtgtttgtttgttgggctcacgcttgcacaatgaaggcttgttcacacaa

SEQ ID NO: 11274 - DNA, 1678 bp, Homo sapiens
  source 1..1678: mol_type = unassigned DNA
gtgacagggcagtctgctttcccataccctgggctgagcccctttgaagcccccagctgctcagtgaagttgcaggggtctggcctctcttctcctggaggtggccaggctgtgtgggagtgggggctctgcccctaatgcccccgcctcccgcaggcatctctgccggccttgccacaaccgtgagaaggccaagggcctgggcaagtacatctgccagcggtgccacctggtcatcgacgagcagcccctcatgttcaggagcgacgcctaccaccctgaccacttcaactgcacccactgtgggaaggagctgacagccgaggcccgcgagctgaagggtgagctctactgcctgccctgccatgacaagatgggcgtccccatctgcggggcctgccgccggcccatcgagggccgagtggtcaacgcgctgggcaagcagtggcacgtggagcactttgtctgtgccaagtgtgagaagccattcctggggcaccggcactatgagaagaagggcctggcctactgcgagactcactacaaccagctcttcggggacgtctgctacaactgcagccatgtgattgaaggcgatgtggtgtcggccctcaacaaggcctggtgtgtgagctgcttctcctgctccacctgcaacagcaagctcaccctgaagaacaagtttgtggagttcgacatgaagcccgtgtgtaagaggtgctacgagaagttcccgctggagctgaagaagcggctgaagaagctgtcggagctgacctcccgcaaggcccagcccaaggccacagacctcaactctgcctgaaggccctcttgcgcagctgcctctcggcccctccgccttctcccctcctgctgtccatgcttggccccctcgtccccatccacctgtgccctccgcatcttaccctccctttctctttcctcattgccttctcccttcctgttccctcatctctgccttccccatgtctctcctctccttggccgtggcttctgtctgtgaggaggcaggagctggggagtgggagcctatgaccccacgtctgacagccatgtccacctgtgcccacagcttccgcccacagacctccagggacaggagcaaattgcaccacagctccccgcctggcctggccctccccaggcggctcagtggctcatgctgtcctgtgagagcccctgccccagagcggccccactaagcgcatgtggctcctgggctacccacagccagggcagcctgctggagccacagggccagggccatgcagatggaggcctctgggagccacctccaatccctcaccactcactcaaccagtggcacagtgtccttgtgcccacactgagccagcaagtcctgctgtccacacccacaagctacctggagggacaggacccacctccatccttcggaaggccttcctggaatcccaccttggcctccgccctcggttccgccccgcccctctccccccgaccttggggcttgtgtcgagcccttgggtggggccaggaggaggtgatggcgtcagaggaggtgtggtcagaggtgacttgttcccacctccagggaggacgcttcgtcttcggccagcgcagacctggtgtttgtttgttgggctcacgcttgcacaatgaaggcttgttcacacaa

SEQ ID NO: 11275 - DNA, 1620 bp, Homo sapiens
  source 1..1620: mol_type = unassigned DNA
cagtgctgtgcaggatggagtccagacacccagcagtagcagaaatcgcctgtacgtgtttgggcccttcttcatctggcaaaccccgaaggaagggggcatctctgccggccttgccacaaccgtgagaaggccaagggcctgggcaagtacatctgccagcggtgccacctggtcatcgacgagcagcccctcatgttcaggagcgacgcctaccaccctgaccacttcaactgcacccactgtgggaaggagctgacagccgaggcccgcgagctgaagggtgagctctactgcctgccctgccatgacaagatgggcgtccccatctgcggggcctgccgccggcccatcgagggccgagtggtcaacgcgctgggcaagcagtggcacgtggagcactttgtctgtgccaagtgtgagaagccattcctggggcaccggcactatgagaagaagggcctggcctactgcgagactcactacaaccagctcttcggggacgtctgctacaactgcagccatgtgattgaaggcgatgtggtgtcggccctcaacaaggcctggtgtgtgagctgcttctcctgctccacctgcaacagcaagctcaccctgaagaacaagtttgtggagttcgacatgaagcccgtgtgtaagaggtgctacgagaagttcccgctggagctgaagaagcggctgaagaagctgtcggagctgacctcccgcaaggcccagcccaaggccacagacctcaactctgcctgaaggccctcttgcgcagctgcctctcggcccctccgccttctcccctcctgctgtccatgcttggccccctcgtccccatccacctgtgccctccgcatcttaccctccctttctctttcctcattgccttctcccttcctgttccctcatctctgccttccccatgtctctcctctccttggccgtggcttctgtctgtgaggaggcaggagctggggagtgggagcctatgaccccacgtctgacagccatgtccacctgtgcccacagcttccgcccacagacctccagggacaggagcaaattgcaccacagctccccgcctggcctggccctccccaggcggctcagtggctcatgctgtcctgtgagagcccctgccccagagcggccccactaagcgcatgtggctcctgggctacccacagccagggcagcctgctggagccacagggccagggccatgcagatggaggcctctgggagccacctccaatccctcaccactcactcaaccagtggcacagtgtccttgtgcccacactgagccagcaagtcctgctgtccacacccacaagctacctggagggacaggacccacctccatccttcggaaggccttcctggaatcccaccttggcctccgccctcggttccgccccgcccctctccccccgaccttggggcttgtgtcgagcccttgggtggggccaggaggaggtgatggcgtcagaggaggtgtggtcagaggtgacttgttcccacctccagggaggacgcttcgtcttcggccagcgcagacctggtgtttgtttgttgggctcacgcttgcacaatgaaggcttgttcacacaa

SEQ ID NO: 11276 - DNA, 2269 bp, Homo sapiens
  source 1..2269: mol_type = unassigned DNA
gcccgcgacctcaaggcggctgccccgcgccatggcggcccggctgggtgcgctggccgcgtcggggctgtaccggcggcgccagcaccggcagagcccgccgccagccacgggcaatatgtcggacgccttggccaacgccgtgtgccagcgctgccaggcccgcttctcccccgccgagcgcattgtcaacagcaatggggagctgtaccatgagcactgcttcgtgtgtgcccagtgcttccggcccttccccgaggggctcttctatgagtttgaaggccggaagtactgcgaacacgacttccaaatgctgtttgctccgtgctgtggatcctgcggtaaggccggtgacagtacacatcctgggctgcctgggaagtgggcagcagtggcggggggcagggggccgagggggtacacagaactggcccagctctttcctaactccccaccttgcctctctgagcggcagccgtcaggccccctacaggcatcaccatcccacgagggagcccatgggccaggcagagagcaggcggagtgctaggtggacagggcttgggagggtccgaagaggggacaggcacgtgctccccagccagcagggacctgtcttcttccaggtgagttcatcattggccgcgtcatcaaggccatgaacaacaactggcacccgggctgcttccgctgcgagctgtgtgatgtggagctggctgacctgggctttgtgaagaatgccggcaggcatctctgccggccttgccacaaccgtgagaaggccaagggcctgggcaagtacatctgccagcggtgccacctggtcatcgacgagcagcccctcatgttcaggagcgacgcctaccaccctgaccacttcaactgcacccactgtgggaaggagctgacagccgaggcccgcgagctgaagggtgagctctactgcctgccctgccatgacaagatgggcgtccccatctgcggggcctgccgccggcccatcgagggccgagtggtcaacgcgctgggcaagcagtggcacgtggagcactttgtctgtgccaagtgtgagaagccattcctggggcaccggcactatgagaagaagggcctggcctactgcgagactcactacaaccagctcttcggggacgtctgctacaactgcagccatgtgattgaaggcgatgtggtgtcggccctcaacaaggcctggtgtgtgagctgcttctcctgctccacctgcaacagcaagctcaccctgaagaacaagtttgtggagttcgacatgaagcccgtgtgtaagaggtgctacgagaagttcccgctggagctgaagaagcggctgaagaagctgtcggagctgacctcccgcaaggcccagcccaaggccacagacctcaactctgcctgaaggccctcttgcgcagctgcctctcggcccctccgccttctcccctcctgctgtccatgcttggccccctcgtccccatccacctgtgccctccgcatcttaccctccctttctctttcctcattgccttctcccttcctgttccctcatctctgccttccccatgtctctcctctccttggccgtggcttctgtctgtgaggaggcaggagctggggagtgggagcctatgaccccacgtctgacagccatgtccacctgtgcccacagcttccgcccacagacctccagggacaggagcaaattgcaccacagctccccgcctggcctggccctccccaggcggctcagtggctcatgctgtcctgtgagagcccctgccccagagcggccccactaagcgcatgtggctcctgggctacccacagccagggcagcctgctggagccacagggccagggccatgcagatggaggcctctgggagccacctccaatccctcaccactcactcaaccagtggcacagtgtccttgtgcccacactgagccagcaagtcctgctgtccacacccacaagctacctggagggacaggacccacctccatccttcggaaggccttcctggaatcccaccttggcctccgccctcggttccgccccgcccctctccccccgaccttggggcttgtgtcgagcccttgggtggggccaggaggaggtgatggcgtcagaggaggtgtggtcagaggtgacttgttcccacctccagggaggacgcttcgtcttcggccagcgcagacctggtgtttgtttgttgggctcacgcttgcacaatgaaggcttgttcacacaa

SEQ ID NO: 11277 - DNA, 2111 bp, Homo sapiens
  source 1..2111: mol_type = unassigned DNA
gcgtaacgtgagctcgcgaccagcgcgggggaggcgcccacacgcccgtcccgtcttggtgtctggccccaggcggccgcgcctcccctccgaggtggtcccatagcccctgcaccaggcggcccgcgcccgcgacctcaaggcggctgccccgcgccatggcggcccggctgggtgcgctggccgcgtcggggctgtaccggcggcgccagcaccggcagagcccgccgccagccacgggcaatatgtcggacgccttggccaacgccgtgtgccagcgctgccaggcccgcttctcccccgccgagcgcattgtcaacagcaatggggagctgtaccatgagcactgcttcgtgtgtgcccagtgcttccggcccttccccgaggggctcttctatgagtttgaaggccggaagtactgcgaacacgacttccaaatgctgtttgctccgtgctgtggatcctgcggtgagttcatcattggccgcgtcatcaaggccatgaacaacaactggcacccgggctgcttccgctgcgagctgtgtgatgtggagctggctgacctgggctttgtgaagaatgccggcaggcatctctgccggccttgccacaaccgtgagaaggccaagggcctgggcaagtacatctgccagcggtgccacctggtcatcgacgagcagcccctcatgttcaggagcgacgcctaccaccctgaccacttcaactgcacccactgtgggaaggagctgacagccgaggcccgcgagctgaagggtgagctctactgcctgccctgccatgacaagatgggcgtccccatctgcggggcctgccgccggcccatcgagggccgagtggtcaacgcgctgggcaagcagtggcacgtggagcactttgtctgtgccaagtgtgagaagccattcctggggcaccggcactatgagaagaagggcctggcctactgcgagactcactacaaccagctcttcggggacgtctgctacaactgcagccatgtgattgaaggcgatgtggtgtcggccctcaacaaggcctggtgtgtgagctgcttctcctgctccacctgcaacagcaagctcaccctgaagaacaagtttgtggagttcgacatgaagcccgtgtgtaagaggtgctacgagaagttcccgctggagctgaagaagcggctgaagaagctgtcggagctgacctcccgcaaggcccagcccaaggccacagacctcaactctgcctgaaggccctcttgcgcagctgcctctcggcccctccgccttctcccctcctgctgtccatgcttggccccctcgtccccatccacctgtgccctccgcatcttaccctccctttctctttcctcattgccttctcccttcctgttccctcatctctgccttccccatgtctctcctctccttggccgtggcttctgtctgtgaggaggcaggagctggggagtgggagcctatgaccccacgtctgacagccatgtccacctgtgcccacagcttccgcccacagacctccagggacaggagcaaattgcaccacagctccccgcctggcctggccctccccaggcggctcagtggctcatgctgtcctgtgagagcccctgccccagagcggccccactaagcgcatgtggctcctgggctacccacagccagggcagcctgctggagccacagggccagggccatgcagatggaggcctctgggagccacctccaatccctcaccactcactcaaccagtggcacagtgtccttgtgcccacactgagccagcaagtcctgctgtccacacccacaagctacctggagggacaggacccacctccatccttcggaaggccttcctggaatcccaccttggcctccgccctcggttccgccccgcccctctccccccgaccttggggcttgtgtcgagcccttgggtggggccaggaggaggtgatggcgtcagaggaggtgtggtcagaggtgacttgttcccacctccagggaggacgcttcgtcttcggccagcgcagacctggtgtttgtttgttgggctcacgcttgcacaatgaaggcttgttcacacaa

SEQ ID NO: 11278 - DNA, 2099 bp, Homo sapiens
  source 1..2099: mol_type = unassigned DNA
caaagtgcccagagatcagaaggcgctgccgcctcggctctgcagggacagaatgggcccctcggggagccgtgccctggggtggaggcgctgctggcatgaccctgcagaagggcaggggtggcacctgggggctgcacgctgtcttccaggaaggagctgacagccgaggcccgcgagctgaagggtgagctctactgcctgccctgccatgacaagatgggcgtccccatctgcggggcctgccgccggcccatcgagggccgagtggtcaacgcgctgggcaagcagtggcacgtggagcactttgtctgtgccaagtgtgagaagccattcctggggcaccggcactatgagaagaagggcctggcctactgcgagactcactacaaccaggtgagcccggtgcagaaccttcagggatgcgggtctggaggggtggccaggagagctgccgtgagcaagggaggctgtgggcaccccctcaggagctctgccaggtgctgagcccaggcctgcaccctcagccctggctcctggcctggggtctcgagacctgggcagctctcttcagtctcagtgtcttcctttgaagaatgttctggggctggtgtgaggtcccgggcacatggggctgacagtgccagcaaccccctccctcccttgctctggtacagaaggcagggggcgctggtgggatgcagtcaccacctgggcccacctccttgcaggacagcagtggccagagcagaggggccttctggggagcaacgccccagcctgttgtccttcccggaagggtggttctcatgggttgccgtgccctcaacccagccttgcagctgggccctgggaggcagggcctgggagatgcctgagaggggccgtgttggagggccaggctggctgcatgatggccctgggctggggtgtgactgcctgcagctactctgacagcctgctcggcccacagctcttcggggacgtctgctacaactgcagccatgtgattgaaggcgatgtggtgtcggccctcaacaaggcctggtgtgtgagctgcttctcctgctccacctgcaacagcaagctcaccctgaagaacaagtttgtggagttcgacatgaagcccgtgtgtaagaggtgctacgagaagttcccgctggagctgaagaagcggctgaagaagctgtcggagctgacctcccgcaaggcccagcccaaggccacagacctcaactctgcctgaaggccctcttgcgcagctgcctctcggcccctccgccttctcccctcctgctgtccatgcttggccccctcgtccccatccacctgtgccctccgcatcttaccctccctttctctttcctcattgccttctcccttcctgttccctcatctctgccttccccatgtctctcctctccttggccgtggcttctgtctgtgaggaggcaggagctggggagtgggagcctatgaccccacgtctgacagccatgtccacctgtgcccacagcttccgcccacagacctccagggacaggagcaaattgcaccacagctccccgcctggcctggccctccccaggcggctcagtggctcatgctgtcctgtgagagcccctgccccagagcggccccactaagcgcatgtggctcctgggctacccacagccagggcagcctgctggagccacagggccagggccatgcagatggaggcctctgggagccacctccaatccctcaccactcactcaaccagtggcacagtgtccttgtgcccacactgagccagcaagtcctgctgtccacacccacaagctacctggagggacaggacccacctccatccttcggaaggccttcctggaatcccaccttggcctccgccctcggttccgccccgcccctctccccccgaccttggggcttgtgtcgagcccttgggtggggccaggaggaggtgatggcgtcagaggaggtgtggtcagaggtgacttgttcccacctccagggaggacgcttcgtcttcggccagcgcagacctggtgtttgtttgttgggctcacgcttgcacaatgaaggcttgttcacac

SEQ ID NO: 11279 - DNA, 2592 bp, Homo sapiens
  source 1..2592: mol_type = unassigned DNA
gtggtcccatagcccctgcaccaggcggcccgcgcccgcgacctcaaggcggctgccccgcgccatggcggcccggctgggtgcgctggccgcgtcggggctgtaccggcggcgccagcaccggcagagcccgccgccagccacgggcaatatgtcggacgccttggccaacgccgtgtgccagcgctgccaggcccgcttctcccccgccgagcgcattgtcaacagcaatggggagctgtaccatgagcactgcttcgtgtgtgcccagtgcttccggcccttccccgaggggctcttctatgagtttgaaggccggaagtactgcgaacacgacttccaaatgctgtttgctccgtgctgtggatcctgcggtgagttcatcattggccgcgtcatcaaggccatgaacaacaactggcacccgggctgcttccgctgcgagctgtgtgatgtggagctggctgacctgggctttgtgaagaatgccggcaggcatctctgccggccttgccacaaccgtgagaaggccaagggcctgggcaagtacatctgccagcggtgccacctggtcatcgacgagcagcccctcatgttcaggagcgacgcctaccaccctgaccacttcaactgcacccactgtgggaaggagctgacagccgaggcccgcgagctgaagggtgagctctactgcctgccctgccatgacaagatgggcgtccccatctgcggggcctgccgccggcccatcgagggccgagtggtcaacgcgctgggcaagcagtggcacgtggagcactttgtctgtgccaagtgtgagaagccattcctggggcaccggcactatgagaagaagggcctggcctactgcgagactcactacaaccaggtgagcccggtgcagaaccttcagggatgcgggtctggaggggtggccaggagagctgccgtgagcaagggaggctgtgggcaccccctcaggagctctgccaggtgctgagcccaggcctgcaccctcagccctggctcctggcctggggtctcgagacctgggcagctctcttcagtctcagtgtcttcctttgaagaatgttctggggctggtgtgaggtcccgggcacatggggctgacagtgccagcaaccccctccctcccttgctctggtacagaaggcagggggcgctggtgggatgcagtcaccacctgggcccacctccttgcaggacagcagtggccagagcagaggggccttctggggagcaacgccccagcctgttgtccttcccggaagggtggttctcatgggttgccgtgccctcaacccagccttgcagctgggccctgggaggcagggcctgggagatgcctgagaggggccgtgttggagggccaggctggctgcatgatggccctgggctggggtgtgactgcctgcagctactctgacagcctgctcggcccacagctcttcggggacgtctgctacaactgcagccatgtgattgaaggcgatgtggtgtcggccctcaacaaggcctggtgtgtgagctgcttctcctgctccacctgcaacagcaagctcaccctgaagaacaagtttgtggagttcgacatgaagcccgtgtgtaagaggtgctacgagaagttcccgctggagctgaagaagcggctgaagaagctgtcggagctgacctcccgcaaggcccagcccaaggccacagacctcaactctgcctgaaggccctcttgcgcagctgcctctcggcccctccgccttctcccctcctgctgtccatgcttggccccctcgtccccatccacctgtgccctccgcatcttaccctccctttctctttcctcattgccttctcccttcctgttccctcatctctgccttccccatgtctctcctctccttggccgtggcttctgtctgtgaggaggcaggagctggggagtgggagcctatgaccccacgtctgacagccatgtccacctgtgcccacagcttccgcccacagacctccagggacaggagcaaattgcaccacagctccccgcctggcctggccctccccaggcggctcagtggctcatgctgtcctgtgagagcccctgccccagagcggccccactaagcgcatgtggctcctgggctacccacagccagggcagcctgctggagccacagggccagggccatgcagatggaggcctctgggagccacctccaatccctcaccactcactcaaccagtggcacagtgtccttgtgcccacactgagccagcaagtcctgctgtccacacccacaagctacctggagggacaggacccacctccatccttcggaaggccttcctggaatcccaccttggcctccgccctcggttccgccccgcccctctccccccgaccttggggcttgtgtcgagcccttgggtggggccaggaggaggtgatggcgtcagaggaggtgtggtcagaggtgacttgttcccacctccagggaggacgcttcgtcttcggccagcgcagacctggtgtttgtttgttgggctcacgcttgcacaatgaaggcttgttcacac

SEQ ID NO: 11280 - DNA, 2500 bp, Homo sapiens
  source 1..2500: mol_type = unassigned DNA
aagtgcatgactcaggactgggtgggagggggctgtccctgaggccctggtctcccccagccaagtcctggcagggggatgctgttcttcaggatcccatgacctggggctcttggggagccccagcccggagagtgacctgtggctttgctggggaaaggggcttggagggtacagggcagtgtccaggattgcagtctcaaatccgaggcccacaggggagctgcctctgtgatcgccattaaggctgtggcctggggtctcagggcagcccaggaaccaaaaatagcctgtaacttgtcactttgtaagtcctgccctccagacacacttccctttcttctccccaagcctctcttcccagttagctcccctgacttggagtcacctctaagccttggcccaggcccctctgcagtgagatggagggactcatcccccggagagtggcatctgcaggcccactggctgcctgtggtcaccccctagggttctagcggggctgcctcccattttcctcagagcatccctgccagctggctggttctcactctcctgttttctaggaaaagaaagtggggagagacaggaacagggtccggagcagccccagcagcagcattgaggtggagcaatatgtcggacgccttggccaacgccgtgtgccagcgctgccaggcccgcttctcccccgccgagcgcattgtcaacagcaatggggagctgtaccatgagcactgcttcgtgtgtgcccagtgcttccggcccttccccgaggggctcttctatgagtttgaaggccggaagtactgcgaacacgacttccaaatgctgtttgctccgtgctgtggatcctgcggtgagttcatcattggccgcgtcatcaaggccatgaacaacaactggcacccgggctgcttccgctgcgagctgtgtgatgtggagctggctgacctgggctttgtgaagaatgccggcaggcatctctgccggccttgccacaaccgtgagaaggccaagggcctgggcaagtacatctgccagcggtgccacctggtcatcgacgagcagcccctcatgttcaggagcgacgcctaccaccctgaccacttcaactgcacccactgtgggaaggagctgacagccgaggcccgcgagctgaagggtgagctctactgcctgccctgccatgacaagatgggcgtccccatctgcggggcctgccgccggcccatcgagggccgagtggtcaacgcgctgggcaagcagtggcacgtggagcactttgtctgtgccaagtgtgagaagccattcctggggcaccggcactatgagaagaagggcctggcctactgcgagactcactacaaccagctcttcggggacgtctgctacaactgcagccatgtgattgaaggcgatgtggtgtcggccctcaacaaggcctggtgtgtgagctgcttctcctgctccacctgcaacagcaagctcaccctgaagaacaagtttgtggagttcgacatgaagcccgtgtgtaagaggtgctacgagaagttcccgctggagctgaagaagcggctgaagaagctgtcggagctgacctcccgcaaggcccagcccaaggccacagacctcaactctgcctgaaggccctcttgcgcagctgcctctcggcccctccgccttctcccctcctgctgtccatgcttggccccctcgtccccatccacctgtgccctccgcatcttaccctccctttctctttcctcattgccttctcccttcctgttccctcatctctgccttccccatgtctctcctctccttggccgtggcttctgtctgtgaggaggcaggagctggggagtgggagcctatgaccccacgtctgacagccatgtccacctgtgcccacagcttccgcccacagacctccagggacaggagcaaattgcaccacagctccccgcctggcctggccctccccaggcggctcagtggctcatgctgtcctgtgagagcccctgccccagagcggccccactaagcgcatgtggctcctgggctacccacagccagggcagcctgctggagccacagggccagggccatgcagatggaggcctctgggagccacctccaatccctcaccactcactcaaccagtggcacagtgtccttgtgcccacactgagccagcaagtcctgctgtccacacccacaagctacctggagggacaggacccacctccatccttcggaaggccttcctggaatcccaccttggcctccgccctcggttccgccccgcccctctccccccgaccttggggcttgtgtcgagcccttgggtggggccaggaggaggtgatggcgtcagaggaggtgtggtcagaggtgacttgttcccacctccagggaggacgcttcgtcttcggccagcgcagacctggtgtttgtttgttgggctcacgcttgcacaatgaaggcttgttcacac

SEQ ID NO: 11281 - DNA, 2045 bp, Homo sapiens
  source 1..2045: mol_type = unassigned DNA
gccacccccgcccacccctctcgcgggcggagcggctcttggccttttttgggcgtctccctgctccgcggcccgggctggcgggcgggcgctcggctggcggctgcagcagcagagggagacccgcggcaaccccggcaacccagggctcggcgtcgctgccaccatgacgggaagcaatatgtcggacgccttggccaacgccgtgtgccagcgctgccaggcccgcttctcccccgccgagcgcattgtcaacagcaatggggagctgtaccatgagcactgcttcgtgtgtgcccagtgcttccggcccttccccgaggggctcttctatgagtttgaaggccggaagtactgcgaacacgacttccaaatgctgtttgctccgtgctgtggatcctgcggtgagttcatcattggccgcgtcatcaaggccatgaacaacaactggcacccgggctgcttccgctgcgagctgtgtgatgtggagctggctgacctgggctttgtgaagaatgccggcaggcatctctgccggccttgccacaaccgtgagaaggccaagggcctgggcaagtacatctgccagcggtgccacctggtcatcgacgagcagcccctcatgttcaggagcgacgcctaccaccctgaccacttcaactgcacccactgtgggaaggagctgacagccgaggcccgcgagctgaagggtgagctctactgcctgccctgccatgacaagatgggcgtccccatctgcggggcctgccgccggcccatcgagggccgagtggtcaacgcgctgggcaagcagtggcacgtggagcactttgtctgtgccaagtgtgagaagccattcctggggcaccggcactatgagaagaagggcctggcctactgcgagactcactacaaccagctcttcggggacgtctgctacaactgcagccatgtgattgaaggcgatgtggtgtcggccctcaacaaggcctggtgtgtgagctgcttctcctgctccacctgcaacagcaagctcaccctgaagaacaagtttgtggagttcgacatgaagcccgtgtgtaagaggtgctacgagaagttcccgctggagctgaagaagcggctgaagaagctgtcggagctgacctcccgcaaggcccagcccaaggccacagacctcaactctgcctgaaggccctcttgcgcagctgcctctcggcccctccgccttctcccctcctgctgtccatgcttggccccctcgtccccatccacctgtgccctccgcatcttaccctccctttctctttcctcattgccttctcccttcctgttccctcatctctgccttccccatgtctctcctctccttggccgtggcttctgtctgtgaggaggcaggagctggggagtgggagcctatgaccccacgtctgacagccatgtccacctgtgcccacagcttccgcccacagacctccagggacaggagcaaattgcaccacagctccccgcctggcctggccctccccaggcggctcagtggctcatgctgtcctgtgagagcccctgccccagagcggccccactaagcgcatgtggctcctgggctacccacagccagggcagcctgctggagccacagggccagggccatgcagatggaggcctctgggagccacctccaatccctcaccactcactcaaccagtggcacagtgtccttgtgcccacactgagccagcaagtcctgctgtccacacccacaagctacctggagggacaggacccacctccatccttcggaaggccttcctggaatcccaccttggcctccgccctcggttccgccccgcccctctccccccgaccttggggcttgtgtcgagcccttgggtggggccaggaggaggtgatggcgtcagaggaggtgtggtcagaggtgacttgttcccacctccagggaggacgcttcgtcttcggccagcgcagacctggtgtttgtttgttgggctcacgcttgcacaatgaaggcttgttcacac

SEQ ID NO: 11282 - DNA, 2315 bp, Homo sapiens
  source 1..2315: mol_type = unassigned DNA
ctatactcccgcaacctcccaccgtcacctccccaacacccccaccaccctcagccttgacctccccatcccaccccgccccgcgggccccaccctgccacccccgcccacccctctcgcgggcggagcggctcttggccttttttgggcgtctccctgctccgcggcccgggctggcgggcgggcgctcggctggcggctgcagcagcagagggagacccgcggcaaccccggcaacccagggctcggcgtcgctgccaccatgacgggaagatgaggtcaccagaggccacagaggctgagccactcaggaggccagtcacaggtccaccagtgtccggccagtgtttgtccctgcagccctttctggaacctagctgggaaaagaaagtggggagagacaggaacagggtccggagcagccccagcagcagcattgaggtggagcaatatgtcggacgccttggccaacgccgtgtgccagcgctgccaggcccgcttctcccccgccgagcgcattgtcaacagcaatggggagctgtaccatgagcactgcttcgtgtgtgcccagtgcttccggcccttccccgaggggctcttctatgagtttgaaggccggaagtactgcgaacacgacttccaaatgctgtttgctccgtgctgtggatcctgcggtgagttcatcattggccgcgtcatcaaggccatgaacaacaactggcacccgggctgcttccgctgcgagctgtgtgatgtggagctggctgacctgggctttgtgaagaatgccggcaggcatctctgccggccttgccacaaccgtgagaaggccaagggcctgggcaagtacatctgccagcggtgccacctggtcatcgacgagcagcccctcatgttcaggagcgacgcctaccaccctgaccacttcaactgcacccactgtgggaaggagctgacagccgaggcccgcgagctgaagggtgagctctactgcctgccctgccatgacaagatgggcgtccccatctgcggggcctgccgccggcccatcgagggccgagtggtcaacgcgctgggcaagcagtggcacgtggagcactttgtctgtgccaagtgtgagaagccattcctggggcaccggcactatgagaagaagggcctggcctactgcgagactcactacaaccagctcttcggggacgtctgctacaactgcagccatgtgattgaaggcgatgtggtgtcggccctcaacaaggcctggtgtgtgagctgcttctcctgctccacctgcaacagcaagctcaccctgaagaacaagtttgtggagttcgacatgaagcccgtgtgtaagaggtgctacgagaagttcccgctggagctgaagaagcggctgaagaagctgtcggagctgacctcccgcaaggcccagcccaaggccacagacctcaactctgcctgaaggccctcttgcgcagctgcctctcggcccctccgccttctcccctcctgctgtccatgcttggccccctcgtccccatccacctgtgccctccgcatcttaccctccctttctctttcctcattgccttctcccttcctgttccctcatctctgccttccccatgtctctcctctccttggccgtggcttctgtctgtgaggaggcaggagctggggagtgggagcctatgaccccacgtctgacagccatgtccacctgtgcccacagcttccgcccacagacctccagggacaggagcaaattgcaccacagctccccgcctggcctggccctccccaggcggctcagtggctcatgctgtcctgtgagagcccctgccccagagcggccccactaagcgcatgtggctcctgggctacccacagccagggcagcctgctggagccacagggccagggccatgcagatggaggcctctgggagccacctccaatccctcaccactcactcaaccagtggcacagtgtccttgtgcccacactgagccagcaagtcctgctgtccacacccacaagctacctggagggacaggacccacctccatccttcggaaggccttcctggaatcccaccttggcctccgccctcggttccgccccgcccctctccccccgaccttggggcttgtgtcgagcccttgggtggggccaggaggaggtgatggcgtcagaggaggtgtggtcagaggtgacttgttcccacctccagggaggacgcttcgtcttcggccagcgcagacctggtgtttgtttgttgggctcacgcttgcacaatgaaggcttgttcacac

SEQ ID NO: 11283 - DNA, 2335 bp, Homo sapiens
  source 1..2335: mol_type = unassigned DNA
ttttgcagtctgtccgtggatactgtgaacatcaggctactcggccgggctcctgcgctcagggcttcgagaaatgctcattttggggctgcccctctgccggcctctctggattcagagggcagccgctgctccttttgttttgtgggcctggctctgggcccggagcagcacctccctggggaggccgcctttccttccgcggcttcttccgtctcctcctgaccccaaggtgcctccggcctctgcctccagctaaggacctctggccaagcctcctgcccagggagaggtgaagctgccgtgcctgggtgccccgtggtggccggacactcctggcggctgctcagtcttgcacgtggctgtgccaagcgggccaggcagctgctatttccctcagagaagttgctggcggcgctcagggaaggaagcacccgaggaggcggagcggcatctcagccacagagcaatatgtcggacgccttggccaacgccgtgtgccagcgctgccaggcccgcttctcccccgccgagcgcattgtcaacagcaatggggagctgtaccatgagcactgcttcgtgtgtgcccagtgcttccggcccttccccgaggggctcttctatgagtttgaaggccggaagtactgcgaacacgacttccaaatgctgtttgctccgtgctgtggatcctgcggtgagttcatcattggccgcgtcatcaaggccatgaacaacaactggcacccgggctgcttccgctgcgagctgtgtgatgtggagctggctgacctgggctttgtgaagaatgccggcaggcatctctgccggccttgccacaaccgtgagaaggccaagggcctgggcaagtacatctgccagcggtgccacctggtcatcgacgagcagcccctcatgttcaggagcgacgcctaccaccctgaccacttcaactgcacccactgtgggaaggagctgacagccgaggcccgcgagctgaagggtgagctctactgcctgccctgccatgacaagatgggcgtccccatctgcggggcctgccgccggcccatcgagggccgagtggtcaacgcgctgggcaagcagtggcacgtggagcactttgtctgtgccaagtgtgagaagccattcctggggcaccggcactatgagaagaagggcctggcctactgcgagactcactacaaccagctcttcggggacgtctgctacaactgcagccatgtgattgaaggcgatgtggtgtcggccctcaacaaggcctggtgtgtgagctgcttctcctgctccacctgcaacagcaagctcaccctgaagaacaagtttgtggagttcgacatgaagcccgtgtgtaagaggtgctacgagaagttcccgctggagctgaagaagcggctgaagaagctgtcggagctgacctcccgcaaggcccagcccaaggccacagacctcaactctgcctgaaggccctcttgcgcagctgcctctcggcccctccgccttctcccctcctgctgtccatgcttggccccctcgtccccatccacctgtgccctccgcatcttaccctccctttctctttcctcattgccttctcccttcctgttccctcatctctgccttccccatgtctctcctctccttggccgtggcttctgtctgtgaggaggcaggagctggggagtgggagcctatgaccccacgtctgacagccatgtccacctgtgcccacagcttccgcccacagacctccagggacaggagcaaattgcaccacagctccccgcctggcctggccctccccaggcggctcagtggctcatgctgtcctgtgagagcccctgccccagagcggccccactaagcgcatgtggctcctgggctacccacagccagggcagcctgctggagccacagggccagggccatgcagatggaggcctctgggagccacctccaatccctcaccactcactcaaccagtggcacagtgtccttgtgcccacactgagccagcaagtcctgctgtccacacccacaagctacctggagggacaggacccacctccatccttcggaaggccttcctggaatcccaccttggcctccgccctcggttccgccccgcccctctccccccgaccttggggcttgtgtcgagcccttgggtggggccaggaggaggtgatggcgtcagaggaggtgtggtcagaggtgacttgttcccacctccagggaggacgcttcgtcttcggccagcgcagacctggtgtttgtttgttgggctcacgcttgcacaatgaaggcttgttcacac

SEQ ID NO: 11284 - DNA, 1695 bp, Homo sapiens
  source 1..1695: mol_type = unassigned DNA
aagatgcctgaagttctaacaccagagatggtttcctgctgcttccaggaacagggtctgttcttagtccaatgtggagttcctcatggggaccccattccccaggaatccaggttccacagtactctgacttggtctggctggtctcggctggcactttccctaggactgctaaaaccacggtgagggcggagagctgagggccgaagaaggcggggcatctctgccggccttgccacaaccgtgagaaggccaagggcctgggcaagtacatctgccagcggtgccacctggtcatcgacgagcagcccctcatgttcaggagcgacgcctaccaccctgaccacttcaactgcacccactgtgggaaggagctgacagccgaggcccgcgagctgaagggtgagctctactgcctgccctgccatgacaagatgggcgtccccatctgcggggcctgccgccggcccatcgagggccgagtggtcaacgcgctgggcaagcagtggcacgtggagcactttgtctgtgccaagtgtgagaagccattcctggggcaccggcactatgagaagaagggcctggcctactgcgagactcactacaaccagctcttcggggacgtctgctacaactgcagccatgtgattgaaggcgatgtggtgtcggccctcaacaaggcctggtgtgtgagctgcttctcctgctccacctgcaacagcaagctcaccctgaagaacaagtttgtggagttcgacatgaagcccgtgtgtaagaggtgctacgagaagttcccgctggagctgaagaagcggctgaagaagctgtcggagctgacctcccgcaaggcccagcccaaggccacagacctcaactctgcctgaaggccctcttgcgcagctgcctctcggcccctccgccttctcccctcctgctgtccatgcttggccccctcgtccccatccacctgtgccctccgcatcttaccctccctttctctttcctcattgccttctcccttcctgttccctcatctctgccttccccatgtctctcctctccttggccgtggcttctgtctgtgaggaggcaggagctggggagtgggagcctatgaccccacgtctgacagccatgtccacctgtgcccacagcttccgcccacagacctccagggacaggagcaaattgcaccacagctccccgcctggcctggccctccccaggcggctcagtggctcatgctgtcctgtgagagcccctgccccagagcggccccactaagcgcatgtggctcctgggctacccacagccagggcagcctgctggagccacagggccagggccatgcagatggaggcctctgggagccacctccaatccctcaccactcactcaaccagtggcacagtgtccttgtgcccacactgagccagcaagtcctgctgtccacacccacaagctacctggagggacaggacccacctccatccttcggaaggccttcctggaatcccaccttggcctccgccctcggttccgccccgcccctctccccccgaccttggggcttgtgtcgagcccttgggtggggccaggaggaggtgatggcgtcagaggaggtgtggtcagaggtgacttgttcccacctccagggaggacgcttcgtcttcggccagcgcagacctggtgttt

SEQ ID NO: 11285 - DNA, 1730 bp, Homo sapiens
  source 1..1730: mol_type = unassigned DNA
gcgctcggctggcggctgcagcagcagagggagacccgcggcaaccccggcaacccagggctcggcgtcgctgccaccatgacgggaaggaaaagaaagtggggagagacaggaacagggtccggagcagccccagcagcagcattgaggtggagcaatatgtcggacgccttggccaacgccgtgtgccagcgctgccaggcccgcttctcccccgccgagcgcattgtcaacagcaatggggagctgtaccatgagcactgcttcgtgtgtgcccagtgcttccggcccttccccgaggggctcttctatgagtttgaaggccggaagtactgcgaacacgacttccaaatgctgtttgctccgtgctgtggatcctgcggtgagttcatcattggccgcgtcatcaaggccatgaacaacaactggcacccgggctgcttccgctgcgagctgtgtgatgtggagctggctgacctgggctttgtgaagaatgccggcaggcatctctgccggccttgccacaaccgtgagaaggccaagggcctgggcaagtacatctgccagcggtgccacctggtcatcgacgagcagcccctcatgttcaggagcgacgcctaccaccctgaccacttcaactgcacccactgtgggaaggagctgacagccgaggcccgcgagctgaagggtgagctctactgcctgccctgccatgacaagatgggcgtccccatctgcggggcctgccgccggcccatcgagggccgagtggtcaacgcgctgggcaagcagtggcacgtggagcactttgtctgtgccaagtgtgagaagccattcctggggcaccggcactatgagaagaagggcctggcctactgcgagactcactacaaccagctcttcggggacgtctgctacaactgcagccatgtgattgaaggcgatgtggtgtcggccctcaacaaggcctggtgtgtgagctgcttctcctgctccacctgcaacagcaagctcaccctgaagaacaagtttgtggagttcgacatgaagcccgtgtgtaagaggtgctacgagaagttcccgctggagctgaagaagcggctgaagaagctgtcggagctgacctcccgcaaggcccagcccaaggccacagacctcaactctgcctgaaggccctcttgcgcagctgcctctcggcccctccgccttctcccctcctgctgtccatgcttggccccctcgtccccatccacctgtgccctccgcatcttaccctccctttctctttcctcattgccttctcccttcctgttccctcatctctgccttccccatgtctctcctctccttggccgtggcttctgtctgtgaggaggcaggagctggggagtgggagcctatgaccccacgtctgacagccatgtccacctgtgcccacagcttccgcccacagacctccagggacaggagcaaattgcaccacagctccccgcctggcctggccctccccaggcggctcagtggctcatgctgtcctgtgagagcccctgccccagagcggccccactaagcgcatgtggctcctgggctacccacagccagggcagcctgctggagccacagggccagggccatgcagatggaggcctctgggagccacctccaatccctcaccactcactcaaccagtggcacagtgtccttgtgcccacactgagccagcaagtcct

SEQ ID NO: 11286 - DNA, 930 bp, Homo sapiens
  source 1..930: mol_type = unassigned DNA
gcattctgaacttcagcacaaggcaaacgcagaaccagggcttggaatttcgccgctatgcagctgcacccctgccacccaggagatctgaggctcctcagagctgggaggaccgggcatctctgccggccttgccacaaccgtgagaaggccaagggcctgggcaagtacatctgccagcggtgccacctggtcatcgacgagcagcccctcatgttcaggagcgacgcctaccaccctgaccacttcaactgcacccactgtggcactttgtctgtgccaagtgtgagaagccattcctggggcaccggcactatgagaagaagggcctggcctactgcgagactcactacaaccagctcttcggggacgtctgctacaactgcagccatgtgattgaaggcgatgtggtgtcggccctcaacaaggcctggtgtgtgagctgcttctcctgctccacctgcaacagcaagctcaccctgaagaacaagtttgtggagttcgacatgaagcccgtgtgtaagaggtgctacgagaagttcccgctggagctgaagaagcggctgaagaagctgtcggagctgacctcccgcaaggcccagcccaaggccacagacctcaactctgcctgaaggccctcttgcgcagctgcctctcggcccctccgccttctcccctcctgctgtccatgcttggccccctcgtccccatccacctgtgccctccgcatcttaccctccctttctctttcctcattgccttctcccttcctgttccctcatctctgccttccccatgtctctcctctccttggccgtggcttctgtctgtgaggaggcaggagctggggagtgggagcctatgaccccacgtctgacagccatgtccacctgtgcccacagcttccgcccacagacctccagggacagg

SEQ ID NO: 11287 - DNA, 867 bp, Homo sapiens
  source 1..867: mol_type = unassigned DNA
gcattctgaacttcagcacaaggcaaacgcagaaccagggcttggaatttcgccgctatgcagctgcacccctgccacccaggagatctgaggctcctcagagctgggaggaccgggcatctctgccggccttgccacaaccgtgagaaggccaagggcctgggcaagtacatctgccagcggtgccacctggtcatcgacgagcagcccctcatgttcaggagcgacgcctaccaccctgaccacttcaactgcacccactgtgggaaggagctgacagccgaggcccgcgagctgaagggtgagctctactgcctgccctgccatgacaagatgggcgtccccatctgcggggcctgccgccggcccatcgagggccgagtggtcaacgcgctgggcaagcagtggcacgtggagcactttgtctgtgccaagtgtgagaagccattcctggggcaccggcactatgagaagaagggcctggcctactgcgagactcactacaaccagctcttcggggacgtctgctacaactgcagccatgtgattgaaggcgatgtggtgtcggccctcaacaaggcctggtgtgtgagctgcttctcctgctccacctgcaacagcaagctcaccctgaagaacaagtttgtggagttcgacatgaagcccgtgtgtaagaggtgctacgagaagttcccgctggagctgaagaagcggctgaagaagctgtcggagctgacctcccgcaaggcccagcccaaggccacagacctcaactctgcctgaaggccctcttgcgcagctgcctctcggcccctccgccttctcccctcctgctgtccatgcttggccccctcgtccccatccacc

SEQ ID NO: 11288 - DNA, 531 bp, Homo sapiens
  source 1..531: mol_type = unassigned DNA
ataggcctctgtggaggtggcaggtgggcatgtgtggcctcggggagggcctgtggtggcagcgccatggccaggtggtggcagtttcctttgcattagcgccactccatccctggcccgagccctctcccaggcatctggctcctctatgggtcaaggctgcctaatggttaggggcagcggtgctgtcattgcagcctggactgccggcaagccacttcccctctgcaagcccccatcagagggacgaaacaccgctttgtgggctgctgtgaattcagactgtggtcagccttcgatgcacaggcatctctgccggccttgccacaaccgtgagaaggccaagggcctgggcaagtacatctgccagcggtgccacctggtcatcgacgagcagcccctcatgttcaggagcgacgcctaccaccctgaccacttcaactgcacccactgtgggaaggagctgacagccgaggcccgcgagctgaagggtgagctctactgcctgccctgccatgacaagatgggcgt

SEQ ID NO: 11289 - DNA, 5505 bp, Homo sapiens
  source 1..5505: mol_type = unassigned DNA
aattgacaaagtcacgtgtgctcagggggccagaaactggagagaggagagaaaaaaatcaaaagaaggaaagcacattagaccatgcgagctaaatttgtgatcgcacaaaatcaagatgttagattgatgcagaagatcactccgttccaaagggaaagttttcatctcacgagtttggagctgagggcccgtggggcaacatggccgaaggcggggctagcaaaggtggtggagaagagcccgggaagctgccggagccggcagaggaggaatcccaggttttgcgcggaactggccactgtaagtggttcaatgtgcgcatgggatttggattcatctccatgataaaccgagagggaagccccttggatattccagtcgatgtatttgtacaccaaagcaaactattcatggaaggatttagaagcctaaaagaaggagaaccagtggaattcacatttaaaaaatcttccaaaggccttgagtcaatacgggtaacaggacctggtgggagcccctgtttaggaagtgaaagaagacccaaagggaagacactacagaaaagaaaaccaaagggagatagatgctacaactgtggtggccttgatcatcatgctaaggaatgtagtctacctcctcagccaaagaagtgccattactgtcagagcatcatgcacatggtggcaaactgcccacataaaaatgttgcacagccacccgcgagttctcagggaagacaggaagcagaatcccagccatgcacttcaactctccctcgagaagtgggaggcgggcatggctgtacatcaccaccgtttcctcaggaggctagggcagagatctcagaacggtcaggcaggtcacctcaagaagcttcctccacgaagtcatctatagcaccagaagagcaaagcaaaaaggggccttcagttcaaaaaaggaaaaagacataacaggtcttcttcatatgttctttcctttacccggttgcaaagtctacctcatgcaagtataggggaacagtatttcacaagcagtagctgacctgggattttaactactattggggaactgtgaattttttaaacagacaaatcactctaagcaaattacatttgagcagggtgtcatgttttatgttaattcagagaataagatactatgtctgtcaatatgtgcatgtgtgagagggagagagcctgagtctgtgtgtgtacatgaggatttttatataggaatgtagacacatatataaagaggctttgtctttatatatttgtgtatagatcaaagcacacaccctctctcatataattggatatttccaagaattgaaaacccatgtgaagcattatagatagttttaaatttaacccactggagttttcttgaaataccacttcttttatattatataaaactaaaaacacgactgttaccttttgtgtgaaccaaaggatacttcagatctcagagctgccaattatggggtactaaaggtttttaagacatccagttctcccgaatttgggattgcctctttttcttgaaatctctggagtagtaatttttttcccccttttttgaaggcagtaccttaacttcatatgcctctgactgccataagcttttttgattctgggataacataactccagaaaagacaatgaatgtgtaatttgggccgatatttcactgttttaaattctgtgtttaattgtaaaattagatgcctattaagagaaatgaaggggaggatcatcttagtggcttgttttcagtagtattttaatatcagcttcttgtaaccttttccatgttgtgagggttgtaagggattgtgtggcaacagcagcttcccttggctaactcaatcttctacccattgcttagagcagggagccctccttatttactactgaagaccttagagaactccaattgtttggcatatatttttggtggtggtttttattcctcctggagagttatctaatttgtttctaaaacaaacaagcagcaaagaaatgaattaaatactggggttgagaattaaaattaagtggatgttcacagttgcccaatatatatgacctgcaaatgatacgaaaaagtgcagcatttagtggcagttaacaagagtgacaagcctggggcagaggtaccaaacctctcccaccagagagctagaagtattttatacagtaactttgatcttatggaagtgaccttcaatgcttattctgaagtaacctatatggtggatacaggatgaacattcagtgccagggagaatcttctcaggttggttctcgttagagtgataaactggctaggggccatagtattggtcctgttaggtttcggtcatggaaaaaaaaattattttggggtcatcctggctctagatgttatgggcaaatttctgaaacatctgcaagaaggtaccagttaattatagtgcttaatattgggaataagattaagcattataattataatgtatgggcctgttggtgtaagctcagataattaaataaaaatagcatgactcaaatgagacatattctgctgaacagtttctacttcctctcccgcctgtcctgtcatgggagacgtgtatagttgctgctgtttcagcaaaccaccataagacgaaaatgcctcaggttgggttgccagtcctttacaactcagcttgaatttcacaacagtgattgtgagaatctgcgtggtatacactgaaatatcggtgtgctgtgatgcaaagcttacctttgacgatattgaatgtgatatagctgtagagaagtacttccttgccttatgtgaggatttcaaacttatttaaattatgtagacaaatcaaagtggcattgcttaatttttagcaggcataataagcaagttaacagtaaaatgcaaaacatgataagcgttgctcaatttttagcaggtataataagcaggttaacagtaaaaatgcaaaacatgatagataagtcactttgaaaattcaaaccaaagttccttcaccttatggaaataggaaattatggacttcaaaattggacacttcctgtttacaaaaagaaattcagagctaaaatcatggtaaaaaaaaatagaaacacttgagaactatggtctttatgggtgcaatttgaaatccttttcatcatcttaccagactaaactaagagcacataccaaacctatcttatggttgaaagttggggtttattttttatatgagaatattatcactattacataacatactcaggacaaagaactttgctcagggaacataccatgtaatatttttgttgtttctttacagactagtctacagtcctgcttactcaaaacaaaccaaataacttatacctttatataagtattatgtactgatgatagtaactacctctgagtttgacacagatcaaaatttttgaatatcagatatcagttatcctatttttatttcatgtgaaaactcctctaaagcagattccctcaactctgtgcatatgtgaatatcactgatgtgaacacattgttcatttacataggtaaaatattactctgtttacagcaaaaggctacctcatagttgatacatagcacacctgtatgtatgctgttccagccttacaggtggctgataattctctggtacagaacctttttatctgtattataaatagcaattcacaactgcatgtttctgacaaacacttgtgaataatgaagcatctcgttttagttagcaaagtctccaaacatttccttaaaataatcatgtatttagtttaaagaattatgggcactgttcaacttaagcaaaacagaacacggaagcagtcttagaagcaccactttgcccagaggtggaggttggaaggggtagcagggagaggggttggtgtatgcaggtattcatgctaggcaaagagtttaaaagacgccaatgtccttcatttactgtctgtgctgccctgaagccaagcgtattgcagcattatagccccaggcacataactaactagcactggcttgccaaggaatgaacatgcaatgccattactagctattgagggaaaagggtctgtgtgaagcatcactttgcagggattactaatggtggggcagcaggtctgtgaattaagttatctcttgacctcaccctcatgtcaacacaaatgtaattcctaaacaagatgcattgccagtctcttagccctgtaagctgatcttttgctacatggcagactataatgaaaacatttttatacttgggtttctagtcttcactagaaggccttggatgtatttttgcagttgaaagatttagaaagatttttacctgcttataacttggaagtttagagtgcaatgtaagaaaaaagatcaagaaatgtcatgttattagcatcagtccacctccaatattgccgatactttttttattctggctcagttttattttgcaccagtgcggccccaagttactgctggttgtatttagtttgtgaataggagcccataagtgttaatagactttgtaacattcactataagatgaattatacaggacatgggaaatctcattaagtcttaaagttaatttaaattaatttatctgttttctctaagaaatgtttatcataaaatatatatgtgtatttcccctttggttataaaatttgggaaagtatgtacaagtgcagctgcactgactttaattttctagatgtcttaatgagatttatttgttttagagaagaacatcttgttaaaagcatcaaactctgtcttacatagctgtcaacagcctctttaagatgtggtggttgtatgatctgtgtcttaattgttcagttagagtgagaagttgacctatgattcatttttaaattttatatttggaacaaagctgcaagttatggtaaagtactgtactgtgagaagtattatgatatttaatgcatctgtggcttaacacttgtgagagttaccagcttgaaaatgatggtgttgactacctcttgaatcacatctatcaaccactggcacctaccaccaagctggcttcaattagtatgtgttgctttttggtattaacaactaaccgtactagagaccaaagtgaaccctgatttttatatgtctttaataatggtgttttatctagtgtttttaaattatcctgtgtagtatttagattacctcattgtccattttgactcatgttgtttacaagtgaaaataaaaacacttgaactgtatgtttttaaaagacaaaaaaggggtagatgtttggaatgcgtttcactcgcatgcagtcatctggagggactgaagcactgtttgcctttctgtacactctgggttttatattctcatttcatgcctaatgtcttattctgtcaattatggatatgttgaggtttaaaaaaattacttgattaaaaataaaacatataacgttggcattta

SEQ ID NO: 11290 - DNA, 2635 bp, Homo sapiens
  source 1..2635: mol_type = unassigned DNA
gtctctcgacctccgcgctccctcaggaagtgacagactccaggccccttcctccgccccgtccttcgggactgaacgccacacacgtcctcacaccctctccccctctcacacccaggctagcgacgcgaccatgaggccccggaggttcttcagaagaggatgaggtcattcaaccaggtttcatcagccccaggcggggctagcaaaggtggtggagaagagcccgggaagctgccggagccggcagaggaggaatcccaggttttgcgcggaactggccactgtaagtggttcaatgtgcgcatgggatttggattcatctccatgataaaccgagagggaagccccttggatattccagtcgatgtatttgtacaccaaagcaaactattcatggaaggatttagaagcctaaaagaaggagaaccagtggaattcacatttaaaaaatcttccaaaggccttgagtcaatacgggtaacaggacctggtgggagcccctgtttaggaagtgaaagaagacccaaagggaagacactacagaaaagaaaaccaaagggagatagatgctacaactgtggtggccttgatcatcatgctaaggaatgtagtctacctcctcagccaaagaagtgccattactgtcagagcatcatgcacatggtggcaaactgcccacataaaaatgttgcacagccacccgcgagttctcagggaagacaggaagcagaatcccagccatgcacttcaactctccctcgagaagtgggaggcgggcatggctgtacatcaccaccgtttcctcaggaggctagggcagagatctcagaacggtcaggcaggtcacctcaagaagcttcctccacgaagtcatctatagcaccagaagagcaaagcaaaaaggggccttcagttcaaaaaaggaaaaagacataacaggtcttcttcatatgttctttcctttacccggttgcaaagtctacctcatgcaagtataggggaacagtatttcacaagcagtagctgacctgggattttaactactattggggaactgtgaattttttaaacagacaaatcactctaagcaaattacatttgagcagggtgtcatgttttatgttaattcagagaataagatactatgtctgtcaatatgtgcatgtgtgagagggagagagcctgagtctgtgtgtgtacatgaggatttttatataggaatgtagacacatatataaagaggctttgtctttatatatttgtgtatagatcaaagcacacaccctctctcatataattggatatttccaagaattgaaaacccatgtgaagcattatagatagttttaaatttaacccactggagttttcttgaaataccacttcttttatattatataaaactaaaaacacgactgttaccttttgtgtgaaccaaaggatacttcagatctcagagctgccaattatggggtactaaaggtttttaagacatccagttctcccgaatttgggattgcctctttttcttgaaatctctggagtagtaatttttttcccccttttttgaaggcagtaccttaacttcatatgcctctgactgccataagcttttttgattctgggataacataactccagaaaagacaatgaatgtgtaatttgggccgatatttcactgttttaaattctgtgtttaattgtaaaattagatgcctattaagagaaatgaaggggaggatcatcttagtggcttgttttcagtagtattttaatatcagcttcttgtaaccttttccatgttgtgagggttgtaagggattgtgtggcaacagcagcttcccttggctaactcaatcttctacccattgcttagagcagggagccctccttatttactactgaagaccttagagaactccaattgtttggcatatatttttggtggtggtttttattcctcctggagagttatctaatttgtttctaaaacaaacaagcagcaaagaaatgaattaaatactggggttgagaattaaaattaagtggatgttcacagttgcccaatatatatgacctgcaaatgatacgaaaaagtgcagcatttagtggcagttaacaagagtgacaagcctggggcagaggtaccaaacctctcccaccagagagctagaagtattttatacagtaactttgatcttatggaagtgaccttcaatgcttattctgaagtaacctatatggtggatacaggatgaacattcagtgccagggagaatcttctcaggttggttctcgttagagtgataaactggctaggggccatagtattggtcctgttaggtttcggtcatggaaaaaaaaattattttggggtcatcctggctctagatgttatgggcaaatttctgaaacatctgcaagaaggtaccagttaattatagtgcttaatattgggaataagattaagcattataattataatgtatgggcctgttggtgtaagctcagataattaaataaaaatagcatgactcaaatgagacatattctgctgaacagtttctacttcctctcccgcctgtcctgtcatgggagacgtgtatagttgctgctgtttcagcaaaccacc

SEQ ID NO: 11291 - DNA, 912 bp, Homo sapiens
  source 1..912: mol_type = unassigned DNA
acagtccagaatcgacccggaagccttcagatctgacaggatcgcactgttgcccagggtggagtgcagtggcgcaatcttggctcactgcaacctccgcccccctgctggagagatcctcccacctcagcctccccaatagctgggaccactggcgcgcagaccacgcccagcgaattttttgtagagagccaggtcgccattttccacaggctggtgttgaactcctgggctcaagcgattcgccacgtcaacctctgaagaaggtgctgggattacaagcatgagccaccgccgccaggttcttcagaagaggatgaggtcattcaaccaggtttcatcagccccaggcggggctagcaaaggtggtggagaagagcccgggaagctgccggagccggcagaggaggaatcccaggttttgcgcggaactggccactgtaagtggttcaatgtgcgcatgggatttggattcatctccatgataaaccgagagggaagccccttggatattccagtcgatgtatttgtacaccaaagcaaactattcatggaaggatttagaagcctaaaagaaggagaaccagtggaattcacatttaaaaaatcttccaaaggccttgagtcaatacgggtaacaggacctggtgggagcccctgtttaggaagtgaaagaagacccaaagggaagacactacagaaaagaaaaccaaagggagatagatgctacaactgtggtggccttgatcatcatgctaaggaatgtagtctacctcctcagccaaagaagtgccattactgtcagagcatcatgcacatggtggcaaactgcccacataaaaatgttgcacagccacccgcgagttctcagggaagacaggaagcagaatcccagccatgcacttcaactct

SEQ ID NO: 11292 - DNA, 6112 bp, Homo sapiens
  source 1..6112: mol_type = unassigned DNA
cggatacctgctcagctccgcaccgcaactgaagatctgccgccgcggaacagttgcgtctccatctggctaccaacccacccaagctttcttctccaccaccaccaccttccttccttccccctcctccccctcctttccgtcttccctctccacccccgcccccaatctcctcctttttttctcactacgagcggttgctgatgctgaagccgagcgtcacttcggctcccacggcagacatggcgacattgacagtggtccagccgctcaccctggacagagatgttgcaagagcaattgaattactggaaaaactacaggaatctggagaagtaccagtgcacaagctacaatccctcaaaaaagtgcttcagagtgagttttgtacagctattcgagaggtgtatcaatatatgcatgaaacgataactgttaatggctgtcccgaattccgtgcgagggcaacagcaaaggcaacagttgcagcttttgcagctagtgaaggccactcccaccctcgagtagttgaactgccaaagactgatgaaggccttggttttaatgtgatgggaggaaaggagcaaaattcccccatttatatctctcgcataattcctggaggggtggctgaaagacacggaggcctcaaaagaggagaccagctgctatcagtgaacggagtgagtgtggaaggagaacaccatgagaaagctgtggaactactcaaggctgctaaagacagcgtcaagctggtggtgcgatacaccccaaaagttctggaagaaatggaggctcgctttgaaaagctacgaacagccaggcgtcggcagcagcagcaattgctaattcagcagcagcaacagcagcagcagcaacaaacacaacaaaaccacatgtcataggcccttgagggaaagctacttgatcaaacatccgatagtcacaaatttgaaaccgtgcttcagaatcccagcacatagtaaaagacaacactgataattatacctgtcaagaagctgtgaacacatggtgtataaattctttaccaaggcaactcaacaccttctttctctgggcttgaaccgccactgctcacgtgggctttacatacattgaccttccattcactgcagtgggaattctcagtgtgcagagggagaggttttctagtctgcaaactgaaacagtgtaagaagaataaagtctatgacttttaaataaatcaccagggccaagattgagtgaatcttgggtccatagcttttccagatattagcaaacccctcattaggctataattcaaactgcatcagttcaaagtgaaacctacacattgctccttaccctcacctgctccacaatccatagtgctgagttgtctgaattggaattccagttaattgcaagttcaacctgttttcctcttgaaaatcgcaaggtatcatactatatttatattttcttcaggttctagaagcaatcggctttttcttttgtttccatgaattttattatgcattaatagaatggaccaattttagctcaacttttagtttgttagaagcaagtgtaggaactctagcactgtagtttttaattattgcttgtatctattattattaattccaacagagtataatgtatatttattctataaaatatatattatcagagtgcatttgttacaacttaggttcttttcttaccaagtattaagaatctagtaagagaatactagcaaaggacctagccctgtgaacagattctcgtatgttatatacataaacccactctcaatattttttgagttttatactttttgattgataaacactgaagaaatctaaactctactcacactgatgtgctgtcatagaagcctatttcatattttaaagcttagcaaaactaaattatatgtgcatatatattcaaatatttgtgtcacacaaagtttaggtcaatttccccaaatataaaccagatatttttggcactctcagataaacaagtattatttctcttataattgggcaggtggaaaccagtgatatcaatattgtgaatggcagatgctgcttcctctagaaaaataaaataaaatcaccaactttaatatattcccataggtaaatagacaatgagatatcatttttcagaaaatatcattcactggaaaataatctgttataactacatttacaggtcataatttttggtttatggtaaatctaggcacctaagtctgattttactttatgaaataaataggaagcaataattgtttgggcatttgaataccttaagcacataaatgaacctaagaaaagaataattgcttagttgaagtattcaaaatagatcagtaaaccacaggcaaatatttgaatgttcccttttctcaaatacagaaattgattccccaagatacaatacaatttgacacttcagataatcccccaaaatagaaatgtatgaagctcagtttagactgtcttcttgaaaataaaacaaaaccaatcaaaactacccagcacattttattatgccctgttgggtgatagtattgtcaataccaggttttccctgctcttcacaatgcatccctcaccagaggaaaaacagcaagaaaactaggacatttgctaatttcaacaatacacccctgtgataacagattcccatccttgaatacatatcattttttactagagagaacgggggtggtgaggtgggggcagttaggaccctgtatgttatgtaaaatagatttacaaaaaggacaagcatgataaaagggaatgaatggagacgatgtattattcagtttgaaagagatagttcacatttttataagaaaaatttaataaaacatatattttagttatcatttaacaaagatatattaaagctattcaggcaatgccacaggattctcatgaagggaaatcactgaacccttgtcatgagaaaatggtcatttcaacacatttcaatacattgtataaatttggagcttaaggtgagtgagtatgttttcacttagtcataaatgtttggtcaaaattaaagttatcatatggtttcacatcaatacaaatattgtcacagtgttacagaaacaactatcaaatggtaagatagtttacatttgtgttttctagaaacctttgtatttatgcttcatttggttaatgttaagtgctgataaaggcataccagattgtttgtcaaagtaaagaagcaatccatcacacctaggacatctaaggatggattatacgtcagagtggtctcatatacaaatgaccattttccttcagtaaaatcttgttggttgaaatgtaagtcttttcctaaagttttaatcagaggtagccatcactaagacttaagccacctgtggttctcttaagtttcactgaagccagaagaaggaaattaccacaacttgtattatactaattatcttcattattaacgatcatattagagccactgacatgtcccaaattatattaaaataaaaacctgcattgctctgacatgaagctcaattcaatgtaataaacaaattaggtattaaacgttataatttaaaaaacttctacgatatcaccagaaatcctggtgaaatttaattttttcccttttttaggtcagtggccggtgggatagatttttctaaactttttcctgctatgattttgaaggcaaatacatagagcacagttcagtaaaagagtttccaagccttttcactggagcatttacattttgattctgttgtcatttgaaatagaacatctgcagggagataatgagcttaagttacaattgactttggaaagaataacagacttttgtgtttcctcaatcatgtagtcaatagggaattctccagttatgtgaacaatcacagtcttttaagacaatacttagatctaaatgcaaaatctagcatgcagaggctttttaaggattttagactgtctccaaagaacttggctcgagatggattacacagatttacaaatgcagttttcaactgtgacatcaaactgatcttatctcatttcatgttactcaactgtgcccgtaggaccccaagaggtggaatattttgtctacattattttaaacatctatagatatgtgtggatgtgtgaataatgcctaaatttctcatcttttaactagtttgtttttatcatacagacacagcctgttcataagaccagctttagacaacttagaactcaatgctctgaagattcagggaggccaacatagaaaaagatcttccaaaatatggggtggtccaacccatctcatccctctctagctggaaaactatagagaaagggctgtgactgccttgaccactgcctggcacaatgtaggcactcggtatttgttggatgaataagtggctgaatcagtgaatagacaaaaaacatggattttgccttctgaaaatctcacaaattttaccagcttatattatactgattgtcactatgatttctaagtttcatggttagaaccatattttgagtctatataaaaactttttagatgtatgaatttgaaatttcattaattactttaaaggcttcaaagatttgaggacatttgaacagtggataaggaacaatgtttggggatacagagtttttatgctgagttgaactcaacctttctagttctttatacaagcttcctgaattatctggcaggaatgattcaaacataaaaccccatttttaaattttataaaagatattttcatttttatataaaaagatcatcaggcatattatcccctttgatatttattaacaaccattctctaagaaattcataataattggagacaccatccctaaatctcttcctattttcaaaagatcatttatcctttcatatttgattcctggaatacactaagctgaagtttaatcacatacttactcagatgtttccatgtgtttattcatttaacaaatacttattgtgtacctagtgcatgctaggttctggaaatgcaacagcaaacaagacagacacaatccctcttggaggttactgtgagaaactctccaacatttactctagcaataactagagagtttactgtccattgggtcctcttcacacctgatagaaaaaataaaattcctcaccccatggaagtcatgaaatactccctgcacagatttgtgtgagcttgcttttctaaaaccactgctcaaaaatgctgcttagtttatctataaaccacggttataccccagtgaggtaggtaagtaatttattcataactaacatttatgcagctctattttctagccactgtgctgagtgcttttatggactatctcaccaaatcccttcaacaactctattcagtaggttccattttatagatacaaaaactgaagcacagatatattatgtgacttgtccaaggtcacacagctagcaggtggaactgggatttgaacccatgcaatctgacacaagagttcatgtgtctaatcattatctgtggtttgggggacaccattacattaaaatgaatgagtcactaagtgagtcactgtatataaaatacttggaaattgtaaagtaatatacaaaagatattaacaaagtattattcatggtaaacaaatcacatcagtagcaaacacagggtgggaactcaatcttatgttatagcttactcttaagaagaatatgtgaagccaggaacatggttaaaggtacagaccagaaaatttctgacatgtgataaatatttcagtgacttttcagatttatttcttgttagccgctgtgtctatttggtgctacaaaaactgaaagaaacaaaatccctgatgtaagggcttataataaatacacagtttggagatgaactaaggatattttacatttacgggaaaggattggacaatagtatcattttctcaccatttgcatgtacatcatgtctttccaattgttttcattatttttctgaaagagctgcaaaattgtgcagtggttcaacctgaccaaagtggtattatgctgctgggaagtaaaagtattagacaccaaa

SEQ ID NO: 11293 - DNA, 989 bp, Homo sapiens
  source 1..989: mol_type = unassigned DNA
tccctctccacccccgcccccaatctcctcctttttttctcactacgagcggttgctgatgctgaagccgagcgtcacttcggctcccacggcagacatggcgacattgacagtggtccagccgctcaccctggacagagatgttgcaagagcaattgaattactggaaaaactacaggaatctggagaagtaccagtgcacaagctacaatccctcaaaaaagtgcttcagagtgagttttgtacagctattcgagaggtgtatcaatatatgcatgaaacgataactgttaatggctgtcccgaattccgtgcgagggcaacagcaaaggtattctcgtgtgtacactgtaagagaatttagacatcagtggcagcccagagtctagaaccagtactacttctcaggcaacagttgcagcttttgcagctagtgaaggccactcccaccctcgagtagttgaactgccaaagactgatgaaggccttggttttaatgtgatgggaggaaaggagcaaaattcccccatttatatctctcgcataattcctggaggggtggctgaaagacacggaggcctcaaaagaggagaccagctgctatcagtgaacggagtgagtgtggaaggagaacaccatgagaaagctgtggaactactcaaggctgctaaagacagcgtcaagctggtggtgcgatacaccccaaaagttctggaagaaatggaggctcgctttgaaaagctacgaacagccaggcgtcggcagcagcagcaattgctaattcagcagcagcaacagcagcagcagcaacaaacacaacaaaaccacatgtcataggcccttgagggaaagctacttgatcaaacatccgatagtcacaaatttgaaaccgtgcttcagaatcccagcacatagtaaaagacaacactgataattatacctgtcaagaagctgtgaacacatggtgtataaattctttaccaaggcaa

SEQ ID NO: 11294 - DNA, 905 bp, Homo sapiens
  source 1..905: mol_type = unassigned DNA
acttcggctcccacggcagacatggcgacattgacagtggtccagccgctcaccctggacagagatgttgcaagagcaattgaattactggaaaaactacaggaatctggagaagtaccagtgcacaagctacaatccctcaaaaaagtgcttcagagtgagttttgtacagctattcgagaggtgtatcaatatatgcatgaaacgataactgttaatggctgtcccgaattccgtgcgagggcaacagcaaaggcaacagttgcagcttttgcagctagtgaaggccactcccaccctcgagtagttgaactgccaaagactgatgaaggccttggttttaatgtgatgggaggaaaggagcaaaattcccccatttatatctctcgcataattcctggaggggtggctgaaagacacggaggcctcaaaagaggagaccagctgctatcagtgaacggagtgcttctaagaagtcaaaaacagatggaaactcatgtcagctcagcaatcattgggagagaaaattttttctatccctaggcaccaagagaaatttcccatgggaatgttacaaatgagacattgaaccacctaatacaattccatagaaaatacagaggcctttggtgtatggctacttcttatatcaatcctcagtgaaaccttacaactgaatgctgaattaaaatttaacattaataggaggtcaaaatgttacagtaagaatttatagctttctaatgatctccttttcacccttttatgctcaagtgttttctccgcaattttaagagagaactcaaggactatttataagggttgcagccaatgtggagccagcggcaaccgtaaatatatttagtgatagagtcaggatataaaaagtctcaatagaatggtac

SEQ ID NO: 11295 - DNA, 546 bp, Homo sapiens
  source 1..546: mol_type = unassigned DNA
tactggaaaaactacaggaatctggagaagtaccagtgcacaagctacaatccctcaaaaaagtgcttcagagtgagttttgtacagctattcgagaggtgtatcaatatatgcatgaaacgataactgttaatggctgtcccgaattccgtgcgagggcaacagcaaaggcaacagttgcagcttttgcagctagtgaaggccactcccaccctcgagtagttgaactgccaaagactgatgaaggccttggttttaatgtgatgggaggaaaggagcaaaattcccccatttatatctctcgcataattcctggaggggtggctgaaagacacggaggcctcaaaagaggagaccagctgctatcagtgaacggagtggtatgtttataaaataaccagagattttctccttaagcacattctttttttttgccccctgctattactgaagtcaacgttgaaaacctagaataaatattcattttatgtctaaccagctttctaagcattgatggatattaaacctataaaagctgcaatctaa

SEQ ID NO: 11296 - DNA, 462 bp, Homo sapiens
  source 1..462: mol_type = unassigned DNA
atgaggaaacccaggcctggagaggtcaagcaacttgctcaagtggcacagctggagagtggggagctgggacttgagcccaggtagtgtgtccccagcaccttcaactaaactccattctgtgctgccctttggaacacccactcaatggccttcacactccatgtcctacttgggaggacatgtgatctcaacagcactcacaaatgaaggctttccagacaggatattgaagatgggaggtgtgagctgtgggagagagctgactaagaagaagaaactccccagaaaggtggcctgccagtcttcacgatgtatgggagcaggtgggaaaagagctgcaagtgtttgcacttcatcattgaaattgttgaaactgctgatcaggaaacacagaatgagtttaaccagcgatgccaacttctgcaagatggactccagcttgggagctctgtatggaat

SEQ ID NO: 11297 - DNA, 587 bp, Homo sapiens
  source 1..587: mol_type = unassigned DNA
aatctgctgagctggtggccacctaaatacaatcgtcctgttcccctcattggtctctccggtctcctgattccagccacattttggtgagccagccaggagtgaagacgacaggtttgctgtctcctttgcctgtgggtctggggccccagcctgggggagacccgtgactccaggcatgctatcaggacaacttcaacccgaggggagatcagctctcccgcaacctggtgccgctctctgacagcacaacagaacctaaggggctacaggatgattcaaggaacagtgtgctacaggacctcgcaagaagaccctcaccagatgcagcccctctatgttggacttcccagcctccggaagttagaaatgtgctacaaccactcaaggtctgcaaacagattcctatttagatgttgttgagaggtaagtacaactagttctcattaatatttcatgtcctatgtgccatacttacactgccattttgtagtcatttgtcctacagctaaagattaatttataatcagatacgtgaaatctgatatgtgcattaagcttgattatacctgactgtgtcttcacga

SEQ ID NO: 11298 - DNA, 528 bp, Homo sapiens
  source 1..528: mol_type = unassigned DNA
gtgagccagccaggagtgaagacgacaggtttgctgtctcctttgcctgtgggtctggggccccagcctgggggagacccgtgactccaggcatgctatcaggacaacttcaacccgaggggagatcagctctcccgcaacctggtgccgctctctgacagcacaacagaacctaaggggctacaggatgattcaaggaacagtgtgctacaggacctcgcaagaagaccctcaccagatgcagcccctctatgttggacttcccagcctccggaagttagaaatgtgctacaaccactcaaggtctgcaaacagattcctatttagatgttgttgagagctgaatttctggaacaagagatatagattaagactgttgttacatgttgcctacatgactttcaaaagcttgattcccagtggcgctctcaacagcagtcataaacaatggtaattcaatgtatatttatattcaactgatatattaattggaatatattaaaaatacgtatatttatattcagaata

SEQ ID NO: 11299 - DNA, 394 bp, Homo sapiens
  source 1..394: mol_type = unassigned DNA
tacaagaaatgcaatcagggggagcagaatgacgcagaggagtctggaagctcaggattgcattaagcgactttcccatactgtgaggagatgtggtggggaccattaactgttggaaggattccttttaaggatgcattatatcaagagctagatatcagagccacttgggagaaataagaaacaggtgtagaaacagtcgcagattggcatgagctgtggagaaagagtctggattctgggttgctgtgtcacacacagcccacttgcaggatgacagtggaagaatgagtcatgatctctgcaagcgcccatcaagaacagcctgagaggtctggaaagtgctcaccccaggacccttcatgtccttattaaaattgtatggcagaaaaaa

SEQ ID NO: 11300 - DNA, 413 bp, Homo sapiens
  source 1..413: mol_type = unassigned DNA
cattatatcaagagctagatatcagagccacttgggagaaataagaaacaggtgtagaaacaggattggtagacaacatgttcatgcaaatgatatgaagaagattggcacctggaaaatcaaggaagaggtggggccgtgtaggcagagacttaattttctcaagtgaatgaagaaaaaagcacatggtgaggctgattctgtggggatgtatttgagctagaagattcaggagggaaaattagttctaagacaaagatggagacatcaataagattgggaaatactcagacgtcagaagaatttgggtttgaatcagaattcctttacatactttctaagtttcaagttaagcagcaattcagtgtttcaaaccttacgattgataaacaaaaaataaaatgaaattcacc

SEQ ID NO: 11301 - DNA, 567 bp, Homo sapiens
  source 1..567: mol_type = unassigned DNA
atataactggaactctgggaatgtaacgggcatggtgtgcttgtctgatggacagggcagcttaggggaataagtctctgcagcgttgtagtgaagagagaatacgggacaactgcaggaccacagctcagccaagacacaaccacatgactgaagacagagatcatctgggtcagtgtttcagaaaatgttgccaagaaacttcaaatgcagattcctggacctccgtgcaaactactatattagaagtgagagtgggggtgagatggaggagaggtgatattgagaacctgcattttttaaaacttttattttagtttcaggggtacatgtgaaggtttgttatataggtaagctcatgtcacgtgggtttgttttacagattacttcatcacccatatattaagcctagtaccgaatagttcctttttctgctcctctccctccttcaaccctccatgctcaaacagaccccagtgtctgttgttccctttatgttcatgagttctcatcatttatctctcacttataagtgagaacatgtagtatttggttttctgttcctct

SEQ ID NO: 11302 - DNA, 540 bp, Homo sapiens
  source 1..540: mol_type = unassigned DNA
tataactggaactctgggaatgtaacgggcatggtgtgcttgtctgatggacagggcagcttaggggaataagtctctgcagcgttgtagtgaagagagaatacgggacaactgcaggaccacagctcagccaagatgagctcaagtgttgcaagtatctgcttaaaatgccatgtgatgctaatcatctctgcacgagcagttcatctcatctctccagtaaattgcttatcacagtaaaagtaggacctcctgcttcagactctaagcttccggagaacaggaactgcatcttttctatttcacatacccaactcctcacacaatgcatgatgcaagtgggaatctacataaaatatctgatggataaatggagtagcactgatgcatatgagacccagtgttaaccagaggaagcaatcaactccaagatcaactgccaagataaaaaccaggaccaaggaaagcttctgagataaaatgatttttaagattaacgtagtggatatttccaattgttttttttatacccttcatctg

SEQ ID NO: 11303 - DNA, 579 bp, Homo sapiens
  source 1..579: mol_type = unassigned DNA
atggtgtgcttgtctgatggacagggcagcttaggggaataagtctctgcagcgttgtagtgaagagagaatacgggacaactgcaggaccacagctcagccaagacacaaccacatgactgaagacagagatcatctgggtcagtgtttcagaaaatgttgccaagaaacttcaaatgcagattcctggacctccgtgcaaactactatattagaagctcccttgcagctgagttggccatatgactgacagcaagccctggaatgcagccagaagtgatagaagcctctttcacaccatgctcctaaaatattccaagaaattttccaaacctactctttttagtctgtgcatctggaagtgaaagttttagaaagggtaaagtcacttaatggaaagggcccagatctagcccctcggagccaagctgtccaactagaaattctgcattagtatttgcgaccccagtaaaaaaaaaaaagtcccacaaagatgtaggatctcactttgcctgcgttaattccctgtcctttgcccagtttctcctctcttggaaggcagaggcagcttctgatttt

SEQ ID NO: 11304 - DNA, 587 bp, Homo sapiens
  source 1..587: mol_type = unassigned DNA
atggtgtgcttgtctgatggacagggcagcttaggggaataagtctctgcagcgttgtagtgaagagagaatacgggacaactgcaggaccacagctcagccaagagctcccttgcagctgagttggccatatgactgacagcaagccctggaatgcagccagaagtgatagaagcctctttcacaccatgctcctaaaatattccaagaaattttccaaacctactctttttagtctgtgcatctggaagtgaaagttttagaaagggtaaagtcacttaatggaaagggcccagatctagcccctcggagccaagctgtccaactagaaattctgcattagtatttgcgaccccagtaaaaaaaaaaaagtcccacaaagatgtaggatctcactttgcctgcgttaattccctgtcctttgcccagtttctcctctcttggaaggcagaggcagcttctgattttgatcacttcatgtccagtaggacctcctgcttcagactctaagcttccggagaacaggaactgcatcttttctatttcacatacccaactcctcacacaatgcatgatgcaagtgggaa

SEQ ID NO: 11305 - DNA, 477 bp, Homo sapiens
  source 1..477: mol_type = unassigned DNA
agagacaaaggaaacacagagacatagacatggatctgggaaatacaccttttgctactcgttcagttttagcaaggaggtttcttgcatggctaagcaaaacttaaacttcctctgagaattacaggaattacaggacctgacaaagctatgaagattaaaacctataggaagaaaatctgaaccagaaacagtatggcagaattgggatctgactcacagagggaagaacttataattcttcacaggtcacatagaagcatgagaatttgggttcaagcaagtaaattctaaatcagaatccatacataaagtgtttgcaatgtccagttatatctccatgatattttctttgtggaagttgattgttcttccttacaataaattgcttgaattgtctgtctattcatttagctatttcttttcttgtctttgcgatatttttttttgtaagtaaaaaattttcagactaaataa

SEQ ID NO: 11306 - DNA, 1403 bp, Homo sapiens
  source 1..1403: mol_type = unassigned DNA
ccggtgcctggggtctctggagggggtactcagagtatccgaggaggagactcctggatgctaacagagcccccagttaggagcagtccgcgagacagttggtaacagtgctggccttgcccgggcgccggaaggttccgtgaggcccagcaagtcctgacttggcacagggcccagcacacggcgcagtaacaatataattaccgtatgcagtcccccaggatacagggtcaaaggagagcacaaccatcgcagttggaagcccatggggcagggcccaggacacagtgagcatacaatagacattagctgctgtggtgtcttgatttcaagcccagtgcagatgcatctgacttacgaaacttcagtgacacctgctctgtgccagacactgaagatggagcagtgaacagcactgacccagcctgtcctcctgttgcctgcaggccagaagcaaggtctcgctgtgttaccctggctggagtgcagtggctacttacaggcatgatcatagcatactgcagcctcgaactcctggactagagcagttctcctgcctcagcctccagagcagctgggactgcagacacgcaccacagagcccagcctgagtcattttgattctgtaactggcttcctctcggcgggcaggctcacaccctccacccccagctggagatggaaggaggatgctcaccgcccattcctcatgcaggccatcgatggaaatgtcagacagtgcgagtccacgcctgaacacttctggggtccgctctgggactgacactggcagatccatcggtgagctcccgcctgccacctctgggcctgcattgcggtgatagggccaagggcctgggccttcaattctccagacttgccaaaatgctcagcgcaggcctcgtcggcaactgcagacaagcagaggcagcacctgggctctgcctgtgcctggcacagtgaagcgagggtgggggcaggaatgagggtcctctccatgcaaggggggaagatagaagaacaaaatttcaccctaatgtagtgtctttagaccgtgcaatgttgtgctcctgttagtctgatatcaggggcttgcagcctggcaaaggaaaaaaaacaggctgaggcacatgatagaagacaggcagggatgccacaatcataaccatggcaaagaccaggatcagaaaggcccaccatctctgaccccaaatccctgggcagatggttccagaactcagaattttcccagttgtagaaagatggggccaggtgcagtggctcacgcctgtaatcccagcattttgggagtacaaggtgggcggatcacctgaggtcaggagttcgagaccagcctggccaacatggtgaaaccctgtctctactaaaaaaaaaaaaaaaaa

SEQ ID NO: 11307 - DNA, 1887 bp, Homo sapiens
  source 1..1887: mol_type = unassigned DNA
gcggccgcctctccacgccctgccccgggccgcccgccaggccgccgtttcccggagccggccccctcccgccctcgcggccggctgatgtcatctgcacacaactttccgcttcccggcccgtctcggggccctgagtcatcgccgcccccggccccgacgctggcctgcggcgtctgtttgtgcagagcgaggccccgccggccgggcttgacgtcaggctggcagggcctggaacggccccgcatcgcggccccctgggggcaggacgacaccgctgggggccgagggcagggcacgccttcggaatccggcttcgaagccggccgcctgacctggggcaagtgctttcaactctctgaacttcggttcctcatctgccagttggcagacgctcagcaaatcttcctagactcacggggcgaattgtacagttgggtaaatcgaggcccagagatggcaaaaggaccgtccaaggtcgtacagccacccggaattacaattcttttctgccgggtcacacgctgtcatccacgtgttacctaagagagctttccagcctgtgctaagaaaactgccccacatcatctgcagtaggacgggggagttggagccctggtcaggccactctgctactgaccacagttttctcatctctaaaaaggcgcagtaacaatataattaccgtatgcagtcccccaggatacagggtcaaaggagagcacaaccatcgcagttggaagcccatggggcagcagggcccaggacacagtgagcatacaatagacattagctgctgtggtgtcttgatttcaagcccagtgcagatgcatctgacttacgaaacttcagtgacacctgctctgtgccagacactgaagatggagcagtgaacagcactgacccagcctgtcctcctgttgcctgcaggccagaagcaaggtctcgctgtgttaccctggctggagtgcagtggctacttacaggcatgatcatagcatactgcagcctcgaactcctggactagagcagttctcctgcctcagcctccagagcagctgggactgcagacacgcaccacagagcccagcctgagtcattttgattctgtaactggcttcctctcggcgggcaggctcacaccctccacccccagctggagatggaaggaggatgctcaccgcccattcctcatgcaggccatcgatggaaatgtcagacagtgcgagtccacgcctgaacacttctggggtccgctctgggactgacactggcagatccatcggtgagctcccgcctgccacctctgggcctgcattgcggtgatagggccaagggcctgggccttcaattctccagacttgccaaaatgctcagcgcaggcctcgtcggcaactgcagacaagcagaggcagcacctgggctctgcctgtgcctggcacagtgaagcgagggtgggggcaggaatgagggtcctctccatgcaaggggggaagatagaagaacaaaatttcaccctaatgtagtgtctttagaccgtgcaatgttgtgctcctgttagtctgatatcaggggcttgcagcctggcaaaggaaaaaaaacaggctgaggcacatgatagaagacaggcagggatgccacaatcataaccatggcaaagaccaggatcagaaaggcccaccatctctgaccccaaatccctgggcagatggttccagaactcagaattttcccagttgtagaaagatggggccaggtgcagtggctcacgcctgtaatcccagcattttgggagtacaaggtgggcggatcacctgaggtcaggagttcgagaccagcctggccaacatggtgaaaccctgtctctactaaaaaaaaaaaaaaaaa

SEQ ID NO: 11308 - DNA, 961 bp, Homo sapiens
  source 1..961: mol_type = unassigned DNA
ggttcctcatctgccagttggcagacgctcagcaaatcttcctagactcacggggcgaattgtacagttgggtaaatcgaggcccagagatggcaaaaggaccgtccaaggtcgtacagccacccggaattacaattcttttctgccgggtcacacgctgtcatccacgtgttacctaagagagctttccagcctgtgctaagaaaactgccccacatcatctgcagtaggacgggggagttggagccctggtcaggccactctgctactgaccacagttttctcatctctaaaaaggcgcagtaacaatataattaccgtatgcagtcccccaggatacagggtcaaaggagagcacaaccatcgcagttggaagcccatggggcagacccagacttcaccctcaggtcaccctcacctggactttggggtgccccacaccccgccccaggccctggcctctggaatatttggaaacttgaactgggccagaggcttaagctcacatctgtctggagcctcaactttctcctctgtaaaatgggctaacactgaaagaaccttgcagaatctcagcaacgtcacagaggacattgttagcacagccagcgggctcctgctgggctgagtttgtgggtaatccaagcctcggcaggtacagttcctccctcagcagggcccaggacacagtgagcatacaatagacattagctgctgtggtgtcttgatttcaagcccagtgcagatgcatctgacttacgaaacttcagtgacacctgctctgtgccagacactgaagatggagcagtgaacagcactgacccagcctgtcctcctgttgcctgcaggccagaagcaaggtctcgctgtgttaccctggctggagtgcagtggctacttacaggcatgatcatagcatactgcagcctcgaactcctggactagagcagttctcctgcct

SEQ ID NO: 11309 - DNA, 9557 bp, Homo sapiens
  source 1..9557: mol_type = unassigned DNA
ccagcctgtgctaagaaaactgccccacatcatctgcagtaggacgggggagttggagccctggtcaggccactctgctactgaccacagttttctcatctctaaaaaggcgcagtaacaatataattaccgtatgcagtcccccaggatacagggtcaaaggagagcacaaccatcgcagttggaagcccatggggcagaagcaaggtctcgctgtgttaccctggctggagtgcagtggctacttacaggcatgatcatagcatactgcagcctcgaactcctggactagagcagttctcctgcctcagcctccagagcagctgggactgcagacacgcaccacagagcccagcctgagtcattttgattctgtaactggcttcctctcggcgggcaggctcacaccctccacccccagctggagatggaaggaggatgctcaccgcccattcctcatgcaggccatcgatggaaatgtcagacagtgcgagtccacgcctgaacacttctggggtccgctctgggactgacactggcagatccatcggtgagctcccgcctgccacctctgggcctgcattgcggtgatagggccaagggcctgggccttcaattctccagacttgccaaaatgctcagcgcaggcctcgtcggcaactgcagacaagcagaggcagcacctgggctctgcctgtgcctggcacagtgaagcgagggtgggggcaggaatgagggtcctctccatgcaaggggggaagatagaagaacaaaatttcaccctaatgtagtgtctttagaccgtgcaatgttgtgctcctgttagtctgatatcaggggcttgcagcctggcaaaggaaaaaaaacaggctgaggcacatgatagaagacaggcagggatgccacaatcataaccatggcaaagaccaggatcagaaaggcccaccatctctgaccccaaatccctgggcagatggttccagaactcagaattttcccagttgtagaaagatggggccaggtgcagtggctcacgcctgtaatcccagcattttgggagtacaaggtgggcggatcacctgaggtcaggagttcgagaccagcctggccaacatggtgaaaccctgtctctactaaaaaaaaaaaaaaaaattagccgggcgtggcgatgcatgcctgtaatcccagctactcgggaggctgagccaggagaattgcttgaacccgggaggcggaggttgcagtgagccaagatcgcgccactacactccagtccgggcgacagagcaagagtccattcccccaccaccaaaaaaaaaaaaaaaagaaagaaagatgatgtgatacatatcacatatttcctaacacccccaaccaaacacatttatgcatatgcataaagcagacgaggaaagattctaaataggctctgaatctcagttttctcatctctacaatggggcagtgatggcatgcacctcccagggctgttctgagaatctgatgcctcccattgcactggtgagcctggcacaggcacaggtcccaccccaggccctttgaactggctgttcctttggcctggaacattcctccccagatacctcctgagagggctccctcacttccttcaaggcactgctcaaatgctacctcttcacagaggctttccctgaccaccccgtctctttcctcttcctgcatagcctctgtcacctgacattttatgtcataaattactcatttattaatttcctgctctcccacagtggcacccgagctctgtgagggcaagactttgttcggttgtgggctatgcccccaacccctcggacagtgcctgcacaggtggacatttttgttggatgaaggattttctgttaaatgtgtctggcacacacagaaaaacaaagcccagcaggtacgatggtgattattattgttactggtggcgctctattattgttattagtgtctgttgaaaaagaccctgagctataccagcccttggttctccagcctgtgaaatgggcatcctgggcactgaggcactagccttgggaagctgatagggggtccctgcaggagagacaaagaacactgcccacccccccgggggagcctgcgcccctcaccggaaagagaagcaggggggagcagagggagcttgcagccccacacgcagggctgccagaaggccatacataattcattgccaaatggggctgcgggcggctctccgcggcgtgcgctgggggctcactctgcgcctggcacttcgctgactgcgcctcacacgttgcctcattgcatcttcatggatttgcagggtgtgacccttccccctgttttacccagggggatcctgaggctcagaggatggggccaccgtgctagtcacacagcctctctgtggccaagctgggcctcgggccagcagattcggcccccagcggcccccattcactgcctctctgctgagggaaaagacgggcctggggagcgggtgggaggcacaaaggagaccccgctctgagacaggctgcagaagagggagctgggtctcagcagggctggggaaggctctggccccagccctccgcccaaccccctgccctcctctcctggaggagatgctccccaaattagccatcatgagcgctggctctgggggttgggcgttggggagcagtttgctcagctgtaaaatgggaataacagaagccgtccctgggactatgagatcaaggtgctcaagaaaagtggtgtctgctgaggggaaaagccagtcccaaaaggttgcatactctcattctgtttatttgtttttgtttttgagacagggtctcgccctgtcacccaggctggagtacagtggcgcaatatgggctcactgcaacctccacctcctgggctcaagtgatcctcccatctcagaccctcaaggagctggggctacaggcacgtgccaccgtgtccggctaatttttgtattttttgtagagacagggtttcaccatgttgcccaggctggtctcaaactcctgagctcaggtgatccgcctgccttggcctgcgataaaattgcacagaagtaaatacacacacgtgaggatacggaaaaccggggaaacctgagcaagagcagtcagaccccggctgtgatggcgcccagtagttctgcgagatgttaccattggggaaactgagtgaaggcgggtacctgggatccctctgttttcttttttgttgttgttgttattttgagatgaagtttccctcttgttgcccaggctgggtgatccacctgcctcggcctcccaaagtgctgggattacacgcgtgagccactgtgcccagcctctctgttttatttcttctttttttttttttttttttggagacgctctgtcgcccaggctggagtgcagtggcacgatattggctcactgcaagctccgcctcctgggttcacaccattctcctgcctcagcctcccgagtagctgggactacaggcgcccgccacctcgcccgtctaattttttgtatttttagtagaggcggggcttcaccgtgttagccaggatggtctcaatctcctgacctcgtcatccgcccgtctcggcctcccatagtgctgggattacaggcatgagccaccacgcccggctgttttatttcttataactgtacaggaatctacaatgattgtaacaaaaatttcaattaaggccactctaggcacatggcctgtggggtagccctgctcaacaagaagccgtcaaaaaaatgttttttaattaaaaaatttcttcaattaaaaagcgttatcttcctctgcccggaaagggttaagtgagtcactgcagttagctccccttcccccacaaccacctagaccaggccagggaccagcgggcaattgcctggcagctggagttttcctccactgtggactgtacttcttgcgtcactctgaatgtctccagtctttattccagaatgttctggtcctctcccacttttccaaggacaggaattccctagtggggctccagaagaggctctggaggagaacaagaaaggcccttgtcatccattggcctcaggctgggaaatctcggttccactcccagcccagcctcaatattaggttgtcagtctggagtctgagagccatgcccccacccccttagtccttcacctccaggagagttggggatactggaaagaatgttgagtgtcagagcccctctcagtggctcacgcctgaaatcccagccctttgggaggctgaggcaggtggattgcttgaggccaagagttcaagaccagcctggccaacgcgacgaaaccctgactctactaaaaatacaaaaattagctgggcgtggtggcacacacctgtaatcccagcagctcgggaggctgaggcaggagaattgtttgaacctgagaggtggaggttgcagtgagctgagatcacaacactgcactcaaaaagtagttaattaatttagtttaattaaaaaagaatattgagtgtcaggcaatctgggtagaacccattgtgtttctacaggatagaatctgctgtgttctctagcggaacttccggatcaccttcaccgtatgactctagacaatccctgtccactcttcagttttagatgccccattcaaagaatgaaagaattgtcctagatgatcctttagggtcttccaggctgatgacaagggggacctggcccctctgctgctggccaaagaggactttacttcccattccgtgtggttgaacaagaattgctgggctccagtcctgcctttggcccttccctacatgtgaccttgggccctctttgcctttcagaatcaatacagtgagagagttaacacaagctcaggttagtaagtcattcaacaaacatttactgagcgcttatcaaatactgcatgctggagtggacactggagaaaaaggtgaggagaaggccgggcgcagtggctcgtgactgtaattccagcactttgaggggcagaggcaggtggattacctgaggtcaggagtttgagaccagcctggccaacatggcaaaaccccgtctctactaaaaatacaaatattagccaggcatggtggtgcatatctgtagtcccagctactcaggaggctgagcaggagaatcacttgaactcaggaggtggagcgtgcagtgggccgagattgcacctctgcactccagcctgggcaacatagtgagactctgtctcaaataaataaataaagtgaggagaaaaaaataccatctctgtcttcacagaacttatagtttgagaggggagaatcccacaagtaaattataaatctcagctgagattatgcaaagaagcaaaggccggacgtggtggctcacgcctgtaatcccagcactttgggaggccgagacgggcggatcatgaggtcaggagattgagaccatcctggctaacacggtgaaaccctgtctctactaaaaatacaaaaaaattagctgggcgtggtggcgggcgtctgtagttccagctactcgggaggctgaggcaggaggatggcgtgaacccaggagcacaggttgcagtgagccgagatggcgccactgcactccagcctgggcgacagagcgagactctgtctcaaaaaaaaaaaaaaaaaaggaagcaaagtgcccagctgggatggtggtttcagaggccacagtgggagcttcccagagaagggatgattgagctaagtctaagcaaaaggggtggtcagggcagcagctgctccaaaacaggggctgggggcttatgtggagagagaagacatggagagaccatgcccagaaggaggcggcggcttcagtgaacagtgcaggggagcaggtccgaggaggccgcctaccaggggaaggagtctcatctccatcctagacaaaaaaaggatcttttgagatgcattaagcaggggagtcacagattggatttgtgttttgagaatctcctgcttacctagagaagaagggcatctcctgggccctcactgttgccttaaatgatttttattgtgtattacttaaacatgtgcaagcataaaatgagatataaactccttgtagctcttatacaagcatcagaccaagacaaattgacccatcacgtacaaaatcgattcaaatcagattaattttatgtgacatgttattatgccttttgtctgaaaccctgccaccacccacagtgcaattatggcccaaccactgtggtgttctgaatttgtgggacagagaatattggccttttaaacacgtgcatgcatgcatttgcgtgtgcgcacacacacacatcccaaatgattttttcccactatatatgaagaactcctacaaaccaaaaagaaaaaggcagacaattcaagagaaaaatgggggagggcttgcattaaagtacttcataacaagagtacttaggaggccaacaaatacacgaaaagctgctagcttcatgactcatgggggtggcttggtcagttcaggatactgtaacaaaataccttagactgggaaatttataaacaacggaatttattgctcacagttctggaggctgggaagtccaagatcaaggcagcagtagatccggtgcctgagcccgttccctgcttcaaacatggcaccttcttgctgtatcctcacatggtggaagggggaagacagttctctggggcctcttttataagggcagttatccaattcacaaggatagagccctcatgacctaatcacctttcaaagatccccatcttctaacaccttctaacaccatcaccttggtgattaggtctttttgttgttgttgttgttgagatggactctcactctgttgcctaggctggagtgcagtggcgtaatcttggttcactgcaacctctgcctcccgggctgaagtgattatcctgtctcagcctcccaagtggctgggattacaggcgtgtgccaccatgcccggctaattttcatatttttagtagagacagggtttcaccatgttggtcaggctggtctcgaactcctgacctcatgatccgcccacttcgtcctcccaaaatgctgggattacaggcatgagccactgcacccagccgattaagtcttaacgtatgagtttttgggagaaactcaaacattcggacaatagcaaggagaatacaaaaccacagtgagctaccgcttcagacaccagagaagtttaagtgaaaaagactggcaataccaagtgctgatgaggatatggagcaaccagaactctcagacattgctgatgggaatctaaattagtataaccaccacgaaagcatccgtaaggtttaattgtgttgaacacaccctgccctctgaccaagcatttccactcctgggcatacaggcaaaagaaatgcatccacgtgttcatcaaaagatgtaacctgtgccaggtgaggtggttcatgcctgtaatcccagcacatcgggaggccaaggagggaggattgcttgagcccagaagttcgagagcagcctaggcaacaaggcaaaacctcgtctctactaaaaagtagccaggcatgatggtatatgcctgtagtcccagctactcaggaggccaaggcatgcagattgattgaacccggaaggtggaggctacagtgaattgtgatctcgccactgcactccagcctgggtgacagagcaagatcttgtctcaattaaaaaaaaaggaagaaagaaagacataacctggaatattcacaccaacactattcaggatagccctaaactggaaagaatctgaatatcctccggctttagaacagagagaaattatagactattcattcatacaggggatgattgatcagctttaagaataaacaaaccgtacacaacaatatagatgaatctacaaccttaatgtgcaaaatagttcacatatataaaggacaaaaacaggcaaaactactccatggtgttagaaataggggtagaggttaccctcatgcggcaggagggttagtgataggggatttggaagaggaggagcccaatggactgaacagctgagctggaaacagcaatttgttccttaaagttctgaacccaactgttatccagcatggagtctgtctggagaggccagatgtggggcctctcacaggggaatgagaagtgcctctcagggtcccacccatgatccccctttccttgcccacacaaccaccaactggcaagtagtaacccaggacctgtagcccccactggcttgacacagagcataatgcaagcttttcctgctccaggtcctggacaccactttgccctttgccccacacgtacagccccctgaccaaaagctgggtactctggcttgactagagggagctagactccaggaataagtaaggagctgggcttccacgctagagaacaagagcttctctggggaaaggggcttcccatgaagccctggggcactgggagattaatgggcagacctctggcctcagcttccagggaaggggagggtgtgggccaacatgcggtggctacactgaccacaagccgatgaccccagccagcctcaggatgtctcagctctaggcatggtttttcgttttgttttgtcgtgttttgtttttgagatggaacctcgctctgtcgcctaggctggagtgaagtggcaccatctcgtctccctgcaacctccacctcctgggttcaagcgattctcctgcctcagcctcctgagtagctgagattacatgtgcgtgccaccttgcccagctaatttttgtatttttagtagagatagggtttcatcatgttagctaggctggtctcaaactcctgacctcaagtgatctgcctgcctcagcctcccaaagtgcaaggattacaggcatgagccaccatgcccggcataggcatggttttgacaatctgtctctttgtgccctggctccttctccaactcctctttggaggaggcacaggaggaggggtcatttcactgttcctgaaaagtagacatataacctacatgcaactgccaggtgataagggccccatctgtctggcatgacgttggaggtccacaaaggctgattagatgaatgctcagctctggggcctccccacagagctcacagacaggcgtgaaggaaagcaggactcttattagaatatgttcagagttttcactgaagaagcctcctgtgtgggccaggcactgtgctcagtgctttgattcacagtctcatttaattctcaccatttacagacaagaattcagctaagatccttttcaatcaagtctggcaatatctgcctttcaatggcagtgcctagtcctttcatatgtaatatacttatcattatgggtgggtttaagttttatcatcttgctatttgttatctatttgtcccccctcttttgttcctcctttactgccttctatttggttgagacttaataaaatattttattccatcttctcta

SEQ ID NO: 11310 - DNA, 1654 bp, Homo sapiens
  source 1..1654: mol_type = unassigned DNA
gtgctaagaaaactgccccacatcatctgcagtaggacgggggagttggagccctggtcaggccactctgctactgaccacagttttctcatctctaaaaaggcgcagtaacaatataattaccgtatgcagtcccccaggatacagggtcaaaggagagcacaaccatcgcagttggaagcccatggggcagcccagtgcagatgcatctgacttacgaaacttcagtgacacctgctctgtgccagacactgaagatggagcagtgaacagcactgacccagcctgtcctcctgttgcctgcaggccagacggagtctcactctgtcaccaggctggagtacagtggtgtgatctcggctcactgcaacctccgcctcccaggttcaagcgattctcctgcctcagcctctcaagtagctgagattacagacgtgtgtcaccatgccctgttaatttttgtttgtttgttttgttttttgttttgttttgtttcgttttttgttttttttttttgagacggagtcttgctctgtcgcccaggctggagtgcagtggccccgatctcggctcaccgcaagctccgcctcgcgggttcatgccattctccggcctcagcctcccgagtagctgggactacaggcatccgccaccacacccagctaattttttgtattttttttagtagagacggggtttcactgtgttagccaggatggtctcgatcccctgaccttgtgatccacccaaggcctcggcctcccaaagtgctgggattacaggcatgagccaccgtgcccggtcaatttttatattttttgtagagacagggtttcaccatgttggccaggctggtgtcgaactcccgacctcaggtgattgtcggccttggcctcccaaagtgctgggattacaggcgtgagccaccgcgcccagccggtgggcagccagttgtgttccgggaggaggaggacaccctggaaagacagtggggccagacactgaactgcctttggaagcaagtaggagcaacagcgaaggtttgctggctcagaagcaaggtctcgctgtgttaccctggctggagtgcagtggctacttacaggcatgatcatagcatactgcagcctcgaactcctggactagagcagttctcctgcctcagcctccagagcagctgggactgcagacacgcaccacagagcccagcctgagtcattttgattctgtaactggcttcctctcggcgggcaggctcacaccctccacccccagctggagatggaaggaggatgctcaccgcccattcctcatgcaggccatcgatggaaatgtcagacagtgcgagtccacgcctgaacacttctggggtccgctctgggactgacactggcagatccatcgatgccgttccattgtttgctgactttcattgattctatgagaagtctgcagtcttttgcagcgttgttttcctatgtataattgtctcctcccaccccactcaccccagctgctttccacattctctctctttgattttcagcagtctgcccatgatgtgcctaaataggactttctttgcattcatcttggctggggctcactgaactttctgaatctgtagattaattttcttttttcaataaacctt

SEQ ID NO: 11311 - DNA, 910 bp, Homo sapiens
  source 1..910: mol_type = unassigned DNA
ctcactccctctattgcctctccagacccagacttcaccctcaggtcaccctcacctggactttggggtgccccacaccccgccccaggccctggcctctggaatatttggaaacttgaactgggccagaggcttaagctcacatctgtctggagcctcaactttctcctctgtaaaatgggctaacactgaaagaaccttgcagaatctcagcaacgtcacagaggacattgttagcacagccagcgggctcctgctgggctgagtttgtgggtaatccaagcctcggcaggtacagttcctccctcagggcccaggacacagtgagcatacaatagacattagctgctgtggtgtcttgatttcaagcccagtgcagatgcatctgacttacgaaacttcagtgacacctgctctgtgccagacactgaagatggagcagtgaacagcactgacccagcctgtcctcctgttgcctgcaggccagacggagtctcactctgtcaccaggctggagtacagtggtgtgatctcggctcactgcaacctccgcctcccaggttcaagcgattctcctgcctcagcctctcaagtagctgagattacagacaagcaaggtctcgctgtgttaccctggctggagtgcagtggctacttacaggcatgatcatagcatactgcagcctcgaactcctggactagagcagttctcctgcctcagcctccagagcagctgggactgcagacacgcaccacagagcccagcctgagtcattttgattctgtaactggcttcctctcggcgggcaggctcacaccctccacccccagctggagatggaaggaggatgctcaccgcccattcctcatgcaggccatcgatggaaatgtcagacagtgcgagtccacg

SEQ ID NO: 11312 - DNA, 830 bp, Homo sapiens
  source 1..830: mol_type = unassigned DNA
taaaatgggctaacactgaaagaaccttgcagaatctcagcaacgtcacagaggacattgttagcacagccagcgggctcctgctgggctgagtttgtgggtaatccaagcctcggcaggtacagttcctccctcagggcccaggacacagtgagcatacaatagacattagctgctgtggtgtcttgatttcaagcccagtgcagatgcatctgacttacgaaacttcagtgacacctgctctgtgccagacactgaagatggagcagtgaacagcactgacccagcctgtcctcctgttgcctgcaggccagaagcaaggtctcgctgtgttaccctggctggagtgcagtggctacttacaggcatgatcatagcatactgcagcctcgaactcctggactagagcagttctcctgcctcagcctccagagcagctgggactgcagacacgcaccacagagcccagcctgagtcattttgattctgtaactggcttcctctcggcgggcaggctcacaccctccacccccagctggagatggaaggaggatgctcaccgcccattcctcatgcaggccatcgatggaaatgtcagacagtgcgagtccacgcctgaacacttctggggtccgctctgggactgacactggcagatccatcgatgccgttccattgtttgctgactttcattgattctatgagaagtctgcagtcttttgcagcgttgttttcctatgtataattgtctcctcccaccccactcaccccagctgctttccacattctctctctttgattttcagcagtctgcccatgatgtgcctaaa

SEQ ID NO: 11313 - DNA, 261 bp, Homo sapiens
  source 1..261: mol_type = unassigned DNA
tgggtaatccaagcctcggcaggtacagttcctccctcagcccagtgcagatgcatctgacttacgaaacttcagtgacacctgctctgtgccagacactgaagatggagcagtgaacagcactgacccagcctgtcctcctgttgcctgcaggccagaagcaaggtctcgctgtgttaccctggctggagtgcagtggctacttacaggcatgatcatagcatactgcagcctcgaactcctggactagagcagttctcc

SEQ ID NO: 11314 - DNA, 663 bp, Homo sapiens
  source 1..663: mol_type = unassigned DNA
tgggtaatccaagcctcggcaggtacagttcctccctcagggcccaggacacagtgagcatacaatagacattagctgctgtggtgtcttgatttcaagcccagtgcagatgcatctgacttacgaaacttcagtgacacctgctctgtgccagacactgaagatggagcagtgaacagcactgacccagcctgtcctcctgttgcctgcaggccagacggagtctcactctgtcaccaggctggagtacagtggtgtgatctcggctcactgcaacctccgcctcccaggttcaagcgattctcctgcctcagcctctcaagtagctgagattacagacgtgtgtcaccatgccctgttaatttttgtttgtttgttttgttttttgttttgttttgtttcgttttttgttttttttttttgagacggagtcttgctctgtcgcccaggctggagtgcagtggccccgatctcggctcaccgcaagctccgcctcgcgggttcatgccattctccgcctgggcaacatagtgagactctgtctcaaataaataaataaagtgaggagaaaaaaataccatctctgtcttcacagaacttatagtttgagaggggagaatcccacaagtaaattataaatctcagctgagattatgcaaagaa

SEQ ID NO: 11315 - DNA, 444 bp, Homo sapiens
  source 1..444: mol_type = unassigned DNA
tgggtaatccaagcctcggcaggtacagttcctccctcagtggcacccgagctctgtgagggcaagactttgttcggttgtgggctatgcccccaacccctcggacagtgcctgcacaggtggacatttttgttggatgaaggattttctgttaaatgtgtctggcacacacagaaaaacaaagcccagcagatgccgttccattgtttgctgactttcattgattctatgagaagtctgcagtcttttgcagcgttgttttcctatgtataattgtctcctcccaccccactcaccccagctgctttccacattctctctctttgattttcagcagtctgcccatgatgtgcctaaataggactttctttgcattcatcttggctggggctcactgaactttctgaatctgtagattaattttcttttttcaataaaccttgg

SEQ ID NO: 11316 - DNA, 472 bp, Homo sapiens
  source 1..472: mol_type = unassigned DNA
tgggtaatccaagcctcggcaggtacagttcctccctcagggcccaggacacagtgagcatacaatagacattagctgctgtggtgtcttgatttcaagcccagtgcagatgcatctgacttacgaaacttcagtgacacctgctctgtgccagacactgaagatggagcagtgaacagcactgacccagcctgtcctcctgttgcctgcaggccagatgccgttccattgtttgctgactttcattgattctatgagaagtctgcagtcttttgcagcgttgttttcctatgtataattgtctcctcccaccccactcaccccagctgctttccacattctctctctttgattttcagcagtctgcccatgatgtgcctaaataggactttctttgcattcatcttggctggggctcactgaactttctgaatctgtagattaattttcttttttcaataaaccttggaat

SEQ ID NO: 11317 - DNA, 781 bp, Homo sapiens
  source 1..781: mol_type = unassigned DNA
cggtgagccgagatcacactattgcactccagccttggcaaaaagagcgaaactccatcccaaaaaaaaaaaaaaaacaaagctgcagctcagagaagtggagacactggcccagggacccacagcaaggccttggcccagctggggctagatggcaagaggtggttcagcattggagctccattgcctgggttcaaatcggggtctgtcactggccagctgtgagcctaagtctctgaacttctctgtgccttagtgtcctcattctgtagagtggagatagtaatcattcctatttcaaagattgttgtgagaaataagtgaactaatacatgtcatatgcttaaaagcagggcccaggacacagtgagcatacaatagacattagctgctgtggtgtcttgatttcaagcccagtgcagatgcatctgacttacgaaacttcagtgacacctgctctgtgccagacactgaagatggagcagtgaacagcactgacccagcctgtcctcctgttgcctgcaggccagaagcaaggtctcgctgtgttaccctggctggagtgcagtggctacttacaggcatgatcatagcatactgcagcctcgaactcctggactagagcagttctcctgcctcagcctccagagcagctgggactgcagacacgcaccacagagcccagcctgagtcattttgattctgtaactggcttcctctcggcgggcaggctcacaccctccacccccagctggagatggaaggaggatgctcaccgccc

SEQ ID NO: 11318 - DNA, 786 bp, Homo sapiens
  source 1..786: mol_type = unassigned DNA
cctgttgcctgcaggccagaagcaaggtctcgctgtgttaccctggctggagtgcagtggctacttacaggcatgatcatagcatactgcagcctcgaactcctggactagagcagttctcctgcctcagcctccagagcagctgggactgcagacacgcaccacagagcccagcctgagtcattttgattctgtaactggcttcctctcggcgggcaggctcacaccctccacccccagctggagatggaaggaggatgctcaccgcccattcctcatgcaggccatcgatggaaatgtcagacagtgcgagtccacgcctgaacacttctggggtccgctctgggactgacactggcagatccatcgtggcacccgagctctgtgagggcaagactttgttcggttgtgggctatgcccccaacccctcggacagtgcctgcacaggtggacatttttgttggatgaaggattttctgttaaatgtgtctggcacacacagaaaaacaaagcccagcagatgccgttccattgtttgctgactttcattgattctatgagaagtctgcagtcttttgcagcgttgttttcctatgtataattgtctcctcccaccccactcaccccagctgctttccacattctctctctttgattttcagcagtctgcccatgatgtgcctaaataggactttctttgcattcatcttggctggggctcactgaactttctgaatctgtagattaattttcttttttcaataaaccttggaatattttcagca

SEQ ID NO: 11319 - DNA, 473 bp, Homo sapiens
  source 1..473: mol_type = unassigned DNA
cttccggagagacggagagctcctagaagcagcgcctcccagcagaagcagaatcttgccctggggaggagtacagctcagaacccgcagactcggggtcaaatcccagctctgtgactttcttgatgcgtgaccttgggaggcagctttgctgccctgagccctgtttcctccccggaaaacccataataataactgtacctcttccagtgaggagacaaggtggaatagaacgcagagcccacgtgtgcctggcacttgacggagtctcactctgtcaccaggctggagtacagtggtgtgatctcggctcactgcaacctccgcctcccaggttcaagcgattctcctgcctcagcctctcaagtagctgagattacagacgtgtgtcaccatgccctgttaatttttgtttgtttgttttgttttttgttttgttttgtttcgttttttgttttttttttttgagacgg

SEQ ID NO: 11320 - DNA, 355 bp, Homo sapiens
  source 1..355: mol_type = unassigned DNA
gcggaaagggttaacgggctccgccgcattgggctgtccttcaaggggggagccagccaatgagcgcgcgccgcgatgagaagcaaggtctcgctgtgttaccctggctggagtgcagtggctacttacaggcatgatcatagcatactgcagcctcgaactcctggactagagcagttctcctgcctcagcctccagagcagctgggactgcagacacgcaccacagagcccagcctgagtcattttgattctgtaactggcttcctctcggcgggcaggctcacaccctccacccccagctggagatggaaggaggatgctcaccgcccattcctcatgcaggccatcgatgg

SEQ ID NO: 11321 - DNA, 612 bp, Homo sapiens
  source 1..612: mol_type = unassigned DNA
gggctcccgagtgtggggagggcggctcagcaggagctgctgcttcccagaaagttgattatttttaacccaggaagaagaaaggaaggaggcgagggagaaggactcagagaaaagaggagaggaaaagagaggagaggagaggaaagaaacggagtctcactctgtcaccaggctggagtacagtggtgtgatctcggctcactgcaacctccgcctcccaggttcaagcgattctcctgcctcagcctctcaagtagctgagattacagacgtgtgtcaccatgccctgttaatttttgtttgtttgttttgttttttgttttgttttgtttcgttttttgttttttttttttgagacggagtcttgctctgtcgcccaggctggagtgcagtggccccgatctcggctcaccgcaagctccgcctcgcgggttcatgccattctccggcctcagcctcccgagtagctgggactacaggcatccgccaccacacccagctaattttttgtattttttttagtagagacggggtttcactgtgttagccaggatggtctcgatcccctgaccttgtgatccacccaaggcctcggcctcccaaagtgct

SEQ ID NO: 11322 - DNA, 469 bp, Homo sapiens
  source 1..469: mol_type = unassigned DNA
gacatggtgggggcagccaggaacggtgtgccagggggaggaacagcttgagcaaaggtgcagagaggagacaggcaaagagaaccacatgtgacatggtgggacatgccggaatcttccagagagaagcaaggtctcgctgtgttaccctggctggagtgcagtggctacttacaggcatgatcatagcatactgcagcctcgaactcctggactagagcagttctcctgcctcagcctccagagcagctgggactgcagacacgcaccacagagcccagcctgagtcattttgattctgtaactggcttcctctcggcgggcaggctcacaccctccacccccagctggagatggaaggaggatgctcaccgcccattcctcatgcaggccatcgatggaaatgtcagacagtgcgagtccacgcctgaacacttctggggtccgctctgggactgacactggcaga

SEQ ID NO: 11323 - DNA, 382 bp, Homo sapiens
  source 1..382: mol_type = unassigned DNA
tgctccaggaagaggaaatctacacataagaaggtctcaaagtgggagaacagggtaatctagaagaactagagaaacttaagcagctgtgtcaggtcaaacagtgggtgggaatcacgaggctggagcccagctgatcaggaaggccgtcgagtgccaggttgagagctgggacttatccccaggcagggaggcctattgggagactgctctgagagtccagctgctttccacattctctctctttgattttcagcagtctgcccatgatgtgcctaaataggactttctttgcattcatcttggctggggctcactgaactttctgaatctgtagattaattttcttttttcaataaaccttggaatattttcagcataa

SEQ ID NO: 11324 - DNA, 531 bp, Homo sapiens
  source 1..531: mol_type = unassigned DNA
gcagctgtgtcaggtcaaacagtgggtgggaatcacgaggctggagcccagctgatcaggaaggccgtcgagtgccaggttgagagctgggacttatccccaggcagggaggcctattgggagactgctctgagagtccaggcaagtggggctgtgttgactgtgaggatgtggaatggagtggggctggaggactggagaggccctcaagagttgtagaaagagggtctcctctgatgtggagctggcctgcaagtgtgatgctgttccagacagagagaacagcatggacaaaggctttcttttttttttttttttttttcagacggagtctcactctgtcaccaggctggagtacagtggtgtgatctcggctcactgcaacctccgcctcccaggttcaagcgattctcctgcctcagcctctcaagtagctgagattacagacggtttcaccatgttggccaggctggtgtcgaactcccgacctcaggtgattgtcggccttggcctcccaaagtgctgggatta

SEQ ID NO: 11325 - DNA, 739 bp, Homo sapiens
  source 1..739: mol_type = unassigned DNA
gcgtgagccaccgcgcccagccggtgggcagccagttgtgttccgggaggaggaggacaccctggaaagacagtggggccagacactgaactgcctttggaagcaagtaggagcaacagcgaaggtttgctggctcagaagcaaggtctcgctgtgttaccctggctggagtgcagtggctacttacaggcatgatcatagcatactgcagcctcgaactcctggactagagcagttctcctgcctcagcctccagagcagctgggactgcagacacgcaccacagagcccagcctgagtcattttgattctgtaactggcttcctctcggcgggcaggctcacaccctccacccccagctggagatggaaggaggatgctcaccgcccattcctcatgcaggccatcgatggaaatgtcagacagtgcgagtccacgcctgaacacttctggggtccgctctgggactgacactggcagatccatcgtggcacccgagctctgtgagggcaagactttgttcggttgtgggctatgcccccaacccctcggacagtgcctgcacaggtggacatttttgttggatgaaggattttctgttaaatgtgtctggcacacacagaaaaacaaagcccagcagatgccgttccattgtttgctgactttcattgattctatgagaagtctgcagtcttttgcagcgttgttttcctatgtataattgtctcctcccacccca

SEQ ID NO: 11326 - DNA, 276 bp, Homo sapiens
  source 1..276: mol_type = unassigned DNA
tgaattaatctgttcagaatgaacaagcagaatagtctttggatttgatccaaatccctgaagcactttgggaatgagaatggctatgccagacagagagaccctggcgacttatgatactgcagaacacaacaggcacttcagattggtcccaggcaaaagaaagcagtatagagatttattctcccactggcatgaaagctgtgattctgaccaccttctacatcactgtctaccacccctacaccagctcttagaagacagagtaactacagg

SEQ ID NO: 11327 - DNA, 637 bp, Homo sapiens
  source 1..637: mol_type = unassigned DNA
gaggcgtcagtgtgaagggaaggctaaggacgcatcggtgctggagagttgagaatatgccttcccctccacccccaacccagtcaccttatttgaaaaaaaattaaaaaacaccttttatttaaaaacctaaccctggaagtttgctcgctgacatcaggggagcaacgtgaacacaggaaaatggaaatcaacatttgaaacttttaaatggaagctttattggggttccacatatggaaaactgcaaatagcagaagtatgtgactcaataaattattctggagtgaccacatcctctaactgcctcccaggacaagacggagaatgtgaacaatgctcctgaaggcccctttccctcaaagaatcactgcaattgaaggaaaaatgctccatgtcccctctgccagttggtgtttatcaaaggacaacggaggaagagagacaaagtgcctggatgtgtgtgttaatcaagagttgtcaggaccctgcctctaaaagaaagcgctaaaatgatgcttttgacaagacttttctcaaagtggatgcagtctaagggttggaaaacaaggcccaatcaggctaggtctgacttgtcgcctgcttttgtaaataaagttttattggctcacagaca

SEQ ID NO: 11328 - DNA, 675 bp, Homo sapiens
  source 1..675: mol_type = unassigned DNA
agtgtgaagggaaggctaaggacgcatcggtgctggagagttgagaatatgccttcccctccacccccaacccagtcaccttatttgaaaaaaaattaaaaaacaccttttatttaaaaacctaaccctggaagtttgctcgctgcctgaaaatcatatgcgtggtttttcctgtttcctgctctgtagctgacatcaggggagcaacgtgaacacaggaaaatggaaatcaacatttgaaacttttaaatggaagctttattggggttccacatatggaaaactgcaaatagcagaagtatgtgactcaataaattattctggagtgaccacatcctctaactgcctcccaggacaagacggagaatgtgaacaatgctcctgaaggcccctttccctcaaagaatcactgcaattgaaggaaaaatgctccatgtcccctctgccagttggtgtttatcaaaggacaacggaggaagagagacaaagtgcctggatgtgtgtgttaatcaagagttgtcaggaccctgcctctaaaagaaagcgctaaaatgatgcttttgacaagacttttctcaaagtggatgcagtctaagggttggaaaacaaggcccaatcaggctaggtctgacttgtcgcctgcttttgtaaataaagttttattggctcacagac

SEQ ID NO: 11329 - DNA, 607 bp, Homo sapiens
  source 1..607: mol_type = unassigned DNA
ggagggtgccggtcagcggagccgtgcgatgtatttgaaaagcaatcagtccgaccttcccccatagattcatcctgcctgaaaatcatatgcgtggtttttcctgtttcctgctctgtagctgacatcaggggagcaacgtgaacacaggaaaatggaaatcaacatttgaaacttttaaatggaagctttattggggttccacatatggaaaactgcaaatagcagaagtatgtgactcaataaattattctggagtgaccacatcctctaactgcctcccaggacaagacggagaatgtgaacaatgctcctgaaggcccctttccctcaaagaatcactgcaattgaaggaaaaatgctccatgtcccctctgccagttggtgtttatcaaaggacaacggaggaagagagacaaagtgcctggatgtgtgtgttaatcaagagttgtcaggaccctgcctctaaaagaaagcgctaaaatgatgcttttgacaagacttttctcaaagtggatgcagtctaagggttggaaaacaaggcccaatcaggctaggtctgacttgtcgcctgcttttgtaaataaagttttattggctcacagac

SEQ ID NO: 11330 - DNA, 747 bp, Homo sapiens
  source 1..747: mol_type = unassigned DNA
gcgtcagtgtgaagggaaggctaaggacgcatcggtgctggagagttgagaatatgccttcccctccacccccaacccagtcaccttatttgaaaaaaaattaaaaaacaccttttatttaaaaacctaaccctggaagtttgctcgctaaattgcagagggtcccagtttcattcattctccctcacagggaaggcattctcttcctcttcctccagctgcctgaaaatcatatgcgtggtttttcctgtttcctgctctgtagctgacatcaggggagcaacgtgaacacaggaaaatggaaatcaacatttgaaacttttaaatggaagctttattggggttccacatatggaaaactgcaaatagcagaagtatgtgactcaataaattattctggagtgaccacatcctctaactgcctcccaggacaagacggagaatgtgaacaatgctcctgaaggcccctttccctcaaagaatcactgcaattgaaggaaaaatgctccatgtcccctctgccagttggtgtttatcaaaggacaacggaggaagagagacaaagtgcctggatgtgtgtgttaatcaagagttgtcaggaccctgcctctaaaagaaagcgctaaaatgatgcttttgacaagacttttctcaaagtggatgcagtctaagggttggaaaacaaggcccaatcaggctaggtctgacttgtcgcctgcttttgtaaataaagttttattggctcac

SEQ ID NO: 11331 - DNA, 722 bp, Homo sapiens
  source 1..722: mol_type = unassigned DNA
ggagagctgggcttcgaggcgtcagtgtgaagggaaggctaaggacgcatcggtgctggagagttgagaatatgccttcccctccacccccaacccagtcaccttatttgaaaaaaaattaaaaaacaccttttatttaaaaacctaaccctggaagtttgctcgggaaggcattctcttcctcttcctccagctgcctgaaaatcatatgcgtggtttttcctgtttcctgctctgtagctgacatcaggggagcaacgtgaacacaggaaaatggaaatcaacatttgaaacttttaaatggaagctttattggggttccacatatggaaaactgcaaatagcagaagtatgtgactcaataaattattctggagtgaccacatcctctaactgcctcccaggacaagacggagaatgtgaacaatgctcctgaaggcccctttccctcaaagaatcactgcaattgaaggaaaaatgctccatgtcccctctgccagttggtgtttatcaaaggacaacggaggaagagagacaaagtgcctggatgtgtgtgttaatcaagagttgtcaggaccctgcctctaaaagaaagcgctaaaatgatgcttttgacaagacttttctcaaagtggatgcagtctaagggttggaaaacaaggcccaatcaggctaggtctgacttgtcgcctgcttttgtaaataaagttttattggctcac

SEQ ID NO: 11332 - DNA, 827 bp, Homo sapiens
  source 1..827: mol_type = unassigned DNA
agaaaagctggaatgccgttaaaacaacaccctgtcatctttcaatcagtccttagctgaagttaaaatcccactcattctgcatgatccagcctctgtagcatagagtgagtagccccttaacaagaaccaaaatggagggtacggatgaggctcagatcgtcaccacctggagaatagagacagtgactgagtcaccaggaaatctgtcccctgctcatcccagaatccccgagctttgactttttaagagaacatgtgacagataatgccatctgagaaggattgcctcctttactgtatgttttccactgagatgaagattttggtcatttcctcattcatgttcctgcttttcaaaacccaagcaagaaaggaaacttctacagtgactttctcattatgaaatcttagcattcactagtcggccataatggaaaaccagccaaatggacacatatacactggtctgtacccgcagagaaagaaatgcaaatctctgtgatcagaaaactatcctatcttgtacattgttaaaagtctgcctccaaaaagtttacttctggaatactgtaattgaatagaatcagggatcctacctgtgtccttcaactttcacatcttgtctactcaagtaagggttgaatttgcatgactatatctaaggttcgagggcttacctgttggcagtagacccagtagtctatgaatggaaatgggcaaacctgtgacctcccaaaactttaatatgaaagttttgtttgtgtatactcatggcattattcttttaataaagagataatctatatagttttcttttttaaaag

SEQ ID NO: 11333 - DNA, 326 bp, Homo sapiens
  source 1..326: mol_type = unassigned DNA
tggagaatagagacagtgactgagtcaccaggaaatctgtcccctgctcatcccagaatccccgagctttgactttttaagagaacatgtgacagataatgccatctgagaagcttaggcaactcagtcatcaatgtgtcctcgagaagagcatatccccaaattggaaaataatccttcagggcatctgaacataaccacatttggcttactttgtgaagcagttgtctgaatagaataagactggcttggaacgagattcacagagcaaccaaataaagatgattgagtgaatggctaaagaaataaatatgttcgaatctgta

SEQ ID NO: 11334 - DNA, 1339 bp, Homo sapiens
  source 1..1339: mol_type = unassigned DNA
acataggtccccagagaatttcaatatgtctgatgtcaagaacggaaagtgagacagccaggtgggagggggtccctggagaatctccaaccagcctgcgcactgggaatgcgcactggagtgaaaatacagaagttggtgccctttgcagcagccaggagtccgactcctcctcttcctgtgtggaacctggaattcaaacggctggggcctcactcacggcatatggaactaaccacgcccctaactaagaaggcacaccttagttgcagttagcacacaattaaagcaactctccaagttttaccttaaagttcaaaattgctaggagttgaaactactagaaatatatttacatgcaagagtcaaagaaactttgaactatttatggcctttaataattaagtaaggtatactcctgtgatcaagacttggagcatatttgtttctctctgcctggttcctctagaaattggaaactatcagaacagagaccaactccgtttcccgatccctttgcaatctgcattgaaccatgagtcaagttcttgataaaggagtgaaaatggatgacatttaaggcacatctgaagatggggaaaccacagcacagaataaggctgggcccttgaatcaataaatgaaggagaactactcaagagaacaaaaccaccagcaatatccacctgtatttgtcttttcataatgtgtgacacatgtgctcatggattattgtccgaagcaagacatgtgaccaagcctaacatcaactgggtgaagagctatatgttcctttctcaagaggcactacaagtgacatgccactgggcagatggagtctcgctctgtcacccaggctagagtgcagtaccgcaatctcggctcgctgcaagctctgactcccaggttcacaccattctcctgcctcagcctcccaagtagctggcactacaggcgcccaccaccatgcctggctaattttttatatttttagtagagaaggggtttcgccgtgttagccagaatggtcttgatctcctgacctcatgatctgcccacctcggcctcccaaagtgctgggattacaggcgtgagccaccgcgactggcctaacatatttttaaaacctgcagaatgtttgtattacttttgtcatagtacataacatttaaatggatttcttgtttgtgtatgtgtgtatattcattcacaacactgatagtttttctgaatatttcctttggattttattcttttctcattcaactaaataagaacctgcaccatctttttctagtgtaaaaattacaatatctgaagtgaaactactagaataaat

SEQ ID NO: 11335 - DNA, 559 bp, Homo sapiens
  source 1..559: mol_type = unassigned DNA
actggagtgaaaatacagaagttggtgccctttgcagcagccaggagtccgactcctcctcttcctgtgtggaacctggaattcaaacggctggagtcaaagaaactttgaactatttatggcctttaataattaagtaaggtatactcctgtgatcaagacttggagcatatttgtttctctctgcctggttcctctagaaattggaaactatcagaacagagaccaactccgtttcccgatccctttgcaatctgcattgaaccatgagtcaagttcttgataaaggagtgaaaatggatgacatttaaggcacatctgaagatggggaaaccacagcacagaataaggctgggcccttgaatcaataaatgaaggagaactactcaagagaacaaaaccaccagcaatatccacctgtatttgtcttttcataatgtgtgacacatgtgctcatggattattgtccgaagcaagacatgtgaccaagcctaacatcaactgggtgaagagctatatgttcctttctcaagaggcactacaagtgacatgccactgg

SEQ ID NO: 11336 - DNA, 755 bp, Homo sapiens
  source 1..755: mol_type = unassigned DNA
gactcctcctcttcctgtgtggaacctggaattcaaacggctgggtaggaagcacgctagcaggggcctctggccttgctgagggtccctgtttccccttttccttccttttcacccaacaaaaccctgctttactcacccttcaaaccatctatgagcctaaattgtcgtggtcgtggaatggacaaggacccagtctttagctgaactaagggaaagtcctgctttttggcgcgcaacaggggagctcaagaaacaggcctcactcacggcatatggaactaaccacgcccctaactaagaaggcacaccttagttgcagttagcacacaattaaagcaactctccaagttttaccttaaagttcaaaattgctaggagttgaaactactagaaatatatttacatgcaagagtcaaagaaactttgaactatttatggcctttaataattaagtaaggtatactcctgtgatcaagacttggagcatatttgtttctctctgcctggttcctctagaaattggaaactatcagaacagagaccaactccgtttcccgatccctttgcaatctgcattgaaccatgagtcaagttcttgataaaggagtgaaaatggatgacatttaaggcacatctgaagatggggaaaccacagcacagaataaggctgggcccttgaatcaataaatgaaggagaactactcaagagaacaaaaccaccagcaatatccacctgtatttgtcttttcata

SEQ ID NO: 11337 - DNA, 694 bp, Homo sapiens
  source 1..694: mol_type = unassigned DNA
ttcctgtgtggaacctggaattcaaacggctggggcctcactcacggcatatggaactaaccacgcccctaactaagaaggcacaccttagttgcagttagcacacaattaaagcaactctccaagttttaccttaaagttcaaaattgctaggagttgaaactactagaaatatatttacatgcaagagtcaaagaaactttgaactatttatggcctttaataattaagtaaggtatactcctgtgatcaagacttggagcatatttgtttctctctgcctggttcctctagaaattggaaactatcagggagagatgatgacagcctgaacaaggatgacaataatggaaacagagacaaaaggacagaggtggaacagagaccaactccgtttcccgatccctttgcaatctgcattgaaccatgagtcaagttcttgataaaggagtgaaaatggtaagtctaaagcaatgaaaagctgctgtattgactacacatgccttcatttcttctaccctgcttctttcatgcctgcttatctgaatgacaccaggatgacatttaaggcacatctgaagatggggaaaccacagcacagaataaggctgggcccttgaatcaataaatgaaggagaactactcaagagaacaaaaccaccagcaatatccacctgtatttgtcttttcataa

SEQ ID NO: 11338 - DNA, 854 bp, Homo sapiens
  source 1..854: mol_type = unassigned DNA
aaacggctgggtaggaagcacgctagcaggggcctctggccttgctgagggtccctgtttccccttttccttccttttcacccaacaaaaccctgctttactcacccttcaaaccatctatgagcctaaattgtcgtggtcgtggaatggacaaggacccagtctttagctgaactaagggaaagtcctgctttttggcgcgcaacaggggagctcaagaaacaggcctcactcacggcatatggaactaaccacgcccctaactaagaaggcacaccttagttgcagttagcacacaattaaagcaactctccaagttttaccttaaagttcaaaattgctaggagttgaaactactagaaatatatttacatgcaagagtcaaagaaactttgaactatttatggcctttaataattaagtaaggtatactcctgtgatcaagacttggagcatatttgtttctctctgcctggttcctctagaaattggaaactatcattgtcagcataacctcattcttcttggacacgggacaagaattcaggatgcaccaaatgcaggaacagagaccaactccgtttcccgatccctttgcaatctgcattgaaccatgagtcaagttcttgataaaggagtgaaaatggtaagtctaaagcaatgaaaagctgctgtattgactacacatgccttcatttcttctaccctgcttctttcatgcctgcttatctgaatgacaccaggatgacatttaaggcacatctgaagatggggaaaccacagcacagaataaggctgggcccttgaatcaataaatgaaggagaactactcaagagaacaaaaccaccagcaa

SEQ ID NO: 11339 - DNA, 1032 bp, Homo sapiens
  source 1..1032: mol_type = unassigned DNA
cgggggaaaggccttttccttcctttttcaggacagacaggaaagccggggctcctcactccccctcccctctgtgcccgggacgggatgcatggcccaagggtcccacacagctggctagatggttctcagacacaagccaccgcagccttccttttcccctgccagggggttaaactttatcagagagtaattaagctttaaccctgctgttgaaatcacttgcagacgaataagaagttcttccccaggcatttttaaaccttttttcactccccttttccacctcctcaacaagtaaacccttaaagttttttttttgtttgtttgtttgtttttttttagaagacactttactaggccactccctctgctccccagctatcactgtatgctctgcaaagttttgcttgtgaaataaatcctctattttgttttacatcctgaggccatggcttataactctggcggcaaggatttgtttagcaatcctgccttaggggatgagccctctctaattcaatatctgcatgtcccctgtctcttaaagggcctcactcacggcatatggaactaaccacgcccctaactaagaaggcacaccttagttgcagttagcacacaattaaagcaactctccaagttttaccttaaagttcaaaattgctaggagttgaaactactagaaatatatttacatgcaagagtcaaagaaactttgaactatttatggcctttaataattaagtaaggtatactcctgtgatcaagacttggagcatatttgtttctctctgcctggttcctctagaaattggaaactatcagaacagagaccaactccgtttcccgatccctttgcaatctgcattgaaccatgagtcaagttcttgataaaggagtgaaaatgtgtgtgacacatgtgctcatggattattgtccgaagcaagacatgtgaccaagcctaacatcaactgggtgaagagctatatgttcctttctcaagaggcactacaagtgacatgccactgg

SEQ ID NO: 11340 - DNA, 402 bp, Homo sapiens
  source 1..402: mol_type = unassigned DNA
tgtgtgacacatgtgctcatggattattgtccgaagcaagacatgtgaccaagcctaacatcaactgggtgaagagctatatgttcctttctcaagaggcactacaagtgacatgccactgggcagtttagcaaaagctggaggtgccttgacatttgcagtacactgaaacagtggctggcttgaaaaatcccaaaacgattttctgcaggagagcccttttgactaatatgagggcagtgaaaagactccatttatgaaacaggaaatgagccctcatcagacactgaatctgccggcacattgatcttcgacttctgccttcagaaccatgaaagggtgaggcaatgaaaagccaatctgtaattgtctgctctttcttaccctgctgctaactactga

SEQ ID NO: 11341 - DNA, 496 bp, Homo sapiens
  source 1..496: mol_type = unassigned DNA
agcctaacatcaactgggtgaagagctatatgttcctttctcaagaggcactacaagtgacatgccactgggcagggggcaggtctttcctgtgctgttcttgtgaaagtgagtaagtctcatgagatctgaaggctttgaaaaacaggaatctccctgtacaagctctctctttgcctgctgccatccatgtaagacgtgacttgctccttcttgtcttctgccataattgtgagtcttccccagccatgtggaactgtcttggttggagtccaggtatctgcaaattaaataagcacttgaagtgatagtatctgagtgtccgtaggcaaatgttaggagaactgaatcagatgttctttgaaagattttcatggttctaaaatgttctgatttaaaatccacaaagaaaaaaagcattgaaaatgaatcagcaaactagatgtaattaaagcttcttgcaattccattaataaactttttagaatgaattaca

SEQ ID NO: 11342 - DNA, 632 bp, Homo sapiens
  source 1..632: mol_type = unassigned DNA
ctcaagaggcactacaagtgacatgccactgggcagtttagcaaaagctggaggtgccttgacatttgcagtacactgaaacagtggctggcttgaaaaatcccaaaacgattttctgcaggagagcccttttgactaatatgaggtacaaagaaaaagaagtctacaacagatgtgctgaagctcagaaaatggcactacaaagtgtggcactttgacatgctaagtactttgaactaaagaagcagcctcaaaacgaagatctttctgaacttgtcttaccaccccgtctctctaccctgtttctcccctaaaactctcagagaggctttctgtgaactttcccttatctgactaagggaagttcctccagaagcaatgcaattgttatgaaccccttccctggaatccacattaaccagagaagattatctcatgtagcaagagaggagactaaaggtctttctgtccaggataccatatctacagaggctttacatccatttttctgagagttcatcagaccatgtctgtgcaaaaaccgggacaattccagtgtacactaggaaaaagttattcagcttatttcagctttgcaagaaacttctcatcaaagaaacacacaggcttct

SEQ ID NO: 11343 - DNA, 920 bp, Homo sapiens
  source 1..920: mol_type = unassigned DNA
ggcactacaagtgacatgccactgggcagcctctcaactcaggagatacagtgtggaagatcttattgaaaccacctttgcaaaaattataactgagaaaactatgacaatgaaagagatctacctgattccatcttgcttctaacctctacgctctcctaatttatacctgggtttaggcagaactattttttggaggaacttagtttatagtttaactttggaacaaagatgatcacagcctcatcccaaaacaaactcccttcctgcctggaggctagattgcctttgtgggactaacaaattagctacaagattagagattatgatttaggagtcatgcatctggaggctacaagatgctgaacctccccaaattgcttctggggataacattacttttgtaaaacctgagatcagtgcttgagatattttacagacactgtacttgatggcttatttggtcttgtggcccccacccaggaattgactcagtgcaagaggacagctgggactcccaatgatttcatctctcaccgcaccagtcagcactccccactgtccaacccctgccaccaaattatccttgaaaacctcgatccccaggttttcagggagactgatttacgtaataataaagctctggtctcctgcacagctggctctgtatgaattaaactctttattacaattcccctgtcttgataaatcggctctgtctaggcagagggcaaggaagaccccttgggcagttacattatctcttttcttcttagaacataagtctttctccattgtattgaaaggtcattaagagtctgttcaaataactcatatgtgaaatatgacaagaattccatactaatataatgttatccagtaatatttacagcaaagttactatttatgcagtgttttgc

SEQ ID NO: 11344 - DNA, 778 bp, Homo sapiens
  source 1..778: mol_type = unassigned DNA
ggcactacaagtgacatgccactgggcaggattatcctttctactctcctactttctgaactacttttctccctctgtaagtcttaaagaagttcaatgagctataagtgaactcaggtagacaactcaacaaaatcaagaagacaatacatgaacaaaatgatactttgaataaataaatataaaccataaaaaacttgaattattcagttcagtcataatacatgactttaaacttcaaaacagtttgttatagtacagccaaaatcattaaaattggtcagctaagaagtatatattttttctagttctctaatggatagctgtacattatattcacaacttacaaaatctgtccagcaagataacagattagaagacacttaacattgcttcccccacaaaggtataagcagtaactattcaaagacaataaaactaccctgaagttactagaacttgagagagaagcagaggaactgatggagcctgcagaaatgagagaagctgtgactgataaatgacgattttagaatctgccacccactaccccaagccacataacagctcacagaaaatttctatacatttaggatgtctgagttggaagaaattcgaagttgaaaataaacattcaatttccctatcagttgaggaggcttcatgggaagtctacatgggtctcatcccatggaaaacactgagagttccaggagggctgaatgacctgagtgaactgaagataaaatcaggagagctgattgcagcaactgtcctg

SEQ ID NO: 11345 - DNA, 573 bp, Homo sapiens
  source 1..573: mol_type = unassigned DNA
ggcactacaagtgacatgccactgggcagcactgttcacattatgtaagtgataaaattgacctaaatatccatcaatggacaaatagatcaagaaaacatgataaacatacacagtggaatactatacagctacaaaaagaatgaccttctgtcatttgtgacaacgtggataaacctgcaggacattctgttaagtgaaatcaaccaggtacagaaaaacaaatattgcatgagctcactcatatgtggaatctaaagtaattttactcattgaccaacctctttccatcccccatccccttttctctcctcaacctctggtaactgctgttctactctttatttctatgagaccacagttacagttagataggaagaataaattctggtgttctattacatagcagagtgactacagctaaaaatagtgtattatatatttcaatatagctagagaagaagatcttgaatgttatcaccacaaagaaatgataatgctgtggtaatgggtatgttaattatcctgatatgatcattaaacaatgcatatatctattgaaacatcacagta

SEQ ID NO: 11346 - DNA, 757 bp, Homo sapiens
  source 1..757: mol_type = unassigned DNA
ggcactacaagtgacatgccactgggcagtggctgctatggaaacaagtcctgatgcatgacagaggaggaaagctatcagtcctgtggttaaagaggggacatttccactagatttccaattgcatatggaatcaagaaagaagcaactgggaattacttcacacagcaaatctaaggaagagactgttaatttggctttgccagttactccttctcaaggcccataattaaatgtgagtttctgggcactaatgcaaaagccagatttgctctgagcctgcggggcttataaattggttgcttttgcaaactgttattgttcctttaggtcaagaggggaagaattattgactttgttcagttgaattaaatgctccccttgtggtttgaaagaagaaatttgcctccctcaccctctaagattacatacaaagggagaattgtttttgggcaagttagacttgatgaaaaaatatacagttctactggattatagcactgtgtgttgccttagagtcacatgactccagttttgccttctatatgaagcccaaggctttcatctttttctgatacagtgggctcttcagctttaagcactgacttttgtgtgctagtatacaatgcctgtacactcccacaaaaagctcaagatgtccttacacgtatttgctgtaggtgtccttcagccgatttcagtgcctagaatctagatgctttgcacctagtttcacctttgctcacagatgctagtg

SEQ ID NO: 11347 - DNA, 781 bp, Homo sapiens
  source 1..781: mol_type = unassigned DNA
ggcactacaagtgacatgccactgggcaggatttttatttcatttgcaatgaatgaagaagcacagctctgaaagactgaattcccagcactgggtgtcagctctaccaaatgcggtacagattgcaatctgaccacagaatctcaccacaaagaatgccggggtctcctctgattatagctactggctataagttctaactagggtttaatgcaaattttccctgtagtctgcttggggagttggcctcattcttgaatttttctcagaaagttattgccaaaaatgtgagttctcaccgcagtgaaagaggaaatccagctatgagcatatataatacaggagaaagaatgcagagaaaacacattcttttcttgctactcagttgccagagaagtatatctataatattttcagttgtgatgctatgtcccattgaattcaaccacacattggaaaaatcagtttaccctagaatctagttattgttgtggtacagtttaatttttgtcaaataattctttctaaaatttctaatgtaagtctttaattttcaagatattttgcttagaagatgatatggtttggctgtgtccccacccaaatctcaccttgaattcccaggtgttgtagggggcaggtctttcctgtgctgttcttgtgaaagtgagtaagtctcatgagatctgaaggctttgaaaaacaggaatctccctgtacaagctctctctttgcctgctgccatccatgtaagacgtgacttgctccttcttgtcttctg

SEQ ID NO: 11348 - DNA, 559 bp, Homo sapiens
  source 1..559: mol_type = unassigned DNA
ggcactacaagtgacatgccactgggcagtttagcaaaagctggaggtgccttgacatttgcagtacactgaaacagtggctggcttgaaaaatcccaaaacgattttctgcaggagagcccttttgactaatatgagagtctcgctctgtcatccaggctggaatgcagtggcacgatctcggctcattgcaacctctgcttcccgggttcaagtgattctcatgcctcagcctcctgagtacccggaactacaggcacctgccaccacacctggctaatttttgtatttttagtagacctggggttttgccttattggccaggctggtcttgaactcttgaccttgtgatccacccatcttggcctcccaaagtgctgggattacaggtgtgggccaccgtgactggccaacattatgtattttaaaagatgtcttcaaatagaaacacacataaaataaggccatttatgaatcagttgaaaataaatataaaatctggttatatgaaaatataaccagagctctcagggccctaaccctgtgtttcccttaggaa

SEQ ID NO: 11349 - DNA, 267 bp, Homo sapiens
  source 1..267: mol_type = unassigned DNA
ggcactacaagtgacatgccactgggcagtttagcaaaagctggaggtgccttgacatttgcagtacactgaaacagtggctggcttgaaaaatcccaaaacgattttctgcaggagagcccttttgactaatatgagatggcagagcctccatcaagccaggtggactgagtagcgcaaactctctctttacccgtgttggacaggtaagatgtgcctgcttccccttctgccatgattgtaagtttcctgaagcttccccagaca

SEQ ID NO: 11350 - DNA, 581 bp, Homo sapiens
  source 1..581: mol_type = unassigned DNA
ggcactacaagtgacatgccactgggcagtttagcaaaagctggaggtgccttgacatttgcagtacactgaaacagtggctggcttgaaaaatcccaaaacgattttctgcaggagagcccttttgactaatatgaggtaagatgtgcctgcttccccttctgccatgattgtaagtttcctgaagcttccccagacatgtggaactgtgagtcaattaagtctcttttctttataaatttctcagtctcagatatttctttacagcagtgtgaaaacaggctaacacaagcagttattttgctaccatctactgaatcttataacgtattatatgaaaacacagggaattgaagtgatgcaggaaatactggaaatctgcctgcctgctgctacttctctctgtagcattggaaaaacaagttaacttctttgcttccatttcatcctccacttacgtgacaggaagaagattacctgctatttctaaagaactttgaagctaaaagctagtgtgtaaccagaaaaagtgctttaattagatttcaaatgattcaagcatagtccagtgtaaaacaact

SEQ ID NO: 11351 - DNA, 456 bp, Homo sapiens
  source 1..456: mol_type = unassigned DNA
gcactacaagtgacatgccactgggcaggtaagatcctctcaaatgaagggactgtgaatatttgactaataatacaaatatttactggatattttacagtgatatttacaaatatcactggctaacttttcccagcttgatatcctgaaagaggcacagtttcagtagtaaatggtaaatttaccttgattgcactgaaggctatttctttaaaactattttctttccttttgactattccatgtatcctttcagaagtaaacattgtttttacccctttaaaaagtctacttataccatctacttaatttggaatttatctaacattgccagtttgatatagatacagaaatttaatgagaaaatgcagttctatatttagaatatggattcttcaagatgtttctgacacacatttgttttcattgaaacattaaacaattatttagctaaca

SEQ ID NO: 11352 - DNA, 1068 bp, Homo sapiens
  source 1..1068: mol_type = unassigned DNA
ctacaagtgacatgccactgggcagaaaataaattggaatgaagcccatgtgaatgcatggagacaaggtgaaaaggtagatgagaaaaaagttggaaatatttgcaggtacatttgacaggaccaggagatgtcttgggcattcatgatgatggaagagtggtcaataatgactctattttctagcttgtatcatgagatgaatggagacccgtagaagaataagttttgtgagtgactgggtcatgtaatatattttggatttgttaaatgtgaactacttttaagaaactgtggggaaaaacttcgttttgtttacatccatgaatcatttgaagcacgaaaaataattctcagctgaagatacaaatatgagggccctgggtgtataactgaaggcacgagtataaatgggattatttagggagggcttaaaagtggatagagagtaaattcacagactataggtacaaaataatcaccaatgacaatatattatgcagcttaagaccaattgtatgtattttcctgacaatgtcttttagagcctgtgactagttttctcctgaagatgtggtgatcttcttatcaatttttaagagtacttaaatgttttaacaattatatttaactcaaaattagtttccaacttgttttcctttaattataatttaaagtgtatattttatgtgtacgaatattaaaaatttatgaagtcatatctattgcctttgtctcttattactttaccaatgcttacaaaaactttcctcattaatgcttatataaatcttcttttttattgcaaatttttccattcttctggtttgtaaaatgcctaaagtaaaatgtgtatctgaattaattaatcgttaaatatcttttcaattttctcaacccaatatattggacaattcacctcttactcccagagttttatctctacatattattcctatgaagcttttacacatgctgagactaaatggtctgttctatgtcattgattctatttgcctagttgtctatttaccttgtagttttgaggtaataaatggtcctttaaac

SEQ ID NO: 11353 - DNA, 748 bp, Homo sapiens
  source 1..748: mol_type = unassigned DNA
ctacaagtgacatgccactgggcagtttagcaaaagctggaggtgccttgacatttgcagtacactgaaacagtggctggcttgaaaaatcccaaaacgattttctgcaggagagcccttttgactaatatgagaatatttatgtgtgaatcaactagaggaatgaacatcacctaaagacaaaacaggatctttgtatacatcttctgggaaggagttgttatcatttccacaaggccaattgcatcattcggataaaaacattatattgttgtctttatttggaagtaaaatatattttaaagagatgtgaatgattataaagtttataataggtatactgtgatgactttgtcaaacgttaacttgactaggctgaatgatatttcctagaattccctttcctttgttttctattaaagagggaatgttttctggtagaccatgtaatagagatagaagttcttcttttttacgcattcattcattattatagtttaatgaatcataaatgaaaaaaaaaccctcttccagaagcatttactaacactttcaggtatatgagaatggaataattttcagaaactgggctttctgtattttccctgttggctatttcagaccagttcccgacccttctccatccttctccatgccctgggaaaccgacttttatagactgcaaaagtatgctctcttacactttggtttcttattgaggtcaaataataaaaatcactgccaaaaa

SEQ ID NO: 11354 - DNA, 1339 bp, Homo sapiens; identical to SEQ ID NO: 11334
  source 1..1339: mol_type = unassigned DNA

SEQ ID NO: 11355 - DNA, 559 bp, Homo sapiens; identical to SEQ ID NO: 11335
  source 1..559: mol_type = unassigned DNA

SEQ ID NO: 11356 - DNA, 755 bp, Homo sapiens; identical to SEQ ID NO: 11336
  source 1..755: mol_type = unassigned DNA

SEQ ID NO: 11357 - DNA, 694 bp, Homo sapiens; identical to SEQ ID NO: 11337
  source 1..694: mol_type = unassigned DNA

SEQ ID NO: 11358 - DNA, 854 bp, Homo sapiens; identical to SEQ ID NO: 11338
  source 1..854: mol_type = unassigned DNA

SEQ ID NO: 11359 - DNA, 1032 bp, Homo sapiens; identical to SEQ ID NO: 11339
  source 1..1032: mol_type = unassigned DNA

SEQ ID NO: 11360 - DNA, 402 bp, Homo sapiens; identical to SEQ ID NO: 11340
  source 1..402: mol_type = unassigned DNA

SEQ ID NO: 11361 - DNA, 496 bp, Homo sapiens; identical to SEQ ID NO: 11341
  source 1..496: mol_type = unassigned DNA

SEQ ID NO: 11362 - DNA, 632 bp, Homo sapiens; identical to SEQ ID NO: 11342
  source 1..632: mol_type = unassigned DNA

SEQ ID NO: 11363 - DNA, 920 bp, Homo sapiens; identical to SEQ ID NO: 11343
  source 1..920: mol_type = unassigned DNA

SEQ ID NO: 11364 - DNA, 778 bp, Homo sapiens; identical to SEQ ID NO: 11344
  source 1..778: mol_type = unassigned DNA

SEQ ID NO: 11365 - DNA, 573 bp, Homo sapiens; identical to SEQ ID NO: 11345
  source 1..573: mol_type = unassigned DNA

SEQ ID NO: 11366 - DNA, 757 bp, Homo sapiens; identical to SEQ ID NO: 11346
  source 1..757: mol_type = unassigned DNA

SEQ ID NO: 11367 - DNA, 781 bp, Homo sapiens; identical to SEQ ID NO: 11347
  source 1..781: mol_type = unassigned DNA

SEQ ID NO: 11368 - DNA, 559 bp, Homo sapiens; identical to SEQ ID NO: 11348
  source 1..559: mol_type = unassigned DNA

SEQ ID NO: 11369 - DNA, 267 bp, Homo sapiens; identical to SEQ ID NO: 11349
  source 1..267: mol_type = unassigned DNA

SEQ ID NO: 11370 - DNA, 581 bp, Homo sapiens; identical to SEQ ID NO: 11350
  source 1..581: mol_type = unassigned DNA

SEQ ID NO: 11371 - DNA, 456 bp, Homo sapiens; identical to SEQ ID NO: 11351
  source 1..456: mol_type = unassigned DNA

SEQ ID NO: 11372 - DNA, 1068 bp, Homo sapiens; identical to SEQ ID NO: 11352
  source 1..1068: mol_type = unassigned DNA

SEQ ID NO: 11373 - DNA, 748 bp, Homo sapiens; identical to SEQ ID NO: 11353
  source 1..748: mol_type = unassigned DNA

SEQ ID NO: 11374 - DNA, 5168 bp, Homo sapiens
  source 1..5168: mol_type = unassigned DNA
attctctaggcgaaggagaacaataagaggcaggtaaagctggagcccgtaacaggaggaaacgtgagcattgaaaacccgccctttggatgaactgaccacagctggacaacaccagtgccaggccagggttccaagcactgcagagatgaagcaccttcttccaggagttcctggagttctcagaagccagagtggacttgttcctccgttttatttgatgaggttctaaatatagctgggcaaggcttcggattttagtgggagatggccagaggcgaagcaactgataaaagtagctgaatagctctccctctctgagctaggtgcaagctcctgacgtaggaagcgatccctccttgccacagataacccacgtagccaggtgctgccaagcagcttccacctggaggagggcagctgctctgcgcatgaccagtagctgtggatggcatcgtcgaggcatctggaggaagctgcagccccacaaggcccctgacccctctgcctttccctctgctggctcctcttcctccctctttccctgctgtcccctgtagagaactttctaccagtccacacaccaacctaggtgcagcccccctgcgtgactccctccctgactatcataaccatggccagcagtatctccacatctctgcccagatccccctgggaaggcttatcccaggccccaggtttggggcaatgcccagtggcatcggatggggtcccccttgaaaggaagcacagaaagactgagccatcaacgtagtcccctccatcacctgccactgtccccaaaatctcccacaccggaagtgtttagattgtctaaggacaatattgtctagggtttgaggaccaccccacagcaaaaacactagaaagctagttccaaaatgcaaatcccaggccaagcccctcacctcctgaggcagcatccctgggtatagatctcagaaatctgcagttttaatacaaaggccccctaaacttaaagaaacagcctgaattcacatgggcacaccttacctgagcaggcaatacagtgacaagggtggaaacagaggggacgagacctgacactgggaaggcctgacagagggaaggaaggaaagctctcaggctaagggcgctgggaaccccactcttccctctagggagttgccgttccctgaggggcctgaggagcctcctcctgaagccccagctattcaaattacaccttttcttattaggacatcaggaggtgttgccccttagctttccattctaacctcctcaatgtaggggccttgctggtgtcgaggacagagcggaggcctcaagggtatgtgcagtctaggtggccttggtggaggggcaggattctacatttgggaggggacttcttgctgaactccttccagatgggtcaaatggggtagactgagggagtggtgtgggaggtggtaaagaaccaagtagggactggatggatcctgggagtttacagggctgcctcggagagggagggtgctgagagagaggagaccagggtgggcaccaacgcgatccctgcaggctatgagtgtaggatcagagagggttaagggccagaagcccctgtgtgtttaggactgtggcaccatgggtgcatcccctgagaagcgaagctcaggcaggagcagcagtgggcaaagagcctggtggtgcaggtgcaggccctgtagaggaggcagtgacaacacccagcccaggccgactctctctgcctgtcccctgagtcccctggcacctctccacatctgctcagccctcccagttaacctagcactggtagatggttgatatgatttggatctgtgtccccaaatctcatgttgaattctaatccccagtgttggaggtggggcctggtgggaggtgattggatcatgggggtgaatccttcatgaatggcttagctttatccccttaatgctgttcttgtggtagtgagggaattcttgcaatatctggttgtttaaaagtgtgtagcacttcccccccaacactcttttgttcctgttccaactgtgtgaagtgctcactccccctttgccttctgctatgactgttaagtttcctgaggccttcccagaagctgagcaggtgtcagcatcatgctttctgtatagcctgaggaaccataagccaattaaacctcttttctttaaaaattacccagtctgagatatttcttttcttttctttgagacagggtctggctctgtcacccaggctggagcgtagctgcacctctgcctccagggctcaagtgatcctcccacctcagcctcacaagtcactgggaccacagcacgtgccaccacacccagctaatgtttgctttctttgtagagacagggtttcaccatgttgcacaggctggtctcaaactcctgagctcatgcgattctcctgtcttggcctcccaaagtgatgggattacaggtttgagccactgcactcatcctaggtatttctctatagcaatgcaagaaaaactaatacgaaggtgaatccatctgcagatccagactccacaggaagccagcaagtgtgattgcgggctctgctgcatttcaggggcggttctatacttggcacgtgcatgctttccccagcctagcatattagcctgctggggctactataacaaaataccacaaactgagtggcttaatacaactgaaatgcattctctcacacttctagtggccaaagtccaagatcaaagttttggcagggttggctccttctggacactcagagggagagtctgtcctgtgtctctcccctggcttctcctggttgctggcaacccttggcattttttgcttataaatgcatccctcttatctcagcctgtactgtcacgtgaccttcttccctgtgcatctgtctcttgtcctcttcttctaaggacagcagtcatattggattaagggcccagccactccagcatgacctcctcttaacttgatggcattcaaagccatcaggtttggaaacaaggtcacattaccagggaccggaggctaggacttgaagataccctttgggaggagacacctgcaacgtttggattggagaagactcagtgaccttctgggatgtcgtttaccctccctgggctgcagcttccttgtttgtagaggaagaggttaaattaaacaatctcttccaggtctcatggtcttcgaatctgttttctcctctgctgttttctcagcttccttctcccgatggaaatagggggccagtgtatttcccctgcctcccctccctctcagccctgctttcaagtcttagagctggcaagggctttgtgcaatactccaggtcctaccctcaatttctggtggaacaacagaataagcggtctctgcatgcacacaaatcccttcagctccgtctgggcccagcggcagctgaccaaccagcccatcacacacctttctgcaggccccttccccgcccggcctctttctctactctttttgtttatttttattccccagtctctcatctctcacctatacagtcaagtttccagcctctctttccacccactgttcagccatcagtcagcctaaacattctactttctgcctttctccccacaagcaactttgtttgcagagaacccacagagtttgacatgttgtctgcagactctctgtccacaggctgcaggtgtagtggagcccgctccagactgagacagaggcccaggtttttaccaggctgtgctgctgccagcctggtgtgactacccatcccacccccttcgatacctgtgcctcagtttctcccatggataatggagtgggactcaatgggagtaacagactccaagaacatgaatgggggtgagcagggaccaccaaacacgtcctctgcccatctcatgtccgacccactcacctcccaagtaacaggcacaacttcaccaaatctgtggccccccaactgggtggataaggccaggacttgcttctgatttgcacagcacatccccccagcattggaataaaagctgctcaggatggccctcgagataaggttttcagagctctagggatccagacccaaaactgcgggacctctgaggaagcacaggttcctgcactgaaggcagagcactggccatctattttgactctaaatatttggaggaattctgcgagctgttttgtaagctgcactgaggtaatgctgtgtcatggaaaccagtgcaggcaagatttctagggagaggcagtgtttacccttgttacatggactagaggtcagcaaaagcagaagcccctcaagagcgtgcgcagagctgcagaggtaagctggcaggtcccaaccagtctccagcaaatttggccatgaaatgaggaatccctgggacctccgtttttcttggccatgtcccttgctgggcacctatatgcgtgatcttatttcagcttcatgattcttgcaggcatcattatcaatgtttttgttgctgttttaactggcggggtgggcggggagagaggggaaatcacgttcccagagacatatagctaaagagaaagtgaagatttgagcctgacaccagccatgcttttcctgacattcctggcagtgtgaaaggaaggacagcaatatggttttcttgaaggggtaacaagtttcagcaaataattttgcttatatcttacgagagaggcatggatgtttgctgggagggaaaggagctagtagcaagtggaagaggaaagactccaaaaccaagaggagggctcttctctcccagagttgaggggggaaggatgggagggaggtaaaggtcagaaatctctctttatttggaatggtttgcacagcggctcacaatcggagcttccctctgcctcagacaggcctcttctctaacaggtgtaatgcagtgatgttttcctttggcttccttgctgagtcatgactagatttgcctgggaaagctcagatattactgattcagtgttcattcctttttcctccttaccaccagccttcaacactccatatgacgccttcaataggaagggaggaagataaataacatggaaacagagagaatcacctggaccaattttggtattaaaaaacctggaaaaagc

SEQ ID NO: 11375 - DNA, 3055 bp, Homo sapiens
  source 1..3055: mol_type = unassigned DNA
gcgcggggcggacagacggacagccagccccgcgagggcgcgcggactgccgggcggaggtgtcggaggaggaggaaacggaggagggggctgggcaggggctggggcctggtcgggccggctggagagacatgcgattggtgaccgagccgagcggaccgaaggcgcgcccgagatgcaggtgagcaagaggatgctggcggggggcgtgaggagcatgcccagccccctcctggcctgctggcagcccatcctcctgctggtgctgggctcagtgctgtcaggctcggccacgggctgcccgccccgctgcgagtgctccgcccaggaccgcgctgtgctgtgccaccgcaagcgctttgtggcagtccccgagggcatccccaccgagacgcgcctgctggacctaggcaagaaccgcatcaaaacgctcaaccaggacgagttcgccagcttcccgcacctggaggagctggagctcaacgagaacatcgtgagcgccgtggagcccggcgccttcaacaacctcttcaacctccggacgctgggtctccgcagcaaccgcctgaagctcatcccgctaggcgtcttcactggcctcagcaacctgaccaagctggacatcagcgagaacaagatcgttatcctactggactacatgtttcaggacctgtacaacctcaagtcactggaggttggcgacaatgacctcgtctacatctctcaccgcgccttcagcggcctcaacagcctggagcagctgacgctggagaaatgcaacctgacctccatccccaccgaggcgctgtcccacctgcacggcctcatcgtcctgaggctccggcacctcaacatcaatgccatccgggactactccttcaagaggctgtaccgactcaaggtcttggagatctcccactggccctacttggacaccatgacacccaactgcctctacggcctcaacctgacgtccctgtccatcacacactgcaatctgaccgctgtgccctacctggccgtccgccacctagtctatctccgcttcctcaacctctcctacaaccccatcagcaccattgagggctccatgttgcatgagctgctccggctgcaggagatccagctggtgggcgggcagctggccgtggtggagccctatgccttccgcggcctcaactacctgcgcgtgctcaatgtctctggcaaccagctgaccacactggaggaatcagtcttccactcggtgggcaacctggagacactcatcctggactccaacccgctggcctgcgactgtcggctcctgtgggtgttccggcgccgctggcggctcaacttcaaccggcagcagcccacgtgcgccacgcccgagtttgtccagggcaaggagttcaaggacttccctgatgtgctactgcccaactacttcacctgccgccgcgcccgcatccgggaccgcaaggcccagcaggtgtttgtggacgagggccacacggtgcagtttgtgtgccgggccgatggcgacccgccgcccgccatcctctggctctcaccccgaaagcacctggtctcagccaagagcaatgggcggctcacagtcttccctgatggcacgctggaggtgcgctacgcccaggtacaggacaacggcacgtacctgtgcatcgcggccaacgcgggcggcaacgactccatgcccgcccacctgcatgtgcgcagctactcgcccgactggccccatcagcccaacaagaccttcgctttcatctccaaccagccgggcgagggagaggccaacagcacccgcgccactgtgcctttccccttcgacatcaagaccctcatcatcgccaccaccatgggcttcatctctttcctgggcgtcgtcctcttctgcctggtgctgctgtttctctggagccggggcaagggcaacacaaagcacaacatcgagatcgagtatgtgccccgaaagtcggacgcaggcatcagctccgccgacgcgccccgcaagttcaacatgaagatgatatgaggccggggcggggggcagggacccccgggcggccgggcaggggaaggggcctggccgccacctgctcactctccagtccttcccacctcctccctacccttctacacacgttctctttctccctcccgcctccgtcccctgctgccccccgccagccctcaccacctgccctccttctaccaggacctcagaagcccagacctggggaccccacctacacaggggcattgacagactggagttgaaagccgacgaaccgacacgcggcagagtcaataattcaataaaaaagttacgaactttctctgtaacttgggtttcaataattatggatttttatgaaaacttgaaataataaaaagagaaaaaaactatttcctatagctagtcggaatgcaaacttttgacgtcctgattgctccagggccctcttccaactcagtttcttgtttttctcttcctcctcctcctcttcttcctcctttctcttctcttccccagtggggagggatcactcaggaaaacaggaaaggaggttccagccccacccacctgcccaccccgccccaggcaccatcaggagcaggctagggggcaggcctgggcccagctccgggctggctttttgcagggcgcaggtggaggggacaggtctgccgatgggggtgggagcctgtctgctgggctgccaggcggcaccactgcaaggggtgggagcctggcttgggtgtggctgagactctggacagaggctggggtcctcctgggggacagcacagtcagtggagagagccaggggctggaggtggggcccaccccagcctctggtcccagctctgctgctcacttgctgtgtggcctcaagcaggtcactggcctctctgggcctcagtctccacatctgtacaaatgggaacattaccccctgccctgcctacctcacagggctgttgtgaggaattgatgagatgatgtatgtgaaacactttgtaacctgtaaagcgctgtgcacacgtg

SEQ ID NO: 11376 - DNA, 2677 bp, Homo sapiens
  source 1..2677: mol_type = unassigned DNA
agaggataattccccattatacagagatatttagcctaatagaagccgacagatcattcagggcagtaatgtactccggcttcaagcgtgtagtttcctcagcctgaactcccagattaaaggctccttgcccagcccgccctgtgccggtgcctgtgaccttgactgcaatgatgggggatcttatgaccatgacctggctaccttgagtctgtggggctacacagccttcagcctgcatctccagggctctgactctatccagctcctggaccagctcccaagtctactcctgaccccagcctgggccaaggggacttctcaagctttgggacccagcaggacacagcagcagtcaggtgcatgctgggaccgcgacggacaggctgccgcaccccaggcccccagaggccagtctgtttgcctcccaacgccatctgacccaggtgagcaagaggatgctggcggggggcgtgaggagcatgcccagccccctcctggcctgctggcagcccatcctcctgctggtgctgggctcagtgctgtcaggctcggccacgggctgcccgccccgctgcgagtgctccgcccaggaccgcgctgtgctgtgccaccgcaagcgctttgtggcagtccccgagggcatccccaccgagacgcgcctgctggacctaggcaagaaccgcatcaaaacgctcaaccaggacgagttcgccagcttcccgcacctggaggagctggagctcaacgagaacatcgtgagcgccgtggagcccggcgccttcaacaacctcttcaacctccggacgctgggtctccgcagcaaccgcctgaagctcatcccgctaggcgtcttcactggcctcagcaacctgaccaagctggacatcagcgagaacaagatcgttatcctactggactacatgtttcaggacctgtacaacctcaagtcactggaggttggcgacaatgacctcgtctacatctctcaccgcgccttcagcggcctcaacagcctggagcagctgacgctggagaaatgcaacctgacctccatccccaccgaggcgctgtcccacctgcacggcctcatcgtcctgaggctccggcacctcaacatcaatgccatccgggactactccttcaagaggctgtaccgactcaaggtcttggagatctcccactggccctacttggacaccatgacacccaactgcctctacggcctcaacctgacgtccctgtccatcacacactgcaatctgaccgctgtgccctacctggccgtccgccacctagtctatctccgcttcctcaacctctcctacaaccccatcagcaccattgagggctccatgttgcatgagctgctccggctgcaggagatccagctggtgggcgggcagctggccgtggtggagccctatgccttccgcggcctcaactacctgcgcgtgctcaatgtctctggcaaccagctgaccacactggaggaatcagtcttccactcggtgggcaacctggagacactcatcctggactccaacccgctggcctgcgactgtcggctcctgtgggtgttccggcgccgctggcggctcaacttcaaccggcagcagcccacgtgcgccacgcccgagtttgtccagggcaaggagttcaaggacttccctgatgtgctactgcccaactacttcacctgccgccgcgcccgcatccgggaccgcaaggcccagcaggtgtttgtggacgagggccacacggtgcagtttgtgtgccgggccgatggcgacccgccgcccgccatcctctggctctcaccccgaaagcacctggtctcagccaagagcaatgggcggctcacagtcttccctgatggcacgctggaggtgcgctacgcccaggtacaggacaacggcacgtacctgtgcatcgcggccaacgcgggcggcaacgactccatgcccgcccacctgcatgtgcgcagctactcgcccgactggccccatcagcccaacaagaccttcgctttcatctccaaccagccgggcgagggagaggccaacagcacccgcgccactgtgcctttccccttcgacatcaagaccctcatcatcgccaccaccatgggcttcatctctttcctgggcgtcgtcctcttctgcctggtgctgctgtttctctggagccggggcaagggcaacacaaagcacaacatcgagatcgagtatgtgccccgaaagtcggacgcaggcatcagctccgccgacgcgccccgcaagttcaacatgaagatgatatgaggccggggcggggggcagggacccccgggcggccgggcaggggaaggggcctggccgccacctgctcactctccagtccttcccacctcctccctacccttctacacacgttctctttctccctcccgcctccgtcccctgctgccccccgccagccctcaccacctgccctccttctaccaggacctcagaagcccagacctggggaccccacctacacaggggcattgacagactggagttgaaagccgacgaaccgacacgcggcagagtcaataattcaataaaaaagttacgaactttctctgtaacttgggtttcaataattatggatttttatgaaaacttgaaataataaaaagagaaaaaaacta

SEQ ID NO: 11377 - DNA, 1035 bp, Homo sapiens
  source 1..1035: mol_type = unassigned DNA
tccagacaggactgtccagagcaacggtgtgccagagagactgagaagtacccagaaatggtgcagctggaacagaaggtgagcaagaggatgctggcggggggcgtgaggagcatgcccagccccctcctggcctgctggcagcccatcctcctgctggtgctgggctcagtgctgtcaggctcggccacgggctgcccgccccgctgcgagtgctccgcccaggaccgcgctgtgctgtgccaccgcaagcgctttgtggcagtccccgagggcatccccaccgagacgcgcctgctggacctaggcaagaaccgcatcaaaacgctcaaccaggacgagttcgccagcttcccgcacctggaggagctggagctcaacgagaacatcgtgagcgccgtggagcccggcgccttcaacaacctcttcaacctccggacgctgggtctccgcagcaaccgcctgaagctcatcccgctaggcgtcttcactggcctcagcaacctgaccaagctggacatcagcgagaacaagatcgttatcctactggactacatgtttcaggacctgtacaacctcaagtcactggaggttggcgacaatgacctcgtctacatctctcaccgcgccttcagcggcctcaacagcctggagcagctgacgctggagaaatgcaacctgacctccatccccaccgaggcgctgtcccacctgcacggcctcatcgtcctgaggctccggcacctcaacatcaatgccatccgggactactccttcaagaggctgtaccgactcaaggtcttggagatctcccactggccctacttggacaccatgacacccaactgcctctacggcctcaacctgacgtccctgtccatcacacactgcaatctgaccgctgtgccctacctggccgtccgccacctagtctatctccgcttcctcaacctctcctacaaccccatcagcaccattgagggctccatgttgcatgagctgctccggctgcaggagatccagctggtgggcggg

SEQ ID NO: 11378 - DNA, 938 bp, Homo sapiens
  source 1..938: mol_type = unassigned DNA
ggctcagcctcaggtcctgcggggctgaccagtgtgcagagtgccctgaaagtgccaggcctggctgggtgcttcccatcttcacagcagctgagaggcagctaccaccacccttcttatagaagaggaagcagaggctttgtgaagtgtcccaccgaggaggccctgatcttgagcccggagccctgagccctgagacgatgcttgaggatcttatgaccatgacctggctaccttgagtctgtggggctacacagccttcagcctgcatctccagggctctgactctatccagctcctggaccagctcccaagtctactcctgaccccagcctgggccaaggggacttctcaagctttgggacccagcaggacacagcagcagtcagggtgagcaagaggatgctggcggggggcgtgaggagcatgcccagccccctcctggcctgctggcagcccatcctcctgctggtgctgggctcagtgctgtcaggctcggccacgggctgcccgccccgctgcgagtgctccgcccaggaccgcgctgtgctgtgccaccgcaagcgctttgtggcagtccccgagggcatccccaccgagacgcgcctgctggacctaggcaagaaccgcatcaaaacgctcaaccaggacgagttcgccagcttcccgcacctggaggagctggagctcaacgagaacatcgtgagcgccgtggagcccggcgccttcaacaacctcttcaacctccggacgctgggtctccgcagcaaccgcctgaagctcatcccgctaggcgtcttcactggcctcagcaacctgaccaagctggacatcagcgagaacaagatcgttatcctactggactacatgtttcaggacctgtacaacctcaagtcactggaggttggcgacaatgacctcgtctacatctctcaccg

SEQ ID NO: 11379 - DNA, 588 bp, Homo sapiens
  source 1..588: mol_type = unassigned DNA
gattttaagctccatctcttgctggcggtgccaccttgggcaagccatgtggccattctgagctgttttctcatctgcagaatggttgggatcatttgtgcttcaagagtcatgtgcatgctgggaccgcgacggacaggctgccgcaccccaggcccccagaggccagtctgtttgcctcccaacgccatctgacccaggtgagcaagaggatgctggcggggggcgtgaggagcatgcccagccccctcctggcctgctggcagcccatcctcctgctggtgctgggctcagtgctgtcaggctcggccacgggctgcccgccccgctgcgagtgctccgcccaggaccgcgctgtgctgtgccaccgcaagcgctttgtggcagtccccgagggcatccccaccgagacgcgcctgctggacctaggcaagaaccgcatcaaaacgctcaaccaggacgagttcgccagcttcccgcacctggaggagctggagctcaacgagaacatcgtgagcgccgtggagcccggcgccttcaacaacctcttcaacctccggacgctgggtctccgcagcaaccgcctga

SEQ ID NO: 11380 - DNA, 611 bp, Homo sapiens
  source 1..611: mol_type = unassigned DNA
gcacacgctgcgcgctctcacgcgcatacacacgccctccctgccgcgctcgccgccgcggccaccatcgcggagccgagccctgcggagcgggaaccgaggccggagcggggaccggaggcagccgagccgggggatgccggcccggagcggagccgcgcgcggacggcgcgcccgggacgcctccggcacccacaggccctgaggctccagtgcccacaggcagagagggcgactgagtccagcccaggctgagccctgcccagctgtactccccagacacccacccaacccgagtgcatgctgggaccgcgacggacaggctgccgcaccccaggcccccagaggccagtctgtttgcctcccaacgccatctgacccaggtgagcaagaggatgctggcggggggcgtgaggagcatgcccagccccctcctggcctgctggcagcccatcctcctgctggtgctgggctcagtgctgtcaggctcggccacgggctgcccgccccgctgcgagtgctccgcccaggaccgcgctgtgctgtgccaccgcaagcgctttgtggcagtccccgagggcatccccaccgagacgcgcctgctggaccta

SEQ ID NO: 11381 - DNA, 552 bp, Homo sapiens
  source 1..552: mol_type = unassigned DNA
attattagctccatctaagagacaggaagacggagattccaagaggctcagggacttgcccggggtcacctggctgaccagtggccttgtcaggcctccacccagggatcttatgaccatgacctggctaccttgagtctgtggggctacacagccttcagcctgcatctccagggctctgactctatccagctcctggaccagctcccaagtctactcctgaccccagcctgggccaaggggacttctcaagctttgggacccagcaggacacagcagcagtcaggtgcatgctgggaccgcgacggacaggctgccgcaccccaggcccccagaggccagtctgtttgcctcccaacgccatctgacccaggtgagcaagaggatgctggcggggggcgtgaggagcatgcccagccccctcctggcctgctggcagcccatcctcctgctggtgctgggctcagtgctgtcaggctcggccacgggctgcccgccccgctgcgagtgctccgcccaggaccgcgctgtgctgtgccaccgcaagcgctt

SEQ ID NO: 11382 - DNA, 522 bp, Homo sapiens
  source 1..522: mol_type = unassigned DNA
actctgagatctaacccaaggaggagcgggtgcccgagaggggaagggagctcaagaaaaaaaaaaatagcttgcttgacttaattatgactgattgtgacagcttacatctttagtctgaaaagtatctatgggggatcttatgaccatgacctggctaccttgagtctgtggggctacacagccttcagcctgcatctccagggctctgactctatccagctcctggaccagctcccaagtctactcctgaccccagcctgggccaaggggacttctcaagctttgggacccagcaggacacagcagcagtcaggtgcatgctgggaccgcgacggacaggctgccgcaccccaggcccccagaggccagtctgtttgcctcccaacgccatctgacccaggtgagcaagaggatgctggcggggggcgtgaggagcatgcccagccccctcctggcctgctggcagcccatcctcctgctggtgctgggctcagtgctgtcaggctcggccacgggctg

SEQ ID NO: 11383 - DNA, 571 bp, Homo sapiens
  source 1..571: mol_type = unassigned DNA
acctcgttccctggtttccctgatgaggcagttggaaggaggaggcagaccagtcctgcctccggcacccacaggccctgaggctccagtgcccacaggcagagagggcgactgagtccagcccaggctgagccctgcccagctgtactccccagacacccacccaacccgaggtgtcccaccgaggaggccctgatcttgagcccggagccctgagccctgagacgatgcttgaggatcttatgaccatgacctggctaccttgagtctgtggggctacacagccttcagcctgcatctccagggctctgactctatccagctcctggaccagctcccaagtctactcctgaccccagcctgggccaaggggacttctcaagctttgggacccagcaggacacagcagcagtcaggtgcatgctgggaccgcgacggacaggctgccgcaccccaggcccccagaggccagtctgtttgcctcccaacgccatctgacccaggtgagcaagaggatgctggcggggggcgtgaggagcatgcccagccccctcctggcctgctggcagcc

SEQ ID NO: 11384 - DNA, 567 bp, Homo sapiens
  source 1..567: mol_type = unassigned DNA
gtgccaccgccccggactgttcccgcgcagcgaggtcccttccccggggcccccgggtggggccggtcgagccggcctccggcacccacaggccctgaggctccagtgcccacaggcagagagggcgactgagtccagcccaggctgagccctgcccagctgtactccccagacacccacccaacccgaggtgtcccaccgaggaggccctgatcttgagcccggagccctgagccctgagacgatgcttgaggatcttatgaccatgacctggctaccttgagtctgtggggctacacagccttcagcctgcatctccagggctctgactctatccagctcctggaccagctcccaagtctactcctgaccccagcctgggccaaggggacttctcaagctttgggacccagcaggacacagcagcagtcaggtgcatgctgggaccgcgacggacaggctgccgcaccccaggcccccagaggccagtctgtttgcctcccaacgccatctgacccaggtgagcaagaggatgctggcggggggcgtgaggagcatgcccagccc

SEQ ID NO: 11385 - DNA, 554 bp, Homo sapiens
  source 1..554: mol_type = unassigned DNA
agttggaaggaggaggcagaccagtcctggtgagtgtccggggtggcaaggattgcagtctcagcggtggcctcagctctcacagcctccggcacccacaggccctgaggctccagtgcccacaggcagagagggcgactgagtccagcccaggctgagccctgcccagctgtactccccagacacccacccaacccgaggtgtcccaccgaggaggccctgatcttgagcccggagccctgagccctgagacgatgcttgaggatcttatgaccatgacctggctaccttgagtctgtggggctacacagccttcagcctgcatctccagggctctgactctatccagctcctggaccagctcccaagtctactcctgaccccagcctgggccaaggggacttctcaagctttgggacccagcaggacacagcagcagtcaggtgcatgctgggaccgcgacggacaggctgccgcaccccaggcccccagaggccagtctgtttgcctcccaacgccatctgacccaggtgagcaagaggatgctggcgggg

SEQ ID NO: 11386 - DNA, 685 bp, Homo sapiens
  source 1..685: mol_type = unassigned DNA
ggcatcgcatcgtggcgagcaggaggcaggagcgggacgcgcaggggagccgggaccctcccgcgcacacgcacatgcacacgctgcgcgctctcacgcgcatacacacgccctccctgccgcgctcgccgccgcggccaccatcgcggagccgagccctgcggagcgggaaccgaggccggagcggggaccggaggcagccgagccgggggatgccggcccggagcggagccgcgcgcggacggcgcgcccgggacgcctccggcacccacaggccctgaggctccagtgcccacaggcagagagggcgactgagtccagcccaggctgagccctgcccagctgtactccccagacacccacccaacccgaggtgtcccaccgaggaggccctgatcttgagcccggagccctgagccctgagacgatgcttgaggatcttatgaccatgacctggctaccttgagtctgtggggctacacagccttcagcctgcatctccagggctctgactctatccagctcctggaccagctcccaagtctactcctgaccccagcctgggccaaggggacttctcaagctttgggacccagcaggacacagcagcagtcaggtgcatgctgggaccgcgacggacaggctgccgcaccccaggcccccagaggccagtctgtttgcctcc

SEQ ID NO: 11387 - DNA, 501 bp, Homo sapiens
  source 1..501: mol_type = unassigned DNA
agaccagtcctggtgagtgtccggggtggcaaggattgcagtctcagcggtggcctcagctctcacaggcaaggagcctccggcacccacaggccctgaggctccagtgcccacaggcagagagggcgactgagtccagcccaggctgagccctgcccagctgtactccccagacacccacccaacccgaggtgtcccaccgaggaggccctgatcttgagcccggagccctgagccctgagacgatgcttgaggatcttatgaccatgacctggctaccttgagtctgtggggctacacagccttcagcctgcatctccagggctctgactctatccagctcctggaccagctcccaagtctactcctgaccccagcctgggccaaggggacttctcaagctttgggacccagcaggacacagcagcagtcaggtgcatgctgggaccgcgacggacaggctgccgcaccccaggcccccagaggccagtctgtttgcct

SEQ ID NO: 11388 - DNA, 569 bp, Homo sapiens
  source 1..569: mol_type = unassigned DNA
agctgtcagcggcagccgaggctagcgcgggacgtcgccaccctagcgccaggccggagctagcagccgcggagccgcggagagcggagggggcggcggggccgggcgtggcgggtcccctcgccgcccactgcgcgctcgaaccctgggccccgcgagcggcgggcggcacccgctgtaatgcggagaatcctccggcacccacaggccctgaggctccagtgcccacaggcagagagggcgactgagtccagcccaggctgagccctgcccagctgtactccccagacacccacccaacccgaggtgtcccaccgaggaggccctgatcttgagcccggagccctgagccctgagacgatgcttgaggatcttatgaccatgacctggctaccttgagtctgtggggctacacagccttcagcctgcatctccagggctctgactctatccagctcctggaccagctcccaagtctactcctgaccccagcctgggccaaggggacttctcaagctttgggacccagcaggacacagcagcagtcaggtgcatgctgggaccgcgac

SEQ ID NO: 11389 - DNA, 3044 bp, Homo sapiens
  source 1..3044: mol_type = unassigned DNA
tgtaggaattgatgagtgccatcagaaagctgtatcatgagctgcctgcacttctaaagtgtccagtggatttttaatcacatgagcctggaaatagggttatgagaagaagctcagagcagagcaccgaaagtggccactaccagcatgaagagcccaacaattcaaactggtgaagtgagaaaaacagaatgcagctttcaaggttcgtttcaagcagttggcttgtgggactctgagagatgctgctgcccatgacatgcgggaattatcatgatcaactacccagcttggatttcacccagtggccaagagctttgtgtgggagacggcaagggttggatttttcaaaagagtaaaccaggataaatcatgaggaacctataacccttttggccacatgcaaaaaagcaagacccgtgaccaaggtgtagactaagaagtggagtcatgcttcacacggccatatcatgctggcagccattcctgggtctggctgtggtgttaatcttcatgggatccaccattggctgccccgctcgctgtgagtgctctgcccagaacaaatctgttagctgtcacagaaggcgattgatcgccatcccagagggcattcccatcgaaaccaaaatcttggacctcagtaaaaacaggctaaaaagcgtcaaccctgaagaattcatatcatatcctctgctggaagagatagacttgagtgacaacatcattgccaatgtggaaccaggagcattcaacaatctctttaacctgcgttccctccgcctaaaaggcaatcgtctaaagctggtccctttgggagtattcacggggctgtccaatctcactaagcttgacattagtgagaataagattgtcattttactagactacatgttccaagatctacataacctgaagtctctagaagtgggggacaatgatttggtttatatatcacacagggcattcagtgggcttcttagcttggagcagctcaccctggagaaatgcaacttaacagcagtaccaacagaagccctctcccacctccgcagcctcatcagcctgcatctgaagcatctcaatatcaacaatatgcctgtgtatgcctttaaaagattgttccacctgaaacacctagagattgactattggcctttactggatatgatgcctgccaatagcctctacggtctcaacctcacatccctttcagtcaccaacaccaatctgtctactgtacccttccttgcctttaaacacctggtatacctgactcaccttaacctctcctacaatcccatcagcactattgaagcaggcatgttctctgacctgatccgccttcaggagcttcatatagtgggggcccagcttcgcaccattgagcctcactccttccaagggctccgcttcctacgcgtgctcaatgtgtctcagaacctgctggaaactttggaagagaatgtcttctcctcccctagggctctggaggtcttgagcattaacaacaaccctctggcctgtgactgccgccttctctggatcttgcagcgacagcccaccctgcagtttggtggccagcaacctatgtgtgctggcccagacaccatccgtgagaggtctttcaaggatttccatagcactgccctttctttttactttacctgcaaaaaacccaaaatccgtgaaaagaagttgcagcatctgctagtagatgaagggcagacagtccagctagaatgcagtgcagatggagacccgcagcctgtgatttcctgggtgacaccccgaaggcgtttcatcaccaccaagtccaatggaagagccaccgtgttgggtgatggcaccttggaaatccgctttgcccaggatcaagacagcgggatgtatgtttgcatcgctagcaatgctgctgggaatgataccttcacagcctccttaactgtgaaaggattcgcttcagatcgttttctttatgcgaacaggacccctatgtacatgaccgactccaatgacaccatttccaatggcaccaatgccaatactttttccctggaccttaaaacaatactggtgtctacagctatgggctgcttcacattcctgggagtggttttattttgttttcttctcctttttgtgtggagccgagggaaaggcaagcacaaaaacagcattgaccttgagtatgtgcccagaaaaaacaatggtgctgttgtggaaggggaggtagctggacccaggaggttcaacatgaaaatgatttgaaggcccacccctcacattactgtctctttgtcaatgtgggtaatcagtaagacagtatggcacagtaaattactagattaagaggcagccatgtgcagctgcccctgtatcaaaagcagggtctatggaagcaggaggacttccaatggagactctccatcgaaaggcaggcaggcaggcatgtgtcagagcccttcacacagtgggatactaagtgtttgcgttgcaaatattggcgttctggggatctcagtaatgaacctgaatatttggctcacactcacggacaattattcagcattttctaccactgcaaaaaacaaaagaaaaaataaaaaagaacaacctacagtgtaggatttacatattaaaaagacacatttgtctaaaacatactctacagaaaaatttgtatctatgattatcatttgttaaagccttgcatcataccatattgttggttcagtaccacaaagagatcaatatattcttttcttccttttttgaaacatatatgctgtacatgttttaaagcaatatgaatgagaggttgtgcttttagttactcaccactatagatccaagtgtgatttcaccttccgttacctacagatgaccctgagactagatccctggagttatgggcggagatattttgagagatgtgtttgtctgatgtaggatgccaagaaacaggacccaaggcaaaactgctcaactctgttaacttctgttactataaataaaggcatgtgcctagttttgatacagaa

SEQ ID NO: 11390 - DNA, 498 bp, Homo sapiens
  source 1..498: mol_type = unassigned DNA
agatgctgctgcccatgacatgcgggaattatcatgatcaactacccagcttggatttcacccagtggccaagagctttgtgtgggagacggcaagggttggatttttcaaaagagtaaaccaggctaccttctcctgccacagatactctatcccatttgctgtcatccaacgactaacaccgttttcacttcagaacgtcaagccttttctgttctcttcatggcctcctcccattaaagctgaaagtatctgctatcagtcatttgtcctaactgagtaagagtacattctttttagaatttaagaacctacactttagacctctcttcactaattatagaatccatcattcaacaaatatttattgattgcctactatgtgccatgctctgttccaggctttaagggtgcagtggtagcaatcacagataggaccccattattctgtctacaccttgtgaggggagatagtcaataaagaaacaaacaaaataa

SEQ ID NO: 11391 - DNA, 2981 bp, Homo sapiens
  source 1..2981: mol_type = unassigned DNA
ttgtaggaattgatgagtgccatcagaaagctgtatcatgagctgcctgcacttctaaagtgtccagtggatttttaatcacatgagcctggaaatagggttatgagaagaagctcagagcagagcaccgaaagtggccactaccagcatgaagagcccaacaattcaaactggtaagtgagtctcatcttgtttgttgcaggttcgtttcaagcagttggcttgtgggactctgagagatgctgctgcccatgacatgcgggaattatcatgatcaactacccagcttggatttcacccagtggccaagagctttgtgtgggagacggcaagggttggatttttcaaagattcatgcagacccgtgaccaaggtgtagactaagaagtggagtcatgcttcacacggccatatcatgctggcagccattcctgggtctggctgtggtgttaatcttcatgggatccaccattggctgccccgctcgctgtgagtgctctgcccagaacaaatctgttagctgtcacagaaggcgattgatcgccatcccagagggcattcccatcgaaaccaaaatcttggacctcagtaaaaacaggctaaaaagcgtcaaccctgaagaattcatatcatatcctctgctggaagagatagacttgagtgacaacatcattgccaatgtggaaccaggagcattcaacaatctctttaacctgcgttccctccgcctaaaaggcaatcgtctaaagctggtccctttgggagtattcacggggctgtccaatctcactaagcttgacattagtgagaataagattgtcattttactagactacatgttccaagatctacataacctgaagtctctagaagtgggggacaatgatttggtttatatatcacacagggcattcagtgggcttcttagcttggagcagctcaccctggagaaatgcaacttaacagcagtaccaacagaagccctctcccacctccgcagcctcatcagcctgcatctgaagcatctcaatatcaacaatatgcctgtgtatgcctttaaaagattgttccacctgaaacacctagagattgactattggcctttactggatatgatgcctgccaatagcctctacggtctcaacctcacatccctttcagtcaccaacaccaatctgtctactgtacccttccttgcctttaaacacctggtatacctgactcaccttaacctctcctacaatcccatcagcactattgaagcaggcatgttctctgacctgatccgccttcaggagcttcatatagtgggggcccagcttcgcaccattgagcctcactccttccaagggctccgcttcctacgcgtgctcaatgtgtctcagaacctgctggaaactttggaagagaatgtcttctcctcccctagggctctggaggtcttgagcattaacaacaaccctctggcctgtgactgccgccttctctggatcttgcagcgacagcccaccctgcagtttggtggccagcaacctatgtgtgctggcccagacaccatccgtgagaggtctttcaaggatttccatagcactgccctttctttttactttacctgcaaaaaacccaaaatccgtgaaaagaagttgcagcatctgctagtagatgaagggcagacagtccagctagaatgcagtgcagatggagacccgcagcctgtgatttcctgggtgacaccccgaaggcgtttcatcaccaccaagtccaatggaagagccaccgtgttgggtgatggcaccttggaaatccgctttgcccaggatcaagacagcgggatgtatgtttgcatcgctagcaatgctgctgggaatgataccttcacagcctccttaactgtgaaaggattcgcttcagatcgttttctttatgcgaacaggacccctatgtacatgaccgactccaatgacaccatttccaatggcaccaatgccaatactttttccctggaccttaaaacaatactggtgtctacagctatgggctgcttcacattcctgggagtggttttattttgttttcttctcctttttgtgtggagccgagggaaaggcaagcacaaaaacagcattgaccttgagtatgtgcccagaaaaaacaatggtgctgttgtggaaggggaggtagctggacccaggaggttcaacatgaaaatgatttgaaggcccacccctcacattactgtctctttgtcaatgtgggtaatcagtaagacagtatggcacagtaaattactagattaagaggcagccatgtgcagctgcccctgtatcaaaagcagggtctatggaagcaggaggacttccaatggagactctccatcgaaaggcaggcaggcaggcatgtgtcagagcccttcacacagtgggatactaagtgtttgcgttgcaaatattggcgttctggggatctcagtaatgaacctgaatatttggctcacactcacggacaattattcagcattttctaccactgcaaaaaacaaaagaaaaaataaaaaagaacaacctacagtgtaggatttacatattaaaaagacacatttgtctaaaacatactctacagaaaaatttgtatctatgattatcatttgttaaagccttgcatcataccatattgttggttcagtaccacaaagagatcaatatattcttttcttccttttttgaaacatatatgctgtacatgttttaaagcaatatgaatgagaggttgtgcttttagttactcaccactatagatccaagtgtgatttcaccttccgttacctacagatgaccctgagactagatccctggagttatgggcggagatattttgagagatgtgtttgtctgatgtaggatgccaagaaacaggacccaaggcaaaactgctcaactctgttaacttctgttactataaataaaggcatgtgcctagttttg

SEQ ID NO: 11392 - DNA, 3031 bp, Homo sapiens
  source 1..3031: mol_type = unassigned DNA
tgtaggaattgatgagtgccatcagaaagctgtatcatgagctgcctgcacttctaaagtgtccagtggatttttaatcacatgagcctggaaatagggttatgagaagaagctcagagcagagcaccgaaagtggccactaccagcatgaagagcccaacaattcaaactggtaagtgagtctcatcttgtttgttgcaggttcgtttcaagcagttggcttgtgggactctgagagatgctgctgcccatgacatgcgggaattatcatgatcaactacccagcttggatttcacccagtggccaagagctttgtgtgggagacggcaagggttggatttttcaaagattttctcaggataaatcatgaggaacctataacccttttggccacatgcaaaaaagcaagacccgtgaccaaggtgtagactaagaagtggagtcatgcttcacacggccatatcatgctggcagccattcctgggtctggctgtggtgttaatcttcatgggatccaccattggctgccccgctcgctgtgagtgctctgcccagaacaaatctgttagctgtcacagaaggcgattgatcgccatcccagagggcattcccatcgaaaccaaaatcttggacctcagtaaaaacaggctaaaaagcgtcaaccctgaagaattcatatcatatcctctgctggaagagatagacttgagtgacaacatcattgccaatgtggaaccaggagcattcaacaatctctttaacctgcgttccctccgcctaaaaggcaatcgtctaaagctggtccctttgggagtattcacggggctgtccaatctcactaagcttgacattagtgagaataagattgtcattttactagactacatgttccaagatctacataacctgaagtctctagaagtgggggacaatgatttggtttatatatcacacagggcattcagtgggcttcttagcttggagcagctcaccctggagaaatgcaacttaacagcagtaccaacagaagccctctcccacctccgcagcctcatcagcctgcatctgaagcatctcaatatcaacaatatgcctgtgtatgcctttaaaagattgttccacctgaaacacctagagattgactattggcctttactggatatgatgcctgccaatagcctctacggtctcaacctcacatccctttcagtcaccaacaccaatctgtctactgtacccttccttgcctttaaacacctggtatacctgactcaccttaacctctcctacaatcccatcagcactattgaagcaggcatgttctctgacctgatccgccttcaggagcttcatatagtgggggcccagcttcgcaccattgagcctcactccttccaagggctccgcttcctacgcgtgctcaatgtgtctcagaacctgctggaaactttggaagagaatgtcttctcctcccctagggctctggaggtcttgagcattaacaacaaccctctggcctgtgactgccgccttctctggatcttgcagcgacagcccaccctgcagtttggtggccagcaacctatgtgtgctggcccagacaccatccgtgagaggtctttcaaggatttccatagcactgccctttctttttactttacctgcaaaaaacccaaaatccgtgaaaagaagttgcagcatctgctagtagatgaagggcagacagtccagctagaatgcagtgcagatggagacccgcagcctgtgatttcctgggtgacaccccgaaggcgtttcatcaccaccaagtccaatggaagagccaccgtgttgggtgatggcaccttggaaatccgctttgcccaggatcaagacagcgggatgtatgtttgcatcgctagcaatgctgctgggaatgataccttcacagcctccttaactgtgaaaggattcgcttcagatcgttttctttatgcgaacaggacccctatgtacatgaccgactccaatgacaccatttccaatggcaccaatgccaatactttttccctggaccttaaaacaatactggtgtctacagctatgggctgcttcacattcctgggagtggttttattttgttttcttctcctttttgtgtggagccgagggaaaggcaagcacaaaaacagcattgaccttgagtatgtgcccagaaaaaacaatggtgctgttgtggaaggggaggtagctggacccaggaggttcaacatgaaaatgatttgaaggcccacccctcacattactgtctctttgtcaatgtgggtaatcagtaagacagtatggcacagtaaattactagattaagaggcagccatgtgcagctgcccctgtatcaaaagcagggtctatggaagcaggaggacttccaatggagactctccatcgaaaggcaggcaggcaggcatgtgtcagagcccttcacacagtgggatactaagtgtttgcgttgcaaatattggcgttctggggatctcagtaatgaacctgaatatttggctcacactcacggacaattattcagcattttctaccactgcaaaaaacaaaagaaaaaataaaaaagaacaacctacagtgtaggatttacatattaaaaagacacatttgtctaaaacatactctacagaaaaatttgtatctatgattatcatttgttaaagccttgcatcataccatattgttggttcagtaccacaaagagatcaatatattcttttcttccttttttgaaacatatatgctgtacatgttttaaagcaatatgaatgagaggttgtgcttttagttactcaccactatagatccaagtgtgatttcaccttccgttacctacagatgaccctgagactagatccctggagttatgggcggagatattttgagagatgtgtttgtctgatgtaggatgccaagaaacaggacccaaggcaaaactgctcaactctgttaacttctgttactataaataaaggcatgtgcctagttttg

SEQ ID NO: 11393 - DNA, 2323 bp, Homo sapiens
  source 1..2323: mol_type = unassigned DNA
aatgaggcgaggtcggaacaggatctgctggctccggctcggtttcctcgcacaggtctctccagctggatcctcgacgctagggaggaaggggcgcgggactgctgtgggggttttccctccccaggcaggggcaggacctgttccgggcgactgcagggttaagggtatcgtcttaaagagccggatcctcccggctggagcgaggctggatggcgggacgcagcctctcagcctctcgtacccgccctgcgtccgcagtggttgttggcgcagccgccccgtcggtgttccgggctcagtccccgctccccagcgccagacgcagactccgggccaagttctccctccgctcgctgctttctgccgcaggacccggatcaataaagggaaggagagccgggaggaaatgatggagaacagagagaaaggagatgcttgatttcactcgccaaggagtgagtgctcatcggcagacactgggctctggccacgcgtcttagactccaaatctcggctcactggtccctttgaggaggtcgcctggtgttcccgtagccctccaccccaccgtaggagagcgcctgccacgagctccgcgcctcgctaagtgctttgctacgtgaactcttagttttcccaacatccctaagccgccgatacattatcacccacgtattgcggacgagagaaccgcctcggagaagctggctggctcgcttggagttttgcagctagtggcggagcgagcattccgagcaggtactgtgcgatcctccagcgccggccgcagctcacagccccttagctccgccgggttattgtgcggccgcgccttctgcacctgttgcggccctcgctaggcgggaagggagggagaagaggaggacaaaggggatgaccaggtggctctcccccgacggactcccggcccagggagcggatagaccactcccagagagagtgtggctttgagccttggagaggatgctctccttctccagggatcgcctccccagcggacgcagagtttcagggaaatgtccgcctccgccacttgggatggcagtggggagaggaggatctgggtgtccggaggagggcagtgggagaaagctggagctgctggagtcgcagctgcctgcggagcgggcccgggaggaagcggggccgagcgtgcggcgtccacgcgataagctccacaaacccaaagctacacagactgaggtcaaaccatctgtgaggtttaacctccgcacctccaaggacccagagcatgaaggatgctacctctccgtcggccacagccagcccttagaagactgcagtttcaacatgacagctaaaacctttttcatcattcacggatggacgatgagcggtatctttgaaaactggctgcacaaactcgtgtcagccctgcacacaagagagaaagacgccaatgtagttgtggttgactggctccccctggcccaccagctttacacggatgcggtcaataataccagggtggtgggacacagcattgccaggatgctcgactggctgcaggagaaggacgatttttctctcgggaatgtccacttgatcggctacagcctcggagcgcacgtggccgggtatgcaggcaacttcgtgaaaggaacggtgggccgaatcacaggtttggatcctgccgggcccatgtttgaaggggccgacatccacaagaggctctctccggacgatgcagattttgtggatgtcctccacacctacacgcgttccttcggcttgagcattggtattcagatgcctgtgggccacattgacatctaccccaatgggggtgacttccagccaggctgtggactcaacgatgtcttgggatcaattgcatatggaacaatcacagaggtggtaaaatgtgagcatgagcgagccgtccacctctttgttgactctctggtgaatcaggacaagccgagttttgccttccagtgcactgactccaatcgcttcaaaaaggggatctgtctgagctgccgcaagaaccgttgtaatagcattggctacaatgccaagaaaatgaggaacaagaggaacagcaaaatgtacctaaaaacccgggcaggcatgcctttcagaggtaaccttcagtccctggagtgtccctgaggaaggcccttaatacctccttcttaataccatgctgcagagcagggcacatcctagcccaggagaagtggccagcacaatccaatcaaatcgttgcaaatcagattacactgtgcatgtcctaggaaagggaatctttacaaaataaacagtgtggacccct

SEQ ID NO: 11394 - DNA, 505 bp, Homo sapiens
  source 1..505: mol_type = unassigned DNA
cagacactgggctctggccacgcgtcttagactccaaatctcggctcactggtccctttgaggaggtcgcctggtgttcccgtagccctccaccccaccgtaggagagcgcctgccacgagctccgcgcctcgctaagtgctttgctacgtgaactcttagttttcccaacatccctaagccgccgatacattatcacccacgtattgcggacgagagaaccgcctcggagaagctggctggctcgcttggagttttgcagctagtggcggagcgagcattccgagcagataagctccacaaacccaaagctacacagactgaggtcaaaccatctgtgaggtttaacctccgcacctccaaggacccagagcatgaaggatgctacctctccgtcggccacagccagcccttagaagactgcagtttcaacatgacagctaaaacctttttcatcattcacggatggacgatgagcggtatctttgaaaactggctgcacaaac

SEQ ID NO: 11395 - DNA, 10441 bp, Homo sapiens
  source 1..10441: mol_type = unassigned DNA
aaaaactacctctataggagcgtgacagcagcgagtccttgcctcccggcggctcaggacgagggcagatctcgttctggggcaagccgttgacactcgctccctgccaccgcccgggctccgtgccgccaagttttcattttccaccttctctgcctccagtcccccagcccctggccgagagaagggtcttaccggccgggattgctggaaacaccaagaggtggtttttgttttttaaaacttctgtttcttgggagggggtgtggcggggcaggatgagcaactccgttcctctgctctgtttctggagcctctgctattgctttgctgcggggagccccgtaccttttggtccagagggacggctggaagataagctccacaaacccaaagctacacagactgaggtcaaaccatctgtgaggtttaacctccgcacctccaaggacccagagcatgaaggatgctacctctccgtcggccacagccagcccttagaagactgcagtttcaacatgacagctaaaacctttttcatcattcacggatggacgatgagcggtatctttgaaaactggctgcacaaactcgtgtcagccctgcacacaagagagaaagacgccaatgtagttgtggttgactggctccccctggcccaccagctttacacggatgcggtcaataataccagggtggtgggacacagcattgccaggatgctcgactggctgcaggagaaggacgatttttctctcgggaatgtccacttgatcggctacagcctcggagcgcacgtggccgggtatgcaggcaacttcgtgaaaggaacggtgggccgaatcacaggtttggatcctgccgggcccatgtttgaaggggccgacatccacaagaggctctctccggacgatgcagattttgtggatgtcctccacacctacacgcgttccttcggcttgagcattggtattcagatgcctgtgggccacattgacatctaccccaatgggggtgacttccagccaggctgtggactcaacgatgtcttgggatcaattgcatatggaacaatcacagaggtggtaaaatgtgagcatgagcgagccgtccacctctttgttgactctctggtgaatcaggacaagccgagttttgccttccagtgcactgactccaatcgcttcaaaaaggggatctgtctgagctgccgcaagaaccgttgtaatagcattggctacaatgccaagaaaatgaggaacaagaggaacagcaaaatgtacctaaaaacccgggcaggcatgcctttcagagtttaccattatcagatgaaaatccatgtcttcagttacaagaacatgggagaaattgagcccaccttttacgtcaccctttatggcactaatgcagattcccagactctgccactggaaatagtggagcggatcgagcagaatgccaccaacaccttcctggtctacaccgaggaggacttgggagacctcttgaagatccagctcacctgggagggggcctctcagtcttggtacaacctgtggaaggagtttcgcagctacctgtctcaaccccgcaaccccggacgggagctgaatatcaggcgcatccgggtgaagtctggggaaacccagcggaaactgacattttgtacagaagaccctgagaacaccagcatatccccaggccgggagctctggtttcgcaagtgtcgggatggctggaggatgaaaaacgaaaccagtcccactgtggagcttccctgagggtgcccgggcaagtcttgccagcaaggcagcaagacttcctgctatccaagcccatggaggaaagttactgctgaggacccacccaatggaaggattcttctcagccttgaccctggagcactgggaacaactggtctcctgtgatggctgggactcctcgcgggaggggactgcgctgctatagctcttgctgcctctcttgaatagctctaactccaaacctctgtccacacctccagagcaccaagtccagatttgtgtgtaagcagctgggtgcctggggcctctcgtgcacactggattggtttctcagttgctgggcgagcctgtactctgcctgacgaggaacgctggctccgaagaggccctgtgtagaaggctgtcagctgctcagcctgctttgagcctcagtgagaagtccttccgacaggagctgactcatgtcaggatggcaggcctggtatcttgctcgggccctagctgttggggttctcatgggttgcactgaccatactgcttacgtcttagccattccgtcctgctccccagctcactctctgaagcacacatcattggctttcctatttttctgttcattttttaattgagcaaatgtctattgaacacttaaaattaattagaatgtggtaatggacatattactgagcctctccatttggaacccagtggagttgggatttctagaccctctttctgtttggatggtgtatgtgtatatgcatggggaaaggcacctggggcctgggggaggctataggatataagcattagggaccctgaggctttaagtggtttctatttcttcttagttattatgtgccaccttcttagttattatgtgccacctcccctatgagtgacgtgtttgatcactagcagaatagcaagcagagtatcattcatgctggggccagaatgatggccggttgccagatataactgctttggagcaaatctcttctgtttagagagatagaagttatgacatatgtaatacacatctgtgtacacagaaaccggcacctgccagacagagctggttctaagatttaatacagtgctttttttcctctttgaaatattttactttaataccagtgccttttcttgttgaacttcttggaaaagccaccaattctagatcttgatttgaattaatacacacaatatctgagacacttacacttttcaaaagatttgtgtatgcattgcctaattagagtagggggagaagggcaactattattatccctattttacaaaactgaggcttagtgaggttcagccacatgcctagacttatatactagttagtggtgcagccagggagaggactcagatttcctggaggcaaagtctatctctgaaactccatgaagacttttgcagccagttcccaccaatatgccccagacgtgagacaaacaaggacttttttttttatatagagccatccataaaatcctaagcccttttattaatgtataaccaggagaacatctgtgccaacggttggactttttatggctgagattcgggaggaagtgtgacaccaagcaggagaggaagaatgattttctttgtacttaggttttctaaggacattgttttaatctgtatcgtgccaaagttgtatcactgttaaacttctgaagacataaccagttgagtcttatttcaagatatgttctcaagccaattgtgtgcttctcttgtttctgtgattgctttctagccaaagcgaagcttgtacaggttgagtatcccttatccaaaatgcttggaaccagaagtgtttcaaattttagattattttcagattttggaatgtttgcatatacataatgagatattttgggaataggacccgagcctaaacacaaaattcattgatgtgtcagttacaccttatccacatagcctgagggtaattttatacgatattttaaatagttgtgtacatgaagcatggtttgtggtaacttatgtgaggggttttcccattttttgtcttgttggtgctcaaaaagttttggattttggagcatttcggattttggatttttggattagggttgctcaacccatattattggctgtacatcctggtcacttctgacttctgtttttactaatggaagctttgcaaattgaattctcagtgagttgtatatttatacacctggcttgaagccttaattgtatataatgatgctttttaaaaaatgctatttggaagactatttatttctcgtgtatataatgtatataaaaaaatatggttagtgtttacctaaggttaaccaatttcaagattaaaatttttaaatagtaaaataataaaaaattataaagttcttaatggtctgacaactcaattttttttttttttttttttttttttgagacagagcctctctctgtcacccaggctggagtgcagtggcaatcttggctcactacaacctctgcctcctgggctcaggtggtcctcccacctcagccttctgagtagctgggattacagagatgcgtcaccatgtctggctaatttttgtatttttagtagagatggggtttcgccatgttggccaggctggtcaggctgggttcgaactcctggcctcaagtgatccgcctgcctcagcctctgaaagttctgagattataggtgtgagccaccgtgcctggccaattcttaaagtttgaaagaatatagctgccccaacctagagtctgacaaaaagttactctaatataaggcatattctttatttgacactcatcgttagcagaagtggacagcaattcactaaagaaccagaacaagaacatcatttcactgaagacgagaagaaaaattatttcaattgtagcagcttgaaggcctgaaggtggatgttaggaagaacagggagcatggctggacactggggagcattagtgagattattaggtttggttgaattggaactagatatcagtgacttagaccagagggaagctgatttctctattggttaaagtcccagctggtagtaaggttctattctacaggccaagagggctgcaggttcttagtttttcactgtgccattcatggggtattcctcgcatccccacagcccaggggtcccctaccagccaatggaaagccagaaaagggaagggatgaacagtctcctcttaaagacatgactgagaagttgcttacattctattggccagaaataaatccatggtcacatgacaggctgggaaatacagtctttatttagggtgcccatgggccctgctgaagatccaattactatttatttaaaattgacatataataattgtacatatttgtggggaaaatagtgatgtttcgatacatacaaggtatagtgatcatgttggaataattagcatacccatcctttcaaacatgtatcatttctttgtgttgggaacattcaatatcctccttctagttacttgaaaccatattttattaactctagttttacccttcagtggtataggacactagaatttattcctcctgtctagctgtaatcttgtttgtttcgtttggtgttttttgtttttttgtttttttttgagatggagtcttgctctgtagcccaggctggagtgcaggggcatgatcttggcccactgcaacctccgcctcctgggttcaagtgattctcctgcctcagcctcccaagtagctgggattacaggcatgcaccaccacacccagctaatttttgtatttttagtagagacaaggtttcaccatgttggccaggctggtcttgaactcctgacctcaagtgatccacctacctcagccttccaaactgtcgggattaccggtgtgagccaccgggcccagccactagctgtaattttgtatcttttaacaattccgtccctatttcccctttccccctaccaattactatttattaaaagggaaattggatcttgccatccgtttatcaggaattagttttttctctgctaaagccagcgagatagaccagagtaccctttaaatgattaaatcctgtagtcaatttttagtaatcttaaattgatctatgactatgaagtataatgcattacatcagtttgactttatttctggtcttaagtgtgaaaacatttctaaatgacaaggaagctctttataaagggctttagtgatggtggaaactccactgtccatctctaccaggacattctgaaaccaggcttgataatggctgtagggagttgggttagacaataagagataagttcttaacttggttcagatgtcagaggaaagcagaaaatggtgtctctggcatagtaaagaaaattgttgaaatttcccaaaggaagagtcatagcctggatgactgcaagtgccttctttggcttgggggttcagttactagttagagtcaggggaacttccacaggacttcctttgactctccaaacaagctgaagccccagaccccttggaaggatggatacaaagtaggtactagaacagtctttgtcatcaaatatggtatttctcaggtgtcacctctgtgttcagagctaccctgagccctctgccatgtaagctctctgatggcacagatttttatctggcttgttttctgccgttatcttagaagctagaatagtgtctggaacatcatgggtattcaatgaatatttaaataaatagatgaaattagatataagaaactaggtgcttaaacaggcaggaggtaatctgggaaaagagcagttagtttggaatcagaattcttggtgtgtcatccagcattatgtgagttttaggctaaatacagcctttctgagtctctatctgctcatttaagaaacagagacaatactgctcagggttgttgtgaatgttaaaggtacatggtaaaaaagaaagtatttgtgttttgtaaacatttgaattgataagaggacagtgtgagacaaaaataaaatcctgggtgggcacggtggctcacccctgtaatctcagcactttgggaggctgagatgggaggatcacgaggtcaggagtgcgagaccagcctggccaatatggtgaaaccacgtctctgctaaaaatacaaaaattagctgggcgtggtggcacgtgcctgtagtcccagctacgccggaggctgaggcagaagaatcgctcgaacctgggagatggagtttgcagtgagctgagatcacgccactgcactccagcctaggcaactgagtgagactccatctcaaaataaaataaaatagaatagaataaaataaaatcctttccacatatatgcggaaattttatgtatgataaaaggggcctattagtctttgggaaaggaatggatggatgatgagaaagtaggctcatttgacaaagagaaacaaaattagattcctattttaacacgcaacaaagatgaattccaaaatacctattgggtactatgcttattacctgagtgacgaaataatctgtacagcaaactcctgtgacacaccatttaactacataacaaacctgcatacgtacccctgaaactaaagtagaagttaaaaccatcaacccccccaaaacaaaaatgaattccatctgaataaaaggtataaatgtgaaagtcatcatgctaatagatattatgaaatataaattcaaaacctgtataaaaactgaaaaaatgtaaaacgtcacaattagaataagaaaatttaaatagaacaatgaatattaaataaactaaaatgctaataaaatgtactccttagggccaggtgcggtggctcacacctgtaatcccagcactttgggaggccgaggtgggtggatcacctgaggtcaggagtttgagaccagcctggccaatgtggtgaaaccctgtctctactaaaaatacaaaaagttagccaggtgtgatggtgggcacctgtaatcccagctacttgggaggctgaggtaggaaaatcacttgaacccagaaggcagaagttgcagtgagcctagatcacggcactacactccagcctgggcaacaagagcaaatctctatctcaaaaaaaaaaaaaaaaaaaaaaaggccacagaaatgtccatccagcaggtggacaattacccttttgtcagccgttcctctgttgctgaccattagatccacatttcttttctgtccgccctggtcccctggtgccccctttcctggcccctgtgacatattgtcatgtagctccaagtatttccccccctcatatccctcaagtgctccattttccaaatgcatttgacttcctactctcttagccccagctctctggtattctgtgtagctgacttccacaagggatctgttgggagcttgtaactgaactgaagtcatgcacattgtcaatggctagtagacctttacctggtccagagttgtctgcattgtttaaagaagacgtttgttaatccaaattaatctttgatttgcatggaggcagtaggtcaaatcaaaaggaaattttcctctccctagcaagcaaactcagaaacaaacaaacaaacgaaaaccaagaaacaaaaggaaaggttcctgttgggatagagaaacagtggagcagggcagccaccttacacataggctagatctgcttgggaatctttcttctaatcgaggcccctaaaatattcctgattttcacagttgatttcatttcttccctcctgaacttacagagcctttcagtaaacaccagtatttgtccctccccgtgtatgcccagtggtttccatggcagcaacggttgccatagagaggtgaagagaggtgtcggtgccctcttttgtaactgtgggttatctatagattgggggtggcctctcctaaaaaagactaatatgtaaataaaaggaataagaatcaaacaaatataaatcagggctcaagtcatttgttttcctaaacctttgtggttatccataccatttaaccttgactttccttaaatcataccggtgcgtgtgtgtgtgcagagggaaagggctgcaagaagactctggaagctaggacaggtctcagcaggtgagggctcaggcccagaggccagctggggcagcagggagcagagttatctgggccatttgctaattatctcagcccagacgagtctgcacgctatgtggtttaataccttcaccagaggcaaatggttttggactcacaagaattgctcatggccagaggcaatggacagatgccatatgagaaagggctgaggccaggaacagaggcagggttatctcactggaatggagaagctaaaatgacattatctttacttctgccctggttattatcccaaggcaacttcagtgggcttgttttgaagtcaaagcctcaactatttattgtgagggagataattcattttcattttcctgccagagatgtcagtcttactattcatcctgtatcctctattagatacacagagcttcttccttctgcttaggctgccccaaattccatataggattctttttgaagaatatatatcatccaaaaagaggtcctaggaaatgtggcttcacaaccctggggtttgtttccctggctgctgtctctctctctctcttttttaattttttttggagacacggtatcactgtgtggcccaggctggagtgtggtggcgccatcactgctcactgcagcctcgacctcctgggctcaagcagtcctcccacttcagcctcccaaatagctgggactacaggtgtactccactatgcctggctacattttgaattttttgtagagatggggttttgccatgttgctcaggttggtctcaaactcctgggctcaagcaatccacccaacttggcctcccaaagtgctgggattagaggcatgagccatcaggcctggccatgctgcctctctctccttcaaggtagacttcctctttccttccccttctccctgcttctttctccttctcctctccttctcctcttctccttcttcttctcacagctttttattgacttataacaggcacacaataaactgcacacaggtaaatcatataatttgacattttggtacaggaaatcatcatgaaactgaaagcattaccacatcgagattgtgaacataccaccaccagaagttttcttgtgcccctttgtaattcttcccactgccctctccccaggttgtccctgatctgctttttgtccttgtagattagttgcattttctagaattttgtataagtggagtgtatctacagtatgttctcttttgtgtctgccttcttgtactcagcataattattttgagattcatccacgtctttgcatggatcagtcatctgttccattttattgctaagcagtattccactgtatagataaataacattttgtttatccgtttacttgttgatgaactttaagttgtttccagttttgagttattagagtaatgctactatgaacatttgcatatgaatccttgtatggacatgaactttcatttcttttgggagtaggatagctggatcatatggaatgtatatgtttaacttttaaataaactgccaaactgttttcc

SEQ ID NO: 11396 - DNA, 1760 bp, Homo sapiens
  source 1..1760: mol_type = unassigned DNA
agcgagtccttgcctcccggcggctcaggacgagggcagatctcgttctggggcaagccgttgacactcgctccctgccaccgcccgggctccgtgccgccaagttttcattttccaccttctctgcctccagtcccccagcccctggccgagagaagggtcttaccggccgggattgctggaaacaccaagaggtggtttttgttttttaaaacttctgtttcttgggagggggtgtggcggggcaggatgagcaactccgttcctctgctctgtttctggagcctctgctattgctttgctgcggggagccccgtaccttttggtccagagggacggctggaagataagctccacaaacccaaagctacacagactgaggtcaaaccatctgtgaggtttaacctccgcacctccaaggacccagagcatgaaggatgctacctctccgtcggccacagccagcccttagaagactgcagtttcaacatgacagctaaaacctttttcatcattcacggatggacgatgagcggtatctttgaaaactggctgcacaaactcgtgtcagccctgcacacaagagagaaagacgccaatgtagttgtggttgactggctccccctggcccaccagctttacacggatgcggtcaataataccagggtggtgggacacagcattgccaggatgctcgactggctgcaggagaaggacgatttttctctcgggaatgtccacttgatcggctacagcctcggagcgcacgtggccgggtatgcaggcaacttcgtgaaaggaacggtgggccgaatcacagcaatcacagaggtggtaaaatgtgagcatgagcgagccgtccacctctttgttgactctctggtgaatcaggacaagccgagttttgccttccagtgcactgactccaatcgcttcaaaaaggggatctgtctgagctgccgcaagaaccgttgtaatagcattggctacaatgccaagaaaatgaggaacaagaggaacagcaaaatgtacctaaaaacccgggcaggcatgcctttcagagtttaccattatcagatgaaaatccatgtcttcagttacaagaacatgggagaaattgagcccaccttttacgtcaccctttatggcactaatgcagattcccagactctgccactggaaatagtggagcggatcgagcagaatgccaccaacaccttcctggtctacaccgaggaggacttgggagacctcttgaagatccagctcacctgggagggggcctctcagtcttggtacaacctgtggaaggagtttcgcagctacctgtctcaaccccgcaaccccggacgggagctgaatatcaggcgcatccgggtgaagtctggggaaacccagcggaaactgacattttgtacagaagaccctgagaacaccagcatatccccaggccgggagctctggtttcgcaagtgtcgggatggctggaggatgaaaaacgaaaccagtcccactgtggagcttccctgagggtgcccgggcaagtcttgccagcaaggcagcaagacttcctgctatccaagcccatggaggaaagttactgctgaggacccacccaatggaaggattcttctcagccttgaccctggagcactgggaacaactggtctcctgtgatggctgggactcctcgcgggaggggactgcgctgctatagctcttgctgcctctcttgaatagctctaactccaaacctctgt

SEQ ID NO: 11397 - DNA, 1453 bp, Homo sapiens
  source 1..1453: mol_type = unassigned DNA
ggacgagggcagatctcgttctggggcaagccgttgacactcgctccctgccaccgcccgggctccgtgccgccaagttttcattttccaccttctctgcctccagtcccccagcccctggccgagagaagggtcttaccggccgggattgctggaaacaccaagaggtggtttttgttttttaaaacttctgtttcttgggagggggtgtggcggggcaggatgagcaactccgttcctctgctctgtttctggagcctctgctattgctttgctgcggggagccccgtaccttttggtccagagggacggctggaagataagctccacaaacccaaagctacacagactgaggtcaaaccatctgtgaggtttaacctccgcacctccaaggacccagagcatgaaggatgctacctctccgtcggccacagccagcccttagaagactgcagtttcaacatgacagctaaaacctttttcatcattcacggatggacgatgagcggtatctttgaaaactggctgcacaaactcgtgtcagccctgcacacaagagagaaagacgccaatgtagttgtggttgactggctccccctggcccaccagctttacacggatgcggtcaataataccagggtggtgggacacagcattgccaggatgctcgactggctgcaggagaaggacgatttttctctcgggaatgtccacttgatcggctacagcctcggagcgcacgtggccgggtatgcaggcaacttcgtgaaaggaacggtgggccgaatcacaggtttggatcctgccgggcccatgtttgaaggggccgacatccacaagaggctctctccggacgatgcagattttgtggatgtcctccacacctacacgcgttccttcggcttgagcattggtattcagatgcctgtgggccacattgacatctaccccaatgggggtgacttccagccaggctgtggactcaacgatgtcttgggatcaattgcatatggaacaatcacagaggtggtaaaatgtgagcatgagcgagccgtccacctctttgttgactctctggtgaatcaggacaagccgagttttgccttccagtgcactgactccaatcgcttcaaaaaggggatctgtctgagctgccgcaagaaccgttgtaatagcattggctacaatgccaagaaaatgaggaacaagaggaacagcaaaatgtacctaaaaacccgggcaggcatgcctttcagaggtaaccttcagtccctggagtgtccctgaggaaggcccttaatacctccttcttaataccatgctgcagagcagggcacatcctagcccaggagaagtggccagcacaatccaatcaaatcgttgcaaatcagattacactgtgcatgtcctaggaaagggaatctttacaaaataaacagtgtggacccctttt

SEQ ID NO: 11398 - DNA, 565 bp, Homo sapiens
  source 1..565: mol_type = unassigned DNA
ctctgctattgctttgctgcggggagccccgtaccttttggtccagagggacggctggaagataagctccacaaacccaaagctacacagactgaggtcaaaccatctgtgaggtttaacctccgcacctccaaggacccagagcatgaaggatgctacctctccgtcggccacagccagcccttagaagactgcagtttcaacatgacagctaaaacctttttcatcattcacggatggacgatgagcggtatctttgaaaactggctgcacaaactcgtgtcagccctgcacacaagagagaaagacgccaatgtagttgtggttgactggctccccctggcccaccagctttacacggatgcggtcaataataccagggtggtgggacacagcattgccaggatgctcgactggctgcaggtactgggggatgagagggagtctcctgtcaccagcaggatctcaaacccaatcttcttaagaaatgcaggtcatgcatctgttgccatgaacttctggagtctgataaaaatctttgagattaaaagttttattgaattaa

SEQ ID NO: 11399 - DNA, 3548 bp, Homo sapiens
  source 1..3548: mol_type = unassigned DNA
tatttaaatgtgtacatttcaaagtgtttccacatatattaacttcattgatcctccagacaaccatgtagattggacacacccaggaaagatgactaaggaaggctattctttttttattgagacagggtcttgctctgtcacccaggctggagtacagtggcatgatcacagctcattgcagcctcgacctccctgggctcagatgatcttcctacctcagcctcctgagtagcttggattacaggaatgtgccactatgcctggctaatttttgtagagatgaggtttcaccatgttgcccaggctggtctctatctcctgagctcaagtgatctgcctgcctcggcctcccagtgctgggtttgcaggcatgagccactgtgcccagtcaggatggctattcttatgataaaggctaagatatttattcttctttcccgctttggaattcatatacctgagaactctatgattcaccctctcactactaattttagaaaacaagctgtccttttccattccctcaaaaacaataggagtccaagtaataaatgaacactaggaagtcatagcatcatatgtaacatgtttagcatcctccctcctgacatggatgctgttcacatgttcactgataaggagcctgagattcagagaggttcagtggtgtgttcacatagctgagactagaatccaggtctcctaactctcagtcttgccccctttctgccaatacagtgtctctcttgtatttctagatcaaggcaaagaggacactttgatagttctccccacacttgtgtgtccatgattgtgtgtgtgtgtgtgtgtgtgtgtgtgtgtgtgtatgttgtgggtggataatatgtaaatgcaagaactgtgatgtactcaactcagggtccagagggtgctgcagtgtggtgtttctcaaagtgcatctatggcttgtcaggttagggagagaaggcagcactcgggaccttgtccatttattctgaaaggaatacatgtaaaatagtcccataggggtgtcagaaagcttggccttaaggtcaaaagagcacaccctgaatacaggtttgcgcgtttgctggtgtgtgagctaacaaatgccactctcacacggtttctttcagtcccactgtggagcttccctgagggtgcccgggcaagtcttgccagcaaggcagcaagacttcctgctatccaagcccatggaggaaagttactgctgaggacccacccaatggaaggattcttctcagccttgaccctggagcactgggaacaactggtctcctgtgatggctgggactcctcgcgggaggggactgcgctgctatagctcttgctgcctctcttgaatagctctaactccaaacctctgtccacacctccagagcaccaagtccagatttgtgtgtaagcagctgggtgcctggggcctctcgtgcacactggattggtttctcagttgctgggcgagcctgtactctgcctgacgaggaacgctggctccgaagaggccctgtgtagaaggctgtcagctgctcagcctgctttgagcctcagtgagaagtccttccgacaggagctgactcatgtcaggatggcaggcctggtatcttgctcgggccctagctgttggggttctcatgggttgcactgaccatactgcttacgtcttagccattccgtcctgctccccagctcactctctgaagcacacatcattggctttcctatttttctgttcattttttaattgagcaaatgtctattgaacacttaaaattaattagaatgtggtaatggacatattactgagcctctccatttggaacccagtggagttgggatttctagaccctctttctgtttggatggtgtatgtgtatatgcatggggaaaggcacctggggcctgggggaggctataggatataagcattagggaccctgaggctttaagtggtttctatttcttcttagttattatgtgccaccttcttagttattatgtgccacctcccctatgagtgacgtgtttgatcactagcagaatagcaagcagagtatcattcatgctggggccagaatgatggccggttgccagatataactgctttggagcaaatctcttctgtttagagagatagaagttatgacatatgtaatacacatctgtgtacacagaaaccggcacctgccagacagagctggttctaagatttaatacagtgctttttttcctctttgaaatattttactttaataccagtgccttttcttgttgaacttcttggaaaagccaccaattctagatcttgatttgaattaatacacacaatatctgagacacttacacttttcaaaagatttgtgtatgcattgcctaattagagtagggggagaagggcaactattattatccctattttacaaaactgaggcttagtgaggttcagccacatgcctagacttatatactagttagtggtgcagccagggagaggactcagatttcctggaggcaaagtctatctctgaaactccatgaagacttttgcagccagttcccaccaatatgccccagacgtgagacaaacaaggacttttttttttatatagagccatccataaaatcctaagcccttttattaatgtataaccaggagaacatctgtgccaacggttggactttttatggctgagattcgggaggaagtgtgacaccaagcaggagaggaagaatgattttctttgtacttaggttttctaaggacattgttttaatctgtatcgtgccaaagttgtatcactgttaaacttctgaagacataaccagttgagtcttatttcaagatatgttctcaagccaattgtgtgcttctcttgtttctgtgattgctttctagccaaagcgaagcttgtacaggttgagtatcccttatccaaaatgcttggaaccagaagtgtttcaaattttagattattttcagattttggaatgtttgcatatacataatgagatattttgggaataggacccgagcctaaacacaaaattcattgatgtgtcagttacaccttatccacatagcctgagggtaattttatacgatattttaaatagttgtgtacatgaagcatggtttgtggtaacttatgtgaggggttttcccattttttgtcttgttggtgctcaaaaagttttggattttggagcatttcggattttggatttttggattagggttgctcaacccatattattggctgtacatcctggtcacttctgacttctgtttttactaatggaagctttgcaaattgaattctcagtgagttgtatatttatacacctggcttgaagccttaattgtatataatgatgctttttaaaaaatgctatttggaagactatttatttctcgtgtatataatgtatataaaaaaatatggttagtgtttacctaaggttaaccaatttcaagattaaaatttttaaatagtaaaataataaaaaattataaagttctt

SEQ ID NO: 11400 - DNA, 2632 bp, Homo sapiens
  source 1..2632: mol_type = unassigned DNA
gctaaaaactttaccatcttcccagttcactcccagtcggtcttaggagacaggaccgctattgtgcccattttgcagacaggaagccgagctcagagaggatgggtaacatgcccgaaggcacagagagtgtcttggtctgtccggacgcgtctgtagagttacaggaagagaagggccgccctccagagggccgggagcgccccagcgcgggtccggggtcgaggtaaaatgtcggttccaggaccttaccaggcggccactgggccttcctcagcaccatccgcacctccatcctatgaagagacagtggctgttaacagttattaccccacacctccagctcccatgcctgggccaactacggggcttgtgacggggcctgatgggaagggcatgaatcctccttcgtattatacccagccagcgcccatccccaataacaatccaattaccgtgcagacggtctacgtgcagcaccccatcacctttttggaccgccctatccaaatgtgttgtccttcctgcaacaagatgatcgtgagtcagctgtcctataacgccggtgctctgacctggctgtcctgcgggagcctgtgcctgctggggtgcatagcgggctgctgcttcatccccttctgcgtggatgccctgcaggacgtggaccattactgtcccaactgcagagctctcctgggcacctacaagcgtttgtaggactcagccagacgtggagggagccgggtgccgcaggaagtcctttccacctctcatccagcttcacgcctggtggaggttctgccctggtggtctcacctctccagggggcccaccttcatgtcttcttttggggggaatacgtcgcaaaactaacaaatctccaaaccccagaaattgctgcttggagtcgtgcataggacttgcaaagacattccccttgagtgtcagttccacggtttcctgcctccctgagaccctgagtcctgccatctaactgtgatcattgccctatccgaatatcttcctgtgatctgccatcagtggctcttttttcctgcttccatgggcctttctggtggcagtctcaaactgagaagccacagttgccttatttttgaggctgttctgcccagagctcggctgaaccagcctttagtgcctaccattatcttatccgtctcttcccgtccctgatgacaaagatcttgccttacagactttacaggcttggctttgagattctgtaactgcagacttcattagcacacagattcactttaatttcttaattttttttttaaatacaaggagggggctattaacacccagtacagacatatccacaaggtcgtaaatgcatgctagaaaaatagggctggatcttatcactgccctgtctccccttgtttctctgtgccagatcttcagtgcccctttccatacagggatttttttctcatagagtaattatatgaacagtttttatgacctccttttggtctgaaatacttttgaacagaatttcttttttttaaaaaaaaacagagatggggtcttactatgttgcccaggctggtgtcgaactcctgggctcaagcgatccttctgccttggcctcccgaagtgctgggattgcaggcataagctaccatgctgggcctgaacataatttcaagaggaggatttataaaaccattttctgtaatcaaatgattggtgtcattttcccatttgccaatgtagtctcacttaaaaaaaaaaaaaagaaaaagaaatggataatttcatctactgcctttacttggggttaatgtgattcttaaacaccttcatcatggaactctcagagtggggtccgttttggtttcctggtggtgggttttgaaagataagggaaagcacattttgagcatgtctgggtaccatggtgcggatgcttgggaaccagaactgtttcagaggaatctaaagtctgattttagttttcagagacacagcttgttgtaaaacatgagaagacatgatttctaggactcaagcagcaagccaggattctaggttggctgctgtgtcatctttgaagtcaagacaaagctgggctcgaccttcaagggtcctcgttttgataatacttcagaatagggaactcatgtgaatactactatgtagaaataaaacctagaccttgagcgaacatctgtatattggttgaaaacgatagtggtaaccattgatcccccttcatttgatgtttggaaaattccagtaattatcatttttgcaacgaatatggataccacatagtactttggtgttacctgcttttgaaaaataaagtctttggttcacccggtgaactatttatgagttcttttggtgtgaagaaagggctcatgttgcatttccagccattgctacaaagaacctttatttgttcagtaacggtagaaaatccttcccgattaaaaacttcagacttgctgaatatcctgcaatgtcaagatgaccgatgttgagttgggtggatttgctaacgagtcagatttgaacatgaggctattggaacccaataggcgtcattgatggcggcaagccatagctttcaagttttaataaaatgcacaaaagagaa

SEQ ID NO: 11401 - DNA, 2292 bp, Homo sapiens
  source 1..2292: mol_type = unassigned DNA
ccttttctcggggcgcccgagaggccagctcagacctcccggctcgacaggcggcgcgggcggcggtaaaatgtcggttccaggaccttaccaggcggccactgggccttcctcagcaccatccgcacctccatcctatgaagagacagtggctgttaacagttattaccccacacctccagctcccatgcctgggccaactacggggcttgtgacggggcctgatgggaagggcatgaatcctccttcgtattatacccagccagcgcccatccccaataacaatccaattaccgtgcagacggtctacgtgcagcaccccatcacctttttggaccgccctatccaaatgtgttgtccttcctgcaacaagatgatcgtgagtcagctgtcctataacgccggtgctctgacctggctgtcctgcgggagcctgtgcctgctggggcaggagtgcagtggtacgatcgtagctctccgcagctttgatctcctgggctcctgcaatccgcccagctcagcctcctgagtacctgggaccacaggtgcatagcgggctgctgcttcatccccttctgcgtggatgccctgcaggacgtggaccattactgtcccaactgcagagctctcctgggcacctacaagcgtttgtaggactcagccagacgtggagggagccgggtgccgcaggaagtcctttccacctctcatccagcttcacgcctggtggaggttctgccctggtggtctcacctctccagggggcccaccttcatgtcttcttttggggggaatacgtcgcaaaactaacaaatctccaaaccccagaaattgctgcttggagtcgtgcataggacttgcaaagacattccccttgagtgtcagttccacggtttcctgcctccctgagaccctgagtcctgccatctaactgtgatcattgccctatccgaatatcttcctgtgatctgccatcagtggctcttttttcctgcttccatgggcctttctggtggcagtctcaaactgagaagccacagttgccttatttttgaggctgttctgcccagagctcggctgaaccagcctttagtgcctaccattatcttatccgtctcttcccgtccctgatgacaaagatcttgccttacagactttacaggcttggctttgagattctgtaactgcagacttcattagcacacagattcactttaatttcttaattttttttttaaatacaaggagggggctattaacacccagtacagacatatccacaaggtcgtaaatgcatgctagaaaaatagggctggatcttatcactgccctgtctccccttgtttctctgtgccagatcttcagtgcccctttccatacagggatttttttctcatagagtaattatatgaacagtttttatgacctccttttggtctgaaatacttttgaacagaatttcttttttttaaaaaaaaacagagatggggtcttactatgttgcccaggctggtgtcgaactcctgggctcaagcgatccttctgccttggcctcccgaagtgctgggattgcaggcataagctaccatgctgggcctgaacataatttcaagaggaggatttataaaaccattttctgtaatcaaatgattggtgtcattttcccatttgccaatgtagtctcacttaaaaaaaaaaaaaagaaaaagaaatggataatttcatctactgcctttacttggggttaatgtgattcttaaacaccttcatcatggaactctcagagtggggtccgttttggtttcctggtggtgggttttgaaagataagggaaagcacattttgagcatgtctgggtaccatggtgcggatgcttgggaaccagaactgtttcagaggaatctaaagtctgattttagttttcagagacacagcttgttgtaaaacatgagaagacatgatttctaggactcaagcagcaagccaggattctaggttggctgctgtgtcatctttgaagtcaagacaaagctgggctcgaccttcaagggtcctcgttttgataatacttcagaatagggaactcatgtgaatactactatgtagaaataaaacctagaccttgagcgaacatctgtatattggttgaaaacgatagtggtaaccattgatcccccttcatttgatgtttggaaaattccagtaattatcatttttgcaacgaatatggataccacatagtactttggtgttacctgcttttgaaaaataaagtctttggttcacccggtg

SEQ ID NO: 11402 - DNA, 2356 bp, Homo sapiens
  source 1..2356: mol_type = unassigned DNA
gtttctctccctgcccccgcgacttcgcgcaagatccgggaaggacacccgaggcccctgggagaccctggggaggtgaaaatcagagagcgaagcgggccgtggcccctaggcctgacccctccccgcggggtaaggcgggcaccccgcgagcgcaggggtcctcttactgctgatggcacccagctctgggcccagacgccgctcaccgtccaccgccggtgctgggtaaaatgtcggttccaggaccttaccaggcggccactgggccttcctcagcaccatccgcacctccatcctatgaagagacagtggctgttaacagttattaccccacacctccagctcccatgcctgggccaactacggggcttgtgacggggcctgatgggaagggcatgaatcctccttcgtattatacccagccagcgcccatccccaataacaatccaattaccgtgcagacggtctacgtgcagcaccccatcacctttttggaccgccctatccaaatgtgttgtccttcctgcaacaagatgatcgtgagtcagctgtcctataacgccggtgctctgacctggctgtcctgcgggagcctgtgcctgctggggtgcatagcgggctgctgcttcatccccttctgcgtggatgccctgcaggacgtggaccattactgtcccaactgcagagctctcctgggcacctacaagcgtttgtaggactcagccagacgtggagggagccgggtgccgcaggaagtcctttccacctctcatccagcttcacgcctggtggaggttctgccctggtggtctcacctctccagggggcccaccttcatgtcttcttttggggggaatacgtcgcaaaactaacaaatctccaaaccccagaaattgctgcttggagtcgtgcataggacttgcaaagacattccccttgagtgtcagttccacggtttcctgcctccctgagaccctgagtcctgccatctaactgtgatcattgccctatccgaatatcttcctgtgatctgccatcagtggctcttttttcctgcttccatgggcctttctggtggcagtctcaaactgagaagccacagttgccttatttttgaggctgttctgcccagagctcggctgaaccagcctttagtgcctaccattatcttatccgtctcttcccgtccctgatgacaaagatcttgccttacagactttacaggcttggctttgagattctgtaactgcagacttcattagcacacagattcactttaatttcttaattttttttttaaatacaaggagggggctattaacacccagtacagacatatccacaaggtcgtaaatgcatgctagaaaaatagggctggatcttatcactgccctgtctccccttgtttctctgtgccagatcttcagtgcccctttccatacagggatttttttctcatagagtaattatatgaacagtttttatgacctccttttggtctgaaatacttttgaacagaatttcttttttttaaaaaaaaacagagatggggtcttactatgttgcccaggctggtgtcgaactcctgggctcaagcgatccttctgccttggcctcccgaagtgctgggattgcaggcataagctaccatgctgggcctgaacataatttcaagaggaggatttataaaaccattttctgtaatcaaatgattggtgtcattttcccatttgccaatgtagtctcacttaaaaaaaaaaaaaagaaaaagaaatggataatttcatctactgcctttacttggggttaatgtgattcttaaacaccttcatcatggaactctcagagtggggtccgttttggtttcctggtggtgggttttgaaagataagggaaagcacattttgagcatgtctgggtaccatggtgcggatgcttgggaaccagaactgtttcagaggaatctaaagtctgattttagttttcagagacacagcttgttgtaaaacatgagaagacatgatttctaggactcaagcagcaagccaggattctaggttggctgctgtgtcatctttgaagtcaagacaaagctgggctcgaccttcaagggtcctcgttttgataatacttcagaatagggaactcatgtgaatactactatgtagaaataaaacctagaccttgagcgaacatctgtatattggttgaaaacgatagtggtaaccattgatcccccttcatttgatgtttggaaaattccagtaattatcatttttgcaacgaatatggataccacatagtactttggtgttacctgcttttgaaaaataaagtctttggttcacccggt

SEQ ID NO: 11403 - DNA, 1118 bp, Homo sapiens
  source 1..1118: mol_type = unassigned DNA
caggctgtcgggggcggacgggtggggctggcaccgagaggcaggggcaggataggagagtgggggagacaccaggtccgcgccaggcgtctcgggggtaaaatgtcggttccaggaccttaccaggcggccactgggccttcctcagcaccatccgcacctccatcctatgaagagacagtggctgttaacagttattaccccacacctccagctcccatgcctgggccaactacggggcttgtgacggggcctgatgggaagggcatgaatcctccttcgtattatacccagccagcgcccatccccaataacaatccaattaccgtgcagacggtctacgtgcagcaccccatcacctttttggaccgccctatccaaatgtgttgtccttcctgcaacaagatgatcgtgagtcagctgtcctataacgccggtgctctgacctggctgtcctgcgggagcctgtgcctgctggggtgcatagcgggctgctgcttcatccccttctgcgtggatgccctgcaggacgtggaccattactgtcccaactgcagagctctcctgggcacctacaagcgtttgtaggactcagccagacgtggagggagccgggtgccgcaggaagtcctttccacctctcatccagcttcacgcctggtggaggttctgccctggtggtctcacctctccagggggcccaccttcatgtcttcttttggggggaatacgtcgcaaaactaacaaatctccaaaccccagaaattgctgcttggagtcgtgcataggacttgcaaagacattccccttgagtgtcagttccacggtttcctgcctccctgagaccctgagtcctgccatctaactgtgatcattgccctatccgaatatcttcctgtgatctgccatcagtggctcttttttcctgcttccatgggcctttctggtggcagtctcaaactgagaagccacagttgccttatttttgaggctgttctgcccagagctcggctgaaccagcctttagtgcctaccattatcttatccgtctcttcccgtccctgatgacaaagatcttgccttacagactttacaggcttggctttgagattctgtaa

SEQ ID NO: 11404 - DNA, 677 bp, Homo sapiens
  source 1..677: mol_type = unassigned DNA
caggcggcgcgggcggcggtaaaatgtcggttccaggaccttaccaggcggccactgggccttcctcagcaccatccgcacctccatcctatgaagagacagtggctgttaacagttattaccccacacctccagctcccatgcctgggccaactacggggcttgtgacggggcctgatgggaagggcatgaatcctccttcgtattatacccagccagcgcccatccccaataacaatccaagtgcatagcgggctgctgcttcatccccttctgcgtggatgccctgcaggacgtggaccattactgtcccaactgcagagctctcctgggcacctacaagcgtttgtaggactcagccagacgtggagggagccgggtgccgcaggaagtcctttccacctctcatccagcttcacgcctggtggaggttctgccctggtggtctcacctctccagggggcccaccttcatgtcttcttttggggggaatacgtcgcaaaactaacaaatctccaaaccccagaaattgctgcttggagtcgtgcataggacttgcaaagacattccccttgagtgtcagttccacggtttcctgcctccctgagaccctgagtcctgccatctaactgtgatcattgccctatccgaatatcttcctgtgatctgccatcagt

SEQ ID NO: 11405 - DNA, 582 bp, Homo sapiens
  source 1..582: mol_type = unassigned DNA
accgaagtgactctgccaaagagtctaagtgaagtgccattaccgtgcagacggtctacgtgcagcaccccatcacctttttggaccgccctatccaaatgtgttgtccttcctgcaacaagatgatcgtgagtcagctgtcctataacgccggtgctctgacctggctgtcctgcgggagcctgtgcctgctggggtgcatagcgggctgctgcttcatccccttctgcgtggatgccctgcaggacgtggaccattactgtcccaactgcagagctctcctgggcacctacaagcgtttgtaggactcagccagacgtggagggagccgggtgccgcaggaagtcctttccacctctcatccagcttcacgcctggtggaggttctgccctggtggtctcacctctccagggggcccaccttcatgtcttcttttggggggaatacgtcgcaaaactaacaaatctccaaaccccagaaattgctgcttggagtcgtgcataggacttgcaaagacattccccttgagtgtcagttccacggtttcctgcctccctgagaccctgagtcctgccatctaa

SEQ ID NO: 11406 - DNA, 773 bp, Homo sapiens
  source 1..773: mol_type = unassigned DNA
agacctcccggctcgacaggcggcgcgggcggcggtaaaatgtcggttccaggaccttaccaggcggccactgggccttcctcagcaccatccgcacctccatcctatgaagagacagtggctgttaacagttattaccccacacctccagctcccatgcctgggccaactacggggcttgtgacggggcctgatgggaagggcatgaatcctccttcgtattatacccagccagcgcccatccccaataacaatccaatgaatgctattggccttgtttcctgagcaacctgtgtttgtccctctccctttcatcagttaccgtgcagacggtctacgtgcagcaccccatcacctttttggaccgccctatccaaatgtgttgtccttcctgcaacaagatgatcgtgagtcagctgtcctataacgccggtgctctgacctggctgtcctgcgggagcctgtgcctgctggggtgcatagcgggctgctgcttcatccccttctgcgtggatgccctgcaggacgtggaccattactgtcccaactgcagagctctcctgggcacctacaagcgtttgtaggactcagccagacgtggagggagccgggtgccgcaggaagtcctttccacctctcatccagcttcacgcctggtggaggttctgccctggtggtctcacctctccagggggcccaccttcatgtcttcttttggggggaatacgtcgcaaaactaacaaatctccaaaccccagaaattgctgcttgga

SEQ ID NO: 11407 - DNA, 516 bp, Homo sapiens
  source 1..516: mol_type = unassigned DNA
agacctcccggctcgacaggcggcgcgggcggcggagttgaatccccctgggggttttcaagttgttcttggactgctggtttttgaaatagaagcccctttggtggggtcccccataaacccaggcgctggtgcccaccttgtgatgtgaaggctcctgtaacacgacctcactttcctggccccgcactactcacctgccccacgggacacagttaccgtgcagacggtctacgtgcagcaccccatcacctttttggaccgccctatccaaatgtgttgtccttcctgcaacaagatgatcgtgagtcagctgtcctataacgccggtgctctgacctggctgtcctgcgggagcctgtgcctgctggggtgcatagcgggctgctgcttcatccccttctgcgtggatgccctgcaggacgtggaccattactgtcccaactgcagagctctcctgggcacctacaagcgtttgtaggactcagccagacgtggagggagccgggtgccgca

SEQ ID NO: 11408 - DNA, 603 bp, Homo sapiens
  source 1..603: mol_type = unassigned DNA
ccctgcgctcagccttctgagccttcctcatctgatgcctgttaggctccctttgctgctgaggtcctgggtgccatcccagcacttggtaaaatgtcggttccaggaccttaccaggcggccactgggccttcctcagcaccatccgcacctccatcctatgaagagacagtggctgttaacagttattaccccacacctccagctcccatgcctgggccaactacggggcttgtgacggggcctgatgggaagggcatgaatcctccttcgtattatacccagccagcgcccatccccaataacaatccaattaccgtgcagacggtctacgtgcagcaccccatcacctttttggaccgccctatccaaatgtgttgtccttcctgcaacaagatgatcgtgagtcagctgtcctataacgccggtgctctgacctggctgtcctgcgggagcctgtgcctgctggggtgcatagcgggctgctgcttcatccccttctgcgtggatgccctgcaggacgtggaccattactgtcccaactgcagagctctcctgggcacctacaagcgtttgtaggactcagccagacgtggagggagc

SEQ ID NO: 11409 - DNA, 717 bp, Homo sapiens
  source 1..717: mol_type = unassigned DNA
agacctcccggctcgacaggcggcgcgggcggcggagttgaatccccctgggggttttcaagttgttcttggactgctggtttttgaaatagaagcccctttggtggggtcccccataaacccaggcgctggtgcccaccttgtgatgtgaaggctcctgtaacacgacctcactttcctggccccgcactactcacctgccccacgggacacaggtaaaatgtcggttccaggaccttaccaggcggccactgggccttcctcagcaccatccgcacctccatcctatgaagagacagtggctgttaacagttattaccccacacctccagctcccatgcctgggccaactacggggcttgtgacggggcctgatgggaagggcatgaatcctccttcgtattatacccagccagcgcccatccccaataacaatccaattaccgtgcagacggtctacgtgcagcaccccatcacctttttggaccgccctatccaaatgtgttgtccttcctgcaacaagatgatcgtgagtcagctgtcctataacgccggtgctctgacctggctgtcctgcgggagcctgtgcctgctggggtgcatagcgggctgctgcttcatccccttctgcgtggatgccctgcaggacgtggaccattactgtcccaactgcagagctctcctgggcacctacaagcgtttgtaggactcagccag

SEQ ID NO: 11410 - DNA, 579 bp, Homo sapiens
  source 1..579: mol_type = unassigned DNA
aggaaaagaaacccgccttgagccaccgcagctcgtgccaggggtctcagatgatggacagacactgatatggaggttcaaatttcgggaaacacagcaacagcccagccatggtaaaatgtcggttccaggaccttaccaggcggccactgggccttcctcagcaccatccgcacctccatcctatgaagagacagtggctgttaacagttattaccccacacctccagctcccatgcctgggccaactacggggcttgtgacggggcctgatgggaagggcatgaatcctccttcgtattatacccagccagcgcccatccccaataacaatccaattaccgtgcagacggtctacgtgcagcaccccatcacctttttggaccgccctatccaaatgtgttgtccttcctgcaacaagatgatcgtgagtcagctgtcctataacgccggtgctctgacctggctgtcctgcgggagcctgtgcctgctggggtgcatagcgggctgctgcttcatccccttctgcgtggatgccctgcaggacgtggaccattactgtcccaactgcagagctct

SEQ ID NO: 11411 - DNA, 593 bp, Homo sapiens
  source 1..593: mol_type = unassigned DNA
gacctcccggctcgacaggcggcgcgggcggcggaatttccccagagctacagtgagggtggaaaaaagaggatctgcaagaggaagtcctgtattcttggcactgtgacttgtcctctatttgttttcgcttttacagcagtgaaaatagccccgtgggtgaggcggtctatcaggtaaaatgtcggttccaggaccttaccaggcggccactgggccttcctcagcaccatccgcacctccatcctatgaagagacagtggctgttaacagttattaccccacacctccagctcccatgcctgggccaactacggggcttgtgacggggcctgatgggaagggcatgaatcctccttcgtattatacccagccagcgcccatccccaataacaatccaattaccgtgcagacggtctacgtgcagcaccccatcacctttttggaccgccctatccaaatgtgttgtccttcctgcaacaagatgatcgtgagtcagctgtcctataacgccggtgctctgacctggctgtcctgcgggagcctgtgcctgctggggtgcatagcgggctgctgcttcatccccttctgcg

SEQ ID NO: 11412 - DNA, 553 bp, Homo sapiens
  source 1..553: mol_type = unassigned DNA
gaaagtggggagagccgcgagcggcaaatcaggagggagggccaggctgtcgggggcggacgggtggggctggcaccgagaggcaggggcaggataggagagtgggggagacaccaggtccgcgccaggcgtctcgggggtaaaatgtcggttccaggaccttaccaggcggccactgggccttcctcagcaccatccgcacctccatcctatgaagagacagtggctgttaacagttattaccccacacctccagctcccatgcctgggccaactacggggcttgtgacggggcctgatgggaagggcatgaatcctccttcgtattatacccagccagcgcccatccccaataacaatccaattaccgtgcagacggtctacgtgcagcaccccatcacctttttggaccgccctatccaaatgtgttgtccttcctgcaacaagatgatcgtgagtcagctgtcctataacgccggtgctctgacctggctgtcctgcgggagcctgtgcctgctggggcaggagtgcagtggtacgatcgtagctctcc

SEQ ID NO: 11413 - DNA, 548 bp, Homo sapiens
  source 1..548: mol_type = unassigned DNA
ggggcgcccgagaggccagctcagacctcccggctcgacaggcggcgcgggcggcggtaaaatgtcggttccaggaccttaccaggcggccactgggccttcctcagcaccatccgcacctccatcctatgaagagacagtggctgttaacagttattaccccacacctccagctcccatgcctgggccaactacggggcttgtgacggggcctgatgggaagggcatgaatcctccttcgtattatacccagccagcgcccatccccaataacaatccaattaccgtgcagacggtctacgtgcagcaccccatcacctttttggaccgccctatccaaatgtgttgtccttcctgcaacaagatgatcgtgagtcagctgtcctataacgccggtgctctgacctggctgtcctgcgggagcctgtgcctgctggggtgagtctgcctcccacttggccccaagccatcctgcccttctctctgggtgctggcgggggtgggttctcaactgcaccatgcttgacattcagggccagacatttgtg

SEQ ID NO: 11414 - DNA, 486 bp, Homo sapiens
  source 1..486: mol_type = unassigned DNA
agacctcccggctcgacaggcggcgcgggcggcggtaaaatgtcggttccaggaccttaccaggcggccactgggccttcctcagcaccatccgcacctccatcctatgaagagacagtggctgttaacagttattaccccacacctccagctcccatgcctgggccaactacggggcttgtgacggggcctgatgggaagggcatgaatcctccttcgtattatacccagccagcgcccatccccaataacaatccaagtacgtgtggcctcccaggccccccttaccattccttggccctccaccctgggaatcaggagagtgaccgaagtgactctgccaaagagtctaagtgaagtgccagtacgttccagttttacccccttaccttgaaattccacacgcagtcttttagattccatgttggtgaggctcacagcttttccgtaataaagtatggtttaggatctttcccatggtcatca

SEQ ID NO: 11415 - DNA, 554 bp, Homo sapiens
  source 1..554: mol_type = unassigned DNA
aagcagtaacccattttctctgggacccctttcttcgcagagagcgcttctctttctttcgcctattacacttctgctcttaacttcagtctggtgtgtccgcatcctagttttgcatggctgtcagacaacaaatctcggaccctccagccacatctcctgtaaataccccgtgtctttgtgctacccagagcccgagtctggccccatgtgcccgtgtaggtgtggaaccctgccacctgcgacacaggtcttcgaggagtcaaaaagggtaacttcctgacgttgccatgacatttgtaaactgtcatggtgctggtgggagtgtagcagtgaggaagaccagagttcgccctcgtcgccgtcttggttttggtaaaatgtcggttccaggaccttaccaggcggccactgggccttcctcagcaccatccgcacctccatcctatgaagagacagtggctgttaacagttattaccccacacctccagctcccatgcctgggccaactacggggcttgtgacggggcctgatgggaagggcatgaatcct

SEQ ID NO: 11416 - DNA, 587 bp, Homo sapiens
  source 1..587: mol_type = unassigned DNA
agacctcccggctcgacaggcggcgcgggcggcgaattataaatgtgtttgtgtggctgtttgatctcaaagcaatgctcagaagatgcagtgtctcgaaatcccagaagataagatgttaccacatgaaagatggtctcaataaagggggagaggcggtggccgaggccttaatttccaaaacgagaaactggggcccacccatcttttaaaggtcgtcaaaagaaagctcccatcctcccatcccccacacctgtgtgttgactctgtaaagatgcagtttcctcactttgggaggagaggccgtggtttttgcaggaattgcgccgctgccgaattcagccattgcctcttggaggtttaggatgccccaggccttgttttccctcaaagcattccattggcaatcacgaccaaccatgctccttgaggatttctgtacacactggcttttcctggtcttgtaaaatgtcggttccaggaccttaccaggcggccactgggccttcctcagcaccatccgcacctccatcctatgaagagacagtggctgttaacagttattaccccacacctccagctcccat

SEQ ID NO: 11417 - DNA, 556 bp, Homo sapiens
  source 1..556: mol_type = unassigned DNA
agtaacccattttctctgggacccctttcttcgcagagagcgcttctctttctttcgcctattacacttctgctcttaacttcagtctggtgtgtccgcatcctagttttgcatggctgtcagacaacaaatctcgggtatttaccccagacaacgacgctgcttcactagcacccattccatctggagcaagcacacctgattgccccagcccggctccgaggaggctggagaattgcaagccttctaaggagggaaatttctccatgcttgggatggagctcagagcctgggtagccccacacaataccctccagccacatctcctgtaaataccccgtgtctttgtgctacccagagcccgagtctggccccatgtgcccgtgtaggtgtggaaccctgccacctgcgacacaggtcttcgaggagtcaaaaagggtaacttcctgacgttgccatgacatttgtaaactgtcatggtgctggtgggagtgtagcagtgaggaagaccagagttcgccctcgtcgccgtcttggttttggtaaaatgtcggtt

SEQ ID NO: 11418 - DNA, 692 bp, Homo sapiens
  source 1..692: mol_type = unassigned DNA
gtttctctccctgcccccgcgacttcgcgcaagatccgggaaggacacccgaggcccctgggagaccctggggaggtgaaaatcagagagcgaagcgggccgtggcccctaggcctgacccctccccgcggggtaaggcgggcaccccgcgagcgcaggggtcctcttactgctgatggcacccagctctgggcccagacgccgctcaccgtccaccgccggtgctgggtaaaatgtcggttccaggaccttaccaggcggccactgggccttcctcagcaccatccgcacctccatcctatgaagagacagtggctgttaacagttattaccccacacctccagctcccatgcctgggccaactacggggcttgtgacggggcctgatgggaagggcatgaatcctccttcgtattatacccagccagcgcccatccccaataacaatccaattaccgtgcagacggtctacgtgcagcaccccatcacctttttggaccgccctatccaaatgtgttgtccttcctgcaacaagatgatcgtgagtcagctgtcctataacgccggtgctctgacctggctgtcctgcgggagcctgtgcctgctggggcaggagtgcagtggtacgatcgtagctctccgcagctttgatctcctgggctcctgcaatccgcccagctcagcctcctga

SEQ ID NO: 11419 - DNA, 2467 bp, Homo sapiens
  source 1..2467: mol_type = unassigned DNA
ccttttctcggggcgcccgagaggccagctcagacctcccggctcgacaggcggcgcgggcggcggtaaaatgtcggttccaggaccttaccaggcggccactgggccttcctcagcaccatccgcacctccatcctatgaagagacagtggctgttaacagttattaccccacacctccagctcccatgcctgggccaactacggggcttgtgacggggcctgatgggaagggcatgaatcctccttcgtattatacccagccagcgcccatccccaataacaatccaattaccgtgcagacggtctacgtgcagcaccccatcacctttttggaccgccctatccaaatgtgttgtccttcctgcaacaagatgatcgtgagtcagctgtcctataacgccggtgctctgacctggctgtcctgcgggagcctgtgcctgctggggtgcatagcgggctgctgcttcatccccttctgcgtggatgccctgcaggacgtggaccattactgtcccaactgcagagctctcctgggcacctacaagcgtttgtaggactcagccagacgtggagggagccgggtgccgcaggaagtcctttccacctctcatccagcttcacgcctggtggaggttctgccctggtggtctcacctctccagggggcccaccttcatgtcttcttttggggggaatacgtcgcaaaactaacaaatctccaaaccccagaaattgctgcttggagtcgtgcataggacttgcaaagacattccccttgagtgtcagttccacggtttcctgcctccctgagaccctgagtcctgccatctaactgtgatcattgccctatccgaatatcttcctgtgatctgccatcagtggctcttttttcctgcttccatgggcctttctggtggcagtctcaaactgagaagccacagttgccttatttttgaggctgttctgcccagagctcggctgaaccagcctttagtgcctaccattatcttatccgtctcttcccgtccctgatgacaaagatcttgccttacagactttacaggcttggctttgagattctgtaactgcagacttcattagcacacagattcactttaatttcttaattttttttttaaatacaaggagggggctattaacacccagtacagacatatccacaaggtcgtaaatgcatgctagaaaaatagggctggatcttatcactgccctgtctccccttgtttctctgtgccagatcttcagtgcccctttccatacagggatttttttctcatagagtaattatatgaacagtttttatgacctccttttggtctgaaatacttttgaacagaatttcttttttttaaaaaaaaacagagatggggtcttactatgttgcccaggctggtgtcgaactcctgggctcaagcgatccttctgccttggcctcccgaagtgctgggattgcaggcataagctaccatgctgggcctgaacataatttcaagaggaggatttataaaaccattttctgtaatcaaatgattggtgtcattttcccatttgccaatgtagtctcacttaaaaaaaaaaaaaagaaaaagaaatggataatttcatctactgcctttacttggggttaatgtgattcttaaacaccttcatcatggaactctcagagtggggtccgttttggtttcctggtggtgggttttgaaagataagggaaagcacattttgagcatgtctgggtaccatggtgcggatgcttgggaaccagaactgtttcagaggaatctaaagtctgattttagttttcagagacacagcttgttgtaaaacatgagaagacatgatttctaggactcaagcagcaagccaggattctaggttggctgctgtgtcatctttgaagtcaagacaaagctgggctcgaccttcaagggtcctcgttttgataatacttcagaatagggaactcatgtgaatactactatgtagaaataaaacctagaccttgagcgaacatctgtatattggttgaaaacgatagtggtaaccattgatcccccttcatttgatgtttggaaaattccagtaattatcatttttgcaacgaatatggataccacatagtactttggtgttacctgcttttgaaaaataaagtctttggttcacccggtgaactatttatgagttcttttggtgtgaagaaagggctcatgttgcatttccagccattgctacaaagaacctttatttgttcagtaacggtagaaaatccttcccgattaaaaacttcagacttgctgaatatcctgcaatgtcaagatgaccgatgttgagttgggtggatttgctaacgagtcagatttgaacatgaggctattggaacccaataggcgtcattgatggcggcaagccatagctttcaagttttaataaaatgcacaaaag

SEQ ID NO: 11420 - DNA, 1527 bp, Homo sapiens
  source 1..1527: mol_type = unassigned DNA
ggtaaaatgtcggttccaggaccttaccaggcggccactgggccttcctcagcaccatccgcacctccatcctatgaagagacagtggctgttaacagttattaccccacacctccagctcccatgcctgggccaactacggggcttgtgacggggcctgatgggaagggcatgaatcctccttcgtattatacccagccagcgcccatccccaataacaatccaattaccgtgcagacggtctacgtgcagcaccccatcacctttttggaccgccctatccaaatgtgttgtccttcctgcaacaagatgatcgtgagtcagctgtcctataacgccggtgctctgacctggctgtcctgcgggagcctgtgcctgctgggggtgcatagcgggctgctgcttcatccccttctgcgtggatgccctgcaggacgtggaccattactgtcccaactgcagagctctcctgggcacctacaagcgtttgtaggactcagccagacgtggagggagccgggtgccgcaggaagtcctttccacctctcatccagcttcacgcctggtggaggttctgccctggtggtctcacctctccagggggcccaccttcatgtcttcttttggggggaatacgtcgcaaaactaacaaatctccaaaccccagaaattgctgcttggagtcgtgcataggacttgcaaagacattccccttgagtgtcagttccacggtttcctgcctccctgagaccctgagtcctgccatctaactgtgatcattgccctatccgaatatcttcctgtgatctgccatcagtggctcttttttcctgcttccatgggcctttctggtggcagtctcaaactgagaagccacagttgccttatttttgaggctgttctgcccagagctcggctgaaccagcctttagtgcctaccattatcttatccgtctcttcccgtccctgatgacaaagatcttgccttacagactttacaggcttggctttgagattctgtaactgcagacttcattagcacacagattcactttaatttcttaattttttttttaaatacaaggagggggctattaacacccagtacagacatatccacaaggtcgtaaatgcatgctagaaaaatagggctggatcttatcactgccctgtctccccttgtttctctgtgccagatcttcagtgcccctttccatacagggatttttttctcatagagtaattatatgaacagtttttatgacctccttttggtctgaaatacttttgaacagaatttcttttttttaaaaaaaaacagagatggggtcttactatgttgcccaggctggtgtcgaactcctgggctcaagcgatccttctgccttggcctcccgaagtgctgggattgcaggcataagctaccatgctgggcctgaacataatttcaagaggaggatttataaaaccattttctgtaatcaaatgattggtgtcattttcccatttgccaatgtagtctcactt

SEQ ID NO: 11421 - DNA, 8405 bp, Homo sapiens
  source 1..8405: mol_type = unassigned DNA
ggacagcctcgcgctgggattggctggcctcgcgcgagcgccggcgcggagtggctggcgaggttttagagggagtcccgctctccaattaaagcggcccagctgcgcctggctgcgcacagagctccctcccaggcccgcgaacttggccattcagccgccgctgtccccgctgcgcgccctcgcgcctctgcctgagaagccaggcgctgttcccccaccccagaagaggatggcaaaggtggctaaggacctcaacccaggagttaaaaagatgtccctgggccagctgcagtcagcaagaggtgtggcatgtttgggatgcaaggggacgtgttcgggcttcgagccacattcatggaggaaaatatgcaagtcttgcaaatgcagccaagaggaccactgcctaacatctgacctagaagacgatcggaaaattggccgcttgctgatggactccaagtattccaccctcactgctcgggtgaaaggcggggacggcatccggatttacaagaggaaccggatgatcatgaccaaccctattgctactgggaaagatcccacttttgacaccatcacctacgagtgggctccccctggagtcacccagaaactgggactgcagtacatggagctcatccccaaggagaagcagccagtgacaggcacagagggtgccttttaccgccgccgccagctcatgcaccagctccccatctatgaccaggatccctcgcgctgccgtggacttttggagaatgagttgaaactgatggaagaatttgtcaagcaatataagagcgaggccctcggcgtgggagaagtggccctcccggggcagggtggcttgcccaaggaggaggggaagcagcaggaaaagccagagggggcagagaccactgctgctaccaccaacggcagtctcagtgacccgtccaaagaagtggaatacgtctgcgagctctgcaagggagcggcccctcctgacagccccgtggtctactcggacagggcaggctacaacaagcagtggcaccccacctgctttgtgtgtgccaagtgctccgagccgctggtggacctcatctacttctggaaggatggtgcaccctggtgcggccgccattactgcgagagtctgcggccccggtgctccggctgcgatgagataatattcgctgaggactaccagcgtgtggaagatctggcctggcaccgaaagcactttgtctgtgagggttgtgagcagctgctgagcggccgggcgtacatcgtcaccaagggtcagcttctgtgcccaacttgcagcaagtccaaacgctcctgaagggctgcccacccacagccagaatccacaggatcccaccgagaaggagagccaggtgtgccgagaccatcctaagggtccgatgtgacagcaagcaagtgaaataaacaatgatttgcttttcagtgagaatatatatatgagatatatatagatatatattctaggttgggtggtggtagatccttgagggtcagtagtttcaaaaccaaaaatattctaagaagtcttaggatggagttccttttctttctgttgttgtttcccagctacaaccaactaaagacacaaatggcgttctgcaaggggactctgggaggagttttccagaatgcaattccgagtgagcaaatcgcatagctgtagaatgtgcgtgcttttttgtggacacaggagctcctccaggagcaggctgggatcccaactatcgcttgttgcctctttttcaagtggaatttgaattttaaataaacaactttttttggcatgataaacagatcaataaaagttttgtgaattccacatacacccttatctaattatttacaccatggcagtgattttgcaacacccagtgctggcagaaaatatagtaaaatactaatgagcctctctatcaatgtatctcatcagacttccactgggagtgtaggctttgggacagaacccccgccccacctgcctattccagatactcccagatcactaatgtaacaaaggtatcatgttttatggtacactgaaaagtggcctgctgggaactgatgagcttctctttagccagggacctgactcagctgccctcagagcccaggaaaatagcgaatgaacccctctgggaataagaccagtactgggaaaccactgaacaggggccacctaagctccaccaatgggtgccacatgggatgtggtgactaatgtgggcagatctttaaaaatacagcactttttcaaatgccaaaacaatcagaaacaaaattttttcaataaaaattaatctaaaatttaacaatgccacttttatgagaaatctcaatttttaatgttgccaactaaacattgaatgagtcacgtagaataggtctttgggccaaattgtatctccattttatggtctctctgaacattttcagctcttaaattaatttctttcccacagtttctaagaaaaacatatttttctactgggagtataaggatgaaaaagacacaagtcctaggagcttacggtctggtcgccagtggttttctttcttgaacttcctcatctgctgccagttttctttaacctcaccatccaaatttcactctgaccatctcgtacctagaaaacccccattcatgtgctttataagtttcaccaaagccattgctatatcctcccaaggcagtggttttctgctcccagctcctttctctagtcaccctcagtttcctcgtcatgttcatcttctcaaagataagtttcaagtgtgtcatttccttcactcaatctccatggctcttcattgcctgccaagttaacaaccaagtcctcatggacatttgaatccttccaaaacttggcttatgtctttctggccttggagccctttatttccctagatttctagttccctatttcttcctaagcatgcagaagctccctctgatcaagcccttccctttgcttttgctagttgaagactggctacctgaagaccaactctggctgttgaaattctattcatcctataaggtgcttctcaagcataacctgcttctctggcactttcctgaagcaccagtgaaatattcaccaattcatcattcattcatccattccacaagtatttcagtgagcacggcaaagttccaattcccatgctgaatataggggatgcggggtgcacaaaaagaacagtgacccctacgcccatagatgttacggtctgtgggggagatgggcctcaagcaaatattctcacaagtcaatgcaaaattacactactgtgcatgctataaaaggaagatttgtgttactataatgcatgtaaactggacttaggaatatcgagagaggtgcccctgggaaagtgatgcttgaactgggctgtaaaggatgagtagccttgccaggcatagtggctcaggcctgtattctcagcactttgggaggccaaagcgggtggatcacttgagcctaggagttcgagaccggcctgggcaacatggcaaaactccacccctacaaaaaatacaaaaactatctggcatggtggcacacctgtagtatcagttactctagaggataacctgagcccagtaagtcaaggctgcagtgagctgtgatcatgccacagcactccagcctgggtgacagagtgagaccctgtttccaaaaaaaaaaaaaaaggataggttgcctctaagttggcaaagagaggaaggacaatggttaaagatggatacatgaatgcatgtgcaaaggccctgtggtggaagccccaccagtttattcaacacctatttgctggtgttggagatacagtggtgaacatggcccatggatggaactgaaagaaaactggtgtggcaggagcacagagcatggtgaggagggtgggcctggggcatgagaggcaggcatggccagcctgctccagttctggggcaattcaaaagactggtctctgttctaggagcaagggggagccttcaaacagctttaaggagggggtggtgatggctggacagggagatcatgagatacgtcatctcttctctgttgaaaccccagcacaatgcatgattgacttggtccactgggtcacaccatcatggatgggcattatctcccacaacagtccccatggggcaccacccagcacctgcccctgcctttctcatgtctattaatgacacccacccttgcatttggagcacctgaatcatctctgccacttgccttcatatctgatgggtcactcagtccagtcctttctctccatcctcgctttcactccatccccaaagtcatatctcaccttgaacattttctgctcagactgacaagtctccccgacgggaactcaccctctccacccaccacttccagatgaattgctcagaaacacaccctcatcttgcactctcctcttcaagaacaatcaggggctccctgttgcacacacagaaaaaaattgaaactgttttaccttgcagtcgagtttcttatttttcctgccccaaccctccttccttcctgttatcctttcagaagccaaatgggcagtttacagtcacagtgtgtgcccctgctttcctcacctctgtaccatcactcacgctgtgctttttgcctgcaattccccacactgtgtttaattgctgcctctgctggggggctgcaatagctgagtgggattctgtaccagaattggaaagatccatgttaactcttgcctgattctatctcccatgtcagcaggaagaggggctgccatccccacccctcccactctctaggaagactttcctccctcacccttcccttggggtgttttaggtgccctttatctgtaagttcataatatcccaggcttacagtaattcttccaaggcctttattgtgctataattatttattcatgaaagccttcccctatgaacttctaaagaataatcgtattatctttatttccccaactcttagtacaaatcctggcaactaaatgaaagaacaaacaacctggggttctgggatggttcgtctttgctgatggcactgtgttccaaaatggccaaggtcaaatataaaaatttcagactgaggtagacactgctggcagcctacacattgccaccacaccccacttccttcttcctagtggcaaggaagcagtgggtggagagggtgagttcctgtcagggagacttgtcagtctgagcagaaaatgttcaaagtgagatatgactttggggatggagacaaagggaggatggagagaaacgactggactgagagaagagcccactcccctttatgtaaattggctttgccaacctggtctgcagctggagaaaggccatgcgcctctattaccagccagtggggcttccgccttaggagggtcttagaaaagtgtttttccttaatgaaaggagatactgtgcagtaaatagccctgctgttgttttcttttcttttgatagaatgtcaaacttacgaaaaaagttacaagaagagaacaaagagctattagagggtgttgctgacacaatgctttatcactcttgaatattttcgtgtgtaattcctacaaataaggacattctcccacatagccacaatacaaccatcaaaatcaggaagttaacgctgatgtgtttctaccatgtaatcctcagatccaattcaagtgtcaccagctgtcccaataatgtcttttataacaaaaacattcagtctaagatcactcattctatttagttatcttgtctattcttcaatttggaagtgttctttgttctttcctgaatgttcatgaccttgacatcttagaagattaaaggttatttaaagttgttgagttaaatatccattaaattaggtttgtcagatatttcctcgaaattagattcagcttatgcattttttggaaggaataccacagaagtgatgttgttttctttctgttgcatccaatcagatgatacaggattttgatttgttccattactgttgacatgaattttgaacatttgataatgccagtatcagccagatttttccattgtaaagtcattcctttgtcctttgtatttaataagtatgtttagggactttgagactatgtcaatgtcctgttcttcatcaaaattccactcactcattcttagtattcattgacgtttactgatcgaactaattattattatgatagttgccaaatgttggtttttctaattcaatcatttctttagtgtttattagcattctactataaggaaaagcactatcttctccccatttattaattcacatatttacatcagcttggagttattgatttctattttattaaatagtttataattgattaccatccttatttattttaatgctcaaattgtcccaaattatggccaaagaaagctccttcaaactggttgctatgtccttttgacatggcccatcattctttaaacacattttacatctggcacaataacgtgctacatacccatcttgtatttttcctgccccatctttgaaatcagccattctcaaggggttccttcttaatctggctgttgttgtgttggaactcctggtaccatcttagaaccttaaggagacaagcgaaccaagccaataagctttccatgatgctgcttagagttaaacagagcccaggtactaagttatgtcatggagacagtgaactaacctctggactgcttgctacatgagacaattgattttcttattttctatgtagggtggtacatttcctcattttgagatatttcttcaacatatagcttttcattagtggggattttgtcaattataaccaaaaacaatgtgacggatacccaagatgtttcatgttgtagcttgggtgaattacacatttctgaagccattacacttcctagtttatttggatttaagttgacaaataaaaattgcatatgtttatggtctataacatggtgtttcgatatatgtatacatcgtggaatggctaaatcaagctaacatatccattacctcacatagttattttttgtggtgagaacattttaaaaatattgtcttagcaattttcaatcaagcctgtcccatggagacacaagcaatagtgacatgagcacttgactcgctgggttatcaggctttggctccaaatgtttggcttcaaatatgaaaaagttacatgaaagatgaaactatgcaatggcatggctgttggtcattcacatctctctctgccaagaatggggatgacgctgttgaaggaagaaatgtgttttctcctttttctcaagtgatatttgccttaggtcagattctactagtttaaagcaaaacgatctcctggtctgattcctttgggtctctaataatggaaactgcaaggatcagcataaagtgttcctttgttctgacgttggtataacattgcttcttgaaaaatgaaagtatttggacatacagacagaagcaatattattcaggtcttccttgttgcaagtgagggaaatccaattaaaactggtttaaacctaaaaaaaaaaaaaagaagaaaagaaaagaaaaaatatgagaggggttttgctttctggaatctgctttctagtcagaaagtgcagaagaagggctagcttcaggaacaattggatgcagtagttcaaatcacaagttaagtctctgcttcttttctccatctctcttctgtcttcctccacactggctttattcttaggtaggcttacccagatagtcataaacacagccaccagtggcagctgggctcacttttgtccttggagccagtgagcccatgaaaaaggagcttctctttctggagcttcccaggggtaactttgatcagccaacaagggtcagtcctatgcttatcccttgaccaatctctgtgcccagagggcagggtactctgattggcaataccttcatcgtgggccaaccactgtggggaagggggagggattagaaaagacagccacacccaaatctcatgaagcagtcccctttattttaaaaaagtccctgtgagagcaacaggagcaaagcatggagaagaagcaatcttggagaagctggaagagaactgacccaaagaatccaagagactaagactgtgcagggttggggaacggaagctcacacaggaggcctggacagagctgcagcagagccaggagagaagccaagtggcacagctcatcttgaagtaattataatgccactaaaattctcatttgtattaattttttttaattactggcaagataaggcaaatgtttttaaaggcctaaataaaatgatattccctgaaggaaa

SEQ ID NO: 11422 - DNA, 1431 bp, Homo sapiens
  source 1..1431: mol_type = unassigned DNA
agctgcgcctggctgcgcacagagctccctcccaggcccgcgaacttggccattcagccgccgctgtccccgctgcgcgccctcgcgcctctgcctgagaagccaggcgctgttcccccaccccagaagaggatggcaaaggtggctaaggacctcaacccaggagttaaaaagatgtccctgggccagctgcagtcagcaagaggtgtggcatgtttgggatgcaaggggacgtgttcgggcttcgagccacattcatggaggaaaatatgcaagtcttgcaaatgcagccaagaggaccactgcctaacatctgacctagaagacgatcggaaaattggccgcttgctgatggactccaagtattccaccctcactgctcgggtgaaaggcggggacggcatccggatttacaagaggaaccggatgatcatgaccaaccctattgctactgggaaagatcccacttttgacaccatcacctacgagtgggctccccctggagtcacccagaaactgggactgcagtacatggagctcatccccaaggagaagcagccagtgacaggcacagagggtgccttttaccgccgccgccagctcatgcaccagctccccatctatgaccaggatccctcgcgctgccgtggacttttggagaatgagttgaaactgatggaagaatttgtcaagcaatataagagcgaggccctcggcgtgggagaagtggccctcccggggcagggtggcttgcccaaggaggaggggaagcagcaggaaaagccagagggggcagagaccactgctgctaccaccaacggcagtctcagtgacccgtccaaagaagtggaatacaagccagtcccactcgtgtgataacccattaatctattaagccataagtggattaatccattcctgaggacctgagccctcacgacccaatcatctcttaaaggccccacctctcaatactgccatgcagaggattatgtttcaacctgagtgtttggaggggatgttcaacccataggaagtggcagtgtggaagaagtgctgctgaggagtgagtcactgggggccattttgagaaaacagaaaggagaagccagagttggggagatgaaagcctcatggcttggtttgtcttaaactgccccacagaaggcgaaaggaatgcttgaggctggaccacgtgggtctagcgtgtactgcgtttctggtccccagcccctgttttaccttttgctcctcctgccccatcaaccaagtgtcttcatttgtttctatggcaattaacttttggagatagaagtcccagcacacgagatccccaagcacattatctaccttgctgaacaggctggcagtcacacatgagccaggcgacccagggaaatgccagcccaaacaaagctgctgccacatcca

SEQ ID NO: 11423 - DNA, 870 bp, Homo sapiens
  source 1..870: mol_type = unassigned DNA
gcacagagctccctcccaggcccgcgaacttggccattcagccgccgctgtccccgctgcgcgccctcgcgcctctgcctgagaagccaggcgctgttcccccaccccagaagaggatggcaaaggtggctaaggacctcaacccaggagttaaaaagatggtgatcacatgggatatacatataaagtaatcgagcgaatactggagattggtgcatttcgaccgcatatgtccctgggccagctgcagtcagcaagaggtgtggcatgtttgggatgcaaggggacgtgttcgggcttcgagccacattcatggaggaaaatatgcaagtcttgcaaatgcagccaagaggaccactgcctaacatctgacctagaagacgatcggaaaattggccgcttgctgatggactccaagtattccaccctcactgctcgggtgaaaggcggggacggcatccggatttacaagaggaaccggatgatcatgaccaaccctattgctactgggaaagatcccacttttgacaccatcacctacgagtgggctccccctggagtcacccagaaactgggactgcagtacatggagctcatccccaaggagaagcagccagtgacaggcacagagggtgccttttaccgccgccgccagctcatgcaccagctccccatctatgaccaggatccctcgcgctgccgtggacttttggagaatgagttgaaactgatggaagaatttgtcaagcaatataagagcgaggccctcggcgtgggagaagtggccctcccggggcagggtggcttgcccaaggaggaggggaagcagcaggaaaagccagagggggcagagaccactgctgctaccac

SEQ ID NO: 11424 - DNA, 579 bp, Homo sapiens
  source 1..579: mol_type = unassigned DNA
acagagctccctcccaggcccgcgaacttggccattcagccgccgctgtccccgctgcgcgccctcgcgcctctgcctgagaagccaggcgctgttcccccaccccagaagaggatggcaaaggtggctaaggacctcaacccaggagttaaaaagatgtccctgggccagctgcagtcagcaagaggtgtggcatgtttgggatgcaaggggacgtgttcgggcttcgagccacattcatggaggaaaatatgcaagtcttgcaaatgcagccaagaggaccactgcctaacatctgacctagaagacgatcggaaaattggccgcttgctgatggactccaagtattccaccctcactgctcgggtgaaaggcggggacggcatccggatttacaagaggaaccggatgatcatgaccaaccctattgctactgggaaagatcccacttttgacaccatcacctacgagtgggctccccctggagtcacccagaaactggtaagagagcttccccaaccaagcagttgttttcctatcctcataaatactagccatgtcaagtgtttctgaatttca

SEQ ID NO: 11425 - DNA, 1113 bp, Homo sapiens
  source 1..1113: mol_type = unassigned DNA
attcagccgccgctgtccccgctgcgcgccctcgcgcctctgcctgagaagccaggcgctgttcccccaccccagaagaggatggcaaaggtggctaaggacctcaacccaggagttaaaaaggaaaatatgcaagtcttgcaaatgcagccaagaggaccactgcctaacatctgacctagaagacgatcggaaaattggccgcttgctgatggactccaagtattccaccctcactgctcgggtgaaaggcggggacggcatccggatttacaagaggaaccggatgatcatgaccaaccctattgctactgggaaagatcccacttttgacaccatcacctacgagtgggctccccctggagtcacccagaaactgggactgcagtacatggagctcatccccaaggagaagcagccagtgacaggcacagagggtgccttttaccgccgccgccagctcatgcaccagctccccatctatgaccaggatccctcgcgctgccgtggacttttggagaatgagttgaaactgatggaagaatttgtcaagcaatataagagcgaggccctcggcgtgggagaagtggccctcccggggcagggtggcttgcccaaggaggaggggaagcagcaggaaaagccagagggggcagagaccactgctgctaccaccaacggcagtctcagtgacccgtccaaagaagtggaatacgtctgcgagctctgcaagggagcggcccctcctgacagccccgtggtctactcggacagggcaggctacaacaagcagtggcaccccacctgctttgtgtgtgccaagtgctccgagccgctggtggacctcatctacttctggaaggatggtgcaccctggtgcggccgccattactgcgagagtctgcggccccggtgctccggctgcgatgagataatattcgctgaggactaccagcgtgtggaagatctggcctggcaccgaaagcactttgtctgtgagggttgtgagcagctgctgagcggccgggcgtacatcgtcaccaagggtcagcttctgtgcccaacttgcagcaagtccaaacgctcctgaagggctgcccacccacagccaga

SEQ ID NO: 11426 - DNA, 1059 bp, Homo sapiens
  source 1..1059: mol_type = unassigned DNA
ctcgcgcctctgcctgagaagccaggcgctgttcccccaccccagaagaggatggcaaaggtggctaaggacctcaacccaggagttaaaaagatgtccctgggccagctgcagtcagcaagaggtgtggcatgtttgggatgcaaggggacgtgttcgggcttcgagccacattcatggagggactgcagtacatggagctcatccccaaggagaagcagccagtgacaggcacagagggtgccttttaccgccgccgccagctcatgcaccagctccccatctatgaccaggatccctcgcgctgccgtggacttttggagaatgagttgaaactgatggaagaatttgtcaagcaatataagagcgaggccctcggcgtgggagaagtggccctcccggggcagggtggcttgcccaaggaggaggggaagcagcaggaaaagccagagggggcagagaccactgctgctaccaccaacggcagtctcagtgacccgtccaaagaagtggaatacgtctgcgagctctgcaagggagcggcccctcctgacagccccgtggtctactcggacagggcaggctacaacaagcagtggcaccccacctgctttgtgtgtgccaagtgctccgagccgctggtggacctcatctacttctggaaggatggtgcaccctggtgcggccgccattactgcgagagtctgcggccccggtgctccggctgcgatgagataatattcgctgaggactaccagcgtgtggaagatctggcctggcaccgaaagcactttgtctgtgagggttgtgagcagctgctgagcggccgggcgtacatcgtcaccaagggtcagcttctgtgcccaacttgcagcaagtccaaacgctcctgaagggctgcccacccacagccagaatccacaggatcccaccgagaaggagagccaggtgtgccgagaccatcctaagggtccgatgtgacagcaagcaagtgaaataaacaatgatttgcttttcagtgagaatatatatatgagatatatatagatatatattcta

SEQ ID NO: 11427 - DNA, 1501 bp, Homo sapiens
  source 1..1501: mol_type = unassigned DNA
agctgcgcctggctgcgcacagagctccctcccaggcccgcgaacttggccattcagccgccgctgtccccgctgcgcgccctcgcgcctctgcctgagaagccaggcgctgttcccccaccccagaagaggatggcaaaggtggctaaggacctcaacccaggagttaaaaagatgtccctgggccagctgcagtcagcaagaggtgtggcatgtttgggatgcaaggggacgtgttcgggcttcgagccacattcatggagggactgcagtacatggagctcatccccaaggagaagcagccagtgacaggcacagagggtgccttttaccgccgccgccagctcatgcaccagctccccatctatgaccaggatccctcgcgctgccgtggacttttggagaatgagttgaaactgatggaagaatttgtcaagcaatataagagcgaggccctcggcgtgggagaagtggccctcccggggcagggtggcttgcccaaggaggaggggaagcagcaggaaaagccagagggggcagagaccactgctgctaccaccaacggcagtctcagtgacccgtccaaagaagtggaatacgtctgcgagctctgcaagggagcggcccctcctgacagccccgtggtctactcggacagggcaggctacaacaagcagtggcaccccacctgctttgtgtgtgccaagtgctccgagccgctggtggacctcatctacttctggaaggatggtgcaccctggtgcggccgccattactgcgagagtctgcggccccggtgctccggctgcgatgagataatattcgctgaggactaccagcgtgtggaagatctggcctggcaccgaaagcactttgtctgtgagggttgtgagcagctgctgagcggccgggcgtacatcgtcaccaagggtcagcttctgtgcccaacttgcagcaagtccaaacgctcctgaagggctgcccacccacagccagaatccacaggatcccaccgagaaggagagccaggtgtgccgagaccatcctaagggtccgatgtgacagcaagcaagtgaaataaacaatgatttgcttttcagtgagaatatatatatgagatatatatagatatatattctaggttgggtggtggtagatccttgagggtcagtagtttcaaaaccaaaaatattctaagaagtcttaggatggagttccttttctttctgttgttgtttcccagctacaaccaactaaagacacaaatggcgttctgcaaggggactctgggaggagttttccagaatgcaattccgagtgagcaaatcgcatagctgtagaatgtgcgtgcttttttgtggacacaggagctcctccaggagcaggctgggatcccaactatcgcttgttgcctctttttcaagtggaatttgaattttaaataaacaactttttttggcatgataaacagatcaataaaagttttgtgaattccacatac

SEQ ID NO: 11428 - DNA, 1232 bp, Homo sapiens
  source 1..1232: mol_type = unassigned DNA
gggtggaccggccgcatctcctcacagcgtctcctctcttcccagcccgacaggcctgaagatcgtggctgtgagctgccgggagaagttcgtccgcatcttcaacccgtcgcaggagagcacggccgacctgagcggcatggtgctgaagcagctggtgcgcggcttcccggagcgcctgtaccgcttcccgccgggcacgctgctggccccgcggcaccacgtcacggtctggggcgaggcgacccgcagcgccaagaagccgctgcgcgcgtcctcgagccgggagcccgttcccctcctctccatccgcggctgcgcgacgctgctcctgagccccaagggcgaggtcctcagtgagcaccggatcccacgccgcgagactccggccccgagggtcttcgccgacggcaccgacttgtccatcgaccgcttcccgctccctgaggccgggcccggcgccgacacccgcaagccgccgcgcccacctcgacccctgcgcaaaggccgggtgcgggagccccgggtcagtcgccggagaccagggtggggaccgcgggtccccgggatctggcctccctccccaggccccgacccagcagaaacggtccctcgtatcccctcgctaggacggacccctacttccccaggccccgccccggccgccccctggtcctccagtacgccccgcggcccctgccccgccccaggcgcggagccctctagggccgcctttcccgggccggccgccgccctcacgaccctcgccccaccaggacgcggggcctgctgcccccagtgagctcggggaagctcttccacgcgcgggaggggcctgcgcggcccgagaaccccgagatccccgcgccgcagcacctgcccgccatcccgggtgaccccaccctgccgtcgcctcccgcagaggccgggctgggcctggaggactgtcggctccagaaagaacaccgagttcgggtgtgccggaagagcgtggaccgtagctgccccctggtggccctgtcggtgcagaacacggcggagagcagattcggcttccgcttcctcagctgcctgccggtcaccgcggacacctgccgcggcgcctaggggcggaggagtggggccgggaccgcgagggagggcgcgggcgggcgccggggctgggcgggctgtgtccgctgcatcatttattgaaccaacgtggcctacaaagtaaaccgcatttctgtaca

SEQ ID NO: 11429 - DNA, 2091 bp, Homo sapiens
  source 1..2091: mol_type = unassigned DNA
cggaggggggcgccgagccgcagtccccgcccccacctcccgcctaccgcgaaaaacgcggaaatgcggtggctgcggcccgcgggcaggcgtcgggagcaagagtcggtcagtggtcacctgggacctccagcaggcgcacctgcagcccccgagactcccacgtgcctgccagacaccacgccccaccccacaccggtggtctgctctgccgacccgcagttggctcttgagtccctggaccctcgcacactgcggctgctgtggagacagcgagaactggagatccaggccttgcggtgggccatccagaatggcgaggacgcccggctctgccacatcctggaagaggtggcggggcttccgcccaagaggagctcccacagtcaggagaaactcctgcagaaccaggtccagaagctgatccaggagttgaaggaacagaaggagcgagcccagtgggagaaggagcacctggaggagcggctgctgcagaccacccgcacgctccaagagatggaggccgagctgcagaacttgcagaagtcctgcctcctgcagctggcccgctcctcgtgggtgggccgcatgctacgatcccagactggcagtgtggaggtagtgacggcagagactctgatggacccaagcgacctctctgaaaacattcaggcccccaccggggagggctttcggctggaggacgtggattggaacagcgttgcccgccggtatcccaacctcttcaccaacatggagcccagctcaaagcaaaagcagccccggccctggccacagctggacacagggagcccagagtcctctggaaagcattccgagcggcatcacaagaccgtggagtggggctccctgccctgtctgaacaccagcagctcagggggcgctgactccgactccagcagctgccggccgggcctgccttccttcgtgcaggtgatagggcacccgccccgggaccaccgcgcttcctccgagcaagcgctggtgcaggccgggagctacagcagggactcagaagatctccagaaaacccactcacccaggcacggcgagccggtcctgtcgccccagccctgcacagaccccgaccactggagcccggaactcctgcagagcccgacaggcctgaagatcgtggctgtgagctgccgggagaagttcgtccgcatcttcaacccgtcgcaggagagcacggccgacctgagcggcatggtgctgaagcagctggtgcgcggcttcccggagcgcctgtaccgcttcccgccgggcacgctgctggccccgcggcaccacgtcacggtctggggcgaggcgacccgcagcgccaagaagccgctgcgcgcgtcctcgagccgggagcccgttcccctcctctccatccgcggctgcgcgacgctgctcctgagccccaagggcgaggtcctcagtgagcaccggatcccacgccgcgagactccggccccgagggtcttcgccgacggcaccgacttgtccatcgaccgcttcccgctccctgaggccgggcccggcgccgacacccgcaagccgccgcgcccacctcgacccctgcgcaaaggccgggtgcgggagccccgggtcagtcgccggagaccagggacgcggggcctgctgcccccagtgagctcggggaagctcttccacgcgcgggaggggcctgcgcggcccgagaaccccgagatccccgcgccgcagcacctgcccgccatcccgggtgaccccaccctgccgtcgcctcccgcagaggccgggctgggcctggaggactgtcggctccagaaagaacaccgagttcgggtgtgccggaagagcgtggaccgtagctgccccctggtggccctgtcggtgcagaacacggcggagagcagattcggcttccgcttcctcagctgcctgccggtcaccgcggacacctgccgcggcgcctaggggcggaggagtggggccgggaccgcgagggagggcgcgggcgggcgccggggctgggcgggctgtgtccgctgcatcatttattgaaccaacgtggcctacaaagtaaaccgcatttctgta

SEQ ID NO: 11430 - DNA, 1051 bp, Homo sapiens
  source 1..1051: mol_type = unassigned DNA
cgaaaaacgcggaaatgcggtggctgcggcccgcgggcaggcgtcggggctgggctggcccagaactcacctaggggcctggtctggggtctccctggaggctcctggtaacaaacagccccaccccttctgggtgctggtatccatggcaacggtatacagcccttccctcccaggcctgcttggaggtcgggcctcagagcaagagtcggtcagtggtcacctgggacctccagcaggcgcacctgcagcccccgagactcccacgtgcctgccagacaccacgccccaccccacaccggtggtctgctctgccgacccgcagttggctcttgagtccctggaccctcgcacactgcggctgctgtggagacagcgagaactggagatccaggccttgcggtgggccatccagaatggcgaggacgcccggctctgccacatcctggaagaggtggcggggcttccgcccaagaggagctcccacagtcaggagaaactcctgcagaaccaggtccagaagctgatccaggagttgaaggaacagaaggagcgagcccagtgggagaaggagcacctggaggagcggctgctgcagaccacccgcacgctccaagagatggaggccgagctgcagaacttgcagaagtcctgcctcctgcagctggcccgctcctcgtgggtgggccgcatgctacgatcccagactggcagtgtggaggtagtgacggcagagactctgatggacccaagcgacctctctgaaaacattcaggcccccaccggggagggctttcggctggaggacgtggattggaacagcgttgcccgccggtatcccaacctcttcaccaacatggagcccagctcaaagcaaaagcagccccggccctggccacagctggacacagggagcccagagtcctctggaaagcattccgagcggcatcacaagaccgtggagtggggctccctgccctgtctgaacaccagcagctcagggggcgctgactccgactccagcagctgccggccgggcctgccttccttc

SEQ ID NO: 11431 - DNA, 798 bp, Homo sapiens
  source 1..798: mol_type = unassigned DNA
cttccctcccaggcctgcttggaggtcgggcctcagctcccgaagaacattgagaatggcccccaagtctggccaggaggttaaagaaaccgaggaagaggctctcctgtcccccacagagcaagagtcggtcagtggtcacctgggacctccagcaggcgcacctgcagcccccgagactcccacgtgcctgccagacaccacgccccaccccacaccggtggtctgctctgccgacccgcagttggctcttgagtccctggaccctcgcacactgcggctgctgtggagacagcgagaactggagatccaggccttgcggtgggccatccagaatggcgaggacgcccggctctgccacatcctggaagaggtggcggggcttccgcccaagaggagctcccacagtcaggagaaactcctgcagaaccaggtccagaagctgatccaggagttgaaggaacagaaggagcgagcccagtgggagaaggagcacctggaggagcggctgctgcagaccacccgcacgctccaagagatggaggccgagctgcagaacttgcagaagtcctgcctcctgcagctggcccgctcctcgtgggtgggccgcatgctacgatcccagactggcagtgtggaggtagtgacggcagagactctgatggacccaagcgacctctctgaaaacattcaggcccccaccggggagggctttcggctggaggacgtggattggaacagcgttgcccgccggtatcccaacctcttcaccaacatggagcccagctcaaagcaaaa

SEQ ID NO: 11432 - DNA, 608 bp, Homo sapiens
  source 1..608: mol_type = unassigned DNA
acatagccgaaagttgcagagatgaagggtgaaagctggaatgattgggttttaatgggtcaggtctgggacctggcttttctcctggagcagagggaatacttgtcatggtaatggggtagcccagagggtgtggacacggctgggaaaagtgaggcttcagtttgggggtcagagcaagagtcggtcagtggtcacctgggacctccagcaggcgcacctgcagcccccgagactcccacgtgcctgccagacaccacgccccaccccacaccggtggtctgctctgccgacccgcaggtctgctgccgctgcaggttggctcttgagtccctggaccctcgcacactgcggctgctgtggagacagcgagaactggagatccaggccttgcggtgggccatccagaatggcgaggacgcccggctctgccacatcctggaagaggtggcggggcttccgcccaagaggtctgcagcacagtccccagcccaacccaaccccgccctgtcctcgcccggactcctggtttctgtctgaccccaaccccaaccgctgaggcagatccttaccctcatccttgcccgcgctgaccctccaccctgatc

SEQ ID NO: 11433 - DNA, 1232 bp, Homo sapiens; identical to SEQ ID NO: 11428
  source 1..1232: mol_type = unassigned DNA

SEQ ID NO: 11434 - DNA, 2084 bp, Homo sapiens
  source 1..2084: mol_type = unassigned DNA
cggaggggggcgccgagccgcagtccccgcccccacctcccgcctaccgcgaaaaacgcggaaatgcggtggctgcggcccgcgggcaggcgtcgggagcaagagtcggtcagtggtcacctgggacctccagcaggcgcacctgcagcccccgagactcccacgtgcctgccagacaccacgccccaccccgcaccggtggtctgctctgccgacccgcagttggctcttgagtccctggaccctcgcacactgcggctgctgtggagacagcgagaactggagatccaggccttgcggtgggccatccagaatggcgaggacgcccggctctgccacatcctggaagaggtggcggggcttccgcccaagaggagctcccacagtcaggagaaactcctgcagaaccaggtccagaagctgatccaggagttgaaggaacagaaggagcgagcccagtgggagaaggagcacctggaggagcggctgctgcagaccacccgcacgctccaggagatggaggccgagctgcagaacttgcagaagtcctgcctcctgcagctggcccgctcctcgtgggtgggccgcatgctacgatcccagactggcagtgtggaggtagtgacggcagagactctgatggacccaagcgacctctctgaaaacattcaggcccccaccggggagggctttcggctggaggacgtggattggaacagcgttgcccgccggtatcccaacctcttcaccaacatggagcccagctcaaagcaaaagcagccccggccctggccacagctggacacagggagcccagagtcctctggaaagcattccgagcggcatcacaagaccgtggagtggggctccctgccctgtctgaacaccagcagctcagggggcgctgactccgactccagcagctgccggccgggcctgccttccttcgtgcaggtgatagggcacccgccccgggaccaccgcgcttcctccgagcaagcgctggtgcaggccggcagctacagcagggactcagaagatctccagaaaacccactcacccaggcacggcgagccggtcctgtcgccccagccctgcacagacccggaccactggagcccggaactcctgcagagcccgacaggcctgaagatcgtggctgtgagctgccgggagaagttcgtccgcatcttcaacccgtcgcaggagagcacggccgacctgagcggcatggtgctgaagcagctggtgcgcggcttcccggagcgcctgtaccgcttcccgccgggcacgctgctggccccgcggcaccacgtcacggtctggggcgaggcgacccgcagcgccaagaagccgctgcgcgcgtcctcgagccgggagcccgttcccctcctctccatccgcggctgcgcgacgctgctcctgagccccaagggcgaggtcctcagtgagcaccggatcccacgccgcgagactccggccccgagggtcttcgccgacggcaccgacttgtccatcgaccgcttcccgctccctgaggccgggcccggcgccgacacccgcaagccgccgcgcccacctcgacccctgcgcaaaggccgggtgcgggagccccgggtcagtcgccggagaccagggacgcggggcctgctgcccccagtgagctcggggaagctcttccacgcgcgggaggggcctgcgcggcccgagaaccccgagatccccgcgccgcagcacctgcccgccatcccgggtgaccccaccctgccgtcgcctcccgcagaggccgggctgggcctggaggactgtcggctccagaaagaacaccgagttcgggtgtgccggaagagcgtggaccgtagctgccccctggtggccctgtcggtgcagaacacggcggagagcagattcggcttccgcttcctcagctgcctgccggtcaccgcggacacctgccgcggcgcctaggggcggaggagtggggccgggaccgcgagggagggcgcgggcgggcgccggggctgggcgggctgtgtccgctgcatcatttattgaaccaacgtggcctacaaagtaaaccgcat

SEQ ID NO: 11435 - DNA, 1051 bp, Homo sapiens
  source 1..1051: mol_type = unassigned DNA
cgaaaaacgcggaaatgcggtggctgcggcccgcgggcaggcgtcggggctgggctggcccagaactcacctaggggcctggtctggggtctccctggaggctcctggtaacaaacagccccaccccttctgggtgctggtatccatggcaacggtatacagcccttccctcccaggcctgcttggaggtcgggcctcagagcaagagtcggtcagtggtcacctgggacctccagcaggcgcacctgcagcccccgagactcccacgtgcctgccagacaccacgccccaccccgcaccggtggtctgctctgccgacccgcagttggctcttgagtccctggaccctcgcacactgcggctgctgtggagacagcgagaactggagatccaggccttgcggtgggccatccagaatggcgaggacgcccggctctgccacatcctggaagaggtggcggggcttccgcccaagaggagctcccacagtcaggagaaactcctgcagaaccaggtccagaagctgatccaggagttgaaggaacagaaggagcgagcccagtgggagaaggagcacctggaggagcggctgctgcagaccacccgcacgctccaggagatggaggccgagctgcagaacttgcagaagtcctgcctcctgcagctggcccgctcctcgtgggtgggccgcatgctacgatcccagactggcagtgtggaggtagtgacggcagagactctgatggacccaagcgacctctctgaaaacattcaggcccccaccggggagggctttcggctggaggacgtggattggaacagcgttgcccgccggtatcccaacctcttcaccaacatggagcccagctcaaagcaaaagcagccccggccctggccacagctggacacagggagcccagagtcctctggaaagcattccgagcggcatcacaagaccgtggagtggggctccctgccctgtctgaacaccagcagctcagggggcgctgactccgactccagcagctgccggccgggcctgccttccttc

SEQ ID NO: 11436 - DNA, 798 bp, Homo sapiens
  source 1..798: mol_type = unassigned DNA
cttccctcccaggcctgcttggaggtcgggcctcagctcccgaagaacattgagaatggcccccaagtctggccaggaggttgaagaaaccgaggaagaggctctcctgtcccccacagagcaagagtcggtcagtggtcacctgggacctccagcaggcgcacctgcagcccccgagactcccacgtgcctgccagacaccacgccccaccccgcaccggtggtctgctctgccgacccgcagttggctcttgagtccctggaccctcgcacactgcggctgctgtggagacagcgagaactggagatccaggccttgcggtgggccatccagaatggcgaggacgcccggctctgccacatcctggaagaggtggcggggcttccgcccaagaggagctcccacagtcaggagaaactcctgcagaaccaggtccagaagctgatccaggagttgaaggaacagaaggagcgagcccagtgggagaaggagcacctggaggagcggctgctgcagaccacccgcacgctccaggagatggaggccgagctgcagaacttgcagaagtcctgcctcctgcagctggcccgctcctcgtgggtgggccgcatgctacgatcccagactggcagtgtggaggtagtgacggcagagactctgatggacccaagcgacctctctgaaaacattcaggcccccaccggggagggctttcggctggaggacgtggattggaacagcgttgcccgccggtatcccaacctcttcaccaacatggagcccagctcaaagcaaaa

SEQ ID NO: 11437 - DNA, 608 bp, Homo sapiens
  source 1..608: mol_type = unassigned DNA
acatagccgaaagttgcagagatgaagggtgaaagctggaatgattgggttttaatgggtcaggtctgggacctggcttttctcctggagcagagggaatacttgtcatggtaatggggtagcccagagggtgtggacacggctgggaaaagtgaggcttcagtttgggggtcagagcaagagtcggtcagtggtcacctgggacctccagcaggcgcacctgcagcccccgagactcccacgtgcctgccagacaccacgccccaccccgcaccggtggtctgctctgccgacccgcaggtctgctgccgctgcaggttggctcttgagtccctggaccctcgcacactgcggctgctgtggagacagcgagaactggagatccaggccttgcggtgggccatccagaatggcgaggacgcccggctctgccacatcctggaagaggtggcggggcttccgcccaagaggtctgcagcacagtccccagcccaacccaaccccgccctgtcctcgcccggactcctggtttctgtctgaccccaaccccaaccgctgaggcagatccttaccctcatccttgcccgcgctgaccctccaccctgatc

SEQ ID NO: 11438 - DNA, 1550 bp, Homo sapiens
  source 1..1550: mol_type = unassigned DNA
agagtgggaaaaagcagaaggagaccagaggtgcccaggtagtgctgggcatgggcaggggcacagtgccacctgcaattgcctttgatgcctcttggtgccctgtgtttacttcttagacatctagggagtaaggtctggctctttcccgtcttaacccaaggttggttgggactctgcagtctggccaagggatgtgttgtcctgtcccttctcccttaggtcactgaaaggcagtcaggtgagatgccctgtctggcccaaaacgatctcggaccctcggtgctggtctcactctggtgaggctgtccctgatgcttggccttctctccagggaaccagtggatgaggtgctgcagatccccccatccctgctgacatgcggcggctgccagcagaacattggggaccgctacttcctgaaggccatcgaccagtactggcacgaggactgcctgagctgcgacctctgtggctgccggctgggtgaggtggggcggcgcctctactacaaactgggccggaagctctgccggagagactatctcaggctttttgggcaagacggtctctgcgcatcctgtgacaagcggattcgtgcctatgagatgacaatgcgggtgaaagacaaagtgtatcacctggaatgtttcaaatgcgccgcctgtcagaagcatttctgtgtaggtgacagatacctcctcatcaactctgacatagtgtgcgaacaggacatctacgagtggactaagatcaatgggatgatataggcccgagtccccgggcatctttggggaggtgttcactgaagacgccgtctccatggcatcttcgtcttcactcttaggcactttgggggtttgagggtggggtaagggatttcttaggggatggtagacctttattgggtatcaagacatagcatccaagtggcataattcaggggctgacacttcaaggtgacagaaggaccagcccttgagggagaacttatggccacagcccatccatagtaactgacatgattagcagaagaaaggaacatttaggggcaagcaggcgctgtgctatcatgatggaatttcatatctacagatagagagttgttgtgtacagacttgttgtgactttgacgcttgcgaactagagatgtgcaattgatttcttttcttcctggctttttaactcccctgtttcaatcactgtcctccacacaagggaaggacagaaaggagagtggccattctttttttcttggcccccttcccaaggccttaagctttggacccaaggaaaactgcatggagacgcatttcggttgagaatggaaaccacaacttttaaccaaacaattatttaaagcaatgctgatgaatcactgtttttagacaccttcattttgaggggaggagttccacagattgtttctatacaaatataaatcttaaaaagttgttcaactattttattatcctagattatatcaaagtatttgtcgtgtgtagaaaaaaaaacagctctgcaggcttaataaaaatgacagactgaaa

SEQ ID NO: 11439 - DNA, 1519 bp, Homo sapiens
  source 1..1519: mol_type = unassigned DNA
cgccggagcaagcggaggcgcaggagcggcggcgacggcggcggcggcggcggcgcccgagcacccgagggggtccgagccccggcagccggccagccccgcgccacaaagggagcgcccccgccgcccggcaccccgcctccctccccaatgtcctcggccatcgaaaggaagagcctggacccttcagagtcactgaaaggcagtcaggtgagatgccctgtctggcccaaaacgatctcggaccctcggtgctggtctcactctggtgaggctgtccctgatgcttggccttctctccagggaaccagtggatgaggtgctgcagatccccccatccctgctgacatgcggcggctgccagcagaacattggggaccgctacttcctgaaggccatcgaccagtactggcacgaggactgcctgagctgcgacctctgtggctgccggctgggtgaggtggggcggcgcctctactacaaactgggccggaagctctgccggagagactatctcaggctttttgggcaagacggtctctgcgcatcctgtgacaagcggattcgtgcctatgagatgacaatgcgggtgaaagacaaagtgtatcacctggaatgtttcaaatgcgccgcctgtcagaagcatttctgtgtaggtgacagatacctcctcatcaactctgacatagtgtgcgaacaggacatctacgagtggactaagatcaatgggatgatataggcccgagtccccgggcatctttggggaggtgttcactgaagacgccgtctccatggcatcttcgtcttcactcttaggcactttgggggtttgagggtggggtaagggatttcttaggggatggtagacctttattgggtatcaagacatagcatccaagtggcataattcaggggctgacacttcaaggtgacagaaggaccagcccttgagggagaacttatggccacagcccatccatagtaactgacatgattagcagaagaaaggaacatttaggggcaagcaggcgctgtgctatcatgatggaatttcatatctacagatagagagttgttgtgtacagacttgttgtgactttgacgcttgcgaactagagatgtgcaattgatttcttttcttcctggctttttaactcccctgtttcaatcactgtcctccacacaagggaaggacagaaaggagagtggccattctttttttcttggcccccttcccaaggccttaagctttggacccaaggaaaactgcatggagacgcatttcggttgagaatggaaaccacaacttttaaccaaacaattatttaaagcaatgctgatgaatcactgtttttagacaccttcattttgaggggaggagttccacagattgtttctatacaaatataaatcttaaaaagttgttcaactattttattatcctagattatatcaaagtatttgtcgtgtgtagaaaaaaaaacagctctgcaggcttaataaaaatgacagactgaaa

SEQ ID NO: 11440 - DNA, 1687 bp, Homo sapiens
  source 1..1687: mol_type = unassigned DNA
ggctccgggcggccgggcgggcgcacaccatccccgcgggcggcgcggagccggcgacagcgcgcgagagggaccgggcggtggcggcggcgggaccgggatggaaggttaagtcctgagcagcagcagcagctgcagccgcctggagccaggctgcgcgccccggcccccgcctcggccgcggcgcgcccgcagcccggtgattcgctctctctctttggcgtttgaagggagcgcggtgactgtccttgagcgcggaggggcgagctcgccggcggagcgccggagcaagcggaggcgcaggagcggcggcgacggcggcggcggcggcggcgcccgagcacccgagggggtccgagccccggcagccggccagccccgcgccacaaagggagcgcccccgccgcccggcaccccgcctccctccccaatgtcctcggccatcgaaaggaagagcctggacccttcagaggaaccagtggatgaggtgctgcagatccccccatccctgctgacatgcggcggctgccagcagaacattggggaccgctacttcctgaaggccatcgaccagtactggcacgaggactgcctgagctgcgacctctgtggctgccggctgggtgaggtggggcggcgcctctactacaaactgggccggaagctctgccggagagactatctcaggctttttgggcaagacggtctctgcgcatcctgtgacaagcggattcgtgcctatgagatgacaatgcgggtgaaagacaaagtgtatcacctggaatgtttcaaatgcgccgcctgtcagaagcatttctgtgtaggtgacagatacctcctcatcaactctgacatagtgtgcgaacaggacatctacgagtggactaagatcaatgggatgatataggcccgagtccccgggcatctttggggaggtgttcactgaagacgccgtctccatggcatcttcgtcttcactcttaggcactttgggggtttgagggtggggtaagggatttcttaggggatggtagacctttattgggtatcaagacatagcatccaagtggcataattcaggggctgacacttcaaggtgacagaaggaccagcccttgagggagaacttatggccacagcccatccatagtaactgacatgattagcagaagaaaggaacatttaggggcaagcaggcgctgtgctatcatgatggaatttcatatctacagatagagagttgttgtgtacagacttgttgtgactttgacgcttgcgaactagagatgtgcaattgatttcttttcttcctggctttttaactcccctgtttcaatcactgtcctccacacaagggaaggacagaaaggagagtggccattctttttttcttggcccccttcccaaggccttaagctttggacccaaggaaaactgcatggagacgcatttcggttgagaatggaaaccacaacttttaaccaaacaattatttaaagcaatgctgatgaatcactgtttttagacaccttcattttgaggggaggagttccacagattgtttctatacaaatataaatcttaaaaagttgttcaactattttattatcctagattatatcaaagtatttgtcgtgtgtagaaaaaaaaacagctctgcaggcttaataaaaatgacagactgaaa

SEQ ID NO: 11441 - DNA, 2294 bp, Homo sapiens
  source 1..2294: mol_type = unassigned DNA
gaattcgtccaaactgaggatcacaagtctccacattctgagtaggaggatgagggtctgagttaggatttgggtcctgcagggcttgctaaggaatcccctgatggcctaggattccacgcagagcacatctggtgtgagagagctcgctgcaagggtgaaggctccgccctatcagatagacaaccaggccaccaagaggcccagccctccaaaccctggatttgcaacatcctcaaagaacagcaacgggccttgagcagaattgagaaggaaatacccccacctgccctcagccgttaagtgggctttgctattcacaagggcctctgggtgtcctggcagagaggggagatggcacaggcaccaggtgctagggtgccagggcctcccgagaaggaacaggtgcaaagcaggcaattagcccagaaggtatccgtggggcaggcagcctagatctgatgggggaagccaccaggattacatcatctgctgtaacaactgctctgaaaagaagatatttttcaacctgaacttgcagtagctagtggagaggcaggaaaaaggaaatgaaaccagagacagagggaagctgagcgaaaatagaccttcccgagagaggaggaagcccggagagagacgcacggtcccctccccgcccctaggccgccgccccctctctgccctcggcggcgagcagcgcgccgcgacccgggccgaaggtgcgaggggctccgggcggccgggcgggcgcacaccatccccgcgggcggcgcggagccggcgacagcgcgcgagagggaccgggcggtggcggcggcgggaccgggatggaagggagcgcggtgactgtccttgagcgcggaggggcgagctcgccggcggagcgccggagcaagcggaggcgcaggagcggcggcgacggcggcggcggcggcggcgcccgagcacccgagggggtccgagccccggcagccggccagccccgcgccacaaagggagcgcccccgccgcccggcaccccgcctccctccccaatgtcctcggccatcgaaaggaagagcctggacccttcagaggaaccagtggatgaggtgctgcagatccccccatccctgctgacatgcggcggctgccagcagaacattggggaccgctacttcctgaaggccatcgaccagtactggcacgaggactgcctgagctgcgacctctgtggctgccggctgggtgaggtggggcggcgcctctactacaaactgggccggaagctctgccggagagactatctcaggctttttgggcaagacggtctctgcgcatcctgtgacaagcggattcgtgcctatgagatgacaatgcgggtgaaagacaaagtgtatcacctggaatgtttcaaatgcgccgcctgtcagaagcatttctgtgtaggtgacagatacctcctcatcaactctgacatagtgtgcgaacaggacatctacgagtggactaagatcaatgggatgatataggcccgagtccccgggcatctttggggaggtgttcactgaagacgccgtctccatggcatcttcgtcttcactcttaggcactttgggggtttgagggtggggtaagggatttcttaggggatggtagacctttattgggtatcaagacatagcatccaagtggcataattcaggggctgacacttcaaggtgacagaaggaccagcccttgagggagaacttatggccacagcccatccatagtaactgacatgattagcagaagaaaggaacatttaggggcaagcaggcgctgtgctatcatgatggaatttcatatctacagatagagagttgttgtgtacagacttgttgtgactttgacgcttgcgaactagagatgtgcaattgatttcttttcttcctggctttttaactcccctgtttcaatcactgtcctccacacaagggaaggacagaaaggagagtggccattctttttttcttggcccccttcccaaggccttaagctttggacccaaggaaaactgcatggagacgcatttcggttgagaatggaaaccacaacttttaaccaaacaattatttaaagcaatgctgatgaatcactgtttttagacaccttcattttgaggggaggagttccacagattgtttctatacaaatataaatcttaaaaagttgttcaactattttattatcctagattatatcaaagtatttgtcgtgtgtagaaaaaaaaacagctctgcaggcttaataaaaatgacagactgaaa

SEQ ID NO: 11442 - DNA, 869 bp, Homo sapiens
  source 1..869: mol_type = unassigned DNA
tgcttgctcgagctgttcgtgggttactttctgccttagttaaaccaaaagggaaaggcggaagaggggaagccctgaagaatgatttagtggttgcccagcctcctttccaaggagaggtgttcgctgagcggctctccccgtccccgacactggcccctttaagaagccaagaaaaaggaaatgaaaccagagacagagggaagctgagcgaaaatagaccttcccgagagaggaggaagcccggagagagacgcacggtcccctccccgcccctaggccgccgccccctctctgccctcggcggcgagcagcgcgccgcgacccgggccgaaggtgcgaggggctccgggcggccgggcgggcgcacaccatccccgcgggcggcgcggagccggcgacagcgcgcgagagggaccgggcggtggcggcggcgggaccgggatggaaggttaagtcctgagcagcagcagcagctgcagccgcctggagccaggctgcgcgccccggcccccgcctcggccgcggcgcgcccgcagcccggtgattcgctctctctctttggcgtttgaagggagcgcggtgactgtccttgagcgcggaggggcgagctcgccggcggagcgccggagcaagcggaggcgcaggagcggcggcgacggcggcggcggcggcggcgcccgagcacccgagggggtccgagccccggcagccggccagccccgcgccacaaagggagcgcccccgccgcccggcaccccgcctccctccccaatgtcctcggccatcgaaaggaagagcctggacccttcagaggaaccagtggatgaggtgctgcagatccccccatccctgctgacatgcggcgg

SEQ ID NO: 11443 - DNA, 390 bp, Homo sapiens
  source 1..390: mol_type = unassigned DNA
cgcctctgcagagcgcggccgcagcccggagcccgcagcccggagcccgcagcctggggcccgcagcccgtagcccgcagcccgcagagccgcgctgtccggggcatcccagtgcacggcgtccgtggacctgggacctcgaacctgggacgggcggaaaatccactgggaacacttgcatttctgaaaaaggaaatgaaaccagagacagagggaagctgagcgaaaatagaccttcccgagagaggaggaagcccggagagagacgcacggtcccctccccgcccctaggccgccgccccctctctgccctcggcggcgagcagcgcgccgcgacccgggccgaagggagcgcggtgactgtccttgagcgcggaggggcgagctcgc

SEQ ID NO: 11444 - DNA, 1295 bp, Homo sapiens
  source 1..1295: mol_type = unassigned DNA
gcggcgccgcggggccttagcggacggaggggagcgcgggggtcaccgggccgggccggcagccctagagctcggcctggcggggaccctgggccagccccgcgcctccgtggcccgggcgtctcgtgcgtgtccgcgaactcgcgtgcgcgcgtcacctcggaccgcagcatggctcggagggcggccctactcgcgccgccctagtgctgcgaagggcctcggagcccaaacccggaaccgccatctgggactgggaagacgacatggccagaagccgactggacagccggcaccaccccatgattcaaggatggccatagcccagtgcaggagcagatttgcttccagtttgcccttcctcctagagttttgctcttgtcgcccaggctacaggacaacagtggcgttatctccgctcactgcaacctccgcctcccaagttcaagcaattctcctgcctcagcctcccaccaccacacctggctaatttttggatttttagtagagatggggtttcaccatgttggccaggctggtctcaaactcctgcctcaacctcccaaagtgctgggattacaggtgtgagccaccacgcccagctgtttaatctctttttaataaaatatttcattgttatcattggattctcacagcaccatttgaggtatacgagcggtgttagtccaattttaacacacgtgctcaactcgtggaaaatgaacagcagagctgttctccagagatgttcagatctgcagcccagggcttttttctgtatgacctttacccacaacagctccgactccaattttttgagtttatacctggatcctacaccacccttctccagccctgtggtccttgacattgtttctttattcatctgcaccaaggactgaggcagaagtaacaatctgtttcaacaacatctacattcagaacatactagaagatacagcacacttcttacacggatcagcaattcagaaatgttctcttctcattttattgcttagagcttcacgttggtgggaagcttgtttggtcataaaaagaactgccaagcacagatacgctatgaccctgcaggttcctggggagaggcaacacatcttcattggagaggacagttgaatatgtctcctctgacacaactacacagacccctttccaagctctgcagccatcctccccacctaatgaaataaaatgtagatttctgttgtttaattgcacctaataaatcttttttttctttcaaccactttgaataaacatatattgtcaatcaa

SEQ ID NO: 11445 - DNA, 2162 bp, Homo sapiens
  source 1..2162: mol_type = unassigned DNA
agcgcgcagccggccgccctcaaccgctcccagcatcggttgccggtggttcggggcagggagacgacgcagcgcgagcggaaagggcggttacccaacggccttagctctcatggcgtcctccgtggtgttacctaaaaataaagttatttgtgattagaaggtaatcgcctcctggtcatgcttccgctggtcaacagtgtctgcggggcgaccccatccttgtggccagagagggcctgtggctgcgctcaaggcgggagcggtccttagcggggccctgcgggacgcccaggccgcgctcctttcccttgctcgcctggccttgaagtgaagggggaggtttaacaatgcagtgggaaccccaaagtttgtctcggccgtgctgctcacattccaaacaatgcaaaaggttgaggaaaacctcagcagttgaaaccgtgatgcatttcagcaaagaagtagctcctgtcctcgtaaaatcagtgaagttctcacggacgacctcattgaaagttttcatgggctgagctgctgacttcagcctgggaactgaggccaacatcggagtctcctcggcacacaagtttgaaagaagtcctagtgacttcaagctcagaaccatggacggcagggctccctctggatgtggaattctccgtccctttccagggagggaacaaagcccacaagcaccgagactccttcagggtgagcaaaggcctggaaaaacctgtatgcagataaagaaaaggaaagaaagagataatcagtgcatgcagttgtcagctggctgggacctgaggagagtcacttgtggaggcaactggtctttatccccattgtccggtacaaggcaggcattaatcctgtgatccttatctgaagctcaggtttgattttattcttttcttaagtacctactgttatccccaagcttataataatagtttaattgttacagccagtatctcaccttcagaagtaagatgcttaggaaaccaagacaaggaactgtgtgttgcaaacagcatcaccctggagaagaggtggcaggaggtgacctacagaaaatggagtaatagcctagagcaagaaacacagaacaaaagagaaatgaggggttaggcaacctcctggagcaccaatgggacaagcacatattcaggggcctcctaacagactcgacttccagcatcctcagatggtgctagacacgttacatagacgttcaagagtagagaactcagggacttctgatttatatcaagaaatgcatacacagcagacgtgtgcctgtggagtggaattctggaaaagctcacagcccagaacataatgcagactcccccagccacagcaccttccaaacctgagaagagtgctgattctccatctgagcacccattctcctgcaacatcaggggagaggatttcacctaagggtcagaccagcatctccaaacccagctccccacctttgcctgttggtggcacttgtgggagaaggggagatggtatgaaaagagccacaacaggagtcacctggacagggtggagcttgatggaaactgacatttgtgcccattggaggcaaatgtagaatttggtatcttccgtagcgtcaggcacatgaaactctccagtgcccatgacttttgacagtgacttcagagcacatctgggagacccatgtggcccaggctccacacaggcaggagctcagcttcactcacagcaggattcctagtgccaagaacaccataggtgcatagcaggtgatcaaaataattgtatgtggctgaatcagtgagaggtaagagagaggacttgatcctagctgcaaactaagagacctcattaaaacctaacatgtggctgggtgtggtggctcacgcctgtaagcccagcactttgggaggccgaggggtggatcacctgaggtcaggagttcaagacaagcctggccaacgtggtgaaaacccatctctactaaatatacaaaaaattggctgggcatggtggcaggtgcctgtaatcccagctacttgggaggctgaggcaggagaatcacttgaacccaggaggcggaggttgcagtgagccgagattgcaccactatactccagcctggcaataagagcaaaagtccgtctcaaaac

SEQ ID NO: 11446 - DNA, 4498 bp, Homo sapiens
  source 1..4498: mol_type = unassigned DNA
ccagagtgcattgcggggccgcttcctttccgctcggctgttttcctgcgcaggagccgcagggccgtaggcagccatggcgcccagccggaatggcatggtcttgaagccccacttccacaaggactggcagcggcgcgtggccacgtggttcaaccagccggcccgtaagatccgcagacgtaaggcccggcaagccaaggcgcgccgcatcgccccgcgccccgcgtcgggtcccatccggcccatcgtgcgctgccccacggttcggtaccacacgaaggtgcgcgccggccgcggcttcagcctggaggagctcagggtggccggcattcacaagaaggtggcccggaccatcggcatttctgtggatccgaggaggcggaacaagtccacggagtccctgcaggccaacgtgcagcggctgaaggagtaccgctccaaactcatcctcttccccaggaagccctcggcccccaagaagggagacagttctgctgaagaactgaaactggccacccagctgaccggaccggtcatgcccgtccggaacgtctataagaaggagaaagctcgagtcatcactgaggaagagaagaatttcaaagccttcgctagtctccgtatggcccgtgccaacgcccggctcttcggcatacgggcaaaaagagccaaggaagccgcagaacaggatgttgaaaagaaaaaataaagccctcctggggacttggaatcagtcggcagtcatgctgggtctccacgtggtgtgtttcgtgggaacaactgggcctgggatggggcttcactgctgtgacttcctcctgccaggggatttggggctttcttgaaagacagtccaagccctggataatgctttactttctgtgttgaagcactgttggttgtttggttagtgactgatgtaaaacggttttcttgtggggaggttacagaggctgacttcagagtggacttgtgttttttctttttaaagaggcaaggttgggctggtgctcacagctgtaatcccagcactttgaggttggctgggagttcaagaccagcctggccaacatgtcagaactactaaaaataaagaaatcagccatgcttggtgctgcacacttgtagttgcagctcctgggaggcagaggtgagggatcacttaacccaggaggcagaggctgcactgagccaggatcacgccactgcactctagcctgggcaacagtgagactgtctcaaaaaaaaaaaaagagacagggtcttcggcacccaggctggagtacagtgccacaatcatggctcactgcagtcttgaactcatggcctcaagcagtcctccctcagcctcccaagtagaggggtttataggcacgagaccctgcacccaacctagagttgccttttttaagcaaagcagtttctagttaatgtagcatcttggactttggggcgtcattcttaagcttgttgtgcccggtaaccatggtcctcttgctctgattaacccttccttcaatgggcttcttcacccagacaccaaggtatgagatggccctgccaagtgtcggcctctcctgttaaacaaaaacattctaaagccattgttcttgcttcatggacaagaggcagccagagagagtgccagggtgccctggtctgagctggcatccccatgtcttctgtgtccgagggcagcatggtttctcgtgcagtgctcagacacagcctgccctagtcctaccagctcacagcagcacctgctctccttggcagctatggccatgacaaccccagagaagcagcttcagggaccgagtcagattctgttttgtctacatgcctctgccgggtgccggtattgaggcacccagggagctgttactggcgtggaaataggtgatgctgctacctctgctgctgcactcacagccacacttgatacacgatgacaccttgcttgtttggaaacatctaaacatctagtagatgacttgcaggctgttggctaccagtttcctgtctgaggtgtatatgttaacttcgtgatcagtttgtatgtttgggactcttgtcctatgtaaagttaaggtgggccgggtgcagtggctcacgcctgtaatcctaacactgggaggccgaggcgggtggatcacctgatggtgaaacctcatctctactgaaaatacaaaaattagctgagtggtgacacacgcctgtaatcccagctacttggtaggcttgaacccaggaggcagagattgcagtgagccgagctgcaccactgtgctccagcctgggtgacagcgagactcagtctcaaaaaaagttgtacaaggtggatggttggaagcttgagcctaggctcgaatccctctcacgtgagagggcctgaagatttctggtggattccaacctggctgaagactggccgtggggggtgcaggggtctccagcgctctgccctccagcctgcttcctccctgcccacaccgcactaggggaagggcctttcctgctgcctgcggggccgcacctggagtaggtaatgccatgtggtgacgtgaatggagcagaggtctgtgccccatcacaccgccttgctgtttttactgtgggacaaaagcactctgatctgcgtgttccgggggccctcctaccagccgacttgacgggaagtcagggttcaggtatcatctgtgcacctggggcggggtagtctgcactgaacctgccagagtcccctcctcatttcactgaaagtcacagtctccagggctgtgttgctaaccttacgttctctccgtttgcttaatctattaagagccctaacaggagaggatgggctttctctgttgtctggggccctgctgttggccggtgctcttagcaagaggtcatttttctaggttgcgctgggacattgtgagtttggtgagggtcatggatgtgggctgggctgggctgggctgggccgggctgcctgctgcctgctgctcccctacctgaaatgcagctagtgcggctctgcccttcctggggctgaggaaggcttctgcaggatagctggggggctgggcaggtgggtgaggcagcctccctgctgacactcagtccttgtagctggagcaagatctcctgatccaggtacgggcctgtctgctccaagaaagactctgccaccagatgcaaaggggccctttgttttaacttagtccctggggaccgcctgattcagcacctgtcggcccaggataccccgctggtggggacaagtgcctgagtgtgggccgtgcccgagtgtggccatccctgagtggggccgtcctgactaggaagtggcttttcagttgtgatgtgtgggcctgacctagggggcgctgtggaacccgggctggaaccagccctctgtgccaggccgcagacaggttccgccggccctgaggggcagctgccatggcgtgggtcactgggagctgagaggaagggcccccaccgcacctcaggcaaagcggctctgggaacaccttgatttcgtccatgtgagccgtcccagggagggcagccaagctgtgaagcctgagaaactgacctgtgtgccacgagcttgtggtctgctgcccggtggaggaagtgcaggtgcgcccaggctcctcattccgttttgcaggattccttcggggtgtgagcatttcctattcagcctgtcgcccccggggagcacgggctggctctgtggtgcccgtggccttttgtagaagcgttggttttacggcaggttcatctctggggcagcctcccacagtgggtggggctttgccagcagtgcccacgggggtcatggggccaggcgcgctccggcgcctgcagaactgatcggggatagtctcaggaggcgctagtcacgtgccccggtgatcggggatagtctcagaaggcgctagtctcctgccccggtgatcggggatagtctcaggaggcacgagtcgcctgcctcggtgatgcaccgtttctcacaccggctgctctggcccgagctaaaggggaagacgtgtgcggataggagctgcacacaattttcctccatgtattgtttattttgctttttcttttggctagacattaggaatttcagttttcccaagttgtatttttccttttctattttaaaattatcatgcagggctgggtgaggtcgctcacgcctatagtctcaaaactttgggaggctgaggggggaggatggcatgagcccaggagtttaaggctgcagtgagccgagatcgctccactgtcctccagcctgcatgacagagcgagaccctatctcaggaaaaaaaaaaacaaaactattatgcagtagtttcgaccctggaagacgagtgtgcatctttgagttgtaacacgtgtacctcgcccatccaggcgtagtttcatttggaatctggttatcctgtagttgctttgttaaaaatatatgtaattgcaaatcatt

SEQ ID NO: 11447 - DNA, 698 bp, Homo sapiens
  source 1..698: mol_type = unassigned DNA
gcttcctttccgctcggctgttttcctgcgcaggagccgcagggccgtaggcagccatggcgcccagccggaatggcatggtcttgaagccccacttccacaaggactggcagcggcgcgtggccacgtggttcaaccagccggcccgtaagatccgcaggtgagccctgcgctcggggctgcccctggggctcgtgcccgcggctgcgccttggcttgcgggtggccgatgccagggcggggggcgctgtctgcaaccgtcgcggagcgctggcctggcggccttaggcaagggtgaccgccgctgcgcttctctccaccagacgtaaggcccggcaagccaaggcgcgccgcatcgccccgcgccccgcgtcgggtcccatccggcccatcgtgcgctgccccacggttcggtaccacacgaaggtgcgcgccggccgcggcttcagcctggaggagctcagggtggccggcattcacaagaaggtggcccggaccatcggcatttctgtggatccgaggaggcggaacaagtccacggagtccctgcaggccaacgtgcagcggctgaaggagtaccgctccaaactcatcctcttccccaggaagccctcggcccccaagaagggagacagttctgctgaagaactgaaactggccacccagctgaccggaccggtcatgcccgtccggaacgt

SEQ ID NO: 11448 - DNA, 2367 bp, Homo sapiens
  source 1..2367: mol_type = unassigned DNA
gcttcctttccgctcggctgttttcctgcgcaggaggtgagggagactgggtcctggcctttgggcatcatccagcgccatcggcctggcgcttcagccaacgcgggagtggatgggccccttcttcttcgcagacagcgttcggccgctgcccgggctctaggcgcggccggacggcccagtctggagggttcggggcggaggcccgggggggtgcgcgcgcccggggtccggcctctcactcgctcccctctcgtccgcagccgcagggccgtaggcagccatggcgcccagccggaatggcatggtcttgaagccccacttccacaaggactggcagcggcgcgtggccacgtggttcaaccagccggcccgtaagatccgcaggtgagccctgcgctcggggctgcccctggggctcgtgcccgcggctgcgccttggcttgcgggtggccgatgccagggcggggggcgctgtctgcaaccgtcgcggagcgctggcctggcggccttaggcaagggtgaccgccgctgcgcttctctccaccagacgtaaggcccggcaagccaaggcgcgccgcatcgccccgcgccccgcgtcgggtcccatccggcccatcgtgcgctgccccacggttcggtaccacacgaaggtgcgcgccggccgcggcttcagcctggaggagctcagggtgagtactggcagcgctgcggtgtcaggaaggccccgaagtcccctctgttggcctcagtcgcgtgatgacattctccggaatcgctgtacggccttgatgaaagcacatttgaacccttttccatctgattgctgaggcttttcatccaggcctcggggctggagaaagcccgggcctgtctccatctctctctggttctggggcaggtggccggcattcacaagaaggtggcccggaccatcggcatttctgtggatccgaggaggcggaacaagtccacggagtccctgcaggccaacgtgcagcggctgaaggagtaccgctccaaactcatcctcttccccaggaagccctcggcccccaagaagggagacagttctgtgagtacacggctctctggccgtcctggtgcgcggggacagtgaggcttggctcctttatcagtgacaccggtccctgggtcttgctggggtgagaagaaccaaaacattgtgggtgatgagctaagcgggactgctaaggttcacctgtgcgtttccgcagagataaccttaatggacatggcaaggctgtgtgacttggaggcagctttttccattgacgttgctctccctaaaatgcttcgtattccaaaatatttctagaaagaccttgtaggataaggttgataaagagtccattgtatacgtttccgggtagttaaattagggaacagttttctctgccccgcccgtggttcacaggtagataactgtctcgtgcgtgttgcgtcaactcagtaagatatagtcacctaactaataaggactgttcttaacattggggccacaaagtgtgttgtagaaaaggctcagacactggtcctgaacacggaatccccaggggaaagtttggggccaggtgagggtggagtccttgcagcagtgcggccaaccccacttaactcttctcattcaccaacaggctgaagaactgaaactggccacccagctgaccggaccggtcatgcccgtccggaacgtaagtgaacacttactcaaatccaggcttcagacgagatcagtgggtgaacacgtgggtatctgagatgcgggtgatgggggtcaggcttaagaacgttaatagtggcagttgtgggtgtggaggtttgcggaaaggaacatttcttcttagtttttacttcttgcaaccatgaagccatacattgggaagtatttttgtttgttttgtgtttttttgttgttgttggaaagagagtttctctatgctgcttacattggttttgaattgctgggtttacaggcttgagccgccatgtccagctcagggagggtttttctttttttttttaaatcccagggaaggtgattgactcagggttgcttttcagcagtacttatggcagcgaacctgacccccaatccccgggaggtcctccaggttctcctgacgcttggttgttcccttgccctttggtgcatgtgggtttaacaacctgtctttctcttctaggtctataagaaggagaaagctcgagtcatcactgaggaagagaagaatttcaaagccttcgctagtctccgtatggcccgtgccaacgcccggctcttcggcatacgggcaaaaagagccaaggaagccgcagaacaggatgttgaaaagaaaaaataaa

SEQ ID NO: 11449 - DNA, 924 bp, Homo sapiens
  source 1..924: mol_type = unassigned DNA
ttcctttccgctcggctgttttcctgcgcaggagccgcagggccgtaggcagccatggcgcccagccggaatggcatggtcttgaagccccacttccacaaggactggcagcggcgcgtggccacgtggttcaaccagccggcccgtaagatccgcagacgtaaggcccggcaagccaaggcgcgccgcatcgccccgcgccccgcgtcgggtcccatccggcccatcgtgcgctgccccacggttcggtaccacacgaaggtgcgcgccggccgcggcttcagcctggaggagctcagggtgagtactggcagcgctgcggtgtcaggaaggccccgaagtcccctctgttggcctcagtcgcgtgatgacattctccggaatcgctgtacggccttgatgaaagcacatttgaacccttttccatctgattgctgaggcttttcatccaggcctcggggctggagaaagcccgggcctgtctccatctctctctggttctggggcaggtggccggcattcacaagaaggtggcccggaccatcggcatttctgtggatccgaggaggcggaacaagtccacggagtccctgcaggccaacgtgcagcggctgaaggagtaccgctccaaactcatcctcttccccaggaagccctcggcccccaagaagggagacagttctgctgaagaactgaaactggccacccagctgaccggaccggtcatgcccgtccggaacgtctataagaaggagaaagctcgagtcatcactgaggaagagaagaatttcaaagccttcgctagtctccgtatggcccgtgccaacgcccggctcttcggcatacgggcaaaaagagccaaggaagccgcagaacaggatgttgaaaagaaaaaataaagccctcctggggacttggaatcag

SEQ ID NO: 11450 - DNA, 554 bp, Homo sapiens
  source 1..554: mol_type = unassigned DNA
cctttccgctcggctgttttcctgcgcaggagacgtaaggcccggcaagccaaggcgcgccgcatcgccccgcgccccgcgtcgggtcccatccggcccatcgtgcgctgccccacggttcggtaccacacgaaggtgcgcgccggccgcggcttcagcctggaggagctcagggtggccggcattcacaagaaggtggcccggaccatcggcatttctgtggatccgaggaggcggaacaagtccacggagtccctgcaggccaacgtgcagcggctgaaggagtaccgctccaaactcatcctcttccccaggaagccctcggcccccaagaagggagacagttctgctgaagaactgaaactggccacccagctgaccggaccggtcatgcccgtccggaacgtctataagaaggagaaagctcgagtcatcactgaggaagagaagaatttcaaagccttcgctagtctccgtatggcccgtgccaacgcccggctcttcggcatacgggcaaaaagagccaaggaagccgcagaacaggatgttgaaaa

SEQ ID NO: 11451 - DNA, 712 bp, Homo sapiens
  source 1..712: mol_type = unassigned DNA
cctttccgctcggctgttttcctgcgcaggaggcagccatggcgcccagccggaatggcatggtcttgaagccccacttccacaaggactggcagcggcgcgtggccacgtggttcaaccagccggcccgtaagatccgcagacgtaaggcccggcaagccaaggcgcgccgcatcgccccgcgccccgcgtcgggtcccatccggcccatcgtgcgctgccccacggttcggtaccacacgaaggtgcgcgccggccgcggcttcagcctggaggagctcagggtggccggcattcacaagaaggtggcccggaccatcggcatttctgtggatccgaggaggcggaacaagtccacggagtccctgcaggccaacgtgcagcggctgaaggagtaccgctccaaactcatcctcttccccaggaagccctcggcccccaagaagggagacagttctgctgaagaactgaaactggccacccagctgaccggaccggtcatgcccgtccggaacgtctataagaaggagaaagctcgagtcatcactgaggaagagaagaatttcaaagccttcgctagtctccgtatggcccgtgccaacgcccggctcttcggcatacgggcaaaaagagccaaggaagccgcagaacaggatgttgaaaagaaaaaataaagccctcctggggacttggaatcagtcggcagtcatgc

SEQ ID NO: 11452 - DNA, 615 bp, Homo sapiens
  source 1..615: mol_type = unassigned DNA
ctttccgctcggctgttttcctgcgcaggagccgcagggccgtaggcagccatggcgcccagccggaatggcatggtcttgaagccccacttccacaaggactggcagcggcgcgtggccacgtggttcaaccagccggcccgtaagatccgcaggtgagccctgcgctcggggctgcccctggggctcgtgcccgcggctgcgccttggcttgcgggtggccgatgccagggcggggggcgctgtctgcaaccgtcgcggagcgctggcctggcggccttaggcaagggtgaccgccgctgcgcttctctccaccagacgtaaggcccggcaagccaaggcgcgccgcatcgccccgcgccccgcgtcgggtcccatccggcccatcgtgcgctgccccacggttcggtaccacacgaaggtgcgcgccggccgcggcttcagcctggaggagctcagggtgagtactggcagcgctgcggtgtcaggaaggccccgaagtcccctctgttggcctcagtcgcgtgatgacattctccggaatcgctgtacggccttgatgaaagcacatttgaacccttttccatctgattgctgaggcttttcatccaggcc

SEQ ID NO: 11453 - DNA, 958 bp, Homo sapiens
  source 1..958: mol_type = unassigned DNA
ctttccgctcggctgttttcctgcgcaggagccgcagggccgtaggcagccatggcgcccagccggaatggcatggtcttgaagccccacttccacaaggactggcagcggcgcgtggccacgtggttcaaccagccggcccgtaagatccgcagaaggtggcccggaccatcggcatttctgtggatccgaggaggcggaacaagtccacggagtccctgcaggccaacgtgcagcggctgaaggagtaccgctccaaactcatcctcttccccaggaagccctcggcccccaagaagggagacagttctgctgaagaactgaaactggccacccagctgaccggaccggtcatgcccgtccggaacgtctataagaaggagaaagctcgagtcatcactgaggaagagaagaatttcaaagccttcgctagtctccgtatggcccgtgccaacgcccggctcttcggcatacgggcaaaaagagccaaggaagccgcagaacaggatgttgaaaagaaaaaataaagccctcctggggacttggaatcagtcggcagtcatgctgggtctccacgtggtgtgtttcgtgggaacaactgggcctgggatggggcttcactgctgtgacttcctcctgccaggggatttggggctttcttgaaagacagtccaagccctggataatgctttactttctgtgttgaagcactgttggttgtttggttagtgactgatgtaaaacggttttcttgtggggaggttacagaggctgacttcagagtggacttgtgttttttctttttaaagaggcaaggttgggctggtgctcacagctgtaatcccagcactttgaggttggctgggagttcaagaccagcctggccaacatgtcagaactactaaaaataaagaaatcagccatgcttggtgctgcacacttgtagttgcagctcctg

SEQ ID NO: 11454 - DNA, 568 bp, Homo sapiens
  source 1..568: mol_type = unassigned DNA
tttccgctcggctgttttcctgcgcaggagccgcagggccgtaggcagccatggcgcccagccggaatggcatggtcttgaagccccacttccacaaggactggcagcggcgcgtggccacgtggttcaaccagccggcccgtaagatccgcagacgtaaggcccggcaagccaaggcgcgccgcatcgccccgcgccccgcgtcgggtcccatccggcccatcgtgcgctgccccacggttcggtaccacacgaaggtgcgcgccggccgcggcttcagcctggaggagctcagggtggccggcattcacaagaaggtggcccggaccatcggcatttctgtggatccgaggaggcggaacaagtccacggagtccctgcaggccaacgtgcagcggctgaaggagtaccgctccaaactcatcctcttccccaggaagccctcggcccccaagaagggagacagttctgtgagtacacggctctctggccgtcctggtgcgcggggacagtgaggcttggctcctttatcagtgacaccggtccctgggtcttgctggggtgagaa

SEQ ID NO: 11455 - DNA, 1455 bp, Homo sapiens
  source 1..1455: mol_type = unassigned DNA
tttccgctcggctgttttcctgcgcaggagccgcagggccgtaggcagccatggcgcccagccggaatggcatggtcttgaagccccacttccacaaggactggcagcggcgcgtggccacgtggttcaaccagccggcccgtaagatccgcagacgtaaggcccggcaagccaaggcgcgccgcatcgccccgcgccccgcgtcgggtcccatccggcccatcgtgcgctgccccacggttcggtaccacacgaaggtgcgcgccggccgcggcttcagcctggaggagctcagggtggccggcattcacaagaagggagacagttctgctgaagaactgaaactggccacccagctgaccggaccggtcatgcccgtccggaacgtctataagaaggagaaagctcgagtcatcactgaggaagagaagaatttcaaagccttcgctagtctccgtatggcccgtgccaacgcccggctcttcggcatacgggcaaaaagagccaaggaagccgcagaacaggatgttgaaaagaaaaaataaagccctcctggggacttggaatcagtcggcagtcatgctgggtctccacgtggtgtgtttcgtgggaacaactgggcctgggatggggcttcactgctgtgacttcctcctgccaggggatttggggctttcttgaaagacagtccaagccctggataatgctttactttctgtgttgaagcactgttggttgtttggttagtgactgatgtaaaacggttttcttgtggggaggttacagaggctgacttcagagtggacttgtgttttttctttttaaagaggcaaggttgggctggtgctcacagctgtaatcccagcactttgaggttggctgggagttcaagaccagcctggccaacatgtcagaactactaaaaataaagaaatcagccatgcttggtgctgcacacttgtagttgcagctcctgggaggcagaggtgagggatcacttaacccaggaggcagaggctgcactgagccaggatcacgccactgcactctagcctgggcaacagtgagactgtctcaaaaaaaaaaaaagagacagggtcttcggcacccaggctggagtacagtgccacaatcatggctcactgcagtcttgaactcatggcctcaagcagtcctccctcagcctcccaagtagaggggtttataggcacgagaccctgcacccaacctagagttgccttttttaagcaaagcagtttctagttaatgtagcatcttggactttggggcgtcattcttaagcttgttgtgcccggtaaccatggtcctcttgctctgattaacccttccttcaatgggcttcttcacccagacaccaaggtatgagatggccctgccaagtgtcggcctctcctgttaaacaaaaacattctaaagccattgttcttgcttcat

SEQ ID NO: 11456 - DNA, 528 bp, Homo sapiens
  source 1..528: mol_type = unassigned DNA
aggtgagggagactgggtcctggcctttgggcatcatccagcgccatcggcctggcgcttcagccaacgcgggagtggatgggccccttcttcttcgcagacagcgttcggccgctgcccgggctctagccgcagggccgtaggcagccatggcgcccagccggaatggcatggtcttgaagccccacttccacaaggactggcagcggcgcgtggccacgtggttcaaccagccggcccgtaagatccgcagacgtaaggcccggcaagccaaggcgcgccgcatcgccccgcgccccgcgtcgggtcccatccggcccatcgtgcgctgccccacggttcggtaccacacgaaggtgcgcgccggccgcggcttcagcctggaggagctcagggtggccggcattcacaagaaggtggcccggaccatcggcatttctgtggatccgaggaggcggaacaagtccacggagtccctgcaggccaacgtgcagcggctgaaggagtaccgctccaaactcatcctct

SEQ ID NO: 11457 - DNA, 2385 bp, Homo sapiens
  source 1..2385: mol_type = unassigned DNA
aggtgagggagactgggtcctggcctttgggcatcatccagcgccatcggcctggcgcttcagccaacgcgggagtggatgggccccttcttcttcgcagacagcgttcggccgctgcccgggctctaggcgcggccggacggcccagtctggagggttcggggcggaggcccgggggggtgcgcgcgcccggggtccggcctctcactcgctcccctctcgtccgcagccgcagggccgtaggcagccatggcgcccagccggaatggcatggtcttgaagccccacttccacaaggactggcagcggcgcgtggccacgtggttcaaccagccggcccgtaagatccgcagacgtaaggcccggcaagccaaggcgcgccgcatcgccccgcgccccgcgtcgggtcccatccggcccatcgtgcgctgccccacggttcggtaccacacgaaggtgcgcgccggccgcggcttcagcctggaggagctcagggtggccggcattcacaagaaggtggcccggaccatcggcatttctgtggatccgaggaggcggaacaagtccacggagtccctgcaggccaacgtgcagcggctgaaggagtaccgctccaaactcatcctcttccccaggaagccctcggcccccaagaagggagacagttctgctgaagaactgaaactggccacccagctgaccggaccggtcatgcccgtccggaacgtctataagaaggagaaagctcgagtcatcactgaggaagagaagaatttcaaagccttcgctagtctccgtatggcccgtgccaacgcccggctcttcggcatacgggcaaaaagagccaaggaagccgcagaacaggatgttgaaaagaaaaaataaagccctcctggggacttggaatcagtcggcagtcatgctgggtctccacgtggtgtgtttcgtgggaacaactgggcctgggatggggcttcactgctgtgacttcctcctgccaggggatttggggctttcttgaaagacagtccaagccctggataatgctttactttctgtgttgaagcactgttggttgtttggttagtgactgatgtaaaacggttttcttgtggggaggttacagaggctgacttcagagtggacttgtgttttttctttttaaagaggcaaggttgggctggtgctcacagctgtaatcccagcactttgaggttggctgggagttcaagaccagcctggccaacatgtcagaactactaaaaataaagaaatcagccatgcttggtgctgcacacttgtagttgcagctcctgggaggcagaggtgagggatcacttaacccaggaggcagaggctgcactgagccaggatcacgccactgcactctagcctgggcaacagtgagactgtctcaaaaaaaaaaaaagagacagggtcttcggcacccaggctggagtacagtgccacaatcatggctcactgcagtcttgaactcatggcctcaagcagtcctccctcagcctcccaagtagaggggtttataggcacgagaccctgcacccaacctagagttgccttttttaagcaaagcagtttctagttaatgtagcatcttggactttggggcgtcattcttaagcttgttgtgcccggtaaccatggtcctcttgctctgattaacccttccttcaatgggcttcttcacccagacaccaaggtatgagatggccctgccaagtgtcggcctctcctgttaaacaaaaacattctaaagccattgttcttgcttcatggacaagaggcagccagagagagtgccagggtgccctggtctgagctggcatccccatgtcttctgtgtccgagggcagcatggtttctcgtgcagtgctcagacacagcctgccctagtcctaccagctcacagcagcacctgctctccttggcagctatggccatgacaaccccagagaagcagcttcagggaccgagtcagattctgttttgtctacatgcctctgccgggtgccggtattgaggcacccagggagctgttactggcgtggaaataggtgatgctgctacctctgctgctgcactcacagccacacttgatacacgatgacaccttgcttgtttggaaacatctaaacatctagtagatgacttgcaggctgttggctaccagtttcctgtctgaggtgtatatgttaacttcgtgatcagtttgtatgtttgggactcttgtcctatgtaaagttaaggtgggccgggtgcagtggctcacgcctgtaatcctaacactgggaggccgaggcgggtggatcacctgatggtgaaacctcatctctactgaaaatacaaaaattagctgagtggtga

SEQ ID NO: 11458 - DNA, 879 bp, Homo sapiens
  source 1..879: mol_type = unassigned DNA
ggtccggcctctcactcgctcccctctcgtccgcagccgcagggccgtaggcagccatggcgcccagccggaatggcatggtcttgaagccccacttccacaaggactggcagcggcgcgtggccacgtggttcaaccagccggcccgtaagatccgcaggtgagccctgcgctcggggctgcccctggggctcgtgcccgcggctgcgccttggcttgcgggtggccgatgccagggcggggggcgctgtctgcaaccgtcgcggagcgctggcctggcggccttaggcaagggtgaccgccgctgcgcttctctccaccagacgtaaggcccggcaagccaaggcgcgccgcatcgccccgcgccccgcgtcgggtcccatccggcccatcgtgcgctgccccacggttcggtaccacacgaaggtgcgcgccggccgcggcttcagcctggaggagctcagggtggccggcattcacaagaaggtggcccggaccatcggcatttctgtggatccgaggaggcggaacaagtccacggagtccctgcaggccaacgtgcagcggctgaaggagtaccgctccaaactcatcctcttccccaggaagccctcggcccccaagaagggagacagttctgctgaagaactgaaactggccacccagctgaccggaccggtcatgcccgtccggaacgtctataagaaggagaaagctcgagtcatcactgaggaagagaagaatttcaaagccttcgctagtctccgtatggcccgtgccaacgcccggctcttcggcatacgggcaaaaagagccaaggaagccgcagaacaggatgttgaaaagaaaaaataaagccctcctggggacttggaatca

SEQ ID NO: 11459 - DNA, 435 bp, Homo sapiens
  source 1..435: mol_type = unassigned DNA
cgtcaactcagtaagatatagtcacctaactaataaggactgttcttaacattggggccacaaagtgtgttgtagaaaaggctcagacactggtcctgaacacggaatccccaggggaaagtttggggccaggtgagggtggagtccttgcagcagtgcggccaaccccacttaactcttctcattcaccaacaggctgaagaactgaaactggccacccagctgaccggaccggtcatgcccgtccggaacgtctataagaaggagaaagctcgagtcatcactgaggaagagaagaatttcaaagccttcgctagtctccgtatggcccgtgccaacgcccggctcttcggcatacgggcaaaaagagccaaggaagccgcagaacaggatgttgaaaagaaaaaataaagccctcctggggacttggaatca

SEQ ID NO: 11460 - DNA, 631 bp, Homo sapiens
  source 1..631: mol_type = unassigned DNA
accggtcatgcccgtccggaacgtaagtgaacacttactcaaatccaggcttcagacgagatcagtgggtgaacacgtctataagaaggagaaagctcgagtcatcactgaggaagagaagaatttcaaagccttcgctagtctccgtatggcccgtgccaacgcccggctcttcggcatacgggcaaaaagagccaaggaagccgcagaacaggatgttgaaaagaaaaaataaagccctcctggggacttggaatcagtcggcagtcatgctgggtctccacgtggtgtgtttcgtgggaacaactgggcctgggatggggcttcactgctgtgacttcctcctgccaggggatttggggctttcttgaaagacagtccaagccctggataatgctttactttctgtgttgaagcactgttggttgtttggttagtgactgatgtaaaacggttttcttgtggggaggttacagaggctgacttcagagtggacttgtgttttttctttttaaagaggcaaggttgggctggtgctcacagctgtaatcccagcactttgaggttggctgggagttcaagaccagcctggccaacatgtcagaactactaaaaataaagaaatcagcca

SEQ ID NO: 11461 - DNA, 1167 bp, Homo sapiens
  source 1..1167: mol_type = unassigned DNA
ggtgccagaaagggcttccccacaaagccgcccctcctggctctgaggcccagaagaatggccagtaaccggcaaagatcactcagagggcccagtcacccatctcatatggaagaacctttcctgcagatggtccaggccagcgagtccctcccaccctcccaaacgtgggctcagcgtgagttcttcctccccagcgagtcctgggagttccctggcttcacccggcaagcctaccaccagctggctctgaagctgccgccctgcacagatatgaagtccaaggtgcgtcagcggctcatccacccttggaagggtggcgcccagcacacctggggctttcacacgtggctcgatgtgtgccgtctgcctgccaccttccccacccagcctgacaggccctacgatagcaatgtctggcgctggctgaccgactccaatgcccacagatgcccccccacggagcaccccatcccccctccctcctggatggggcaaaacagcttcctgaccttcatccactgttatcccacgtttgtggacatgaaaaggaagaagcaggtgattttcaggacagtgaaggagttgaaggaggtggagaagctcaagttgaggagtgaggcaagagcacccccactcgatgcccagggcaacatccagccgccagcgagcttcaagaagtaccggcacatatccgctggtgggaggtttgaaccccagggcctccagctcatgcccaacccgtttcccaataatttcgccaggagctggccctgcccaaaccctctgcctcactaccaggagaaggtgctaaagctggccttgctgcccagcgcgcccctgagccaggacctcataagggatttccaaaccctgataaaggacagaactgccttacccctccaccatctctccaaggcacaagcaagcaaatccccagcaaggaagaggaagagaagacctggacacttctagaagggcttccagaggggacgatcgtgatacccagagccccaggctccagtgttctcaatcaatgctccttcagcaagaggccctggggtagcaaaaggactctggcttctgcagaacagcctctccaccatcctcccagcctcaagccacctctgtaccccaggctattggagattcaactgaaattctaaa

SEQ ID NO: 11462 - DNA, 1167 bp, Homo sapiens; identical to SEQ ID NO: 11461
  source 1..1167: mol_type = unassigned DNA

SEQ ID NO: 11463 - DNA, 2193 bp, Homo sapiens
  source 1..2193: mol_type = unassigned DNA
gagctgctgtagcccctacgtggtgagtagatcgtctccacagaaatcagcggaggcttccacagtccctggttggaatggaaccggcggtgaggatgagaggcgctgaagaccagaagacccagggcgtgaacggggcgtgtcatccctggagtttcagtagaatttcaggcctgtctgcttgagcagcagaggaggagtttctgtgtgcctgtgagagactgtgtgtgtgtgtgtgtgtgtgtgtgtgtgtgagatgaatgaacagggttgtgtacgtgtgtgtgcgttagacaaatgaacagtgttgtgtacctgtgtgaattgtcactgtgactccaggctctaggctctgcagattcctcagccctatcgcctcacagacacttgggatgtgcagcaggtaaaagagagaagccagattcatggaggcgtgaaggatcccagcaagaaaacacagacttgatcttgagacgagatttttgaaattggttgcggcctcaaggcaggctctgagaagactcgataaagagttctcaggaataggcatccctcctggatatttcccccttggaagcgccgaggagccagctctatgtttgtaaccatagcatttctaaagctccagccccaggaacctgctgtgaattagagacagattccaccctaggcatcactgatcttggcctctcttgtattgggaaggtcaacactgttccagtttctctcctactcccatctggttgtgctcggtgaagtaggtgagcagtgctacccttctgttaaaaaaaaaaaaaaaaaaaagatcctgaaagaggaaagaatttttgctacacatctgaaagctaaagtccagttgaactccagaggagaacacagcccaggtaacccctcgtttgcagcctgtgagaccagcctgaggacagcacccagctaaactccaggtccatggaaactgtgagattttatatatttatgttgttttaagctaaattcgtggtaattggttatggtagcaactgaaaattaatgcagtaagaaagtctaaggagatcggaagagactaaagagaaataacagctaaatgcaacgtagattaatgtgtgggatcctggaaaagaaaaaggacattaatgggaaaacatatttgaataagatgtgcaaatttttcgtattgtaccaatgttaatttcctggttttgataattatcctttggttatgtaagataaacgctagaatgaagggtatatgagaaccctctgtactactcttgcaacttttctctaagtctaaaataagtggaaattaaaagttaaaacaaaaaaaaaggaaaattttatctatcccaagaccacaaagttatttttctgtttcttcctccagaatctttattgtttgttttcacacttagacctatgatccatcttgaatttatatctgtgtatgtagtgggatgaagttcaaaatcatttttttcatacagatatccaagtgcactggcaccgtttgttaaaaacactggccttctcttaagctgcagtcagacttttactgtaaagcatgggcccatatatgtgcaggagtctttctacttttccgttggtcctctttgtcaatctttgtgccagcacctccattttaattcctgtagctttatattatatcttgataatctggtaatataagttgaagaacaactttgttcttcaaaatcactttgtctattccaggttctttgcattgctctataattttagaatgagttaattaattttctcaaaacaaacaaaacgccctgctgacattttgttggcagtacattgaatcagtagataaatttagagagaattatctcaaaattgagtcttacagttcatgaacatggaatacatttccatttattgaattcatctttaatttctttccttaaggttttgttgtttcctgtctaaaggtcttgcacatctgttaaatttattcctgttttacattttttatgtttttacaaactgttaaggttttaaaaattttatttttcagtagctttgctttaatataattgttttatacttttaccctttattcagcaataaattatttaatttaaagcttgtggaattaaaaaatatttttatgtacataatcatgtaatctacactatctgcaaataaagatcattttacttccttcca

SEQ ID NO: 11464 - DNA, 504 bp, Homo sapiens
  source 1..504: mol_type = unassigned DNA
caaatgaacagtgttgtgtacctgtgtgaattgtcactgtgactccaggctctaggctctgcagattcctcagccctatcgcctcacagacacttgggatgtgcagcaggtaaaagagagaagccagattcatggaggcgtgaaggatcccagcaagaaaacacagacttgatcttgagacgagatttttgaaattggttgcggcctcaaggcaggctctgagaagactcgataaagagttctcaggaataggcatccctcctggatatttcccccttggaagcgccgaggagccagctctatgtttgtaaccatagcatttctaaagctccagccccaggaacctgctgtgaattagagacagattccaccctaggcatcactgatcttggcctctcttgtattgggaaggtcaacactgttccagtttctctcctactcccatctggttgtgctcggtgaagtagtgctacccttctgttaaaaaaaaaaaaaaaaaaaaga

SEQ ID NO: 11465 - DNA, 431 bp, Homo sapiens
  source 1..431: mol_type = unassigned DNA
tagtagttaaatgtcatgttcgccttattagaaagaatgccttcaaatcagtattatcatgattaccatttatttaacatcttcagtatgcagggcatttataaaatctgtagaaattaattttctctaaatgcaacaagctttatgaccagcactcactgtctataaaagatgacttgcttggcagaagaggaaacagtttcttcagaccttccagccacagtcagccctggtgacattgcatatcagcttctaaagggcctcgcacattccttggcttgtgatgtcccttccccatcatcaaagacagcaacgaaacttcaggctaccatacctgcttcaactgtaggagaatcttagttctggagagttgaccctccaggcgaagcattaggctttgatacaatttgtctggtaccggctgtagatct

SEQ ID NO: 11466 - DNA, 1123 bp, Homo sapiens
  source 1..1123: mol_type = unassigned DNA
cggagcagcagagcaccgggaggcccagggatgtggcgaggcagccgcggtgtcagaaagaggaaggcaggaggctgaggccgagggccctggaatctcgcacattccagggttcagaaagatcacggtggggtccacctctggagtccacaaaagaaaacgtacaatgtggccacaggcctgcttttccaaactcgtcatggttaccatttcatgaacggcttcaagtccagaatggtgagtgcccgtggcaagtgagtatccagatgtcacggaaacacctctgtggaggctcaatcttacattggtggtgggttctgacagccgcacactgcttccgaagaaccctattagacatggccgtggtaaatgtcactgtggtcatgggaacgagaacattcagcaacatccactcggagagaaagcaagtgcagaaggtcattattcacaaagattacaaaccgccccagctcgacagtgacctctctctgcttctacttgccacaccagtgcaattcagcaatttcaaaatgcctgtctgcctgcaggaggaggagaggacctgggactggtgttggatggcacagtgggtaacgaccaatgggtatgagtagaatcctgtttccttctgaagcccttcctaattgatatacttagggccatcttccttaacaccccagacctgctggtttcggagccatcgacctcctcatttccaccgcagagggctggaggagattcagaaaatcagggcagggcccaggagaaggttctttcagagcatggcttcagcctggttacttctgacaccagccaggaggaacagacttcttccccatacagcaggtaccaccagaagtacctgagcaagatcaccctcagctcctgcagcctcagggcaccggagtgtcctgtccacggggcatttgttacggacaaagatttgtgtggcctttcactttgcacgctgaagcttaaccctggctgcaacgggacggggggccaccaaggaagtcattaaggttaactaaggtatagggtggtgccctggttgacaggatggtggccttatgaggacacttacaagatggacgcccacttgtcccccgacccctctggcaca

SEQ ID NO: 11467 - DNA, 252 bp, Homo sapiens
  source 1..252: mol_type = unassigned DNA
atgttgtcagctctggctggaggcaaaggtttggcaattttggactggaattgacaagaagatgttccagcttctaattcccctgcttttggcactcaagggacatgcccaggacaatccagaaaacgtacaatgtggccacaggcctgcttttccaaactcgtcatggttaccatttcatgaacggcttcaagtccagaatgagtagaatcctgtttccttctgaagcccttcctaattgatatacttagg

SEQ ID NO: 11468 - DNA, 2255 bp, Homo sapiens
  source 1..2255: mol_type = unassigned DNA
atgttgtcagctctggctggaggcaaaggtttggcaattttggactggaattgacaagaagatgttccagcttctaattcccctgcttttggcactcaagggacatgcccaggacaatccagaaaacgtacaatgtggccacaggcctgcttttccaaactcgtcatggttaccatttcatgaacggcttcaagtccagaatggtgagtgcccgtggcaagtgagtatccagatgtcacggaaacacctctgtggaggctcaatcttacattggtggtgggttctgacagccgcacactgcttccgaagaaccctattagacatggccgtggtaaatgtcactgtggtcatgggaacgagaacattcagcaacatccactcggagagaaagcaagtgcagaaggaggaggagaggacctgggactggtgttggatggcacagtgggtaacgaccaatgggtatgaccaatatgatgacttaaacatgcacctggaaaagctgagagtggtgcagattagccggaaagaatgtgccaagaggataaaccagctgtccaggaacatgatttgtgcttggaacgaaccaggcaccaatggtatcttcaaggtactcacccctgcccagcctcctcctccctccagggagacagtggggcacctctggtttgtgctatttatggaacccagagactcttccaagtgggtgtcttcagtgggggcataagatctggctccagggggagacctggtatgtttgtgtctgtggctcaatttattccatgaagccaggaggagacagaaaaggaggggaaagcctacaccataatctcaggatccacgagaagccgagaagctcactggtgtgtgttcctcagtaccccttcttgctaggattggggtctcaaatgctgctggccaccatgtttaccgttgataaacctaactgctaagctttggacccaccctttttccttctctttcttctctctcctctcttcctttccattctcccacaagcatctgtggagcatgtgctgtggggtagcatctacaccagcccccagaagttagacatggactcacttctcccaaatctcacagtctaatgaaggaatgttaaacacagtgctaaaaagaggcacgagcagtgcatggggcctcccggaggaaaacaataacctccaacaaagaaggacggtttcaggaaagcattggaaactcaacgttgggaaatgacttacgtttcttgatctcagtttccttgtccatgaaaaagcagattccattagatgaactgtaaggtctttcatcacaccaacattctgtgacgcttaataacttatttctgtcatggaaggcaatattacctcatcatcattgccccactctaattccgtcagttcagtgcatgatacggacgcacacacagggaacccccatctgaggtgcaaattctttcatctcctgggccatccatgaaagaaagtctccggtagagttaggatcaggggtcttttgtccagtttgaacttgaacatggggagattatggcttgctacttatagaccacaccatcctttctctatccttaattattcaaataaaaagtataatgaggtggattggaggaagtggcaacatctgccctctccacatatgtgggtcactgagtgaggcccactgccagtcgccaaagtcatcatccagccagtgagaaaggataaaaattccagatgagaaagcagcacatcttttcactgagtggcaacaaaatagcttgtgtggccagactgaaatataagtgataagaatttgtttttagaaaactaagagaccatgtttatttaaagattggtgccatgaaggacagtcagggactggtggtagttttctgggaggtcctttcttggttatgtctacctggcatagctacaaaggagacaatcatatgtggccccataaaaaagaaagacattcagctgctcattcattcattcattcattcagatactttgtgaaacaggcactggaaagatacaggaatgtagatggtatgggtggttcatgacatctaatgtatatgtcacagccaaatttgtgcctcttctcatagggtcccctcgcaattagtaattagtttcattatataaatgcagttgtcccttggtatctgtgggaaattggttccaggacccttcttggatacgaaaatccatggatgctcaagttcctcatataaaacagtatttgtatat

SEQ ID NO: 11469 - DNA, 2149 bp, Homo sapiens
  source 1..2149: mol_type = unassigned DNA
ggatgtggcgaggcagccgcggtgtcagaaagaggaaggcaggaggctgaggccgagggccctggaatctcgcacattccagggttcagaaagatcacggtggggtccacctctggagtccacaaaagaaaacgtacaatgtggccacaggcctgcttttccaaactcgtcatggttaccatttcatgaacggcttcaagtccagaatgattagacatggccgtggtaaatgtcactgtggtcatgggaacgagaacattcagcaacatccactcggagagaaagcaagtgcagaaggaggaggagaggacctgggactggtgttggatggcacagtgggtaacgaccaatgggtatgaccaatatgatgacttaaacatgcacctggaaaagctgagagtggtgcagattagccggaaagaatgtgccaagaggataaaccagctgtccaggaacatgatttgtgcttggaacgaaccaggcaccaatggtatcttcaaggtactcacccctgcccagcctcctcctccctccagggagacagtggggcacctctggtttgtgctatttatggaacccagagactcttccaagtgggtgtcttcagtgggggcataagatctggctccagggggagacctggtatgtttgtgtctgtggctcaatttattccatgaagccaggaggagacagaaaaggaggggaaagcctacaccataatctcaggatccacgagaagccgagaagctcactggtgtgtgttcctcagtaccccttcttgctaggattggggtctcaaatgctgctggccaccatgtttaccgttgataaacctaactgctaagctttggacccaccctttttccttctctttcttctctctcctctcttcctttccattctcccacaagcatctgtggagcatgtgctgtggggtagcatctacaccagcccccagaagttagacatggactcacttctcccaaatctcacagtctaatgaaggaatgttaaacacagtgctaaaaagaggcacgagcagtgcatggggcctcccggaggaaaacaataacctccaacaaagaaggacggtttcaggaaagcattggaaactcaacgttgggaaatgacttacgtttcttgatctcagtttccttgtccatgaaaaagcagattccattagatgaactgtaaggtctttcatcacaccaacattctgtgacgcttaataacttatttctgtcatggaaggcaatattacctcatcatcattgccccactctaattccgtcagttcagtgcatgatacggacgcacacacagggaacccccatctgaggtgcaaattctttcatctcctgggccatccatgaaagaaagtctccggtagagttaggatcaggggtcttttgtccagtttgaacttgaacatggggagattatggcttgctacttatagaccacaccatcctttctctatccttaattattcaaataaaaagtataatgaggtggattggaggaagtggcaacatctgccctctccacatatgtgggtcactgagtgaggcccactgccagtcgccaaagtcatcatccagccagtgagaaaggataaaaattccagatgagaaagcagcacatcttttcactgagtggcaacaaaatagcttgtgtggccagactgaaatataagtgataagaatttgtttttagaaaactaagagaccatgtttatttaaagattggtgccatgaaggacagtcagggactggtggtagttttctgggaggtcctttcttggttatgtctacctggcatagctacaaaggagacaatcatatgtggccccataaaaaagaaagacattcagctgctcattcattcattcattcattcagatactttgtgaaacaggcactggaaagatacaggaatgtagatggtatgggtggttcatgacatctaatgtatatgtcacagccaaatttgtgcctcttctcatagggtcccctcgcaattagtaattagtttcattatataaatgcagttgtcccttggtatctgtgggaaattggttccaggacccttcttggatacgaaaatccatggatgctcaagttcctcatataaaacagtatttgtatat

SEQ ID NO: 11470 - DNA, 591 bp, Homo sapiens
  source 1..591: mol_type = unassigned DNA
aatgaatggagggcggcggcgactgctgcagctgggccagctgcgcgggctgcaccccctcccagcctgcgagaggaggaagctagtagaagatttgtaccaacaaaaccaaggagtaaacaacttgagaataactgcatgagctcagggcttggactgtcagattccatttctaagcttccagaagagcgacacatagacactggggaagtcagagcctttgaactccaatgccatccccgtcacccacctccaccaccagcaccaccaccgaatggcactttggacaatttttccctctcatgtgacttttgtcatttcttacgtcagttggagccagcacctctcaaatccatcttctaaaacccagaaaattgtgtgtaacacatgatgactgaaagggagtaggctgaccagttaagagcctgccactggaatggaaggctgtgggaaggtgaggggacggtggacatcaaccgggaagagctgaaagatggcgttaccagaacaacttccagtaaaagaaggcactgaggtttaagtgctacgtgggagcagttgccgatttttgcaatgggaggctgcatagat

SEQ ID NO: 11471 - DNA, 539 bp, Homo sapiens
  source 1..539: mol_type = unassigned DNA
atggagggcggcggcgactgctgcagctgggccagctgcgcgggctgcaccccctcccagcctgcgagaggaggaagctagtagaagatttgtaccaacaaaaccaaggagtaaacaacttgagaataactgcatgagctcagggcttggactgtcagattccatttctaagcttccagaagagcgacacatagacactggggaagtcagagcctttgaactccaatgccatccccgtcacccacctccaccaccagcaccaccaccgaatggcactttggacaatttttccctctcatgtgacttttgtcatttcttacgtcagttggagccagcacctctcaaatccatcttctaaaacccagaaaattgtgtgtaacacatgatgactgaaagggagtaggctgaccagttaagagcctgccactggaatggaaggctgtgggaaggtgaggggacggtggacatcaaccgggaagagctgaaagatggcgttaccaggtatctaccctgctaccctgcatagaattcccaagacc

SEQ ID NO: 11472 - DNA, 152 bp, Homo sapiens
  source 1..152: mol_type = unassigned DNA
gtggacatcaaccgggaagagctgaaagatggcgttaccagataaggaaactgagtctcagggaggtcaagagacatgccaaagcacagcttggaagtggtccattggattcgaaggggtcctcacacgaagcaggaagtcaccctgtatct

SEQ ID NO: 11473 - DNA, 566 bp, Homo sapiens
  source 1..566: mol_type = unassigned DNA
gcttttttgctggtagacgcacaccatcacatcctacataatatttagctctgaggcgtttccagatgggaagtgcgtttctgtattttcatagccgtgttctctacgtgaatggactggcgtgaagctgggggctgacggctggcagggcagaacaacttccagtaaaagaaggcactgaggtttaagtgctacgtgggagcagttgccgatttttgcaatgggaggctgcatagattcaaggacttccttgagtgctccaggagcttgtcattccagagacagagcagcccagaagtcctgggatttacacctctagtagaaaccctcaaccagagaaggatggaagtcaatgggcagagtgctcgggagacctttacctgttttacctgattacatcctctgaggtatgtgccatttatacctggggaaactgaggctcagaaaaatgaccttgtctgtggtcacacagctggtaaggggtaggaatggaatttaaacccagttgtctaacttcagggcccacatttcagccacaactgaggtttttcctaacctaaccccat

SEQ ID NO: 11474 - DNA, 362 bp, Homo sapiens
  source 1..362: mol_type = unassigned DNA
cgcacaccatcacatcctacataatatttagctctgaggcgtttccagatgggaagtgcgtttctgtattttcatagccgtgttctctacgtgaatggactggcgtgaagctgggggctgacggctggcagggcagaacaacttccagtaaaagaaggcactgaggtttaagtgctacgtgggagcagttgccgatttttgcaatgggaggctgcatagattcaagtgtgagaattcgaagagattcaaagactatatcaccaccatggtcttgccagaatctgccctctgagtcatttcttaatctactgattatctgtagaaccagccttatataaacaaggaagcatctagcaggtgag

SEQ ID NO: 11475 - DNA, 521 bp, Homo sapiens
  source 1..521: mol_type = unassigned DNA
gcccagaagtcctgggatttacacctctagtagaaaccctcaaccagagaaggatggaagtcaatgggtgaccctgcagcctgtgagaccatcttggcccttgtcagggcagccatttgccattgcagatgaagggtgggggagaggccagagactccttcagactgtgttggaaatgtcatgaaaatggaaattctcacaacctgagagtcatagacctggatttgggtttctgctgtgtcattaagttcttgcaaaccaggcaagtcatgtaacctttctggtccccagttgtcttctctgtaaaatgaagctgttaagagctctgatctcatcacgttgccatgagaaaggaataggacaaggtccaggagggagcttgcatataatgagtgctaggaaatgtcagctatcattatccttgttaatatgaacctgtgtttagtgggttgattttctgaactttgatagcagttggggtttcacggagcatttgggatgaataaacaagcatctctgga

SEQ ID NO: 11476 - DNA, 443 bp, Homo sapiens
  source 1..443: mol_type = unassigned DNA
ggtgaatggattgtgtatgggcgtgagagtaaaactttacaaggtcgagagtcatacaaaagccaaagccgcattaaagccagtcccagccaggcttaaggagagctggaatggagaggattctcatctaacatctgggttgcagttgtatgttaacatggacttcctaggaagtaacatatcaaacaaaagggaaagtgatcaaccagcagcaggtaccagccacagttaactgcacctgctaggagctctgaaagactttttttttttttaaacgaataaagaaattctcatttcactctcctccacactggactcgctgaagaaagagctactctctgatgaagttggtggtgctgtggaagaggaccgccgcctcctggacgaggaccgggaccgctcagcattgtctgactgacaggaaaggacccagataagatcct

SEQ ID NO: 11477 - DNA, 592 bp, Homo sapiens
  source 1..592: mol_type = unassigned DNA
aatggattgtgtatgggcgtgagagtaaaactttacaaggtcgagagtcatacaaaagccaaagccgcattaaagccagtcccagccaggcttaaggagagctggaatggagaggattctcatctaacatctgggttgcagttgtatgttaacatggacttcctaggaagtaacatatcaaacaaaagggaaagtgatcaaccagcagcaggtaccagccacagttaactgcacctgctaggagctctgaaagactttttttttttttaaacgaataaagaaattctcatttcactctcctccacactggactcgctgaagaaagagtagctggctggaggaagctatccagagggaagcagcacagcatctatgcacagacatagcaaataagagcaagtgaaccacgccacacttacgactatgtcaacaaaggaatagaagcaaaggaaaagactgacatagcttagactgggaatccttctagaaagtaagaaagaattcagagagattcctctctctagtcttgaagaaatgaaggtcttcaaaatgaagattgaagaaatatagaatatctaaaaaaaaagaaaga

SEQ ID NO: 11478 - DNA, 1361 bp, Homo sapiens
  source 1..1361: mol_type = unassigned DNA
gttaaatggccagcaggaattatccactagagaagcggaagggagagaatggaaatggccgcatgcagctcctctccctcagacagctcggggctcagcggaatgagcacagtctgcaggacaagtgcggaggacttcagtcccctctactgtatattggctttaggactcaagttgtccctgaaatagaggaaggtgttttctagggtagtggtaattatcacagtcaaaaaagtaggcgagagcacttaggaaaactgtgcggagatcggctgctgatgtgtaaatactgctgaagctgcttattcaagattagaaaacctgagacccagacgggggaaactgctttccatggttaatcgtcaacaactggccaggatgggacagaagcccatacatagccttcattccagggctcagaacaaaaagaaggcagtggcctgggctgcacctgagcttggcttcacataggagggattctggaacgcaggatcctgacaacgacctcaagcccctgtaaagcaacacattttttggcaagaatccctgggacagagaaagaatttcttctcacttattattgagaatgttctcatgtcttgcaaggctcactgcccagtagaagctgaaaagattcagtatgagtaaaagaagagatctgaaatttgcagcttgtcatagaaagaactgagactaccatacacctaagaagtcaaagttgctattcaaggggaagtgcaaacacaagatgagggaaactgatgtatttagtgtctacattttacaaatggatgcttttcataatatgaaaatactgcaccataagattgccagtcacaacagcacggctacagtgaaaattgtcagtcttttttttttccaggatcccagtggatttgttacggtgagaaagcttcacttggagacaaagccaaaaccttcctcccaggctcccttggatgtagggggaagcaaactggctgtccaggcctctgagccacatctacacacctcatgagagggcctgtgcaacattgccttagagatggagagcattgcttcagaatcagggaagcctaaatttcacccctggggctgccccttgtgatcttgaatggctcctgacaagaggctgctggggaggctcctgctccctgcctttcgggactgccgtggattgcccattgatgggtcaaaatccagctacctggtaattcaatgagtccctagtgtgcatccaataaattatcttctgtttaaattagaacaaactgtttttaatctgtgtgctaagaatctcattaaatgcatcataaatttcaaaatcaaaaactaaataaaacatttatctatcgagtact

SEQ ID NO: 11479 - DNA, 689 bp, Homo sapiens
  source 1..689: mol_type = unassigned DNA
gagtgttaaatggccagcaggaattatccactagagaagcggaagggagagaatggaaatggccgcatgcagctcctctccctcagacagctcggggctcagcggaatgagcacagtctgcaggacaagtgcggaggacttcagtcccctctactgtatattggctttaggactcaagttgtccctgaaatagaggaaggtgttttctagggtagtggtaattatcacagtcaaaaaagtaggcgagagcacttaggaaaactgtgcggagatcggctgctgatgtgtaaatactgctgaagctgcttattcaagattagaaaacctgagacccagacgggggaaactgctttccatggttaatcgtcaacaactggccaggatgggacagaagcccatacatagccttcattccagggctcagaacaaaaagaaggcagtggcctgggctgcacctgagcttggcttcacataggagggattctggaacgcaggatcctgacaacgacctcaagcccctgtaaagcaacacattttttggcaagaatccctgggacagagaaagaatttcttctcacttattattgagaatgttctcatgtcttgcaaggctcactgcccagtagaagctgaaaagattcagtatgagtaaaagaagagatctgaaatttgcagcttgtcatagaaag

SEQ ID NO: 11480 - DNA, 563 bp, Homo sapiens
  source 1..563: mol_type = unassigned DNA
atggaaatggccgcatgcagctcctctccctcagacagctcggggctcagcggaatgagcacagtctgcaggacaagtgcggaggacttcagtcccctctactgtatattggctttaggactcaagttgtccctgaaatagaggaaggtgttttctagggtagtggtaattatcacagtcaaaaaagtaggcgagagcacttaggaaaactgtgcggagatcggctgctgatgtgtaaatactgctgaagctgcttattcaagattagaaaacctgagacccagacgggggaaactgctttccatggttaatcgtcaacaactggccaggatgggacagaagcccatacatagccttcattccagggctcagaacaaaaagaaggcagtggcctgggctgcacctgagcttggcttcacataggagggattctggaacgcaggatcctgacaacgacctcaaggcagtgaactccaaatttgaccaagacgcagcctttgtcctgttatttttataacctccaagggaggacacggcgcctgtggaggtcatcattttgatca

SEQ ID NO: 11481 - DNA, 1184 bp, Homo sapiens
  source 1..1184: mol_type = unassigned DNA
caccatataagaagtgcctttcaccttccaccatgattctgaggcctccccatccatgtggaactaaatggaatctttctctgttgcccaggccagagtgcattggcaccatcacagcaaagtgcagcctcaacctcctgggcttggctaaagcaatcctcccacttcaacctcctgagtagctgggactgcaggaatggggacaaagctattgaaaacttctccttctcaggctcacttcgccaacatctgtggctgaatgtagacattcccccttttaggcaaatttctttaaattcatagcaaggtatgaccaagaacattaaaacaatgcttcattgcttatgcctgacgttgaagagcaaaatttacatctgctacacagttcaaggtttccatggccttagtagaggtcatgaaatgtacagttttaaaacttattggagtatctttatgaacgattttaatggactagagtgacaatatttttatacaacattgacctcccctgccccaaatgatgtgaaagactgtggctgtattagaatttagtctagtaagaccaataccatttcagggagttttttgtagttttcctccataaatatattttccacatcaactgctctgagctgagttgctggaacattttcaattctttataagtacatattttggctgagttcagaaaccttggactaggcactgtcctttgagtgagacgtcaggattgaggtagcataggcacaagaccaaattttagttcatgatggagtattgccagcttgtgagcctctggtgctttcaaggaagcacaggtgatggaaatcaaataaaaacagagccaggaaaacatctggtgtggaaagtagctcattgcataaaatgctaaaaacaaaaagttgagaaaattaagcctcttctactttttaaaagaaaaatttgactctaccaattataaccacaaggaatgttctccagacttgaatattttaagtgaaagattaatatccagccatttataaacctccaaatcctttccccaactttattcataccattttttattataaattttcaaaaaatttactgatctagtttggaaaaatcatgtccttgaactgttgaaccatatttgtaatctgtttcaataaaaatatagatataatacttagaaaaacaga

SEQ ID NO: 11482 - DNA, 2198 bp, Homo sapiens
  source 1..2198: mol_type = unassigned DNA
aaagcgcttgcagccgggagctgcgcggccgcgctgagagtcacgtggtgcgccaggaagccgcctagcttcttggagagctcactgcctcgctccgctcctttcctggcgggaggctctgagccacccccacctgcgcagggcggccaggggttaaaacaaagtcacaagtctgacccacactcaaagggagaagattatgcaagagcaaaagcacgagatggaaaccatggggccatcttatagtctgtctgccggagaaagatgaacacaaatcctgtgacaccaggtggagggtgactatggaacatggaacacacgcagtgtaataatgtaggagcagagtcctccattctcctgtgacacccattcccattatacacttagaacctccaagcttgtgcataattatcaatggataagagacagaagaagcaatatacacagcatctgggaggctcctaatccacagataaggcttcctaagcttcctttcctatgctagacatattttggtgatggagtatgacaagcacacgggacacattagccatggaggctgctgagttctggagttccactagacacatggtcttgctgtggttatatgtataacttgcatgcttcagctcagcttcccatgattttcaggataatttaatatgagcagtctaaatagaccaggacgtaatgctgaaatgatttctagatcagtagtcagcgcgtagccaaccctttcaggaccctcatttgtcttctatgttagtgtattccatcagtcgatatttgcaaagaattctgttcagagtcaaaacttcttcagagatccctaaggagggaggaataaattacaggcccatggttactctttcatataatatctaaaaggccattatgtgaaaagattgtctctgaaatctaattcttgcctcagccaggtcaatttaggaaaactgcactggcagcagccagctctgtaatgctgcccaagcagataaaagcttgtagatttgaataaggcccagaccgcgcttgctgcctctgtggaaacagatgttttcctgtgtgaaaacagccacttgcctatggacaaagctttttataagctggtcgtggacacagatgtcttcaattttttttttcactgtaatgatactgcagtgaacagcttctgagatggcccctagcaatcctgcctccacatccaggcctttgtcccttccctgtgaatgggtgctggctgagtagtttgtttcaaaccagcagaatatggcaaaagttgtcactcccatgattaggttacatgatatagtcgagtagaatgtattcctttgctggctttgatgaggcaagttgttttatcaggaaggtccacatggcaagaaactgagggcaacctctgaccaacagccagctagaaaacgaaccctcaacccaacagctcatgggaactggatcctgccaatgatcatataagtgggcttggcagttgatcctttcccagtcaaaacttcagacaagaacacaaccctggctgacaacttgattacagcctatgagaaattctaaaggagagagcccaggtaacactcatagaaactgtctcattggccggatgcagtggttaacacctgtaatcctagaactttgggaggccaaggcagaaggattgcttgacaccaggaggttgaggggaaggagtggctttgggtataagtgcaatttaggctgaatcctggaggaaacctaacgttcctttgaaagatttgaggtttataattaaaagcagagattccatagacttggcaatttaaaaataccagatgttgcattgtgagcaggaggatatcagttcagcacctctaccccccaaaaagaaaagaaattcagggagggagcaaagaaacattcctaaaatgaattggagctggaggccattatcctaagtgagttaatgcaagaagagaaaaccaaatactgcatgctctcatttataagtgggagcttaacactgagcacacatggacataaacatgagaattacagatactatggaattctagagtggggagggagggagggagggagcatgggttgacaaactacttattgggtgctgtgctcgctacctgggtgcaatatgcctgtgtaaaaaaactgcctatatatgccctgtatctaaaataaaagttgaaatt

SEQ ID NO: 11483 - DNA, 2643 bp, Homo sapiens
  source 1..2643: mol_type = unassigned DNA
aacactcaccaggaagttgatgtcggccgggcgcactaggcggtagctgcacgtcgcgcaatcctggctgcattcggcccgcacggtcgccaggagcccggggccgagcaacagcagccaagtgcaaagtgtcaggaaccgcgccatggactgcgaggagagagggacgcgtgcttcgagcctgcctgggcgcagaacggggtccctcggcaggaccctcgccgcgacagcctcagcaggggatcgtcgagcaaaagcccgcaggaatgctcctttctggggccccgccctcccggccgacagcttttaggtagacgtggaggcgactcagatcgcctcgcggttcccgggatggcgcggtcgcccccaacgcgaggctgcctggggcacccggctcttttcctgggcgtccgcggcccagggcaagattccggagagaacgccgcagaccaggggcgagagagcgggagccgggggaggcaggacattgactggggtcacaaagaagaaccagggaacgctgttggggaacccatgcaatgaaatgtgaagggaaagagggcgggcagacgtccccaaacccgctcagcaaagacaagcttcgggcaaattcactcacgttgacgctgttcggatggagcaggccaattggaaaagccgggttcagacacgactctagagggaagagaagaaggaagctgaactgacacgaaacaaaagaagtccgttgttttggattgagttccatacttggctggcccagaggttgatctcaccaccattcagatatccaagaagaagccacctgttggatttaagaaaacccagtcaccaataatgtggaatccatttcgtggagacaagctacttttagtcaaaaattgtaaggcacggtttgtcaagatggccgatacacaacagctccagtctacgcatcccagcatgagcgatgcagaagacgggtgatttctgcatttccaactgaggtaccgggttcatctcactgaagcttgtcggacagtgggctcaggacagtgggtgaagcccactgagcatgagccgaagcagggcgaggcatcgcctcacccaggaagtgcaagggatcagagaattccctttcctagccaaggaaagctgtgacagatggcacctggaaaattaggtcactcccaccttaatattgcgcttttccagtggtcttagcaaacaacacaccaggagtttatatcccgcgcctggcccagagggtcccacacccacagagtctagctcattgctagcagagcagcctgagatcgaactgcaaggcagcagcaaggctgggagaggagcacccaccattgctgaggcttgagtaggtaaacaaagcggctaggaaacttgaactgggtggagcccactgcagctcaaggaggcctgcctgcctctgtagactccacctctgcagccagggcacagctgaacaaaaggcagcagaaacctctgcagacttaaatgtccctgtctgacagtttggaagagagtagtggttctcccagcacgcagctggagatctgagaatggacaaactgcctcctcaagtgggtccctgacccccaagtagcctagctgggaggcattccccagtaggggcagaatgacacctcacatggccgggtacccctctgagacgaagcttccaggggaaagatcaggcagcaacatttgctgttcagcaatattcgctgttctgcagcttctgctgctgatacctaggcaaacagcgtctggagtggacctccagcaaactccaacagacctgcagatgaggatcctgactgttagaaggaaaactaacaaacagcaaggacatccacaccaaaaccccatctgtacgtcaccatcatcaaagaacaaaatgataaaaccacaaaaatggggaaaaaacagagcagagaagctgaaaattctaaaaatcagagtgcctctccccctccaaaggaatgcagctcctcgtcaacaatggaacaaagctggatggagagtgactttgatgagttgagagaagaaggcttcagacgatcaaacttctccgagctaaagaaggaagatcgaacccatcccaaagaagctaaaaaactttaaaaaagattagacaaatggctaactagaatatccagtgtagagaagtccttaaatgatctgttggagctgaaaaccatggcatgagaactacgcgatgcatgcacaaacttcagtagccctgcaagagctcctgagggaagcactaaacatggaaaggaacaactggtatcagccactgcaaaaacatgccaaattgtaaagaccatcaaggctaggaagaaactgcatcaactaatgagcaaaataaccagctaacatcataatgacacaatcgaattcacacataacaatattaaccttaaatgtaaatgggctaaattctccaattaaaagacacagattggcaaattggataaacagtcaagacccatcagtgtgctgtattcaggagacccatctcacgtgcagagacacacataggctcaaaataaagggaaggaggaagatctaccaagcaaatggaaaacaaaaaaaggcaggggttgcaatcctagcctctgacaaaacagactttaaacc

SEQ ID NO: 11484 - DNA, 568 bp, Homo sapiens
  source 1..568: mol_type = unassigned DNA
tttataaaagtatggcacctcttccctctctctctcttgctcttcttgccatgtgacacctcgcccttcaccttctgccatgagtaaaacttcctggggccttaccagaaatcaagcagatactggcactatgcttgtagagcccgcaaaactgaagctgaactgacacgaaacaaaagaagtccgttgttttggattgagttccatacttggctggcccagaggttgatctcaccaccattcagatatccaagaagaagccacctgttggatttaagaaaacccaatccctgacttacaccctgacttgtaatctggaaccacgcagagattttcaatgacaatgtggggaaacagaatttgtctgaactttggtgattttgaatgaagtttatataataattaaagccagggcagatttggcagtcttcttgaaaggaagtaatgcttattgtggtcagaagaaagagtgaggcaactcagggtctgaaaaaagagacatgaagaaagctgaggaccaatccattccaaggttcactgtggaaatggggcccaacccttaaaaggt

SEQ ID NO: 11485 - DNA, 337 bp, Homo sapiens
  source 1..337: mol_type = unassigned DNA
cctggaagagtcctcccttccaccccggatatcactgtgaacctgattccccaggatcaaccatctgagcagataccttggaatgtccccagatttcagagcctcggaccagcagcaacacactctgaagtaggtctcagaagacaaaaagctgaaatcaactcatgcttcctgctacacagaatccactgagaggaaaaggaaacttcaccgaaacttcagaaagctacagaaatgacatccattttcacaatcccagaaggaaagatgcatctgaagggaataaaaacagagcaatggaagagtatttgttaaaataaatggctttgacagggca

SEQ ID NO: 11486 - DNA, 337 bp, Homo sapiens
  source 1..337: mol_type = unassigned DNA
agtctgtcaacttgggcgtgcaaacaaccatcctaagagcctttcttgctctgatagggagaaaaaaaggcttcgggggctaccagaggagaagaggccatcacctcggaccagcagcaacacactctgaagtaggtctcagaagacaaaaagctgaaatcaactcatgcttcctgctacacagaatccactgagaggaaaaggaaacttcaccgaaacttcagaaagctacagaaatgacatccattttcacaatcccagaaggaaagatgcatctgaagggaataaaaacagagcaatggaagagtatttgttaaaataaatggctttgacaggg

SEQ ID NO: 11487 - DNA, 362 bp, Homo sapiens
  source 1..362: mol_type = unassigned DNA
gcttggcgaactccttgaggacatgggctttgttttctgttccattttaccctccactgtgccttcgcagggattccccaggatcaaccatctgagcagataccttggaatgtccccagatttcagagcctcggaccagcagcaacacactctgaagtaggtctcagaagacaaaaagctgaaatcaactcatgcttcctgctacacagaatccactgagaggaaaaggaaacttcaccgaaacttcagaaagctacagaaatgacatccattttcacaatcccagaaggaaagatgcatctgaagggaataaaaacagagcaatggaagagtatttgttaaaataaatggctttgacaggg

SEQ ID NO: 11488 - DNA, 473 bp, Homo sapiens
  source 1..473: mol_type = unassigned DNA
actagagttttgctcctgggacgggacgtccgagaggtctgctggagtttgctggaggtgcactccagaccctgtttgcctgggtatcactagcggacgctgcaaaacaacaaagattgctgcctgttccttcctctggaagctttgtcccagaggggcactcactagatgccaggcagagttctcctgtatgagcttttggttccagagggccatagtcttcatatacttcagcactccatgaaggctttcttggtactgttcaaaggccagaggatctactaccacagaaccattctagatgtgagttcctagtgtgaaaggactgggagttaacagaagagccacagtgagagtctccacctgactgcattgcttcatggcactgtgcttttggacatttgatatccttcagctagaatatatttcttcattgtccattcacaggagccttcctttcttaaagactcaat

SEQ ID NO: 11489 - DNA, 581 bp, Homo sapiens
  source 1..581: mol_type = unassigned DNA
ctagagttttgctcctgggacgggacgtccgagagcttttggttccagagggccatagtcttcatatacttcagcactccatgaaggctttcttggtactgttcaaagtaagatataacaagttgctgtgttgcatacatctttacaccttcattgcttgttctcccaggcatgctatcatacccaaggccacatggtgagatggaaagacactgcatctgaagtcaagggaccaaggtttcaaattctcaatgtcccccttgcatgatgggcaactgacatatcactccgcactttgcttgttgatttcttcattgagtgacagtaaaatggttgagtctgttcccagctgtcagactgccaggaatatctagtagtttggtttcctcttctggaaaatgacattagtagttaatgctacagtgtttactttgtgccaggccatttcctaagtactttacatatatatttactcttttaagtctcatgacaaccctatgaggtagtgtgttagtacattttgcattgctataaaggaatacctaagactgggtaatttataaagaaaagacatttatttg

SEQ ID NO: 11490 - DNA, 575 bp, Homo sapiens
  source 1..575: mol_type = unassigned DNA
aaagtaggaaagaatttagcaaagatattgtatcaggaaaataaaacaaaatcactccagttattttaacagacaaaacgtcatataggaagttggtgttagaggtctgaaaaggcaagtaggaacatggacataatatggagaaagtgagtgcagccttcacctctagggatgggagaaacacagggaagaagctggggtcattagaatccagaagtttagaggaggagtcttttcaagttaaactcaaacttcccaggagaaggcagctgattagttggcactggtgtttctgtgggtgtatgaggaggaggcttctgcaagggagaaaaacaactggaaactggaacaacgcaggctgccagggcgaaaatgcactgctgggtgatgctgcaggaacaggaaacaaacaggaaggactcggtcacttcccttttctcgagtttcccgtctccctctagcaccctttggcagagtctagcatggcaccatcaggccaagctgaaacgtggtttgcagagagccagccccagcatcacagagtctccacctgactgcattgcttcatggcactg

SEQ ID NO: 11491 - DNA, 957 bp, Homo sapiens
  source 1..957: mol_type = unassigned DNA
aactagtcatgcgcctcggatgccgccggccacggggctcccggaggggggtccgacaccgcccggtgcccgggatccccaatctggccggtggatgaggccccatcccatgcacccgagtgcgggggacgggggggttaatattaattcaggatcccatccccacccgaggcaggacacccagtgcacgccccaactccgggacgcgggctctgaccctggaacttccgagattcccgcgacgccccctgtctctgggtccagaacttcgggggacacctcttctgcctcctccaaccccagagatggggtgtcactatgttgcccaggctggtctccaactcctggactcaagagatctgcctgcctcagcctctcaaagggctgggataacagatgtaagccactgcatctggcctccaatgagttgttatgtgaagagaacgtgattaagttagaggactccaaccaggcctgaactctcaaggacagaaatgggtccaacctggcatgacatcctctaaatctttagctcctggcctctcaggtgccccctccagctacctccctcttccttctcttcattccccaagccatagctggttgggccaacctccagacattagcctctttgcaaactcctattcatccctcaaagcctcaccttcaatgctctcctccccaagaagctctctcctctacctctagaccttttccagccctcttccctctttctggcccagccctgactcctgggagtgtctgtgtgcagctttgactcccccagcctgagtgtctctcaagggctgagaccagggcccatgtttccctagagtttgtcatcttccagcatagtgtggacgcatgggggtcaggcaaagggggagtttgatgactcagtactattggtgattttgcatcacttgaaggagaccctgccttaaattcagaacttga

SEQ ID NO: 11492 - DNA, 573 bp, Homo sapiens
  source 1..573: mol_type = unassigned DNA
gaagatgctggagactttgttgcaagaaaggatggctttaggtcatgttgctgaggcctgatcttaaagatctaattgctattggaagagaatcctgtttcccaactgggcctcccctctggagatggagcaaggaagactgtccaactctgctctgggcaccctgctgatggatgaggtgtcaggccagtcgtcatgtgaggactggtttccaaatgcagatacaaaaagaaaaattactgtcatgtgatgtgtgatccatgataccgtcatagttttgttttgctgtgctccaccttcataccttcgcctatgttagaacttctgagaagctgaagcatcacatataaaaagccaagaccatcctcaaggagtttaatgaatgtggcatcacaagaaaaatatgcatcaacattgaaaagaaaagaaataaaattccattaacagagcttgaggaagtggacttgactaagctggagtaaggagtgcagagagtgaggagacaggatgcgaaacaagaagatgaggaaactgaagcctgagaacaacatgaattctacaatacatttaccg

SEQ ID NO: 11493 - DNA, 581 bp, Homo sapiens
  source 1..581: mol_type = unassigned DNA
agtttgatctcagactgctgtgctagcaatcagcgagactccgtgggcgtaggaccctcctagccagatacaaaaagaaaaattactgtcatgtgatgtgtgatccatgataccgtcatagttttgttccaagaccatcctcaaggagtttaatgaatgtggcatcacaagaaaaatatgcatcaacattgaaaaatatggtgcctccctctggaacagagcgcagttatatttcctgcatagtatggaaaagaaataaaattccattaacagagcttgaggaagtggacttgactaagctggagtaaggagtgcagagagtgaggagacaggatgcgaaacaagaggtcccacaataggctgtctgcaagtttgaggagcaaggagagccatcccatgtctcaaaactgaagaacttggagtccgatgttggagggccggaagtatccagcacaggagaaagatgtaggctgggaggctaggccaatcttgcctttcaagtttttctgccggttttatattcacttacagctgattacattgtgtccaccagattaagggtgagttggtcgtccccagcc

SEQ ID NO: 11494 - DNA, 579 bp, Homo sapiens
  source 1..579: mol_type = unassigned DNA
gaagatgctggagactttgttgcaagaaaggatggctttaggtcatgttgctgaggcctgatcttaaagatctaattgctattggaagagaatcctgtttcccaactgggcctcccctctggagatggagcaaggaagactgtccaactctgctctgggcaccctgctgatggatgaggtgtcaggccagtcgtcatgtgaggactggtttccaaatgatgagaaaactgaggctctgagagatgacatcataaagccttgtaagacccagttgctgtgctccaccttcataccttcgcctatgttagaacttctgagaagctgaagcatcacatataaaaagccaagaccatcctcaaggagtttaatgaatgtggcatcacaagaaaaatatgcatcaacattgaaaagcaaagccttccagccagttcaatggtgggagtctccccctgctcttcctgcacaatcatttcccattgaggaagaatgtgaaaatgacgcacaggtgagggaggcatactataagaccgcttcttacctttcgtttcctggagccaatatgaatgaagacccagagag

SEQ ID NO: 11495 - DNA, 569 bp, Homo sapiens
  source 1..569: mol_type = unassigned DNA
atgcctcaccctgctttggctcgcgcacggtgcgcgcacccactgacctgtgcccactgtctggcactccctagtgagatgaacccggtacctcagatggaaatgcagaaatcacccgtcttctgcgtcgctcacgctgggagctgtagaccggagctgttcctattcggccatcttggctcctcaggcaacctcttttctttataaattactcaatctcgggtatttcttcatagcagcatgagaatggactaatacaaagtcctttggctggaggcaacaggaaaaattctgactatcatttcccatgctacccctcacctttcaaatcctttacaatatggggagcaggagaaaggcagatcttacttgagaggaccgtgaggggagcaaggtcgagagtccacatggaaccccaaaaactaggagagctagaacaaggacatttgatacaaaaagaaaaattactgtcatgtgatgtgtgatccatgataccgtcatagttttgttttgctgtgctccaccttcataccttcgcctatgttagaacttctgagaagctgaagcat

SEQ ID NO: 11496 - DNA, 200 bp, Homo sapiens
  source 1..200: mol_type = unassigned DNA
atacctgaaggcagagggcgaccctttgacgtctcagggccatatatcagttccctaacagtgaagcccacaacaagcaagaatttctgacatgacatgggaaaagctgaagaagtcagtctttggggtgtgttttcatctaggaggtggcttgagatggattcatggcaaatcacaataaattatttatcagataataa

SEQ ID NO: 11497 - DNA, 282 bp, Homo sapiens
  source 1..282: mol_type = unassigned DNA
ctgctgagcccacagagtagctgggattacagatgcgtgccacctcacccagttacatcttcctgaggatagagcctacatagaagttcagcaaatatctggtcttttccacacctgggaagatgtgggtataggccactatgtgttttcctttcaaaatggcaagaatttctgacatgacatgggaaaagctgaagaagtcagtctttggggtgtgttttcatctaggaggtggcttgagatggattcatggcaaatcacaataaattatttatcagataa

SEQ ID NO: 11498 - DNA, 421 bp, Homo sapiens
  source 1..421: mol_type = unassigned DNA
aggtgaaagaaaactaaagaaataccagtgcagaaaggaagttctttattttcaggttgctcaagctaaaacaataagcagcatttcatggatgactggcatgtcgccttttactcctcaaggcagactcaagagttttcccagaaacagaggacgagccccttggccatgcagccctaagccaggctgatccagccttgtctcgcccctctctgcaagagactcgtgggtacaggatgattgagggggccccagcctccccagcagctgctgacttgcgcttggaaattcaatcctctcaaggcaagaatttctgacatgacatgggaaaagctgaagaagtcagtctttggggtgtgttttcatctaggaggtggcttgagatggattcatggcaaatcacaataaattatttatcaga

SEQ ID NO: 11499 - DNA, 385 bp, Homo sapiens
  source 1..385: mol_type = unassigned DNA
agacggggtttcaccatgttagccaggatggtctcgatctcctgacttcgagatccacccacctcggcctcccaaagtgctgggattacaggcatgagccaccacacccggcgactcattcttatacaactacctttgtcagcattcttgccattggactgtctagcccttgatgctgttatatcatggcttgttgatacagaagatgctacatgaactcaagtggaactctgactgccttgagagcatcccaccatccattgctgctgcatcaaggtattaaaaagagagacagaaggaagaggtgagagaagcacaagtttaacagtgtgagggcattttgcttaataataagacatttcattaaaatattagctacttttgt

SEQ ID NO: 11500 - DNA, 606 bp, Homo sapiens
  source 1..606: mol_type = unassigned DNA
agagacggggtttcaccatgttagccaggatggtctcgatctcctgacttcgagatccacccacctcggcctcccaaagtgctgggattacaggcatgagccaccacacccggcgactcattcttatacaactacctttgtcagcattcttgccattggactgtctagcccttgatgctgttatatcatggcttgttgatacagaagatgctacatgaactcaagtggaactctgactgccttgagagcatcccaccatccattgctgctgcatcaaggtattaaaaagagagacagaaggaagagaatgtttgtcaaatgtcttctttgggcacctcacagggccaggcacaaggggaaggggtatttgcagctgacttcaatccaaagctgaatgtggatgttggcacctgctgctccctctctccagacatctccctgtatctttgcttatttggtttcatatttattgaccatcaaccaccccccatccctgtagaacgagaagctcatgagaacaggggtcttgttctctagcttttgtttctccaccgagaagagtgcctggaaacagagtcaatgctcaataaacatttatggaacaaa

SEQ ID NO: 11501 - DNA, 464 bp, Homo sapiens
  source 1..464: mol_type = unassigned DNA
catgagaacacattgcctcatacttgctgcaatagagttgaataagtaacagcttttaaattggattatcaactcacattgctaccaaatacgagcatatcaatagcaagtcatttggggtgaatggatatgttgactgccacacctgggtttctgtgactactcctggattcagtgatggagtcagccccaagtcttgtcccatctgttccaagctatttgtccatgtaaaactgtcaacgttccaagccactgactgacagggtaagaagagtgagtctcaagagagtgaggaacggtgaatctttggcagactctgtgtgtgcccatggaagagacagtgacagaaattatgtaatgaaaaaaatgtagcacaagccttatgaatttttacttttcactccatgggattcccatatcaaaagacctattctacacaaaataaagttctctatgaagaattg

SEQ ID NO: 11502 - DNA, 1847 bp, Homo sapiens
  source 1..1847: mol_type = unassigned DNA
gagagtctggctggaggccaaacaacacaaaaccagcacacttaacaaaaatataaccaatgacccttgcagagtccacttaactcccctccaccagagcaggtgctggtatccacagctgagagacctgaagatggatcacatcacaggactccttgcagacattctccagtaccagcccagagcctggtaggtctgttgggtggctagaccagtattctaagtgaagtaactcggaaatggaaaaccaaacatcatctgttctcactcatcagtaggagctaagctatgagaacacaaagacctgtccacgctgagtttatagcaactgtcaattacggttcagattttcctaccccagcgtgactttccaaagaggcttctgctcatggatttctgctccaggaagatgcaacaggaaggtcctcacaagatggctgaacagatgcaggtgctgtgcctctggactgcctagcctccagaactgatacatatgcaggatgtgcagctttgttacacagtatgaagcatgtctttaggactttctgtgccatctggtatccatcaaggggagagtcccaaactgcactggaaggcatcttccagatggtggtgggcgctaaagatcagctgtgtgggtgtgagcttcccatgcctgtggagaagcagcaattgaattgctcatctggaatgaagtttcgtggattttttttttttttgaacagatcactgactacttccaatatgcaataccaagtaaagactgcaaatgactgtgccacagggaggaaaagcagtcaacctgtctttagggacctgttcaaatttctggtgtctcagtggatgttgatttctgacataaagccatttgtgcacatgaggaagatactgtaggaggcatttgctgtgagccagtgtttggtctttagctgaaacagacatttagccataaaccaccaaccagaaagatcaataagacacggttcctcttctggtgggccacataaaggaagttgtcatgttccaacttaatgtgtgggttgagagggatctgcacaaacgagcgtcatcggggagaaaaatatatcccagtctgcgtggtcacggggagcttcctgggcaagcaacatctagactggtgtttgaccaaactactgggcaccataccccagccaagtcagcatataatgtgaaccatcacagtgggagacatgtcacaaagtggtaagacagcaagaattggtggtctgggctggattccagagaacctggactgtgcctatgaagcaccactgccctgtagacctgggataataaacactgatgcctaaagggaccaggcaggaactccttcatagatgaatgcttggtgttattcattacccagtcttgagggactcactggtgagctcggggctcagggagtagacctgactggggagctaagtgatctcgtgtgactctctatgcctcgttgccaccagcgtgggccatctccaggggctctcaaaccgatagaagaccttgcggtgtgggaaaacagctccagagcttctaagctgagcggattgttcctagtgaggaaggtcttgtcccatctgttccaagctatttgtccatgtaaaactgtcaacgttccaagccactgactgacagggtaagaagagtgagtctcaagagagtgaggaacggtgaatctttggcagactctgtgtgtgcccatggaagagacagtgacagaaattatgtaatgaaaaaaatgtagcacaagccttatgaatttttacttttcactccatgggattcccatatcaaaagacctattctacacaaaataaagttctcta

SEQ ID NO: 11503 - DNA, 236 bp, Homo sapiens
  source 1..236: mol_type = unassigned DNA
ctatgaagcaccactgccctgtagacctgggataataaacactgatgcctaaagggaccaggcaggtcttgtcccatctgttccaagctatttgtccatgtaaaactgtcaacgttccaagccactgactgacagggtaagaagagtgagtctcaagagagtgaggaacggtgaatctttggcagactctgtgtgtgcccatggaagagacagtgacagaaattatgtaatgaaaa

SEQ ID NO: 11504 - DNA, 429 bp, Homo sapiens
  source 1..429: mol_type = unassigned DNA
ttctgttttctcctttccactaagggaagatgcaacaggaaggtcctcacaagatggctgaacagatgcaggtgctgtgcctctggactgcctagcctccagaactgatacatatgcaggatgtgcagctttgttacacagatacttttggctcggtgaatggtgcttatcagttaacagcagaaaccctcctgaaatggaaaatggttcattgtttccatcatgtactctatggaatacaaagctctgaaacctgttggctactggaagtgtacaagaaaaagactctcaagctagaggtggggtagagctggagccagccatgtcaagatctttcgaggacatgaacattttttatgcttattaaaagatgatgtggttttaaaataaatctaaggctgggcgcagtggctcatgcctggaatccca

SEQ ID NO: 11505 - DNA, 419 bp, Homo sapiens
  source 1..419: mol_type = unassigned DNA
ggcttctgctcatggatttctgctccaatgcaacaggaaggtcctcacaagatggctgaacagatgcaggtgctgtgcctctggactgcctagcctccagaactgaggtgttggaagctgtgaatgtggatgaaagtaccaatatagagagaacagagtgagaatagaagacagcccaagaatctaaagtcatgcacttgcaagggagtcagaggaagagaggtaagaaggaaaatggttcattgtttccatcatgtactctatggaatacaaagctctgaaacctgttggctactggaagtgtacaagaaaaagactctcaagctagaggtggggtagagctggagccagccatgtcaagatctttcgaggacatgaacattttttatgcttattaaaagatgatgtggttttaaaat

SEQ ID NO: 11506 - DNA, 1978 bp, Homo sapiens
  source 1..1978: mol_type = unassigned DNA
caaaagagcaagtcagggaactagctttggttgggttcggtggtacacaaagcacaaggcctgggttggggttaggaggaaatgagacttgcggcgggtcggggctgaagatgtggcagcgccctgaacctggagaaaggctgaatccctttggtcaaggagagggagagagaggtaagggtctggtcttactttttaagcaggaagaagactacaaaccaccatctaccatctgccaggccctggaatttgaaccaccatcttctggagtgactcaaatgcagaggaagccaggcctgctgctaacgtttctgagaggcggcaagagtataaatggagatccacatatgtataaataaagagtgtgaatcaagctaacaaactgtttaataaaatatgatctaccctcttagcttgacaaatcaacttttcaaacacctggaagaacaagtttgcactcaggattctcagactcctcagagttctgcactgggatgtggaagggctgtgcaagccagcccttgggtccctgatccctgtctcctggcctgtgcccgtctcttctcagcctggctccaactcccattgagaggaagttcttgtacacatatgatactgcagcccttatgtctaatatttatccataccttctgcaaacagccactgtgtgaccacccttgggcttcccaggggtctgcaaactgacaatacagacaaagggaaccaaggcagaggctcacagactgtagaaatgggcttggggccatctgggcagagacttgtggaatcccagcacgatcactctgggtgctgtgtgaaatggatgaatagcaaggagctgcagccaagagcaaatcaacagaagcaccactcaaaatgcctcagtacccattacataaggattcttgtgattaattcttccccaaaatttagagccaagaaaaatccagctctcctactgagagttgtagattagagcttctgtttctaatctacaaacaaacaaatgtgtgcaatgtcttttcatgacaattccaactttatcataaggttgtctactaagaaactagtaggcaggtttctcttgttgtctagaccacctgaaagctcatagctgagtttgcacttatttgcagagtaaactgctcatttatcaatctggcatccaatcacaactttttagctaactgtatgttttcataaacacttttctcacacagtataaattttaaataaataacaatagcaattaagtagtaacaactcgagactggtatctgactagtggttctttcaccagtgtgtacactggaagttttgttttgttttttgatgtttgtacattgtaattgcaggacaggtagtaagaagatttcaaattcacattagctttgctaccactaaattatggtgactgttcctaatttgcaaacaaatgtatgcaatctctttttatgattatcccaactttatcataaggttgttatattttaagacatatgaaaagatataaagtataatacagtgaatacatatatatctaactcccagtttaagaaataaaacattagcaaatacagctgaagctccatgaattcccctcccaaatcatactcccttcccacccgcagagggaacctctattctgagcctggtgtttatcaccaccaagaattaaaaaaatacttttactatatatacacaagtatgtaccccttagaaatgagtagtagtactgttttgtatgtctttacactttaagtaaatggtataagttatttcttgtttttgctcaaaattgttgaaatttatgccctttgattctatagctgactttcactgtgagtcattccatcattatttctgtattcattctcctgctgaagtacatttcaggttgttgctattcctctgctgatccccctcccccaacacacatgcttttattaataaatctgctggaacattcttgcataca

SEQ ID NO: 11507 - DNA, 2189 bp, Homo sapiens
  source 1..2189: mol_type = unassigned DNA
gcaagatggcccttaccagatgctggcaccttgatatttgacttcccagcctccagaactgtgagaaacaaatttattttctttataaattactcagattgtggtgttctgttacagcaacacaaaatggactatgtgaagaaaaccatgttggaatcttgtgctgtcattgataagaaaggatctgagcattaggtcaatcaccaaaaaactgaaaaatcagtaacaatgatgacagactcttcaaataggatgatttaaattttaggaaattggaagaagactccaagaaacttaacaaggtcctccaatattttccccaaaatgatcttctctgatttgactatgcttgttcctccatatctccctgatccctagacttcttctgtcctctatccacattctctcccaaggtgggtcatctagtttcatgactttaaatcctcccttaaactgttggttctcaaatatgcacttgtcacttctctcctaaactccagactcatgtattcagctacctacttgacacttctgtgtggatgtctagtaggtaataatcttagaattattgtgccctgtcaaattcctgctcttccctctaaaatatcttaatactattcagtcttccccatttctgtttatctcagttccttttcaggtcaaaaacctgagttatctttgattcctctctttctctcacattctagtagtccagttcctttcataatcagatcaattagtaagccctatcagctccatttttaaaatgtaactaggatcccaacacttctcaccatttccactactactctgtctcccacctgattctttcaggagccactcgattcgtttcctgcttctaccctcactactctacagtctattgtcagctcagcagccacggtaagcctactttcacttccctgctcaaaactctattggactcttcatctcagagtaaaggtctttccagtggtatacaatatccaatcatatctctccagattgcctaccttcctcccctcactccctccattccggctgcactggctccttgctcttctttgaacgcattaggcacatcctgctccaggacatttgcacttgatgttccctctaactagaatgctctttctctggatattcatatgtttctctcctcatcaccttcaaatcttttccctcatgtcatcttctcagagagacatattctgaccaccctctttaaactgtagtctttaccaatattctgtactacttattcaccatctctgcttttgtattttcttcttagtatttgctactttccagcatgatctgcttttccctaatattttatgatttatcacccattagaatataaggtccatgaaaacacgaaaaatattttctttttttttttttgactgatcccactgcctagaacagtgcttggtgcatagtaattagtcaataaatatttgttggatgaatgagtagatgtcttgaaagtcaaataggaaggaatatggtgatgtcatacaattttattaaaaaatatatgcatccctagtattctaagaattagcacatagtaaagttatagcctaattttataaactctaaaatcacttttatggtttttagctgctgtttttcaagataaaactccaaacaagtacagttttcagtatttcttatgatatattcatcattatttcaaatgcattggctttatggggcctgcacaatcatctttagataaaaatgacctcttatatttctgggtgactagacacaagccttaattaatttttaaaaagggattctatgcagaagggacagtgtttctgcctgtcttctttcacactttgcacacccaggccatctggagtgaaaatgaagtctgcccagagctgctggaagccccagctgccctgctgcccatggagtcctctgaggacgactccagagtccctcaactccttggaggagataagcagccaacacagtgttgttcagcagatgccaccgtctgccatgccctggaatttgaaccaccatcttctggagtgactcaaatgcagaggaagccaggcctgctgctaacgtttctgagaggcggcaagagtataaatggagatccacatatgtataaataaagagtgtgaatcaagctaacaaactgtttaataaaatatgatctaccc

SEQ ID NO: 11508 - DNA, 260 bp, Homo sapiens
  source 1..260: mol_type = unassigned DNA
taaacgcctacgtcagaatctggagtcagctggagtgtgccagcagcaagatggcccttaccagatgctggcaccttgatatttgacttcccagcctccagaactattcattaatgatgtcagaagtgtaaaactaaaggcagaagactgttgttttcaagattgctccccaactaggcttggcgacccttgaaggcagaggacctttctgagttatctttgtaccctgcatagtcctggcacaaaatagcacctaagtc

SEQ ID NO: 11509 - DNA, 812 bp, Homo sapiens
  source 1..812: mol_type = unassigned DNA
agaatctggagtcagctggagtgtgccagcagcaagatggcccttaccagatgctggcaccttgatatttgacttcccagcctccagaactgtgagaaacaaatttattttctttataaattactcagattgtggtgttctgttacagcaacacaaaatggactatgtgaagaaaaccatgttggaatcttgtgctgtcattgataagaaaggatctgagcattaggtcaatcaccaaaaaactgaaaaatcagtaacaatgatgacagactcttcaaataggatgatttaaattttaggaaattggaagaagactccaagaaacttaacaaggtcctccaatattttccccaaaatgatcttctctgatttgactatgcttgttcctccatatctccctgatccctagacttcttctgtcctctatccacattctctcccaaggtgggtcatctagtttcatgactttaaatcctcccttaaactgttggttctcaaatatgcacttgtcacttctctcctaaactccagactcatgtattcagctacctacttgacacttctgtgtggatgtctagtaggtaataatcttagaattattgtgccctgtcaaattcctgctcttccctctaaaatatcttaatactattcagtcttccccatttctgtttatctcagttccttttcaggtcaaaaacctgagttatctttgattcctctctttctctcacattctagtagtccagttcctttcataatcagatcaattagtaagccctatcagctccatttttaaaatgtaactaggatcc

SEQ ID NO: 11510 - DNA, 461 bp, Homo sapiens
  source 1..461: mol_type = unassigned DNA
cagtgacgacacaaccacctggaactcctgcctgccaccccctgtcaaccagggtcgccactatcagaaagaaatgaacccaccttctccttctaatccccgggactggttaaatatgttgagcccaccaatcgttcctcccagtcaacagccggctgagcagcgtccagattcctgtgaaagtttgagtgttcaagaagaaatgtctggaagtgctacagccattttgcaactgtgaaggcaaaactcacactctaaagatatcaggacaagaacctggaagtgtgggtcctcacttcttccttgagcatctatactcatcctgaactacagtttccagaacacatttcacatgagaagaataagcatcttttgtctacagatcccaaagcatccttggacacaattcagagtttcatgaacttgagcggaaagagattacattttcattttcacaaagc

SEQ ID NO: 11511 - DNA, 424 bp, Homo sapiens
  source 1..424: mol_type = unassigned DNA
gcccaccaatcgttcctcccagtcaacagccggctgagcagcgtccagattcctgtgaaagtttgagtgttcaaggatgatttaatcccagaaagctggagagcttggagacatccaagatgctgacaaatggaccaccgaagaaaaagcacttagcacatgaagaaatgtctggaagtgctacagccattttgcaactgtgaaggcaaaactcacactctaaagatatcaggacaagaacctggaagtgtgggtcctcacttcttccttgagcatctatactcatcctgaactacagtttccagaacacatttcacatgagaagaataagcatcttttgtctacagatcccaaagcatccttggacacaattcagagtttcatgaacttgagcggaaagagattacattttcattttcacaaa

SEQ ID NO: 11512 - DNA, 2913 bp, Homo sapiens
  source 1..2913: mol_type = unassigned DNA
aataactttgaaatgagtttgttgcctacaacatgcctttctccaactggaagaaggtgtgggtcctgtcagaaaactccagagcccgtaatcaaagcgaaggatctatcagcccagcaagtgccagcttcactaaacaaaacctccctgaaagaaatctcaggggaaaggctgagctcgatccccgaagcatctgaatatgactggcgaaactatcagccaagccagatgagtgaatccgagttacagatgctagcaagcctacggtggcaacaaaatgaagaactggaggatgctgggacctcccatggcctgagtgcctcccaggtggacaactgtaatgtcagcataagtaccagcagtgacgacacaaccacctggaactcctgcctgccaccccctgtcaaccagggtcgccactatcagaaagaaatgaacccaccttctccttctaatccccgggactggttaaatatgttgagcccaccaatcgttcctcccagtcaacagccggctgagcagcgtccagattcctgtgaaagtttgagtgttcaaggatgatttaatcccagaaagctggagagcttggagacatccaagatgctgacaaatggaccaccgaagaaaaagcacttagcacatgcacatgctcaccaaaatgcaataccatgctatggtcgctcattctgtccacaaagattgcagctttctatgcactctaactgcattctgccacctgcaccctgtggcccacttgaaatgaagtttgactacatgacctgcttctttagccaataaaatgtgagcagaagtgatgcacttccaggtgacagatttaagaactggcatactttgccacttgatttttttccactctacatagcaactgtaatgttcaagatgctggcttctccatcagcctgcatcccagaacggggaaaacaaagtggccctgggaaaaagatgaaaacacaacttttctatcaagcccaatagattgaagtcaagagagagcaacgcacgtcttgaaaagaactgagtgggctgggcgcggtggctcacgcttgtaatctcagcactttgggaggccgaggcgggtggatcacctgaggtccggagtttgagaccagcctgaccaacatggtgaaaccccgtctctactgaaaaaatacaaaaattagcttggcatggtggcgtgcgcctgtagtcgcagctactcgggaggctgaggcaggagaatggcgtgaacccaggaggcggagcttccagtgagccgagattgcgccactgcactccagcctgggcaacacagcgaaactccgtctcaaaaaaaaagaaaagaaaagaactgagtgtaactgtgggcacatgaagctgatcagaattaaatagataagaagccaattaagtttttgagagagttgtatagccagagaaatcaggagcctgaactagaaatatttacaactgttcaaaatttaaagctaccctgggccctccccctttccccaggcaggaggcaggctgagaaagctgttctgcccccaaggaggacatattcttcaatgctcactttagatgtgggcaaggaaaggtaaaggaaaatttgcagaagaaagaaccaaatggactgaggagcaacagaatgagaacactgtaggatagcacttcctggccccctatgggaggtggagccaagtcatctcttctaatggtgtgagtggaagtgatgggtccttctcatcttttctgatggtgtgagtggaagtgatgggtcattctcatctgttctgatggtgtgagtggaagggatgggtcgctctcatctcttctgatggcgtgagtggaagggatgggtcgctctcatctcttctgatggcgcgagtggaagtaatgggtcattcttgtctcttctgatggtgtgagtggaagtgatgggtccttctcatctcttctgatggcgtgagtggaagtgatgggtcattcttgtctcttctgatggtgtcagtggaagtattgggttgttctcatctcttctgatggtgtgaagggaagtgatgggtccttctcatctcttctgatggtgtgagtgcaagtgatgggtccttctcatctcttctgatggtgtgagtggaagtaataggtcattctcatctcttctgatggtgtgagtggaagggatgggtcactttcatttattctgatggtgtgagtggaagagatgggtcactttcatctattctgatggtgtgagtggaagggatgggttgctttcctgctgagtgtgtttcttactttccagtgagaggtcctgcagaacactttattccttctggcttaaagactttatcattctgccagactggatccttgagagcctatgataagtagagtgcccctgccagcccatgacagcatgctgtgtggacaagaaacaaactttcattgtattcagcttagatttgagggtcgtatgcttctgcattacctacttatcactgatacaccattggagcaaaaaatcccatctatgaagaaactccaatgatttaccctatatagttctttctctgaatatgtcgtatgccttacctagtgaatcctggggctaaaatggtattgaaatggtcagatccaatcctgagcccctagtcttatgaactaggcctcctctaacaggcagtgctaagcttccatcattcccagacagtggcccaagatgaaagaagacttctctttcccagcttagcttgaatcacaaagcaatccatttgttttggccaaggggatgtgctactcttttaactcagggtcgcaggctttagggtgcacgcgatggaaaagaactcacttgtaactgttgcaccttgagttcttcttgttccaaaaagctccagaaagaagctcagcccc

SEQ ID NO: 11513 - DNA, 419 bp, Homo sapiens
  source 1..419: mol_type = unassigned DNA
ggactggttaaatatgttgagcccaccaatcgttcctcccagtcaacagccggctgagcagcgtccagattcctgtgaaagtttgagtgttcaagatatttcacacactcctgaccaggctgtaacaagatgattttttagacccacttttcatccaaaacaaggatgatttaatcccagaaagctggagagcttggagacatccaagatgctgacaaatggaccaccgaagaaaaagcacttagcacatgcacatgctcaccaaaatgcaataccatgctatggtcgctcattctgtccacaaagattgcagctttctatgcactctaactgcattctgccacctgcaccctgtggcccacttgaaatgaagtttgactacatgacctgcttctttagccaataaaatgtgagcagaa

SEQ ID NO: 11514 - DNA, 2650 bp, Homo sapiens
  source 1..2650: mol_type = unassigned DNA
gggaaccaatgggcgcggccggaacgcgggtggcgctcggcgctgctctttcgcggtttgattctggggtggggcggcagcgggagcgcgcccgcttttcctaggccagcgggcggttgtctgtggctccgcgactgggcgccccgtcacggaggtgcatttgttgaaattttcagtgctcaaggaaaaaatcctggagcaaaatggaagatccttggtagtccatctgtgatttggaaagagtttgataaagaagttaaaagttttgtgtttgtcctggaaggcagcagccaaacaaacaaaattcagttaccaaaggagaataagcaaagccttggattgatccagaggtttcttgtacttcagatttacgtacccctgggacaagacttctccactgaattgctaattactgatttagggaacatcaaaagaagattatatttatcaacggtccataaggaactatcctccacccctcttcatgcaaaaattccactcttcatgatcaaacgtaaaatttggtgcaatctatgcattgacttagtagcattcaccagtgaaatattcaagggggcagttttccagtcattggatggaattgttgtctcagctaactgtaagctacggaagatcttcaccttaaaatcaaagccacaagacactgctgataaggatgctgtctatggtgttcccttttcaacagatgagcctacagatattataccacgaagctgtcaactaatgacagatgttccacatgtcacacagctgctaaacatgactaaacttcgccaaactgaaataaaattcggaggccatcctctaagatcagcagaatcagatcagttcattaacagaggaacaagtattacacggaacagtaaaaatcaagatgtttgtcatatcgcatttggatccaaagttcttgggccacctccactctctggcagaaggaataacatgaagatatccagcgagacagtgagatccgttgggtccaaaaataaccgatcatgccagccgtccactgtagagaagtgtgttaatggtacagaaatgtcagccttgctgatacctgagtctgaggaacaaggaaataaagaaaatattcaccaaataaagcagactgtacctattcatgcagccaatctacatattatgcatccgcatccccctcaagaaccatcagcagataagaataataacagaagaagattacggttaaaaagtaccagcagagaaaggacagagacacccagcggtagctcttcaggaaataataggattgaagataaagcatcaactatcctcaccactgtgtcccaacaaggagcagagctgttgaactccggcactctaggaccccagtctcctgatcaatcagatgagtggatttttcctgaaaatgctgatcacatttcatatctggcatccagcagacagtctctacttctgggtgatgactcctgcaacccatcacacctgtggctggaagccagcaaagagagtgaacacgaccagcaggcagaggaatcccagagtgttccaaaggacattttcactttttcatcaagaccacgatcagcacctcatggaaagactcagactatgtccccagaggagctctcatttattttggatctaaaagaggataacagtgtgacaagcagagacacccaatcagaggatgatttttacggcggcgacagcagtgaagaggaatatgactggcgaaactatcagccaagccagatgagtgaatccgagttacagatgctagcaagcctacggtggcaacaaaatgaagaactggaggatgctgggacctcccatggcctgagtgcctcccaggtggacaactgtaatgtcagcataagtaccagcagtgacgacacaaccacctggaactcctgcctgccaccccctgtcaaccagggtcgccactatcagaaagaaatgaacccaccttctccttctaatccccgggactggttaaatatgttgagcccaccaatcgttcctcccagtcaacagccggctgagcagcgtccagattcctgtgaaagtttgagtgttcaaggtgaagaagacctcagtgtggaagaggacgaggaagtactgactttgttgtatgacccttgtctgaactgttactttgacccccaaacagggaaatactatgagttggtataatgcctccttccggggcagagagcaggcactcccagctggagcagaatagcagttcagggtcgcttaaggagtcaccacaacttatgtgttgggtgaccacaaaatcaacagtaactgagagaaacgaattcattttgtaaataatgttcaacgttaagaatacctatattccttttgtagatgagtatgattttgaaactgaagaaattaatacagaggcaagattttaggagtttgaattggttcttgtttgttctcattctacatataattttgtttatttcagataattttatgtaaacaaattaagagttattcattcaaattttttgcagtgttaatctgtaaatgatggcttgatgtacagaaaatgtatttttgcttaaaagatgcctgggtaccttttattttatggcatttgtattaaaaataaagtatgatggtaagaagaata

SEQ ID NO: 11515 - DNA, 2617 bp, Homo sapiens
  source 1..2617: mol_type = unassigned DNA
aattactgatttagggaacatcaaaagaagattatatttatcaacggtccataaggaactatcctccacccctcttcatgcaaaaattccactcttcatgatcaaacgtaaaatttggtgcaatctatgcattgacttagtagcattcaccagtgaaatattcaagggggcagttttccagtcattggatggaattgttgtctcagctaactgtaagctacggaagatcttcaccttaaaatcaaagccacaagacactgctgataaggatgctgtctatggtgttcccttttcaacagatgagcctacagatattataccacgaagctgtcaactaatgacagatgttccacatgtcacacagctgctaaacatgactaaacttcgccaaactgaaataaaattcggaggccatcctctaagatcagcagaatcagatcagttcattaacagaggaacaagtattacacggaacagtaaaaatcaagatgtttgtcatatcgcatttggatccaaagttcttgggccacctccactctctggcagaaggaataacatgaagatatccagcgagacagtgagatccgttgggtccaaaaataaccgatcatgccagccgtccactgtagagaagtgtgttaatggtacagaaatgtcagccttgctgatacctgagtctgaggaacaaggaaataaagaaaatattcaccaaataaagcagactgtacctattcatgcagccaatctacatattatgcatccgcatccccctcaagaaccatcagcagataagaataataacagaagaagattacggttaaaaagtaccagcagagaaaggacagagacacccagcggtagctcttcaggaaataataggattgaagataaagcatcaactatcctcaccactgtgtcccaacaaggagcagagctgttgaactccggcactctaggaccccagtctcctgatcaatcagatgagtggatttttcctgaaaatgctgatcacatttcatatctggcatccagcagacagtctctacttctgggtgatgactcctgcaacccatcacacctgtggctggaagccagcaaagagagtgaacacgaccagcaggcagaggaatcccagagtgttccaaaggacattttcactttttcatcaagaccacgatcagcacctcatggaaagactcagactatgtccccagaggagctctcatttattttggatctaaaagaggataacagtgtgacaagcagagacacccaatcagaggatgatttttacggcggcgacagcagtgaagagggtaaccacagtatccagggttctcgaggcccaacaactggtccttcagagttaactcagttaacattagagagcctgctggggaaggctgcaaagcggacaagtaaggaatatctaaggagcgcctacacagaagcaggagcaacagaaagccaggattcctcgatggagcaaatagatagaaataactttgaaatgagtttgttgcctacaacatgcctttctccaactggaagaaggtgtgggtcctgtcagaaaactccagagcccgtaatcaaagcgaaggatctatcagcccagcaagtgccagcttcactaaacaaaacctccctgaaagaaatctcaggggaaaggctgagctcgatccccgaagcatctgaatatgactggcgaaactatcagccaagccagatgagtgaatccgagttacagatgctagcaagcctacggtggcaacaaaatgaagaactggaggatgctgggacctcccatggcctgagtgcctcccaggtggacaactgtaatgtcagcataagtaccagcagtgacgacacaaccacctggaactcctgcctgccaccccctgtcaaccagggtcgccactatcagaaagaaatgaacccaccttctccttctaatccccgggactggttaaatatgttgagcccaccaatcgttcctcccagtcaacagccggctgagcagcgtccagattcctgtgaaagtttgagtgttcaaggtgaagaagacctcagtgtggaagaggacgaggaagtactgactttgttgtatgacccttgtctgaactgttactttgacccccaaacagggaaatactatgagttggtataatgcctccttccggggcagagagcaggcactcccagctggagcagaatagcagttcagggtcgcttaaggagtcaccacaacttatgtgttgggtgaccacaaaatcaacagtaactgagagaaacgaattcattttgtaaataatgttcaacgttaagaatacctatattccttttgtagatgagtatgattttgaaactgaagaaattaatacagaggcaagattttaggagtttgaattggttcttgtttgttctcattctacatataattttgtttatttcagataattttatgtaaacaaattaagagttattcattcaaattttttgcagtgttaatctgtaaatgatggcttgatgtacagaaaatgtatttttgcttaaaagatgcctgggtaccttttattttatggcatttgtattaaaaataaagtatgatggtaagaag

SEQ ID NO: 11516 - DNA, 2761 bp, Homo sapiens
  source 1..2761: mol_type = unassigned DNA
gcggtttgattctggggtggggcggcagcgggagcgcgcccgcttttcctaggccagcgggcggttgtctgtggctccgcgactgggcgccccgtcacgtaggttacacacacaatcactccccagggacggcccggagtccgtccaggcagctgcgccctccccagacccgggcaccgcggaggctggagccgcaatggtgctgatggagggcgggagatggagctgaccaggggccggaggggctgagaagagcctgcccaagtctgggccaagcacgaagccctttcccacccgtcgggctcctgggttcccgccagccgatttccagccgtcagggtcacgccactcgctggaaaccctgaactctgtgccccccaagccctgggccccctgcgggaatgttcaaaaatgagtaccagggaggtgcatttgttgaaattttcagtgctcaaggaaaaaatcctggagcaaaatggaagatccttggtagtccatctgtgatttggaaagagtttgataaagaagttaaaagttttgtgtttgtcctggaaggcagcagccaaacaaacaaaattcagttaccaaaggagaataagcaaagccttggattgatccagaggtttcttgtacttcagatttacgtacccctgggacaagacttctccactgaattgctaattactgatttagggaacatcaaaagaagattatatttatcaacggtccataaggaactatcctccacccctcttcatgcaaaaattccactcttcatgatcaaacgtaaaatttggtgcaatctatgcattgacttagtagcattcaccagtgaaatattcaagggggcagttttccagtcattggatggaattgttgtctcagctaactgtaagctacggaagatcttcaccttaaaatcaaagccacaagacactgctgataaggatggtatgttcagctgtctatggtgttcccttttcaacagatgagcctacagatattataccacgaagctgtcaactaatgacagatgttccacatgtcacacagctgctaaacatgactaaacttcgccaaactgaaataaaattcggaggccatcctctaagatcagcagaatcagatcagttcattaacagaggaacaagtattacacggaacagtaaaaatcaagatgtttgtcatatcgcatttggatccaaagttcttgggccacctccactctctggcagaaggaataacatgaagatatccagcgaggtaggagcaagacagtgagatccgttgggtccaaaaataaccgatcatgccagccgtccactgtagagaagtgtgttaatggtacagaaatgtcagccttgctgatacctgagtctgaggaacaaggaaataaagaaaatattcaccaaataaagcagactgtacctattcatgcagccaatctacatattatgcatccgcatccccctcaagaaccatcagcagataagaataataacagaagaagattacggttaaaaagtaccagcagagaaaggacagagacacccagcggtagctcttcaggaaataataggattgaagataaagcatcaactatcctcaccactgtgtcccaacaaggagcagagctgttgaactccggcactctaggaccccagtctcctgatcaatcagatgagtggatttttcctgaaaatgctgatcacatttcatatctggcatccagcagacagtctctacttctgggtgatgactcctgcaacccatcacacctgtggctggaagccagcaaagagagtgaacacgaccagcaggcagaggaatcccagagtgttccaaaggacattttcactttttcatcaagaccacgatcagcacctcatggaaagactcagactatgtccccagaggagctctcatttattttggatctaaaagaggataacagtgtgacaagcagagacacccaatcagaggatgatttttacggcggcgacagcagtgaagagggtaaccacagtatccagggttctcgaggcccaacaactggtccttcagagttaactcagttaacattagagagcctgctggggaaggctgcaaagcggacaagtaaggaatatctaaggagcgcctacacagaagcaggagcaacagaaagccaggattcctcgatggagcaaatagatagaaataactttgaaatgagtttgttgcctacaacatgcctttctccaactggaagaaggtgtgggtcctgtcagaaaactccagagcccgtaatcaaagcgaaggatctatcagcccagcaagtgccagcttcactaaacaaaacctccctgaaagaaatctcaggggaaaggctgagctcgatccccgaagcatctgaatatgactggcgaaactatcagccaagccagatgagtgaatccgagttacagatgctagcaagcctacggtggcaacaaaatgaagaactggaggatgctgggacctcccatggcctgagtgcctcccaggtggacaactgtaatgtcagcataagtaccagcagtgacgacacaaccacctggaactcctgcctgccacccggactggttaaatatgttgagcccaccaatcgttcctcccagtcaacagccggctgagcagcgtccagattcctgtgaaagtttgagtgttcaaggtgggactatgaaaaacgatatgcataagaaaataaaaataatttactataaatagagagaatccatca

SEQ ID NO: 11517 - DNA, 428 bp, Homo sapiens
  source 1..428: mol_type = unassigned DNA
agcataagtaccagcagtgacgacacaaccacctggaactcctgcctgccaccccctgtcaaccagggtcgccactatcagaaagaaatgaacccaccttctccttctaatccccgcctttaggtcctttgccatccattaagacaaatcagatgcaatttggtgctcaggacaagaaaatgctgttggatgtttggtgtaggcatgggaaaaaaaaactatattctgaaacaagactggttagaaggcagcttcccacattttgagggactggttaaatatgttgagcccaccaatcgttcctcccagtcaacagccggctgagcagcgtccagattcctgtgaaagtttgagtgttcaaggtgggactatgaaaaacgatatgcataagaaaataaaaataatttactataaatagagagaatcca

SEQ ID NO: 11518 - DNA, 4108 bp, Homo sapiens
  source 1..4108: mol_type = unassigned DNA
ggcggcagcgggagcgcgcccgcttttcctaggccagcgggcggttgtctgtggctccgcgactgggcgccccgtcacgtaggttacacacacaatcactccccagggacggcccggagtccgtccaggcagctgcgccctccccagacccgggcaccgcggaggctggagccgcaatggtgctgatggagggcgggagatggagctgaccaggggccggaggggctgagaagagcctgcccaagtctgggccaagcacgaagccctttcccacccgtcgggctcctgggttcccgccagccgatttccagccgtcagggtcacgccactcgctggaaaccctgaactctgtgccccccaagccctgggccccctgcgggaatgttcaaaaatgagtaccagggaggtgcatttgttgaaattttcagtgctcaaggaaaaaatcctggagcaaaatggaagatccttggtagtccatctgtgatttggaaagagtttgataaagaagttaaaagttttgtgtttgtcctggaaggcagcagccaaacaaacaaaattcagttaccaaaggagaataagcaaagccttggattgatccagaggtttcttgtacttcagatttacgtacccctgggacaagacttctccactgaattgctaattactgatttagggaacatcaaaagaagattatatttatcaacggtccataaggaactatcctccacccctcttcatgcaaaaattccactcttcatgatcaaacgtaaaattctgtctatggtgttcccttttcaacagatgagcctacagatattataccacgaagctgtcaactaatgacagatgttccacatgtcacacagctgctaaacatgactaaacttcgccaaactgaaataaaattcggaggccatcctctaagatcagcagaatcagatcagttcattaacagaggaacaagtattacacggaacagtaaaaatcaagatgtttgtcatatcgcatttggatccaaagttcttgggccacctccactctctggcagaaggaataacatgaagatatccagcgagacagtgagatccgttgggtccaaaaataaccgatcatgccagccgtccactgtagagaagtgtgttaatggtacagaaatgtcagccttgctgatacctgagtctgaggaacaaggaaataaagaaaatattcaccaaataaagcagactgtacctattcatgaaccatcagcagataagaataataacagaagaagattacggttaaaaagtaccagcagagaaaggacagagacacccagcggtagctcttcaggaaataataggattgaagataaagcatcaactatcctcaccactgtgtcccaacaaggagcagagctgttgaactccggcactctaggaccccagtctcctgatcaatcagatgagtggatttttcctgaaaatgctgatcacatttcatatctggcatccagcagacagtctctacttctgggtgatgactcctgcaacccatcacacctgtggctggaagccagcaaagagagtgaacacgaccagcaggcagaggaatcccagagtgttccaaaggacattttcactttttcatcaagaccacgatcagcacctcatggaaagactcagactatgtccccagaggagctctcatttattttggatctaaaagaggataacagtgtgacaagcagagacacccaatcagaggatgatttttacggcggcgacagcagtgaagaggtacactgcttgataagtgaagtagtcttgaagcacagttgtttccttagctccaataagcactaaaacaagttgaaatgaaagagggaaaatcaactgctatttataaaaatgcaacagattgccatgtcagtccacagttgcatcaggttgttatggtaactttaaactgtctttttttttttttaattaacagtcagccaatttcacttttacttatagaaaccagttttgggtttctttctgttttttcattttaatctttgaatcacaggatgagaaacgatatgcagtttagtgctatgatagcaagaccagtaaaacactgagaatatactgttctagatctctggagaaattgtgttgcagttgctaagcattctaaattgatggttttctggcttccttactcccctgccatcttttcaccttagacctattaggactcattattttccatatggtcccagaatttgaagagttgtgccaattaaagtttagataatgagtcgtggattagtgctgggacttgccttacaggagattttctgtttgcaattatttagaatatggatatatcctataaattagcaaattcgtaaaaagttttaaaatgtttcaaatcaaactgaatataatttggaaatatttgtttaaaacctaatacattgataactttttccccataggaagtgcatttagtcgtggattttcttcagcattatttttaacgatggtcattcatactttctggaaaaatttattctaaaagcagaatacgaacaactttagggttagtgaaaatgtacaaagcttttctatatagaaattatagaaataactagaaaacctttttatatgtgcccacaaaatatttttataacgtaactgattaagaatcctttttggacagtgaggcacagattaagtccatagcaccaaccttcggaggcagttgagaatatagtgggattgtttaagcagtaattctgggttttttcaacttttaatgagtttcttcagcaaagcgcgtagaggatcgtcttttcacaatattcttgcttctgagtgtcatgaaacaattagtcataccaaacataacctactgcaaatccttttatacataaatagtgcatttgatgctagcattttaagtgttgctgctggacacatttgttcctttcacctttaataacataaagctataaaaacatggacatttgtcttcagcacctaatagtgtcctcatcccagctgataatccttccatggtctaaactggctgattaattcagttcattttatgaatagaatagactcatccccttcccatatgcacagcacaatctctcttactaatgcaaaagcattactctaatagtgggcatttcatggtaggtgggaaatggtagttctctggaaaactatgagagaagtattatggataatctgccctttaaatacaccacatgaagaacttacctcttccatctataggaaggctaagcctttagaagaaacagtagagcttcatgggaaaatgaagaatactagctctgaatattttaatttgatatcacttaatgctttcttttgctgtagctactctgcctctgacatccttcaacgtttattatgcagatgtgtatttgttaccaactacataaaattgaaaacaaatttatcatgcattacccaagctttcactggcagggctatctggtcacccctgtgccatgcccatcaaggtgaccagtagcatacggctagagtctgtggtgagaccatcccattgccaacactggcactcaccaccctttaatcagagcctactaagagtggcagccagagagaggggaaacacctgccacattatcaagctttggggtttgctggtacagagactaacgagatacaagctaagatacaaaaataggaccaacaaaaatgctaggctatatttaaacaagttttagcatgtgtaatgataccttcttaacaaaattggattttttcttttgtacttttggtaatttcttttcctgtaggatagcttcttctatttattaattgtataaatcaatgggaaattaggctacatatttacaatgtttatttacatatagtctttgaagaaaaatcagtttagttaattaaggcatccttactattaattgcattattttagaatgttacatccttatctttgtataattatacttcaggaaaacataatgtcaagttgtaaataatggtggacaagtgaataacaattatattattatgcttgaagtttataaagtgtaattaaaagactttatttgatgtta

SEQ ID NO: 11519 - DNA, 949 bp, Homo sapiens
  source 1..949: mol_type = unassigned DNA
aagcacgaagccctttcccacccgtcgggctcctgggttcccgccagccgatttccagccgtcagggtcacgccactcgctggaaaccctgaactctgtgccccccaagccctgggccccctgcgggaatgttcaaaaatgagtaccagggaggtgcatttgttgaaattttcagtgctcaaggaaaaaatcctggagcaaaatggaagatccttggtagtccatctgtgatttggaaagagtttgataaagaagttaaaagttttgtgtttgtcctggaaggcagcagccaaacaaacaaaattcagttaccaaaggagaataagcaaagccttggattgatccagaggtttcttgtacttcagatttacgtacccctgggacaagacttctccactgaattgctaattactgatttagggaacatcaaaagaagattatatttatcaacggtccataaggaactatcctccacccctcttcatgcaaaaattccactcttcatgatcaaacgtaaaatttggtgcaatctatgcattgacttagtagcattcaccagtgaaatattcaagggggcagttttccagtcattggatggaattgttgtctcagctaactgtaagctacggaagatcttcaccttaaaatcaaagccacaagacactgctgataaggatggtaactcagctccctggaattcataaggtagcacaccatactgctcagatggttttaaacaaccaaaagtattgaaagaatactgatgcctccttttgattttcatctgggattattatttgttaaatcaattcttctagaagtccaggaagcagggctgcatataagatgtcaaagggttcagaagacagcattttatttcaggttttcactggcctccagaattctcttcatcttctaatttaaaaaaccttcatttattaatattggc

SEQ ID NO: 11520 - DNA, 832 bp, Homo sapiens
  source 1..832: mol_type = unassigned DNA
gcttttcctaggccagcgggcggttgtctgtggctccgcgactgggcgccccgtcacggaggtgcatttgttgaaattttcagtgctcaaggaaaaaatcctggagcaaaatggaagatccttggtagtccatctgtgatttggaaagagtttgataaagaagttaaaagttttgtgtttgtcctggaaggcagcagccaaacaaacaaaattcagttaccaaaggagaataagcaaagccttggattgatccagaggtttcttgtacttcagatttacgtacccctgggacaagacttctccactgaattgctgcaaaatgtgatactccagcattcttttcccaagagatatgaagatcttctgacaattcaaatgagattagtgtagactaggacttctcaaaccatttgaagaacgagaattactgatttagggaacatcaaaagaagattatatttatcaacggtccataaggaactatcctccacccctcttcatgcaaaaattccactcttcatgatcaaacgtaaaatttggtgcaatctatgcattgacttagtagcattcaccagtgaaatattcaagggggcagttttccagtcattggatggaattgttgtctcagctaactgtaagctacggaagatcttcaccttaaaatcaaagccacaagacactgctgataaggatggtatgttcaggttgctatcaagattttttaattctctgatgtatttttaaaattagccatacctttgggatagtatgagtgtgtggtagcagtttgatgttatgtctgctaaagtaaatttgtcaacagtcatgctga

SEQ ID NO: 11521 - DNA, 917 bp, Homo sapiens
  source 1..917: mol_type = unassigned DNA
gctcggcgctgctctttcgcggtttgattctggggtggggcggcagcgggagcgcgcccgcttttcctaggccagcgggcggttgtctgtggctccgcgactgggcgccccgtcacgtaggttacacacacaatcactccccagggacggcccggagtccgtccaggcagctgcgccctccccagacccgggcaccgcggaggctggagccgcaatggtgctgatggagggcgggagatggagctgaccaggggccggaggggctgagaagagcctgcccaagtctgggccaagcacgaagccctttcccacccgtcgggctcctgggttcccgccagccgatttccagccgtcagggtcacgccactcgctggaaaccctgaactctgtgccccccaagccctgggccccctgcgggaatgttcaaaaatgagtaccagggaggtgcatttgttgaaattttcagtgctcaaggaaaaaatcctggagcaaaatggaagatccttggtagtccatctgtgatttggaaagagtttgataaagaagttaaaagttttgtgtttgtcctggaaggcagcagccaaacaaacaaaattcagttaccaaaggagaataagcaaagccttggattgatccagaggtttcttgtacttcagatttacgtacccctgggacaagacttctccactgaattgctaattactgatttagggaacatcaaaagaagattatatttatcaacggtccataaggaactatcctccacccctcttcatgcaaaaattccactcttcatgatcaaacgtaaaatttggtgcaatctatgcattgacttagtagcattcaccagtgaaatattcaagggggcagttttccagtcattggatggaattgttgtctcagctaactgtaagcta

SEQ ID NO: 11522 - DNA, 491 bp, Homo sapiens
  source 1..491: mol_type = unassigned DNA
agaagttaaaagttttgtgtttgtcctggaaggcagcagccaaacaaacaaaattcagttaccaaaggagaataagcaaagccttggattgatccagaggtttcttgtacttcagatttacgtacccctgggacaagacttctccactgaattgctgttacaggaggtttttgatggtgaaaatcaagcctgtattacaagtgaagagctgttttacaagcagcctccttgcagcaactaaattgcccccaaaaaagcacataagtgtaatgaagcttttaagtagtcacacatatgcatttatattctctctctcatgaatgactaattttaatttttttaaagtagcaattcagcttgcttttagaaccatttaagctttgcacatgattttgttttccccccaaagccaactattcttgattatgagataggggaaggtttgcatatttatttttgcaaagacagtagcataagccctcatcaccata

SEQ ID NO: 11523 - DNA, 508 bp, Homo sapiens
  source 1..508: mol_type = unassigned DNA
tggcttcagcgtcacctagtgcaggctgccattcaacaaacgcattgtcaacagtcaaccaaaagaaacccattggccaccataccctgaggactaaccctgacacagatgcccttccagatgccctcaatagtctaactgattccatcgccccagccttgggggagaagcactgctgcctatgcactccatttacagaaaaacgttgacctcttggcgagaatgcaaagaagggaacgcttgcttatacgctgttggtgaactgtcacccctacaactcagcttgcaaccagccctggccaccagtttccccacactgagctgaatatcggacatgcccatctcagacattccagcccattctgaaattccacatcgattcacctgacaaagtctgaagttccagggcaatttatctggaaaagcttacctggaatcacgtgtcatttcaaccaacaactgttgaagaggacgtggcattaaaaccaagggtatcaattatttataa

SEQ ID NO: 11524 - DNA, 426 bp, Homo sapiens
  source 1..426: mol_type = unassigned DNA
ttttcccagctacatataaggaatttgaaagtcacataaaatggttaagaaaatgtgccaagattacctcagtaattctggtctgtgttctcaggagaccctggaaataaacaatgaaaaacgttgacctcttggcgagaatgcaaagaagggaacgcttgcttatacgctgttggtgaactgtcacccctacaactcagcttgcaaccagccctggccaccagtttccccacactgagctgaatatcggacatgcccatctcagacattccagcccattctgaaattccacatcgattcacctgacaaagtctgaagttccagggcaatttatctggaaaagcttacctggaatcacgtgtcatttcaaccaacaactgttgaagaggacgtggcattaaaaccaagggtatcaattatttataa

SEQ ID NO: 11525 - DNA, 711 bp, Homo sapiens
  source 1..711: mol_type = unassigned DNA
ccagattctgatgatgattcagaagtcagtgtggaagaagatcagagggagaggcaggcgctctttgacttatcaagctgctccctgaggcccaaaagcttcaagtgtcagacttgtaaaaagtcatatatagggaagtggggactggcccagcattttaaacttaatccaggccatggccagctggaccctgagatggtgctatctgagaaagccaatgggagcaccctccgggggtgcacagaggaaaggacgctcagcctgaccttcccggggctgtccgtgccagcggctccgcgtgagggaggggcccgctcctgcttggtgagagagtcagcacgcggtggcctgcagggttatagagtggaaagtcccacaatctttttcttctctattttcagaaaaacgttgacctcttggcgagaatgcaaagaagggaacgcttgcttatacgctgttggtgaactgtcacccctacaactcagcttgcaaccagccctggccaccagtttccccacactgagctgaatatcggacatgcccatctcagacattccagcccattctgaaattccacatcgattcacctgacaaagtctgaagttccagggcaatttatctggaaaagcttacctggaatcacgtgtcatttcaaccaacaactgttgaagaggacgtggcattaaaaccaagggtatcaattatttataa

SEQ ID NO: 11526 - DNA, 696 bp, Homo sapiens
  source 1..696: mol_type = unassigned DNA
tgaagacacgttgagacaggtatctcgacctgccaagtataaagctaaagctgagttcataaaaagggatgatttggccgacggtcatctgccagattctgatgatgattcagaagtcagtgtggaagaagatcagagggagaggcaggcgctctttgacttatcaagctgctccctgaggcccaaaagcttcaagtgtcagacttgtaaaaagtcatatatagggaagtggggactggcccagcattttaaacttaatccaggccatggccagctggaccctgagatggtgctatctgagaaagccaatgggagcaccctccgggggtgcacagaggaaaggacgctcagcctgaccttcccggggctgtccgtgccagcggctccgcgtgagggaggggcccgctcctgcttggtgagagagtcagcacgcggtggcctgcaggtgaactgtcacccctacaactcagcttgcaaccagccctggccaccagtttccccacactgagctgaatatcggacatgcccatctcagacattccagcccattctgaaattccacatcgattcacctgacaaagtctgaagttccagggcaatttatctggaaaagcttacctggaatcacgtgtcatttcaaccaacaactgttgaagaggacgtggcattaaaaccaagggtatcaattatttataa

SEQ ID NO: 11527 - DNA, 856 bp, Homo sapiens
  source 1..856: mol_type = unassigned DNA
gcgcagggcccccgcctggctctacaagcccgggccgcggcccccgccttccccgccgcctcccggcgctccgtgcccgccccacgaggccggcggctgctgctacctggggccgttgctgcttgtgccgtgagcgacggccagccattgtccccgccgctccgtcagccgcgcccggccgcgcgcgcaccggaaggcgcattggcgtcttgcgggctccgggccgggtgggcaggatggcctccacaagccgcatggcgcgcatggggagcctccgttgatgccgccgcgccgccctccgaggctgcatccgcggaagcccggctccccgagcgctccggcccggcccggcgccccggacctgagtgcgtccccatgaaggcgcccgggctggcccaggcggccgtggcagaggagaccccggactgggcgcccgagctctgccccagctccgaggcgcggtcgccggagccgcctgccaaccgccttcaagacttcgacacgctggtcaccgtgggaaagcaactagaagccatttgtgtcaagaaaaacgttgacctcttggcgagaatgcaaagaagggaacgcttgcttatacgctgttggtgaactgtcacccctacaactcagcttgcaaccagccctggccaccagtttccccacactgagctgaatatcggacatgcccatctcagacattccagcccattctgaaattccacatcgattcacctgacaaagtctgaagttccagggcaatttatctggaaaagcttacctggaatcacgtgtcatttcaaccaacaactgttgaagaggacgtggcattaaaaccaagggtatcaattatttataa

SEQ ID NO: 11528 - DNA, 922 bp, Homo sapiens
  source 1..922: mol_type = unassigned DNA
caaggcaggtggatcacaaggtcaggagatcaagaccatcctcctggctaacaaggtgaaaccctgtctctactaaaaaaaatacaaaaaattagccgggcgtggtggcatgtacctgtagtcccagctactcaggaggctgaggcaggaaaatcgcttgaacccaggaagtggaggttgcagtgagccaagatcataccactgcactccagcctgggcgacagagggagactccgtctcaaaaagaaaaaaagcaataaatgctcttccagaaaactcaaaaatgaagataagctaaaagaaaatggaaagcaccagaataccagaatctttccactcactgatgatcagagttaatacctcagtgtcttctgtggcttcagcgtcacctagtgcaggctgccattcaacaaacgcattgtcaacagtcaaccaaaagaaacccattggccaccataccctgaggactaaccctgacacagatgcccttccagatgccctcaatagtctaactgattccatcgccccagccttgggggagaagcactgctgcctatgcactccatttacagggttatagagtggaaagtcccacaatctttttcttctctattttcagaaaaacgttgacctcttggcgagaatgcaaagaagggaacgcttgcttatacgctgttggtgaactgtcacccctacaactcagcttgcaaccagccctggccaccagtttccccacactgagctgaatatcggacatgcccatctcagacattccagcccattctgaaattccacatcgattcacctgacaaagtctgaagttccagggcaatttatctggaaaagcttacctggaatcacgtgtcatttcaaccaacaactgttgaagaggacgtggcattaaaaccaagggtatcaatta

SEQ ID NO: 11529 - DNA, 904 bp, Homo sapiens
  source 1..904: mol_type = unassigned DNA
tgaccttcccggggctgtccgtgccagcggctccgcgtgagggaggggcccgctcctgcttggtgagagagtcagcacgcggtggcctgcagtgtcttctgtggcttcagcgtcacctagtgcaggctgccattcaacaaacgcattgtcaacagtcaaccaaaagaaacccattggccaccataccctgaggactaaccctgacacagatgcccttccagatgccctcaatagtctaactgattccatcgccccagccttgggggagaagcactgctgcctatgcactccatttacaggctaaaatcacactcgatgtttttatgggatcatttgatctggacattgtcaaagaaaaaattgcaccagacaagttaaaccttcaaggaaggactcagtcaggactactgcaatacggaagagaggagcttaacttcattgaaacaaaaggctggggagtttttaagtgccggggtgagatgctgagaaggaactggagacatcaggaagaggttaggaaatgccgtaaagctatctgcgttggctcattggaatttttcaaaactgggaatctgcccttctacaaaaactgagacacagatgtatcatctccttcaataattgcattttaaagggatggctctgaagtcttgagaaaggcattcctgggttgcaaaactaggaggaggctagaagaaaatttgggagaagatttgcctctcaaagaggtagagaaagaactcacaattgcaagtttcctaaaataaatcctccgtgaaaaaaggaggcctgatggatggaactggaggtcattatgttaagtgaaataagccaggcacagaagaaaaatactgcatgttctcactcacatgtgggagcttaaaacctggatctcatgaagata

SEQ ID NO: 11530 - DNA, 726 bp, Homo sapiens
  source 1..726: mol_type = unassigned DNA
ccgccctccgaggctgcatccgcggaagcccggctccccgagcgctccggcccggcccggcgccccggacctgagtgcgtccccatgaaggcgcccgggctggcccaggcggccgtggcagaggagaccccggactgggcgcccgagctctgccccagctccgaggcgcggtcgccggagccgcctgccaaccgccttcaagacttcgacacgctggtcaccgtgggaaagcaactagaagccatttgtgtcaaggtaacgtctggagaaacaaaaggtcaggaatggccaacgtccctactggccacagtccagccccaatctgcaagacagagccagccgccccgggggaattcccgcctggtgggactccacgtcaccagcccccagctgctcagggtacagcccctcgtgagaaccgagccacagtcatgtttcctacatcagcctcctgctcaggggtttgtacagagaccactgccagccctctaggtggtccctgcaaagagagtcccagcccccaaggctccaaatggacagggcaccatgttgaccccttcgtcggcctccagtttgccgactgtaacatgtttcatccagttcaggacgtttatttatttccaacttgcatacaaaacatactgagaaactaaaaccatcgttaaaagtgaagacacgttgagacaggtatctcgacctgccaagtataaagctaaagctgagttc

SEQ ID NO: 11531 - DNA, 1440 bp, Homo sapiens
  source 1..1440: mol_type = unassigned DNA
gagtagggctgattggagccattgtacagtgtcgggaacataccaggacactgagaatagtgtcatgtcataaggacccagagcagatggaccctgctgtgatgcacaaagggatgaaatgggattttgttggcaccaagacctgattgctttgccagttaccctcacccctggctcacaaggaaagtgtatggaggagattctcgaggaaccacatgagttttaatatcataagcttctgccctgaattgaaaggagctgggctgcttggatcagaggttccatggtctgaactactccactctggtgaaggtttcttccccaaagccactcctcaagctgacttatattgtacctgagttgcatgcctgtgctccaagagcagacgtccttccgcaggagcaggtcattaagagtcactgcgttgatcatgtagaagagctgtttgaatacctgcaggatgatctcagggtccaagccctggtcacacatgactgtatgaaaggcattcatctggcggatgatagcttccaggcggtatgagttatccccatctgccatgctggaggagtgcttctgggagccagtgggcttcacaccagatagaccctgaatgctgtcattttccaacatggcagaaactatcatcggctgtaacacaccctcggcaattttaaagagctgctggtagatctgaatggaaaggtcgctcagtacctgacggtattcggtgaggtcaaagttcttaaggcagtgttcgttgtgctttgctgtattctgagtcatgaagccctcatccccgctgtaccgcttcagacagtgaagaaggtggcaggtgttggataacaggaatgacgtcatctcaaagtcatcactgtgcttcttcaggactttcttaatgccgttggtggtggaggtcatcagggagtgcaccttgagatcatcgttggtttggtccgcgagccgaatgcacatgtagaggatgtaggcggagagacagggcactgtgtccaacagcatctggggcttcaagtctgtcaccaggttgaggatgaggagggcctcgccctctttgcggcactccaacatgccctggaaatccttttctttccactgaactgggacctgcctgttgaactcatggcgcttcctctcactctgggccaacgcctgggcagcttcttcatgtaaatcttcagttgcttttagagcttcctctcattcttttcctcttactttatttttcaccacagagcttcctatcaactagtatgttgaatattttgcttattaactttgtttattgtcttctccctcgattagaatattagctacttgagtacaaggatttgagcctgttacattcactgctgaattttaggctcctggaagatacccagcattcaatagagaccacacaataaatatatgtcaaataaa

SEQ ID NO: 11532 - DNA, 1091 bp, Homo sapiens
  source 1..1091: mol_type = unassigned DNA
gcacagtggtggccaccgcgactggtgctgaagtgttggcgcgtgccgggcgctccgctgggacccgggttgctggccctgagtctcagctttctcatctgtacggttgggacaagtacagtaaccctcgcccgtcaagacgggccagggctgtggcgagggtccacgccttagagcaggcaggagtagggctgattggagccattgtacagtgtcgggaacataccaggacactgagaatagtgtcatgtcataaggacccagagcagatggaccctgctgtgatgcacaaagaaatcaatggagcctattcttccaaataatccttaaatattacttatctcaactgagattttggtgaaaatttagctttagagcttttattgacctgccaatgacctgaagttaagattattcttttctactgaatgaagacaaactaccttataaaaattaacccagaaggctgtagagggatgaaatgggattttgttggcaccaagacctgattgctttgccagttaccctcacccctggctcacaaggaaagtgtatggaggagattctcgaggaaccacatgagttttaatatcataagcttctgccctgaattgaaagatagcagcattttaatcatctcttccattaaaccaagattacacaaaagcgtttgaggacactgaggactgggacttctaattttgcttcagaaaccagtactcaaaatgtctggtttggaggagctgggctgcttggatcagaggttccatggtctgaactactccactctggtgaaggtttcttccccaaagccactcctcaagctgacttatattgtacctgagttgcatgcctgtgctccaagagcagacgtccttccgcaggagcaggtcattaagagtcactgcgttgatcatgtagaagagctgtttgaatacctgcaggatgatctcagggtccaagccctggtcacacatgactgtatgaaaggcattcatctggcggatgatagcttccaggcggtatgagttatccccatctgccatgctggaggagtgcttctgggagccagtgggcttcacaccagatag

SEQ ID NO: 11533 - DNA, 1602 bp, Homo sapiens
  source 1..1602: mol_type = unassigned DNA
agtgaggtcggcgcccgccagtaacaaacatggctccctgaagccgctcaggctcaagagcaacatggaggtctgcacttaatcgctcctctccgggggcggccataccgaggaggcgtctcttccgtgcaggcaggctctcctggggacctcagagattctctccagcggcagcggaaaacggacaatgggtggattcgggtccagattctggtaggagggagtttgggatcgagatctggaaaaaagcactagactggaagaggacgcgatggagtcggagccgctggcggggacaaaaaccagaggccggggaaggcgccggtgggaggcaaggcacggatggactttacctgcgcacgcgtcgcagccatctccgcgcacagtggtggccaccgcgactggtgctgaagtgttggcgcgtgccgggcgctccgctgggacccgggttgctggccctgagtctcagctttctcatctgtacggttgggacaagtacagtaaccctcgcccgtcaagacgggccagggctgtggcgagggtccacgccttagagcaggtacctatcttgtgcagggccctgagatggggtctgactcagttcctgcggggaacttcaccagtgacccagtcagtgcccttcagttaaagaccaccaggagcacacttgcaggagtagggctgattggagccattgtacagtgtcgggaacataccaggacactgagaatagtgtcatgtcataaggacccagagcagatggaccctgctgtgatgcacaaagaggaccacgcaagatatgataaagatctacatcactgaattttggttccatttttgtatctcagcttccaggaaataaaaaagaattctaacattcatactttcagtattttatgtgagaggttttgttgtcaaaatcaagtctgagagcaatgtttgttggggcctttaattggagtcaccaagcgataaaggggacattgtcctcaacaataaccctataataaacacgttttggacaataaatatatgacaatttcttaaaagcaatttcttgggcaatcaagacagtatggcttgagtatggagttatacgatggtttggattaatccagtattaaatctttggttattacagaaatcaatggagcctattcttccaaataatccttaaatattacttatctcaactgagattttggtgaaaatttagctttagagcttttattgacctgccaatgacctgaagttaagattattcttttctactgaatgaagacaaactaccttataaaaattaacccagaaggctgtagagggatgaaatgggattttgttggcaccaagacctgattgctttgccagttaccctcacccctggctcacaaggaaagtgtatggaggagattctcgaggaaccacatgagttttaatatcataagcttctgccctgaattgaaagcctacatcatcctgtgcatttcacaaaatcctaatgaaaactacacgaagctcaaagtatagataaacatatcagtgttgacaaccgtgaaaccacgctatccaaaggctacgagctctgaggaattcctgttagct

SEQ ID NO: 11534 - DNA, 1031 bp, Homo sapiens
  source 1..1031: mol_type = unassigned DNA
aaaaaaaaaaccttaaatgcccatcgctaagtgaaagaagccgatctgaaaagactacatactgttatcagccttttgccaagctgaacacaaggggatgaaaagaaaatctgggctcgaatgtgcaatttcatattttctgttaaggcaatttacaacatatcataaagctgcattaataaacagatgttccacagtctgcagaatataaaataaatgtcttgaataagctacgaagaccaaggcacttttcggagcagatttttttgtcttaaagttttatctcatgcaaacactgcgtataacacaaacttatataatcaatgcttttagcaaaatgtcatagtagaaccaaggcccagttgttagctgaaatctatataaatataggcaggagtagggctgattggagccattgtacagtgtcgggaacataccaggacactgagaatagtgtcatgtcataaggacccagagcagatggaccctgctgtgatgcacaaagaggaccacgcaagatatgataaagatctacatcactgaattttggttccatttttgtatctcagcttccaggaaataaaaaagaattctaacattcatactttcagtattttatgtgagaggttttgttgtcaaaatcaagtctgagagcaatgtttgttggggcctttaattggagtcaccaagcgataaaggggacattgtcctcaacaataaccctataataaacacgttttggacaataaatatatgacaatttcttaaaagcaatttcttgggcaatcaagacagtatggcttgagtatggagttatacgatggtttggattaatccagtattaaatctttggttattacagaaatcaatggagcctattcttccaaataatccttaaatattacttatctcaactgagattttggtgaaaatttagctttagagcttttattgacctgccaatgacctgaagttaagattattcttttctactgaatgaagacaaactaccttataaaaattaacccaga

SEQ ID NO: 11535 - DNA, 459 bp, Homo sapiens
  source 1..459: mol_type = unassigned DNA
cggggaaggcgccggtgggaggcaaggcacggatggactttacctgcgcacgcgtcgcagccatctccgcgcacagtggtggccaccgcgactggtgctgaagtgttggcgcgtgccgggcgctccgctgggacccgggttgctggccctgagtctcagctttctcatctgtacggttgggacaagtacagtaaccctcgcccgtcaagacgggccagggctgtggcgagggtccacgccttagagcaggcaggagtagggctgattggagccattgtacagtgtcgggaacataccaggacactgagaatagtgtcatgtcataaggacccagagcagatggaccctgctgtgatgcacaaagaggaccacgcaagatatgataaagatctacatcactgaattttggttccatttttgtatctcagcttccaggaaataaaaaagaattctaacatt

SEQ ID NO: 11536 - DNA, 716 bp, Homo sapiens
  source 1..716: mol_type = unassigned DNA
ctaagttcaattaccagctgccctttatcattgaacttaatgctttcttctcatagtagaattaagaggaaagtaaaatattttttgtacctatatctttattatatttagacaaatcacagagtgagagagtaggggtttcaagaacaataggagagagacagggaagagagaaagaactgcttgtggaaatacagaatatcccacattttcaatgtggaaagtgtatgagggtctgaaagaaaatactcagttttttttgtcctgtaagaggcagcattgacaaatgtgtaccagagtttgggtacatttgagccagttcttcagaatcgtggggtgggaaatagaacaaaattatttacacctaattctaggcagataagtgtgcttcaaggaaaggcaagggcctggctagattctagatgtttttaaactggaggccagagacagctttagggagtctatatacaggcacaaatttatttcttttatattcttcttgctctttgaaaacggtctttatgcaaatacacactatataaccaaagtttctctttgttccaggcaggagtagggctgattggagccattgtacagtgtcgggaacataccaggacactgagaatagtgtcatgtcataaggacccagagcagatggaccctgctgtgatgcacaaagaggaccacgcaagatatgataaagatctacatcactg

SEQ ID NO: 11537 - DNA, 477 bp, Homo sapiens
  source 1..477: mol_type = unassigned DNA
ggaaatacaacaaaacgcctctcccgctcctttagcaaaacatgtgtcagagcaacgcaagatttgattgggactgctttacttcgttaacaattacatctgttcgtgacatttggtattcctaatatgcccacttggaggaaattgccagcttaggccaaccagggtgaaatgcatgcgcttataaactcataagcccaataataattttcagaaggaggcactcattcacttcggcttataaacttgcaaatctgtagattcattagtctatcacttacatggaaagacaaaatttatatttaattgttgagacttgacttcaaaattttcaagaatatcaacatttgtttttgttgtgcacctctctgtcaaaagtatcagccttttgccaagctgaacacaaggggatgaaaagaaaatctgggctcgaatgtgcaatttcatattttctgttaaggcaatttacaacatatc

SEQ ID NO: 11538 - DNA, 1215 bp, Homo sapiens
  source 1..1215: mol_type = unassigned DNA
tcactcactcacacctcccgcagctcacctcctccccaccccagcatggccgcgtccaccatgtccgtctgctccagcgcttgctccgactcctggcaggtggatgcctgcccagagagctgctgtgagccccactgctgcgccctcagctgctgcgccccggccccctgcctgaccctggtctgcaccccagtgagccgtgtgtccagcccctgctgccaggcagcctgtgagcccagcccctgccaatcaggctgcaccagctcctgcacgccctcgtgctgccagcagtctagctgccagccggcttgctgcacctcctccccctgccagcaggcctgctgcgtgcccgtctgctgcaagcctgtgtgctgcctgcccacctgctctaaggattcctcttcatgctgccagcagtctagctgccagccaacttgctgtgcctcttcctccagccagcagtcctgctgtgtgcctgtttgctgcaagcctgtgtgctatgtgcccacctgctctgaggattcctcttcatgctgccagcagtctagctgccatccagcttgctgcacctcctccccctgccagcaggcctgctgcgtgcccgtccgttgcaagcctgtctgctgcaagcccatctgctgtgtgcccgtctgctctggggcttccacttcatgctgccagcagtctagctgccagccggcttgctgcaccacctcctgctgcagaccctcctcctccgtgtccctcctctgccgccctgtatgccggcccgcctgctgtatgcctgtctcctcctgctgtgcccctgcctcctcctgccaggccagctgctgccgcccggcctcctgcgtgtccctcctctgccgccccgcgtgctcccgcccggcctgctgaggcctctgctcaggccaggagtccagctgctgatgggcacccgccctgggccagctgggctcagttcctgacctgggttaggtggcttcccccacctaggacgggtccccgtgtctcccctgtgctgaggtgaccccccctccttgctcccaggagcctccatccttgcagctccccagctcttgccttccagcaggtgcccacctgcctgctaggtcccctgtcctccctcccagcttctctgctctgggtcacttggcctcgacttgaacctctcagcacctcctcctgctccccaataaactctccttggtcacctga

SEQ ID NO: 11539 - DNA, 1100 bp, Homo sapiens
  source 1..1100: mol_type = unassigned DNA
cactcactcacacactcactcactcacacacctcccccagctcaccgcctccccactccagcatggccgcctccaccatgtccatctgctccagcgcctgcactgactcttggcgggtagtcgactgcccagagagctgctgcgagccctgctgctgtgccccagcccccagcttgaccctggtctgcaccccagtgagctgtgtgtccagcccctgctgccagacggcctgtgagcccagcgcctgccaatcaggctacaccagctcctgcacaaccccatgctaccagcagtctagctgccagccggattgctgcacctcctccccctgccagcaggcctgctgtgtgcctgtctgctgtgtgcccgtctgctgcgtgcccgtctgtaacaagcctgtgtgcttcgtgcctacctgctccgagtcttccccttcatgctgccagcagtctagctgccagccaacttgctgcacctcctccccatgccagcaggcctgctgtgtgcctgtctgctctaagtccgtctgctatgtgcctgtgtgctctggggcttccacttcatgctgccagcagtctagctgccagcctgcttgctgcaccgcctcctgctgcagaccctcctcctccgtgtccctcctctgccaccctgtgtgcaagtccacctgctgcgtgcccgtcccctcctgcggtgcctctgcctcctcctgccagcccagctgctgccgcacggcctcctgtgtttccctcctctgccgccccgtgtgctcccgccctgcctgctacagcctctgctctggccagaagtccagctgctgacagccctggatgtgatccggagtcccttcccaccaggggctgacctcccagctgccccagcaagctctgccctctctggctttgacaccctcagaaggtggggcaggctctttgtcttggggaccaggatgctcccccagtccttcccagatgatggctgcctgtgggaccccagctactcccccagacccaagttctgcagaactaacccccagcaggcctggttccaccctgggcagcaccccctctagttctaataaagccgcctctgtctcacaccaa

SEQ ID NO: 11540 - DNA, 1237 bp, Homo sapiens
  source 1..1237: mol_type = unassigned DNA
acactcacttacacctcccccagctcacctcctccccaccccagcatggccgcgtccaccatgtctgtctgctccagcgcttactccgactcctggcaggtggacgactgcccagagagctgctgtgagcccccctgcagcgcccccagctgctgcgccccggccccctccctgagcctggtctgcaccccagtgagctgtgtgtccagcccctgctgccaggcggcctgtgagcccagcgcctgccaatcaggctgcaccagctcctgcacgccgtcatgctgccagcagtctagctgccagccggcttgctgcacctcctccccctgccagcaggcctgctgtgtgcctgtctgctgcaagactgtctgctgcaagcctgtgtgctgtgtgcctgtctgctgtggggctgcttcttcgtgctgccggcagtctagctgccagccagcttgctgtgcctcttcctcctgccagccggcctgctgtgtgcccgtctgctgcaagcctgtgtgctgtgtgtccacctgctctgaggattcctcttcatgctgccagcagtctagctgccagccagcttgctgcacctcctcctcctaccagcaggcctgctgcgtgcctgtctgctgcaagactgtctactgcaagcccatctgctgtgtgcctgtctgctctagggcttcctcttcacgctgccagcagcctagctgccagccagcttgctgcaccacctcctgctgcagaccctcctcctctgtgtccctcctctgccaccccgtgtgcaggtccacctgctgtgtgcccgtctcctcctgctgtgcccccacctcctcctgccagtccagctgctgccgcccggcctcctgcgtgtccctcctctgccgccccgcaagctcccgcctggcctgctacagcctctgctcaggcaagaagtccagctgctgagtgctcaatccttgtctcctgctgactgtgtctttgctgccaagcaggattctccagtctcaggagcccctggagtcctcagaatccaccagctccatcagtagccacagagctgctgcctgaaggggattttgagcgcgtcacactttcctccccactgtctgggaagagacaacccacaaatccctcagcaggtggactgtggctttctggagcccccttctccaaatgtgttgcttatacccaatgtgacaaagaagaactgctctaatcaataaattcttgagtcaggaaa

SEQ ID NO: 11541 - DNA, 873 bp, Homo sapiens
  source 1..873: mol_type = unassigned DNA
agctcaacccccagcacggctgcatccaccatgtccgtctgctccagcgacctgagctatggcagccgcgtctgccttcctggttcctgtgactcttgctccgactcctggcaggtggacgactgcccagagagctgctgtgagcccccctgctgcgccccggccccctgcctgagcctggtctgcaccccagtgagccgtgtatccagcccctgctgccgagtgacctgtgagcccagcccctgccaatcaggctgcaccagctcctgcacgccctcgtgctgccagcagtctagctgccagccggcttgctgcacctcctccccctgccagcaggcctgctgcgtgcccgtctgctgcaagactgtctgctgcaagcctgtgtgctgtatgcccgtctgctgtgggccttcttcttcatgctgccagcagtctagctgccagccagcttgctgcatctcctccccgtgtcaacagtcctgctgtgtgcccgtctgctgcaagcccatctgctgtgtgcctgtctgctctggggcctcctctctgtgctgccagcagtctagctgccagccagcttgctgcaccacctcctgctgcagaccctcctcctccgtgtccctcctctgccgccctgtgtgcagacccgcccgccgcgtgcccgtcccctcctgctgtgtccccacctcctcctgccagccaagctgcggccgcctggcctcctgcgggtccctcctctgccgccccacatgttcccgcctggcctgctgaggcctctgctcaggccagaagtccagctgctgccaggcatgtcccccagggccactgggcactatgagtcccccacctctcccactactggcccctcggctgctc

SEQ ID NO: 11542 - DNA, 282 bp, Homo sapiens
  source 1..282: mol_type = unassigned DNA
tgcaccagctcctgcacgccctcgtgctgccagcagtctagctgccagccggcttgctgcacctcctccccctgccagcaggcctgctgcgtgcccgtctgctgcaagactgtctgctgcaagccttctagctgccagccagcttgctgcatctcctccccgtgtcaacagtcctgctgtgtgcccgtctgctgcaagcccatctgctgtgtgcctccagcttgctgcaccacctcctgctgcagaccctcctcctccgtgtccctcctctgccgccctgtg

SEQ ID NO: 11543 - DNA, 1149 bp, Homo sapiens
  source 1..1149: mol_type = unassigned DNA
tcactcactcacacacctcccccagctcacctcctccccactccagcatggccgcctccaccatgtccatctgctccagcgcctgcaccaactcctggcaggtggacgactgcccagagagctgctgtgagctcccctgcggcacccccagctgctgtgccccagccccctgcctgaccctggtctgcaccccagtgagctgtgtgtccagcccctgctgccaggcggcctgtgagcccagcgcctgccaatcaggctgcaccagctcctgcacgccctcgtgctgccagcagtctagctgccagccggcttgctgcacctcctccccctgccagcaggcctgctgcgtgcccgtctgctgcaagcctgtgtgctgtgtgcccgtctgctgtggggcttcttcatgctgccagcagtctagctgccagccagcttgctgtgcctcttcctcctgccagcagtcctgccgtgtgcctgtctgctgcaaagctgtgtgctgcgtgcccacctgctctgagtcatcctcttcatgctgccagcagtctagctgccagccggcttgctgcacctcctccccgtgtcagcagtcctgctgtgtgtccgtctgctgcaagcctgtctgctgcaagtccatctgctgtgtacctgtttgctctggggcttcctctccgtgctgccagcagtctagctgccagccagcttgctgcacctcctcctgctgcagaccctcctcctctgtgtccctcctctgccgccccgtgtgctcccgcccagcctcctgcagcttttcctcaggccaaaagtctagctgctgatggccatgtcccccagggccagccgggctcaggccccacctccctgccagtccttggacctcccagcccacccagcctcagcacagctcagcacagaaggagcagccccagccacagccgcccagccccggggtctcagatgctcactggctcctctctgacctcccgccgggcgggcgagccctggcttctcctcacggtgcttcctggctgcagaccacaaccctccgctggtcgctggtcgctggttggggatgggccctcctgacctgggtctcacccccaggagcgtcaccctctgcctctgagcaccaataaagcgtctgcggcccca

SEQ ID NO: 11544 - DNA, 366 bp, Homo sapiens
  source 1..366: mol_type = unassigned DNA
tcactcactcacacacctcccccagctcacctcctccccactccagcatggccgcctccaccatgtccatctgctccagcgcctgcaccaactcctggcaggtggacgactgcccagagagctgctggccagccgggctcaggccccacctccctgccagtccttggacctcccagcccacccagcctcagcacagctcagcacagaaggagcagccccagccacagccgcccagccccggggtctcagatgctcactggctcctctctgacctcccgccgggcgggcgagccctggcttctcctcacggtgcttcctggctgcagaccacaaccctccgctggtcgctggtcgctggttggggat

SEQ ID NO: 11545 - DNA, 971 bp, Homo sapiens
  source 1..971: mol_type = unassigned DNA
tcactcactcacgtctcccccagctcacctcctccccaccccagcatggccacgtctaccatgtccgtctgctccagcgcttactctgactcctggcaggtggacgcctgcccagagagctgctgtgagcccccctgctgcgccaccagctgctgcgccccggccccctgcctgaccctggtctgcaccccagtgagctgtgtgtccagcccctgctgccaggcggcctgtgagcccagcccctgccagtcaggctgcaccagctcctgcacgccctcgtgctgccagcagtctagctgccagccagcttgctgcacatcctccccctgccagcaggcctgctgcgtgcctgtctgctgcaagccagtctgctgtgtgcccgtctgctgcaagcctgtctgctgcaagcccatctgctgtgtgcccgtctgctctggggcttcctcttcatgctgccagcagtctagccgccagccggcttgctgcaccacctcctgctgcagaccctcctcctccgtgtccctcctctgccgccccgtgtgcaggtccacctgctgtgtgcccatcccctcctgctgtgcccctgcctccacctgccagcccagctgctgccgcccggcctcctgcgtgtccctcctctgccgccccacgtgctcccgcctctcttccgcgtgctgcggcctctcctcaggccagaagtccagctgctgacgggcaggtcccgtttctccagagttgttccagggccatctctgacttccgaaaatccttgcagccctgagccctgtctgagtctcctctgcccatagccactgcacctccagccagcaatgctgagctttcatgccgattccctccaggcatgcatctctcccacaccctcatctccatgctggccagccggtggtcactgtgtcctgccccatgtgagtgatcagtctgtcaacaaataaagtcaccaatgtgccctc

SEQ ID NO: 11546 - DNA, 1643 bp, Homo sapiens
  source 1..1643: mol_type = unassigned DNA
agctcaacccccagcacagcagcatccaccatgtccgtctgctccagcgacctgagctacagcagccgcgtctgccttcctggttcctgtgactcttgctccgactcctggcaggtggacgactgcccagagagctgctgcgagcccccctgctgcgcccccagctgctgcgccccggccccctgcctgagcctggtctgcaccccagtgagccgtgtgtccagcccctgctgcccagtgacctgtgagcccagcccctgccaatcaggctgcaccagctcctgcacgccctcgtgctgccagcagtctagctgccagctggcttgctgtgcctcctccccctgccagcaggcctgctgcgtgcccgtctgctgcaagactgtctgctgcaagcctgtgtgctgtgtgcccgtctgctgtggggattcttcatgctgccagcagtctagctgccagtcagcttgctgcacctcctccccctgccagcaggcctgctgtgtgcccatctgctgcaagcctgtctgctctgggatttcctcttcgtgctgccagcagtctagctgtgtgagctgtgtgtccagcccctgctgccaggcggtctgtgagcccagcccctgccaatcaggctgcatcagctcctgcacgccctcgtgctgccagcagtctagctgccagccggcttgctgcacctcctcctcctgccagcaggcctgctgcgtgcccgtctgctgcaagactgtctgctgcaagcctgtgtgctctgaggattcctcttcatgctgccagcagtctagctgccagccggcttgctgcacctcctctccctgccagcaggcttgctgtgtgcctgtctgctgcaagcctgtgtgctgcaagcctgtctgctctgtgcccatctgctctggggcttcctctctgtgctgccagcagtctagctgccagccagcttgctgcacctcctcccaaagccagcagggctgctgcgtgcccgtctgctgcaagcctgtgagctgtgtgcctgtttgctctggggcttcctcttcatgctgccagcaatctagctgccagccagcttgctgcaccacctcctgctgcagaccctcctcctccgtgtccctcctctgccgccccgtgtgcaggcccgcctgctgcgtgcccgtcccttcctgctgtgctcccacctcctcctgccaacccagctgctgccgcccagcctcctgcgtgtccctcctctgacgccccgtgtgctcccgcccagcctgctgaggcctccgctcaggtcagaagcccagctgctgatggacacgccccccagtgccagccaggctcaggtcccacctgaaagctgatagtcgcgtcctgaattgctcctgcactttgaccatttcctggtgtctgctgttgagctggacaatggaagaactgaaagtctatactcaatgctgcagccctcttgcggggggaggggggcgcttctagaaagttcccatggcagtggcctcccctccatatctcccacctctcatgagggtcagttcagccttgacccgtgaggtctctgtcctcctggctcagagccgcagagccttctttggacgccctcaagctgaccaataaaggccctgagactgcaatggcgctga

SEQ ID NO: 11547 - DNA, 1244 bp, Homo sapiens
  source 1..1244: mol_type = unassigned DNA
cccccagctcaacccccagcacagcagcatccaccatgtccgtctgctccagcgacctgagctacagcagccgcgtctgccttcctggttcctgtgactcttgctccgactcctggcaggtggacgactgcccagagagctgctgcgagcccccctgctgcgcccccagctgctgcgccccggccccctgcctgagcctggtctgcaccccagtgagccgtgtgtccagcccctgctgcccagtgacctgtgagcccagcccctgccaatcaggctgcaccagctcctgcacgccctcgtgctgccagcagtctagctgccagctggcttgctgtgcctcctccccctgccagcaggcctgctgcgtgcccgtctgctgcaagactgtctgctgcaagcctgtgtgctgtgtgcccgtctgctgtggggattcttcatgctgccagcagtctagctgccagtcagcttgctgcacctcctccccctgccagcaggcctgctgtgtgcccatctgctgcaagcctgtctgctctgggatttcctcttcgtgctgccagcagtctagctgtgtgagctgtgtgtccagcccctgctgccaggcggtctgtgagcccagcccctgccaatcaggctgcatcagctcctgcacgccctcgtgctgccagcagtctagctgccagccggcttgctgcacctcctcctcctgccagcaggcctgctgcgtgcccgtctgctgcctgcctgtgtgctgtgcgcccacctgctctgaggattcctattcatgctgccaacagtctagctgccagccagcttgctgcacctcctccccctgccagcaggcctgctgtgtgcctgtctgctctggggcttccacttcatgctgccagcagtctagctgccagcctgcttgctgcaccgcctcctgctgcagaccctcctcctccgtgtccctcctctgccaccctgtgtgcaagtccacctgctgcgtgcccgtcccctcctgcggtgcctctgcctcctcctgccagcccagctgctgccgcacggcctcctgtgtttccctcctctgccgccccgtgtgctcccgccctgcctgctacagcctctgctctggccagaagtccagctgctgacagccctggatgtgatccggagtcccttcccaccaggggctgacctcccagctgccccagcaagctctgccctctctggctttgacaccctcagaaggtggggcaggctct

SEQ ID NO: 11548 - DNA, 597 bp, Homo sapiens
  source 1..597: mol_type = unassigned DNA
gcagcatccaccatgtccgtctgctccagctcttgctccgactcctggcaggtggacgactgcccagagagctgctgcgagcccccctgctgcgcccccagctgctgcgccccggccccctgcctgagcctggtctgcaccccagtgagccgtgtgtccagcccctgctgcccagtgacctgtgagcccagcccctgccaatcaggctgcaccagctcctgcacgccctcgtgctgccagcagtctagctgccagccggcttgctgcacctcctctccctgccagcaggcttgctgtgtgcctgtctgctgcaagcctgtgtgctgcaagcctgtctgctgctgcgtgcccgtctgctgcaagcctgtgagctgtgtgcctgtttgctctggggcttcctcttcatgctgccagcaatctagctgccagccagcttgctgcaccacctcctgctgcagaccctcctcctccgtgtccctcctctgccgccccgtgtgcaggcccgcctgctgcgtgcccgtcccttcctgctgtgctcccacctcctcctgccaacccagctgctgccgcccagcctcctgcgtgtccctcctctga

SEQ ID NO: 11549 - DNA, 1150 bp, Homo sapiens
  source 1..1150: mol_type = unassigned DNA
ccagctcacgtcttccccaccccagcatggccgcgtgcaccatgtccgtctgctccagcgcttgctctgactcctggcgagtggacgactgcccagagagctgctgtgagcccccctgcggcaccgccccctgcctgaccctggtctgcaccccagtgagctgtgtgtccagcccctgctgccaggcggcctgtgagcccagcccctgccaatcaggctgcaccagctcctgcacgccctcgtgctgccagccggcttgctgcgcctcctccccctgccagcaggcctgctgcgtgcccgtctgctgcaagcctgtgtgctgcctgcccacctgctctaaggattcctcttcatgctgccagcagtctagctgccagccaacttgctgtgcctcttcctcctgccagcagtcctgctgtgtgcctgtctgctgcaagcccgtgtgctgtgtgcccacctgttctgaggattcctcttcatgctgccagcattctagctgccagccgacttgctgcacctcctccccctgccagcagtcctgctacgtgcctgtctgttgcaagcctgtctgctgcaaacccatctgctgtgtgcccgtctgctctggggcttccacttcatgctgccagcagtctagctgtcagccggcttgctgcaccacctcctgctgcagaccctcctcctccgtgtccctcctctgccgccccatatgcaggcccgcctgctgcctgcccatctcctcctgctgtgcccctgcctcctcctaccaggccagctgctgccgcccggcctcctgcgtgtccctcctctgccgccccgcgtgctcccccctggcctgctgaggcctctgctcaggccaggagtccagttgctgatgtgcacatcccccagggccaactggtcctgactcgggttaggaggttgcccccgcttgggacggggcccccatgtgctgaggtgacccccccctccatactcccaggaatctccatcctcgaagctccccagctcctgcctcccagcaggggcccacctgcctgttgggtcccctgtcctccctcccagcttctctgccccatgtcacttggcctcgacttgaacctgtcagcacctcctcctgctccccaataaactccccttggtcgcctga

SEQ ID NO: 11550 - DNA, 1238 bp, Homo sapiens
  source 1..1238: mol_type = unassigned DNA
ctccaccagttcaaccccagcatggccgcgtccaccatgtccgtctgctccagcgacctgagctacggcagccgcgtctgccttcctggttcctgtgactcttgctccgactcctggcaggtggacgactgcccagagagctgctgtgagcccccctgctgcgccccggccccctgcctgagcctggtctgcaccccagtgagccgtgtgtccagcccctgctgcccagtgacctgtgagcccagcccctgccaatcaggctgcaccagctcctgcacgccctcgtgctgccagcagtctagctgccagctggcttgctgtgcctcctccccctgccagcaggcctgctgcgtgcccgtctgctgcaagactgtctgctgcaagcctgtgtgctgtgtgtccgtctgctgtggggattcttcatgctgccagcagtctagctgccagtcagcttgctgcacctcctccccctgccagcaggcctgctgtgtgcccgtctgctgcaagcctgtctgctctgggatttcctcttcgtgctgccagcagtctagctgtgtgagctgtgtgtccagcccctgctgccaggcggtctgtgagcccagcccctgccaatcaggctgcaccagctcctgcacaccctcatgctgccagcagtctagctgccagccaacttgctgcacctcctccccctgccagcaggcctgctgcgtgcccgtctgctgcgtgcctgtgtgctgtgtgcccacctgctctgaggattcctcttcatgctgccagcagtctagctgccagccagcttgctgcacctcctccccctgccagcacgcctgctgtgtgcccgtctgctctggggcttccacatcatgctgccagcagtctagctgccagccggcttgctgcaccgcctcctgctgcagatcctcctcctccgtgtccctcctctgccaccctgtgtgcaagtccacctgctgcgtgcccgtcccctcctgtggtgcctctgcctcctcctgccagcccagctgctgccgcacggcctcctgtgtttccctcctctgccgccccatgtgctcccgccctgcctgctacagcctctgctctggccagaagtccagctgctgacagccctggatgtgatccggagtcccttcccaccaggggctgacctcccagctgccccagcaagctctgccctctctggctttgacaccctcagaagatggggcaggctctttgtctta

SEQ ID NO: 11551 - DNA, 1578 bp, Homo sapiens
  source 1..1578: mol_type = unassigned DNA
catctcctccagttcaatccccagcatggctgcgtccactatgtctgtctgctccagcgacctgagctacggcagccgcgtctgccttcctggttcctgtgactcttgctccgactcctggcaggtggacgactgcccagagagctgctgcgagcccccctgctgcgccccggccccctgcctgagcctggtctgcaccccagtgagctatgtgtccagcccctgctgccgagtgacctgtgagcccagcccctgccaatcaggctgcaccagctcctgcacgccctcgtgctgccagcagtctagctgccagctggcttgctgtgcctcctccccctgccagcaggcctgctgcgtgcccgtctgctgcaagactgtctgctgcaagcctgtgtactgtgtgcctgtctgcagtggggattcttcatgctgccagcagtctagctgccagtcagcttgctgcacctcctccccctgccagcaggcctgctgtgtgcccatctgctgcaagcctgtctgctctgggatttcctcttcgtgctgccagcagtctagctgtgtgagctgtgtgtccagtccctgctgccaggcggtctgtgagcccagcccctgccaatcaggctgcatcagctcctgcacgccctcgtgctgccagcagtctagctgcaagccggcttgctgcacctcctccccttgccagcaggcctgctgtgtgcctgtctgctgcaagcccgtctgctgtgtgcccacctgctctgatgattccggttcatgctgccagccagcttgctgcacctcctcccaaagccagcagggctgctgcgtgcccgtctgctgtaagcctgtgtgctgtgtgcccgtctgctctggggcttccacttcatgctgccagcagtctagctgccagccggcttgctgcaccacctcctgctgcagaccctcctcctccgtgtccctcctctgccgccccgtgtgcaggcccgcctgctgcgtgcccgtcccctcctgctgcgcccccacctcctcctgccaggccagctgctgccgcccagcctcctgtgtgtctctcctttgccgccccgcatgctcccgcccggcctgctgtggccccacctcaacccagaagtccagctgctgagtgatctccttaagatcatccaaagcctgagtgctcactgccacctgcacccctggattctttacccttgacggctctccacatcccgctcctaagccctgcagtggacgtcagtggtcagctggccatccagtgtgcgcttctcctcctagaagcagctcagctgtttctccaagtcttgactttcccccaattacccagccctgcttccccagcaacaggtgggcagtgaccccagcaaggccagcgggtgctcccaggccatagcccggtgtggggagaaatgagggtagacaggtaccaactgggtttctcgtcactgtcccagctcagtggcgagccctgctcctcccctgctgtgggcctgggcctctttctctgtcttccctgaccacgggagcaggtcagacccttctaataaactcctttcctaaaaagta

SEQ ID NO: 11552 - DNA, 876 bp, Homo sapiens
  source 1..876: mol_type = unassigned DNA
accacccagtccagcacccaccatggctgacgcctgctgcaccaggacgtatgtgattgctgcatccaccatgtctgtctgctccagtgacgtgggccatgtcagccgagtctcctcccccagcacctgcactggctcctcctggcaggtggacaattgccaggaaagctgctgcgagccccgctcctgtgcctccagctgctgtacccctagctgctgtgccccagccccctgcctggccctggtctgtgccccagtgagctgtgagcccagcccctgccaatcaggctgcaccgactcctgcacaccttcatgctgccagcagtctagctgccagccggcttgctgcacctcctccccctgccaacaggcctgctgtgtgcctgtgtgctgcaagtccaactgctgcaagcccgtgtgctgcgtgtccatctgctctggagcttcctccccatgctgccagcagtctagctgccagtcagcttgctgcaccttctccccatgccaacaggcctgctgtgtgcccatctgctgcaagcccatctgctgtgtgcctgtctgctctggggcttcctctctgtgctgccagaagtctagctgccagccggcttgctgcaccacctcctgctgcagaccctcctcctccgtgtccctcctctgccgccctgtgtgccggcctgcctgctgtgtgcctgtcccctcctgttgtgtccctgcctcctcctgccagcccagctgctgccacccggcctcctgcctgtccttcctctgccgccccgcgtgctcccgcctggcctgctgaggcctctgctcaggccaggagtccagctgctgatgggcacgtcccccagggccagccggctccggtcctgtcct

SEQ ID NO: 11553 - DNA, 1171 bp, Homo sapiens
  source 1..1171: mol_type = unassigned DNA
tcacacactcacttacacctcccccagctcacctcctccccaccccagcatggccgcgtccaccatgtccatccgctccagcgcttactccgactcctggcaggtggacgactgcccagagagctgctgtgagcccccctgctgcgccaccagctgctgcgccccggccccctgcctgaccctggtctgcaccccagtgagccgtgtatccagcccctgctgccaggtgacctgtgagcccagcccctgccaatcaggctgcaccagctcctgcacgccctcgtgctgccagcagtctagctgccagccggcttactgcacctcctccccctgccagcaggcctgctgcgtgcccgtctgctgcaagcctgtgtgctgcgtgcccgtctgctgtggggcttcttcgtgctgccaacagtctagctaccagccagcttgctgtgcctcttcctcctgccagccggcctgctgtgtgcccgtctgctgcaaacctgtgtgctgtgcgcccacctgctctgaggattcctattcatgctgccaacagtctagctgccagccagcttgctgcacttcctccccctgccagcagtcctactgtgtgcctgtctgctgtaagcctgtctgctgcaaacccatctgctgtgtgcctgtctgctctggggcttcctctttgtgctgccagcagtctggctgccagccggcttgctgcaccacctcctgctgcagaccctcctcctctgtgtccctcctctgccgccctgtgtgcaggcccgcctgctgcgtgcccgtctcctcctgctgtgcccccacctcctcccgccagcccagctattgccgccaggcctcctgtgtgtcccttctctgccgccctgtgtgctcccgcccggcctgctacagcttctcctcaggccagaagtccagctgctgacggtcatgtcccccagggccagccgggctcaggccccacctccctgccagtccttggacctcccagcccacccagcctcagcacagctcaacacagaaggagcagccccagccacagccgcccagccccggggtctcagatgctcactggctcctccctgacctcccccccgggcaggcgagccctggcttctcctcacggtgcttcctggctgcagaccacaaccctccgctggtcgctggt

SEQ ID NO: 11554 - DNA, 453 bp, Homo sapiens
  source 1..453: mol_type = unassigned DNA
tcacacactcacttacacctcccccagctcacctcctccccaccccagcatggccgcgtccaccatgtccatccgctccagcgcttactccgactcctggcaggtggacgactgcccagagagctgctgtgagcccccctgctgcgccaccagctgctgcgccccggccccctgcctgaccctggtctgcaccccagtgagccgtgtatccagcccctgctgccagggccagccgggctcaggccccacctccctgccagtccttggacctcccagcccacccagcctcagcacagctcaacacagaaggagcagccccagccacagccgcccagccccggggtctcagatgctcactggctcctccctgacctcccccccgggcaggcgagccctggcttctcctcacggtgcttcctggctgcagaccacaaccctccgctggtcgctggt

SEQ ID NO: 11555 - DNA, 615 bp, Homo sapiens
  source 1..615: mol_type = unassigned DNA
agctcacctcctccccaccccagcatggccgcgtccaccatgtccatccgctccagcgcttactccgactcctggcaggtggacgactgcccagagagctgctgtgagcccccctgctgcgccaccagctgctgcgccccggccccctgcctgaccctggtctgcaccccagtgagccgtgtatccagcccctgctgccaggtgacctgtgagcccagcccctgccaatcaggctgcaccagctcctgcacgccctcgtgctgccagcagtctagctgccagccggcttactgcacctcctccccctgccagcaggcctgctgcgtgcccgtctgctgcaagcctgtgtgctgcgtgcccgtctgctgtaagcctgtctgctgcaaacccatctgctgtgtgcctgtctgctctggggcttcctctttgtgctgccagcagtctggctgccagccggcttgctgcaccacctcctgctgcagaccctcctcctctgtgtccctcctctgccgccctgcctcctgtgtgtcccttctctgccgccctgtgtgctcccgcccggcctgctacagcttctcctcaggccagaagtccagctgctgacggtcatgtccc

SEQ ID NO: 11556 - DNA, 13912 bp, Homo sapiens
  source 1..13912: mol_type = unassigned DNA
cctccccagtcatttaggacaatttcctaagtcgaagctagagatgcgtgatgcgtttggtgacttttcctgggttcttgcttaagcggagccacaggttgtgggggcggccaggcctctggggaagagcaggtgccgcggtgccggcgcgccagcagcccgcggccaaggccacctgctcccagggccccggcacctctgcggggaggcggcaggcagaggacgcgcgcgcagtcgcgcaggagccctcaggcgagtgggggaagcatcgcaagagacgcggacctggagcgcggtcactgcgttaccgcagcgacctgggttacctaagccggcgggactgagaggccgctgcgcgtgggcaggggctcagattgcgcccgcggtgcctgtcccggcccccaccccggaacgattgcagccctgcggggctcgccgcccacaccgcgctgaggacgctgcccaagccaggcgcccgcccccgcccgcggtctcagccgctcgcagcgcgccgcccccagacgcgcgtggctgctggcgagggctgagaccgcgctcccgccggccagttcccagcagcagcgcatcctccctgctccgcgccttcgctccggacccgcgtcgtcgcagccccgcggtgatgagccccgagccggtcccgccgccgccgccgccccagtgtcctggctgcgaccgcgcggagccgatcgcccagcgcttagaggagggcgacgaggccttccgcgcgggcgactacgagatggcagccgagctctttcgctccatgctagccgggctggcgcagccggaccgcggcctgtgcctgaggctgggggacgcgctggcccgcgccggccgcctccccgaagccctgggcgcgttccgcggcgccgcgcggctcggggcgctgcggccggaggagctggaagagctggcgggcggcctggtgcgcgccgtgggcctgcgcgaccggccgctgtccgcggagaacccgggcggcgagcccgaggcgcccggcgagggagggccggccccggagccccgcgcgccccgcgacctgctcggctgcccgcgctgccggcggctgctgcataagccggtgacgctgccctgcgggctcacagtctgcaagcgctgcgtggagccagggcccgcgcggccgcaggtgcggcgcgtgaacgtggtgctgagcggcctgctggagaagtgcttcccggccgagtgccggctgcgcaggctggcaggccaggcgcggagcctgcagcgccagcagcagccggaggccgcgctgctcaggtgcgaccaggccctggagctggctcctgatgataattcattattgctgctgcgggcggagttatatttgaccatgaagaactatgagcaagctctccaagatgccagtgcagcttgtcagaatgaacctctcttgattaagggacatcaagtaaaagctcaggctctttctggattgggaagaagtaaggaagtgttaaaggaatttctctactgccttgctctgaatcctgaatgtaactctgtgaagaaagaagcacagaaggtaatgtgtgaagtgctgttttcagctacagcaaatgtgcatgaaaatttaacatcttccatccaaagcagattaaaggctcagggtcacagccacatgaatgcccaggctctgctggaagaaggtgatgcagggagctcggagaattcatctgagaaatctgatatgcttggaaataccaattcttcagttttgtattttatactgggtctacactttgaagaggataaaaaggcgttagaaagcatccttccaacagcacccagcgctggcttaaagagacagtttccggatgacgtggaggatgcacctgacctgaacgcccctggaaaaattcccaagaaagatctctcacttcaaaggagcccaaactctgagacagaagaaagtcaggggctctcgcttgatgtaactgactttgagtgtgccctctgcatgagattgctctttgaacctgtcactacgccctgtggacacacattttgcctaaaatgccttgagcgctgccttgaccacgccccacactgtcctttgtgcaaagacaaactttcggaattattggcaagcagaaactttaacataactgttctggccgaagaattaatatttcgatatttgccggatgaattgtctgataggaagagaatttatgatgaagaaatgtcagaactgtcaaatctgaccagagacgtccccatctttgtgtgtgccatggccttccccacggtcccatgtccactccacgtttttgagccccgctatcggcttatgataagaagatgcatggaaactggcaccaagcggtttggcatgtgtttatctgctgagcacgcggggctttcagagtatggatgcatgctggagattaaggacgtgagaacgtttcctgatggaagttctgttgtagacgcgattggcatcagtcggttccgagtgctaagccaccgccacagagatggctataacacagcggacattgaatatcttgaagatgaaaaggtggagggtccagagtatgaagaacttgccgctctccacgattctgtgcatcaacagtctgtttcctggttcgcgtctctccaggatcgcatgaaagaacaaattttaagtcattttggggtaatgccagacagagaacctgagcctcagagtaatcccagcggccctgcctggtcctggtggatcctggccgtgctgcccctggagcgcaaggctcagctggccatcctcggcatgacctcgctcaaagagcggctccttgccatccgacggatattagtcatcatcacgcgtaagatgaatagtcggcaagagctggctaatgccagggagagaaataattgatttttctctctgtcaaggtttctggcagcccttgtgcttttataaatgtcaggcatggacgaatagccgtccattcattgtgcttcatcaagtgcttgtggatgaggttccaaaatgggacgcttgccaaacattgagtcctcctcaaaaatgacaattctgtgtctggtgggatctgaccttgtgtgaggttagcctgaagtctgaatggagcccatagttggaaaacaacctaagaaaatctcttagaagcaggtgcttggggaatgcagttcactgacagcacaggaccctgcagatggtttacatgtggtttgggtttcacgagaaagaaggattcacttcccagtcagcatctggctctgccagatggtaaaggcgtgctttagtgtgtagacaatatgggggaaccacgtttttatctggaagtggatttcttagaacacaggctaaccaaaactacgcttaggctttgcgtgttgctgtgaagttgtctgtgaaatcgaataatcacaccattgttcagtgcaggagcccaaactagtccttacccaagaagtagtagcctctggatagaactgtgtttaatgtcctgttgtagtcccaggtgttgtaaattgcatgttgtaatcaaacgaatgtcaaaacataagaaagtataccttggatatagaaaaacctgagaacagtatcattcacttgaggatatatatatatatatttacacacaataaagtgagttaaaattgtatatgcattgggatgtcaaacataaaaccaccaagtgcaaagaatgctttgaaagtagaaccttgtctcattgatcagtggttactaagcatttaggaaacagtcatctttttctattgggatttgcattagaaattagccccatcagtaaatttcagtttactatccatttattaatatacaaaaacattaaaaaatctgccatgccatggtaatctatctattccaggaaaatagatcagaatatatgaagggaggatggccggtatgggatgtaaatattcagtaagtttttctccaacaccaacctaaaattatctttatttttttgaaagaaagttttacggtgatcagaccaggtgttatctgttaaaggacagtagtatgacttccatcctgtaatgcacgttggtgatattgattggaataactgaatctgagatactcatatgttctctctggcccaaccagctggtgcatttggttggcttcctcgtctgtaaggtggacattcttaaccagagggtcacgaccacatcacagctgcaagttttgctttgttcattgaaggtgattttttagttttaaaatatatatatctcataatatacaatgttgatggtatatcaatccatcaagcattttattagaaagactttataatattattaatttttctttagttttcagtagataaagtagtttcagtagataaagactttataatattattaatttttcttttagttttcagtctcatcatgggagttagaaaataccagcatcacttaattgtaaagagaaaatgtgaaagtattttccaatccaatgtttcaagtgcctcacttattgtgaatctcaaatatcatcttgagatggtttaatggcagtttggccaagtgatttctaagagattttattaatttatgcattaacaatagtattcaactttcttaggcattataacctaacccgatcatttgattggaataactgaatcattcattgattggaataaaataaagaaaacaaaatgcatctcacatgccagaagacctttaccagaagtggttcatgaaaatcagtatgcattgaccattctctgcctttcccttttggaaaatttttttgtaccttcatatcacagctgaatagttatcaatgccatttccatttggaagtatctaaataaccacaatgtgatcacagcttctccacgagccttcctgaagtaaagctggtatgcttgctataatacttggaacctgttgctttctcttcctcactctttaaatgtcataaggtcacacagttcttggaatcagaactattcagttatttcttcatgattctgcctggctttctgagtcttctccttcggcatgttatgtaaaagtctgaacaacaatgatgacgcagacgagagcaacatacgtttttattttttgataggtttttatttttttgataccagagggaattaactatgatcacatcgtgctctctctgttcagcatcacacgcccacatactgcagtgtgggagtagattggtacttactgagcacttagaaacatcacgcatcaggaaccgggtcagggtgacagcatcctacggtcatatcatgaaggaagcctcccttacaaacctaaaaaaaaaaaaccccagcttcagtttgctaccaattaagctaaagcagaacggtctgcttcctcctccgcctgcccccttctgcctcttttctgttggggagatgccaattctaaggatttctcagaaaataatgtaatctctcattcaatgtcaggacattccagcttaattgtactgaaagtgctccaataggcatgctctcgttacattggaatcaaagcagaaaagagtaatagcagcgtgggggagtcatttttcttcttgaggaacaatacatgctgttctgtatttttccattcatcgcccaaacctgcctgtgtctttgaaatgcaagtaagatcccaaaggcagctttctgaaagcccgtggcatttttagcttatcccatcccccgtgtgtgtcctcatcttcagaattgaaagttaggatactttttaaagtttcaaaagaaaataatttaaaatgttaaggtttatccatagaaacacaataattcttaaccaattcatgtaccaaattcaacagtattatctcatttttagggtcacaaatgtgtcctttttgcacttaaacctcctccctctctcaaaaacaaaaacaaacaaacaaacaaaaaacacaccaagactgtttaacaaattgtatctcaactcttaatatatgttaagtcttaccacaggacatttgaatcatcaaggaacagttgaagtttatggatggtagaataacaatgaactatgatattatcactttattataaactttttggaaaattggcagttgctaccatcgaaatactccattgcctgtgttacatagaatttgttataatttttaagggctttaaaaaaatacccatctgtttcttctccttcttgttttcttttgtgccccaccacttaaattacttgggtaaataccactcttcaaaatttgaatactgtctatcaaataagaagaagtgtgaaagatatgaagaagaaaggtgatagcaaattagaagaaaataaatgtgggtgatttcttttagttgaaagcacagagttttatttttccccagtataactattgagtagggtagggaggtccctgtatccccatttttattttttttgagatggggtctcactctgtcacccaggctggagtgcaatggcgcaatctcgtctcaccacaacctccgcctcctgggttcaagtgattctcttgccttggccccctgagtagctgggattacaggcacgcgccaccacacccagctaatttttgtattttttttttttagtagagatggggtttcaccatgttggtcaggctggtctcgaactcctgaccccatgatctgcccgcctcggcctcccacagtgctgggattacaggcgtgagccaccgtgcccggcccatctccccatgttttagcatagacagcagcggcattcagtggaaggagttcttccccttcaacatcgtccttcccaaaggccacattctgattctattgttcaccaaaaactaattcccagggaagcccgctctggatgggaaggatgagctgcgtgagccatcgcccacacagggagataaccgaacccctttgccagcatcaccccctctctactggggtgagacacttcattcagagcactggctctgactcccaggggaaagtctttttccctttacaactcctcacctcagcctcaccttgactttcacttctcaactgctgaattctataaaatagccttttagcagtgactcagcttttaggtgagcacagataatgaagaaattgaagtgccaccattgcactcccccaagttggggacataaactcgaatttgcacccaggtctgataaaagtaactgattgaggacgcagaaaggtggatgccattgacagcgttgactgttctcacaattcctacagaaatgaaagaaggagaggcccagcagaccacaccgggccatgaggggaagcatgggagacaggcagaagcaggagtgaggaggaacgtggctcagaccctctactgtatgttctgcaggaaagggcagggaaatagctaagactggctggtctgaataacagctcagactctaggctatacaggtggtctctagccatctggcacctagccccgggtcgttagggtgggggatattgcttcctaggttgtaagagccagatagaggaggatgggctctggattggtcactttgctcccagggtagccctttgctgtatctaagaattggctcaccctgggatgggcagtttctcctgggtcagcgaggcccctgagatgtcaaaatatcataaaatatagaaatcatgattaatacaattggtcctctgctgttttgacatactaaggtcacttttgatagcagaaacttttaaagagtagggcatacgttgccctgaagagcatagaaaacattttattctgagagtagaaaggaggaagacacgtggagatacaggagtcccttaggctggcccatagctgagtctctcatgtgtgtggcattagtcaagaatgtagttctgcagtttgcggggggggggtctctaacatttcttggtgcagttgttaacatgtgttaaacatatgagtctgatgatgatatcgcggtgtttctcggctcggggtggcaggtctggcggttgtgtggctgggggtgtgcactgatagttcagtaaaggataagtagagactcgtggtgttcatgtgtcaccacagggagggagtggctgtggagacccaggacaggaagtcgcggtggaaagcaggctggggtggtaggagaaggcaccgggggtgggtgctcctcccccaggggttgaggagttgactgatagggggcagttacctcctgggaaagcaagacgctcccttaagttttagaatggtacagagagtagtcccttctaccagagtttccatttagacatgggagtgtagggggccatgtttcggcagaagcagggcatgtatcagcattagtggactcctcagtattaaaaggaagaacagcaaacatgtcatgtgcccactttgtgcctcaggagaggtagcccgtggacatcgctagggcagaggttttaatatctgggacaaagttatctcccacggcgaggtcgtggctgggaccatgtcatcttcagccgtgagctgctgggctgggcaatgtcttctgggatgtgagacgtggggtctcctttctaagcggacccccactcgtgctgatgtgggtcccagcatttgccgcgtttggttgaaacagtggcttacctggagggtctgggtctctggatcataaaccagcgaaagcccccacatcagtggtgacaagatcaatagaccccagaatgtgtgcagctgtgcttgatagggttttggttcttgctttttggtggaagtttaggctcaagtgggtcccgtatcggatgagcagctgcacggcctgtgggagccctggggttagtgggtccaggagagaatgtgttctctctctgggctccagccctgatggggtggggataagatgcaagatttataggaatagggggaaacattatggaaggccccaatatgtaatgagcttttatatacaagaatgcaagacatagccctctttttatgtttaaaggggactatggtaatgttttttaaagtttgtgtgaggtgtgagtcaaccgaaaggccctaaattaagagagattcaggtttgtggtgcaagatagaggcccatttcggggtctgtttgcagaccagaatttgaaatggagttgtttgaggagaccattgtgtgtcttcgtgaaaccgattgtgtggaacctatcagggctgtggaagttgtagcgaatgccttttcccagagcccagcattgtggattccgagaagtggcatgtgtgtctcagtgacttccagtgatgcctgccactctgaagagatgaaggagtgtcctggcaagacctggaatcccagctgtagcacctgtggagagatgtgatttagatttggatttggggtatctgtgaggaagagtcccagagtttttcatcctgaagggggcaactcttgggcagtggtccaacagttggccataaatgtgaagctggggcgctgtgctgaccagggcatccagcgttaagacgactgcctaactttggccacatgcgttgttttttgggttccgtttcgtatcagggcatgctggctaaaagatgggaagcagcaacattctcttgggctccatcatttatatgagggttggcaatgccatctgtaccctctgtgaactcccactgctgttcactcagttaatctaagggacaccaaggggtctgcgggaggatgacctcacaagggactgaggacatgggagaccaccctcctgtgggtagaatacaccagagggcccaggcttgactctgtcctgtgttaaggaggcatcggtagttttgctgagcttgtcaggtgtttataatggacagttggagattggggtcctaggcttaggtctttgagagcctctgtgtccaggagagcccagtaggcatccagccatttactgctttaatagggtagcatgaggctgagagggatagtttcttgcatccaaagcccttaggcaccttatgtccatcctaagtgggccagagactccagggctgcatagagcttgccagagcttctataatgaaggggtctctgagggcaccaacaggagtgcccatggattttaaggtttgattatagaggttgtttatggagggtgccccatttaaagcaagctgatttgtaagcagcagcaagaagattaagtaaaatttgtaaatgaggactacattgccatcagaacctcgaaagtatctaaagatgttggacttgtatgtccttaatgagtgtgacaatgagtttcctcatttgtgctcctggagaaggcggatgtggtgaagaccctgtctgcagacattgtgtgccatggcaaagccgtggagctccctgtgggtggcctgcaaaggtgtatgtgcccctcagggcagaaggcaaacggcagccaagaagctgtgcaagtagacacttaatgggacatgttagccaaatctgtaagagcaaaatattggccagttatttattgtgtagaattaataattttaataataatggaaattgggtaatggatgggactgcagcaataaggttgtagtaatccaccatgaggcacacttgtttttttccaggtttaaggataggaaagattgggctgttcaatggagaaacaagggtataatcacccctttattaattagtaagttttaatccttgaatacctcatattaactgttttaactggaggtccatggggcatcattttatcaagctagtttataactgccaaagactgactttaattttaatttattatttgttttattagagtgtctgtgttcaatatgggatattagggcgttgggtactatgaccacaggaaatttagacaggctacagttaaagtgaagcataccttacccatccaccccccattttatatttagttgcctttttaaaaagattataggggtacaatgtttagatttagtgggatctccaggtataactgtaatttgagccccagtgttaagactatgaagctttgtcaatgggtacattttagcaaatgttacaattaatttagaacctaagttatggagacacaaaagccaataggcacccttttatgttttggttaaatgtttcagtatatacatcttatttatttgtaatattagtatataatttgttgtatacatttttagtgtataagcgttggatttctaattggatcagattagggaccttccgtttagctgcatatgtacatatacatgtacaatttattatatatttgcgttaaaatagcctatctgcatgtgtatatatgtgtgtatgtgtatgtatatgcactcacacgcataaatacacagtctatttagttacctttaatgttttttcccttgtacctaggctttttctcgctttttcctttttttctgattttgtggcaatttagttggaaggaggcggtcccagcatgttgacaggcagggtgttcagagtgcccaggcacactggtggggggtggttacaggctcacgtagctcaggggcttctgcaggtctcaggggagtgggaacaaagtgtcccaccccttccccttttcctcaaacctcaagccactggtctctatggatagatcctttgcatcccaccggattgaggaatgagtcacaacagctgcaaggctcttaaagcaacatttaaaccttttggcggctgtcatttctgtgaggagggtgcctctcaccggccgcatggccggaggatccctgcagcgctttggagaccaacacccagatcctttgcccaggagtgcgattaattcctcactggatgctgggggagggcccctcaggtgagcagcccaccactgacttcagcgttgctggctcggttatcagactctcatccaacacaagctcacagggaaagccgttccttgctccttgtggagggagctaccgtcattgccctgagaccaccagccaagaaagtaggtatgtccaggtagggaattcagagggacccagtgcatccaattatacaattatacccagaaggtcctgtgtaggggactgcgattgacatcaccctagtctgcagcaccaaggactgaatgagctcagtcctcttataatttaggctggactgtcacagacactggcagacacagcatacgtggtgcagccaaagtgcaaacatgccagcagcggccatgctccccagggtgggggtccagttagtaagccacgcgcagccaagaggcgaggcatgccctgtgccacacacggactcaccctgctcactgtgcccgtggtatcgaaatgtacccacgtttaattcataaaggagaggctgctgtcattgaaagaaaagtttgttacttgcatttctggagaaaaggagcgcaccaggccacgcagggccacaggaggaggacgcaccagagtggtcaggaggcagaactaggcgagcagctttccactgtgtctccatggcaaaggcgaagatgggcgggggcagagtgtaggattggcaggtttgaatgtcttgggcagtagctacaggggtggtctccagctgcctggtgcctggccctgggtgatcagggtgaggggatactgccttctgcagtggaagagtcaaatcgaggagatggactctgagttggttagtgtgcaaaggtgcactcccaagggacccctttgctatctctaagaattggcctgccctgggaagggcagtctctccccagtcagtgaggtccccaagatgtgaaaacattatacattataaaaaagcatgattaatataagctcattctagcatttcaggttacagcttctagaagaggtttgtagtctcaaatgagtaggtttttcctctagagaggggcgggcctggaccttcaagcaccccttggtgtgtttaggagctcaggagcagaagcacctgcctgcagccctgcagctaaggaagttctctcagtcactcagagcagggaggggctgagagagtcatgtgaggctcccggggtactacgacagccctcgaggtgaaggattggccctgatcataatagagaaccctgaggaagtttactgtcatgagtctcggctggttggcgcatgtgacctttgaaggatgaagatggagtttgcaacatgagtatctctaaccttttgcttttcagggatcattttcaaaaattgcattggggccttcgttatttaccatagtattttcactttcatagttttgtcacctttttgtactgtgaacagttcaaccagtgaccgacttctctctcatgctgtttaccccacacacaatttcccactcaattctgaaaataagaacctgttaataggttggaaagctgtgtactctattcatatattgttctttcatgctagtggagagtggtgtcattagcatcttaattttagagttgtgaaatgattttaccaattaggaattgaatgtgtattttttttctgtttaataagaagagcaaatttgaataaataagctggtgtagataaacttaataatcatgctttttcttgtttggagataggtgatgtgttgtcatatcctgtgatacaggtcactcatctggccttctgtttctgaagtttaagtctggtttgaatatgtaataatactactcagcatttcttgttgcctaagtgagacgaaacttaaatgttatgatatttacttcatgtattcttgtactgttcatttcaattaattggtattgtatatctaatatgtgatatttgaactgaataaaacttacagtgttgtaaatgttctttaataaataatcacacctaagtaataggctagactgatgagaaattagatcaaatcagtgcctaggcctttgtgtttgtgtcgtagggatgtactaacacatcaccacagactgacggcttttcacaataaatcagttttcttcgctca

SEQ ID NO: 11557 - DNA, 2363 bp, Homo sapiens
  source 1..2363: mol_type = unassigned DNA
agtggcagtctgtttttcttgctcctgatgataattcattattgctgctgcgggcggagttatatttgaccatgaagaactatgagcaagctctccaagatgccagtgcagcttgtcagaatgaacctctcttgattaagggacatcaagtaaaagctcaggctctttctggattgggaagaagtaaggaagtgttaaaggaatttctctactgccttgctctgaatcctgaatgtaactctgtgaagaaagaagcacagaaggtaatgtgtgaagtgctgttttcagctacagcaaatgtgcatgaaaatttaacatcttccatccaaagcagattaaaggctcagggtcacagccacatgaatgcccaggctctgctggaagaaggtgatgcagggagctcggagaattcatctgagaaatctgatatgcttggaaataccaattcttcagttttgtattttatactgggtctacactttgaagaggataaaaaggcgttagaaagcatccttccaacagcacccagcgctggcttaaagagacagtttccggatgacgtggaggatgcacctgacctgaacgcccctggaaaaattcccaagaaagatctctcacttcaaaggagcccaaactctgagacagaagaaagtcaggggctctcgcttgatgtaactgactttgagtgtgccctctgcatgagattgctctttgaacctgtcactacgccctgtggacacacattttgcctaaaatgccttgagcgctgccttgaccacgccccacactgtcctttgtgcaaagacaaactttcggaattattggcaagcagaaactttaacataactgttctggccgaagaattaatatttcgatatttgccggatgaattgtctgataggaagagaatttatgatgaagaaatgtcagaactgtcaaatctgaccagagacgtccccatctttgtgtgtgccatggccttccccacggtcccatgtccactccacgtttttgagccccgctatcggcttatgataagaagatgcatggaaactggcaccaagcggtttggcatgtgtttatctgctgagcacgcggggctttcagagtatggatgcatgctggagattaaggacgtgagaacgtttcctgatggaagttctgttgtagacgcgattggcatcagtcggttccgagtgctaagccaccgccacagagatggctataacacagcggacattgaatatcttgaagatgaaaaggtggagggtccagagtatgaagaacttgccgctctccacgattctgtgcatcaacagtctgtttcctggttcgcgtctctccaggatcgcatgaaagaacaaattttaagtcattttggggtaatgccagacagagaacctgagcctcagagtaatcccagcggccctgcctggtcctggtggatcctggccgtgctgcccctggagcgcaaggctcagctggccatcctcggcatgacctcgctcaaagagcggctccttgccatccgacggatattagtcatcatcacgcgtaagatgaatagtcggcaagagctggctaatgccagggagagaaataattgatttttctctctgtcaaggtttctggcagcccttgtgcttttataaatgtcaggcatggacgaatagccgtccattcattgtgcttcatcaagtgcttgtggatgaggttccaaaatgggacgcttgccaaacattgagtcctcctcaaaaatgacaattctgtgtctggtgggatctgaccttgtgtgaggttagcctgaagtctgaatggagcccatagttggaaaacaacctaagaaaatctcttagaagcaggtgcttggggaatgcagttcactgacagcacaggaccctgcagatggtttacatgtggtttgggtttcacgagaaagaaggattcacttcccagtcagcatctggctctgccagatggtaaaggcgtgctttagtgtgtagacaatatgggggaaccacgtttttatctggaagtggatttcttagaacacaggctaaccaaaactacgcttaggctttgcgtgttgctgtgaagttgtctgtgaaatcgaataatcacaccattgttcagtgcaggagcccaaactagtccttacccaagaagtagtagcctctggatagaactgtgtttaatgtcctgttgtagtcccaggtgttgtaaattgcatgttgtaatcaaacgaatgtcaaaacataagaaagtataccttggatatagaaaaacctgagaacagtatcattcacttgaggatatatatatatatatttacacacaataaagtgagttaaaattgtatatgc

SEQ ID NO: 11558 - DNA, 3549 bp, Homo sapiens
  source 1..3549: mol_type = unassigned DNA
acaacaaaagaggccggaggccgggcctgctgcggcggccgccttcggggaagggggtgggtccggggaggggtttgccatcctcctctagttaaaagtaagggggaaaagagtaaacgcgcgactccagcgcgcggctacctacgcttggtgcttgctttctccagccatcggagaccagagccgccccctctgctcgagaaaggggctcagcggcggcggaagcggagggggaccaccgtggagagcgcggtcccagcccggccactgcggatccctgaaaccaaaaagctcctgctgcttctgtaccccgcctgtccctcccagctgcgcagggccccttcgtgggatcatcagcccgaagacagggatggagaggcctctgtgctcccacctctgcagctgcctggctatgctggccctcctgtcccccctgagcctggcacagtatgacagctggccccattaccccgagtacttccagcaaccggctcctgagtatcaccagccccaggcccccgccaacgtggccaagattcagctgcgcctggctgggcagaagaggaagcacagcgagggccgggtggaggtgtactatgatggccagtggggcaccgtgtgcgatgacgacttctccatccacgctgcccacgtcgtctgccgggagctgggctacgtggaggccaagtcctggactgccagctcctcctacggcaagggagaagggcccatctggttagacaatctccactgtactggcaacgaggcgacccttgcagcatgcacctccaatggctggggcgtcactgactgcaagcacacggaggatgtcggtgtggtgtgcagcgacaaaaggattcctgggttcaaatttgacaattcgttgatcaaccagatagagaacctgaatatccaggtggaggacattcggattcgagccatcctctcaacctaccgcaagcgcaccccagtgatggagggctacgtggaggtgaaggagggcaagacctggaagcagatctgtgacaagcactggacggccaagaattcccgcgtggtctgcggcatgtttggcttccctggggagaggacatacaataccaaagtgtacaaaatgtttgcctcacggaggaagcagcgctactggccattctccatggactgcaccggcacagaggcccacatctccagctgcaagctgggcccccaggtgtcactggaccccatgaagaatgtcacctgcgagaatgggctaccggccgtggtgagttgtgtgcctgggcaggtcttcagccctgacggaccctcaagattccggaaagcgtacaagccagagcaacccctggtgcgactgagaggcggtgcctacatcggggagggccgcgtggaggtgctcaaaaatggagaatgggggaccgtctgcgacgacaagtgggacctggtgtcggccagtgtggtctgcagagagctgggctttgggagtgccaaagaggcagtcactggctcccgactggggcaagggatcggacccatccacctcaacgagatccagtgcacaggcaatgagaagtccattatagactgcaagttcaatgccgagtctcagggctgcaaccacgaggaggatgctggtgtgagatgcaacacccctgccatgggcttgcagaagaagctgcgcctgaacggcggccgcaatccctacgagggccgagtggaggtgctggtggagagaaacgggtcccttgtgtgggggatggtgtgtggccaaaactggggcatcgtggaggccatggtggtctgccgccagctgggcctgggattcgccagcaacgccttccaggagacctggtattggcacggagatgtcaacagcaacaaagtggtcatgagtggagtgaagtgctcgggaacggagctgtccctggcgcactgccgccacgacggggaggacgtggcctgcccccagggcggagtgcagtacggggccggagttgcctgctcagaaaccgcccctgacctggtcctcaatgcggagatggtgcagcagaccacctacctggaggaccggcccatgttcatgctgcagtgtgccatggaggagaactgcctctcggcctcagccgcgcagaccgaccccaccacgggctaccgccggctcctgcgcttctcctcccagatccacaacaatggccagtccgacttccggcccaagaacggccgccacgcgtggatctggcacgactgtcacaggcactaccacagcatggaggtgttcacccactatgacctgctgaacctcaatggcaccaaggtggcagagggccacaaggccagcttctgcttggaggacacagaatgtgaaggagacatccagaagaattacgagtgtgccaacttcggcgatcagggcatcaccatgggctgctgggacatgtaccgccatgacatcgactgccagtgggttgacatcactgacgtgccccctggagactacctgttccaggttgttattaaccccaacttcgaggttgcagaatccgattactccaacaacatcatgaaatgcaggagccgctatgacggccaccgcatctggatgtacaactgccacataggtggttccttcagcgaagagacggaaaaaaagtttgagcacttcagcgggctcttaaacaaccagctgtccccgcagtaaagaagcctgcgtggtcaactcctgtcttcaggccacaccacatcttccatgggacttccccccaacaactgagtctgaacgaatgccacgtgccctcacccagcccggcccccaccctgtccagacccctacagctgtgtctaagctcaggaggaaagggaccctcccatcattcatggggggctgctacctgacccttggggcctgagaaggccttgcgggggtggggtttgtccacagagctgctggagcagcaccaagagccagtcttgaccgggatgaggcccacagacaggttgtcatcagcttgtcccattcaagccaccgagctcaccacagacacagtggagccgcgctcttctccagtgacacgtggacaaatgcgggctcatcagcccccccagagagggtcaggccgaaccccatttctcctcctcttaggtcattttcagcaaacttgaatatctagacctctcttccaatgaaaccctccagtctattatagtcacatagataatggtgccacgtgttttctgatttggtgagctcagacttggtgcttccctatccacagcccccaccccttgtttttcaagatactattattatattttcacagacttttgaagcacaaatttattggcatttaatattggacatctgggcccttggaagtacaaatctaaggaaaaaccaacccactgtgtaagtgactcatcttcctgttgttccaattctgtgggtttttgattcaacggtgctataaccagggtcctgggtgacagggcgctcactgagcaccatgtgtcatcacagacacttacacatacttgaaacttggaataaaagaaaga

SEQ ID NO: 11559 - DNA, 502 bp, Homo sapiens
  source 1..502: mol_type = unassigned DNA
gctggtggagagaaacgggtcccttgtgtgggggatggtgtgtggccaaaactggggcatcgtggaggccatggtggtctgccgccagctgggcctgggattcgccagcaacgccttccaggagacctggtattggcacggagatgtcaacagcaacaaagtggtcatgagtggagtgaagtgctcgggaacggagctgtccctggcgcactgccgccacgacggggaggacgtggcctgcccccagggcggagtgcagtacggggccggagttgcctgctcagaaagtgagagctcctcccctccctccccaccgggctcccaaggggaccagagtcccaccagttattcctcaagagactctgaagccttgccatgagccaagcaatagaggaaggtagaatgaaatcctaagggagaaaaactgggggcaagagagatgaccgccaccccaaccacagatcgctgtctatgatgtagtggggagaaaagcgggagggag

SEQ ID NO: 11560 - DNA, 559 bp, Homo sapiens
  source 1..559: mol_type = unassigned DNA
aaacgcgcgactccagcgcgcggctacctacgcttggtgcttgctttctccagccatcggagaccagagccgccccctctgctcgagaaaggggctcagcggcggcggaagcggagggggaccaccgtggagagcgcggtcccagcccggccactgcggatccctgaaaccaaaaagctcctgctgcttctgtaccccgcctgtccctcccagctgcgcagggccccttcgtgggatcatcagcccgaagacagggatggagaggcctctgtgctcccacctctgcagctgcctggctatgctggccctcctgtcccccctgagcctggcacagtatgacagctggccccattaccccgagtacttccagcaaccggctcctgagtatcaccagccccaggcccccgccaacgtggccaagattcagctgcacctggtattggcacggagatgtcaacagcaacaaagtggtcatgagtggagtgaagtgctcgggaacggagctgtccctggcgcactgccgccacgacggggaggacgtggcctgcccccagggcgg

SEQ ID NO: 11561 - DNA, 620 bp, Homo sapiens
  source 1..620: mol_type = unassigned DNA
gcgagaatgggctaccggccgtggtgagttgtgtgcctgggcaggtcttcagccctgacggaccctcaagattccggaaagcgtacaagccagagcaggaccgtgtgtctcttcagcaacccctggtgcgactgagaggcggtgcctacatcggggagggccgcgtggaggtgctcaaaaatggagaatgggggaccgtctgcgacgacaagtgggacctggtgtcggccagtgtggtctgcagagagctgggctttgggagtgccaaagaggcagtcactggctcccgactggggcaagggatcggacccatccacctcaacgagatccagtgcacaggcaatgagaagtccattatagactgcaagttcaatgccgagtctcagggctgcaaccacgaggaggatgctggtgtgagatgcaacacccctgccatgggcttgcagaagaagctgcgcctgaacggcggccgcaatccctacgagggccgagtggaggtgctggtggagagaaacgggtcccttgtgtgggggatggtgtgtggccaaaactggggcatcgtggaggccatggtggtctgccgccagctgggcctgggattcgccagcaacgccttccag

SEQ ID NO: 11562 - DNA, 689 bp, Homo sapiens
  source 1..689: mol_type = unassigned DNA
cggattcgagccatcctctcaacctaccgcaagcgcaccccagtgatggagggctacgtggaggtgaaggagggcaagacctggaagcagatctgtgacaagcactggacggccaagaattcccgcgtggtctgcggcatgtttggcttccctggggagaggacatacaataccaaagtgtacaacaacccctggtgcgactgagaggcggtgcctacatcggggagggccgcgtggaggtgctcaaaaatggagaatgggggaccgtctgcgacgacaagtgggacctggtgtcggccagtgtggtctgcagagagctgggctttgggagtgccaaagaggcagtcactggctcccgactggggcaagggatcggacccatccacctcaacgagatccagtgcacaggcaatgagaagtccattatagactgcaagttcaatgccgagtctcagggctgcaaccacgaggaggatgctggtgtgagatgcaacacccctgccatgggcttgcagaagaagctgcgcctgaacggcggccgcaatccctacgagggccgagtggaggtgctggtggagagaaacgggtcccttgtgtgggggatggtgtgtggccaaaactggggcatcgtggaggccatggtggtctgccgccagctgggcctgggattcgccagcaacgccttccag

SEQ ID NO: 11563 - DNA, 665 bp, Homo sapiens
  source 1..665: mol_type = unassigned DNA
cccacaccccaacacacccacgacacacacacacacacacacacacacacacacacacatccatacatcaagcatagttgcagctcccagactgagtgcctggcctgggaacagggtggcagggaagggagggggcggggacagtggtcacccgctgaacgtgcatcagcgtctgtactcagcaggaccgtgtgtctcttcagcaacccctggtgcgactgagaggcggtgcctacatcggggagggccgcgtggaggtgctcaaaaatggagaatgggggaccgtctgcgacgacaagtgggacctggtgtcggccagtgtggtctgcagagagctgggctttgggagtgccaaagaggcagtcactggctcccgactggggcaagggatcggacccatccacctcaacgagatccagtgcacaggcaatgagaagtccattatagactgcaagttcaatgccgagtctcagggctgcaaccacgaggaggatgctggtgtgagatgcaacacccctgccatgggcttgcagaagaagctgcgcctgaacggcggccgcaatccctacgagggccgagtggaggtgctggtggagagaaacgggtcccttgtgtgggggatggtgtgtggccaaaactggggcatcgtggaggccatggtggtc

SEQ ID NO: 11564 - DNA, 571 bp, Homo sapiens
  source 1..571: mol_type = unassigned DNA
ccagtgcctgcctagtactttggagtctctgcaggcctagactgtagcactgtgttataagcaaggttgatccaaacttgcttagaagcaaccttgttacaagaaagaattattatccatttggaatctgcagactttggaggcaacccctggtgcgactgagaggcggtgcctacatcggggagggccgcgtggaggtgctcaaaaatggagaatgggggaccgtctgcgacgacaagtgggacctggtgtcggccagtgtggtctgcagagagctgggctttgggagtgccaaagaggcagtcactggctcccgactggggcaagggatcggacccatccacctcaacgagatccagtgcacaggcaatgagaagtccattatagactgcaagttcaatgccgagtctcagggctgcaaccacgaggaggatgctggtgtgagatgcaacacccctgccatgggcttgcagaagaagctgcgcctgaacggcggccgcaatccctacgagggccgagtggaggtgctggtggagagaaacgggtcccttgtgtgggggatggtgtgtgg

SEQ ID NO: 11565 - DNA, 965 bp, Homo sapiens
  source 1..965: mol_type = unassigned DNA
ccatcgtctgcagaatgtttgcctcacggaggaagcagcgctactggccattctccatggactgcaccggcacagaggcccacatctccagctgcaagctgggcccccaggtgtcactggaccccatgaagaatgtcacctgcgagaatgggctaccggccgtggtgagttgtgtgcctgggcaggtcttcagccctgacggaccctcaagattccggaaagcgtacaagccagagcaacccctggtgcgactgagaggcggtgcctacatcggggagggccgcgtggaggtgctcaaaaatggagaatgggggaccgtctgcgacgacaagtgggacctggtgtcggccagtgtggtctgcagagagctgggctttgggagtgccaaagaggcagtcactggctcccgactggggcaagggatcggacccatccacctcaacgagatccagtgcacaggcaatgagaagtccattatagactgcaagttcaatgccgagtctcagggctgcaaccacgaggaggatgctggtgtgagatgcaacacccctgccatgggcttgcagaagaaggtgatgggactggacacctagaggggactgtaactgaggctgcagaaagtatagccacagagctctggggtgaaccctggaagtgaccaggtgctgctgctagtactgctgcagacattgccacttggcatttgcaatgtttagttccccctcgaacctcgggcctggccctggcccggcagcaggcccaagcccctgtgtgcagtgtgagctggaaaggccctgcctccttgcatgttaacatctgaggtgagttacctcacctctgccccaccacctccaaagacaggcgtgggaccggctagccacaaccttatcaaaacacggtgcagcctggctgtgctctgctggctggaggcgttctctttcctctattcatgttcagaaaaaaac

SEQ ID NO: 11566 - DNA, 725 bp, Homo sapiens
  source 1..725: mol_type = unassigned DNA
atctccagctgcaagctgggcccccaggtgtcactggaccccatgaagaatgtcacctgcgagaatgggctaccggccgtggtgagttgtgtgcctgggcaggtcttcagccctgacggaccctcaagattccggaaagcgtacaagccagaggctggagtgcaatggcatgatcttggttcactgcaacctccggctcctgggttcacgcgattctcctgcctcggcctcccaagtagctgagatgacaggcacccgccaccacgcctcgctaatttttgtatttttagtagagatggggtttcaccatgttggccaggctagtcttgaactcctgacctcagatggcccacccgcctcagcctcccaaagtgctgggattacagatgtgagcccactggccgatttcctagaacaagtaaagtagtccaaccacagcaggcttgacccagcctctgacaaagagcaaatgccctatctgtctcttcttgattcgcttttctttctcctcctcttcctttttcctgtatccatcaaagggtctctgtgatttctgtgttcaggaaacagcgaatatcttgtgagtgggtgggaatagcaactgggaagaggagagggagggataggagaagtgaccgatcatttctcaggggctgatgccctgtgccaggtaaaacctcagtacttagtgcactgtttgctgacgcggcatgagtagatgagac

SEQ ID NO: 11567 - DNA, 975 bp, Homo sapiens
  source 1..975: mol_type = unassigned DNA
cctggacttcaatattgctggtggtggtgcaaactgcaatgcgtaccccagaagggaagctggcagcttaaaagttagcagcgtgtgtgccctttgattcagagagccacttgcgcgtggctctccggagagatttctacctgggtccatgaatggacttacggaaggattccttggtaatgattctgagtgactgtgttgatggaggcaagcaaggtcttggacaagtcaaaggcggcagccatcggagaccagagccgccccctctgctcgagaaaggggctcagcggcggcggaagcggagggggaccaccgtggagagcgcggtcccagcccggccactgcggatccctgaaaccaaaaagctcctgctgcttctgtaccccgcctgtccctcccagctgcgcagggccccttcgtgggatcatcagcccgaagacagggatggagaggcctctgtgctcccacctctgcagctgcctggctatgctggccctcctgtcccccctgagcctggcacagtatgacagctggccccattaccccgagtacttccagcaaccggctcctgagtatcaccagccccaggcccccgccaacgtggccaagattcagctgcgcctggctgggcagaagaggaagcacagcgagggccgggtggaggtgtactatgatggccagtggggcaccgtgtgcgatgacgacttctccatccacgctgcccacgtcgtctgccgggagctgggctacgtggaggccaagtcctggactgccagctcctcctacggcaagggagaagggcccatctggttagacaatctccactgtactggcaacgaggcgacccttgcagcatgcacctccaatggctggggcgtcactgactgcaagcacacggaggatgtcggtgtggtgtgcagcgacaaaaggattcctgggttcaaatttgacaattcgttgatcaaccagatagag

SEQ ID NO: 11568 - DNA, 892 bp, Homo sapiens
  source 1..892: mol_type = unassigned DNA
gaattgccagacttcaagtgctggcagtgatgcggggcctggacttcaatattgctggtggtggtgcaaactgcaatgcgtaccccagaagggaagctggcagcttaaaagttagcagcgtgtgtgccctttgattcagagagccacttgcgcgtggctctccggagagatttctacctgggtccatgaatggacttacggaaggattccttggtaatgattctgagtgactgtgttgatggaggcaagcaaggtcttggacaagtcaaaggcggcagaaagctcctgctgcttctgtaccccgcctgtccctcccagctgcgcagggccccttcgtgggatcatcagcccgaagacagggatggagaggcctctgtgctcccacctctgcagctgcctggctatgctggccctcctgtcccccctgagcctggcacagtatgacagctggccccattaccccgagtacttccagcaaccggctcctgagtatcaccagccccaggcccccgccaacgtggccaagattcagctgcgcctggctgggcagaagaggaagcacagcgagggccgggtggaggtgtactatgatggccagtggggcaccgtgtgcgatgacgacttctccatccacgctgcccacgtcgtctgccgggagctgggctacgtggaggccaagtcctggactgccagctcctcctacggcaagggagaagggcccatctggttagacaatctccactgtactggcaacgaggcgacccttgcagcatgcacctccaatggctggggcgtcactgactgcaagcacacggaggatgtcggtgtggtgtgcagcgacaaaaggattcctgggttcaaatttgacaattcgttgatcaaccagatagag

SEQ ID NO: 11569 - DNA, 588 bp, Homo sapiens
  source 1..588: mol_type = unassigned DNA
tatttgtgttgaggggaccagctgttagtctttctgctgctctttctaagaaagctcctgctgcttctgtaccccgcctgtccctcccagctgcgcagggccccttcgtgggatcatcagcccgaagacagggatggagaggcctctgtgctcccacctctgcagctgcctggctatgctggccctcctgtcccccctgagcctggcacagtatgacagctggccccattaccccgagtacttccagcaaccggctcctgagtatcaccagccccaggcccccgccaacgtggccaagattcagctgcgcctggctgggcagaagaggaagcacagcgagggccgggtggaggtgtactatgatggccagtggggcaccgtgtgcgatgacgacttctccatccacgctgcccacgtcgtctgccgggagctgggctacgtggaggccaagtcctggactgccagctcctcctacggcaagggagaagggcccatctggttagacaatctccactgtactggcaacgaggcgacccttgcagcatgcacctccaatggctggggcgtcactgactgcaagcacacgga

SEQ ID NO: 11570 - DNA, 746 bp, Homo sapiens
  source 1..746: mol_type = unassigned DNA
cagccatcggagaccagagccgccccctctgctcgagaaaggggctcagcggcggcggaagcggagggggaccaccgtggagagcgcggtcccagcccggccactgcggatccctgaaaccaaatggagtctcgctctgtcacccaggctggagtacagtggcacgatcttggctgactgcaagctttgcctcccgggttcaagcgattctcctgcctcaagcctcctgagtaactgggactacagaaagctcctgctgcttctgtaccccgcctgtccctcccagctgcgcagggccccttcgtgggatcatcagcccgaagacagggatggagaggcctctgtgctcccacctctgcagctgcctggctatgctggccctcctgtcccccctgagcctggcacagtatgacagctggccccattaccccgagtacttccagcaaccggctcctgagtatcaccagccccaggcccccgccaacgtggccaagattcagctgcgcctggctgggcagaagaggaagcacagcgagggccgggtggaggtgtactatgatggccagtggggcaccgtgtgcgatgacgacttctccatccacgctgcccacgtcgtctgccgggagctgggctacgtggaggccaagtcctggactgccagctcctcctacggcaagggagaagggcccatctggttagacaatctccactgtactggcaacgaggcgacccttgcagcatgcacc

SEQ ID NO: 11571 - DNA, 763 bp, Homo sapiens
  source 1..763: mol_type = unassigned DNA
cggaggccgggcctgctgcggcggccgccttcggggaagggggtgggtccggggaggggtttgccatcctcctctagttaaaagtaagggggaaaagagtaaacgcgcgactccagcgcgcggctacctacgcttggtgcttgctttctccagccatcggagaccagagccgccccctctgctcgagaaaggggctcagcggcggcggaagcggagggggaccaccgtggagagcgcggtcccagcccggccactgcggatccctgaaaccaagttctgaactcccggtctccccagtccctggaggctgcctgcagctttgcttagcttctcagcctgttgatcactgccgtggaattggcgagtatcttccgggggaaagcagagacaaaaaaagctcctgctgcttctgtaccccgcctgtccctcccagctgcgcagggccccttcgtgggatcatcagcccgaagacagggatggagaggcctctgtgctcccacctctgcagctgcctggctatgctggccctcctgtcccccctgagcctggcacagtatgacagctggccccattaccccgagtacttccagcaaccggctcctgagtatcaccagccccaggcccccgccaacgtggccaagattcagctgcgcctggctgggcagaagaggaagcacagcgagggccgggtggaggtgtactatgatggccagtggggcaccgtgtgcgatgacgacttctccatccacgctgcccacgtcgt

SEQ ID NO: 11572 - DNA, 419 bp, Homo sapiens
  source 1..419: mol_type = unassigned DNA
tgatgcggggcctggacttcaatattgctggtggtggtgcaaactgcaatgcgtaccccagaagggaagctggcagcttaaaagttagcagcgtgtgtgccctttgattcagagagccacttgcgcgtggctctccggagagatttctacctgggtccatgaatggacttacggaaggattccttggtaatgattctgagtgactgtgttgatggaggcaagcaaggtcttggacaagtcaaaggcggcagccatcggagaccagagccgccccctctgctcgagaaaggggctcagcggcggcggaagcggagggggaccaccgtggagagcgcggtcccagcccggccactgcggatccctgaaaccaagtaagagcgcttcccgcgccaccccctccccgaagcggttcgcgagaa

SEQ ID NO: 11573 - DNA, 3637 bp, Homo sapiens
  source 1..3637: mol_type = unassigned DNA
gtggttgggggcgcgcgtgcgagtgccagtgagagtgtgggtgcgcgctgtgggccgcggcgcgggtgggtggccgtgcgttcttgcgagccggcctgcaggaggcgaggctcccctggcctcccgcacccagcggcggaccgagcccctggagggaagttgccgcagccgcccgggccgccggccctcctgtcccgcgccaggtggacgtctgatttatgaagctccccatccacctatctgagtacctgacttctcaggactgacacctacagcatcaggtacacagcttctcctagcatgacttcgatctgatcagcaaacaagaaaatttgtctcccgtagttctggggcgtgttcaccacctacaaccacagagctgtcatggctgccatctctacttccatccctgtaatttcacagccccagttcacagccatgaatgaaccacagtgcttctacaacgagtccattgccttcttttataaccgaagtggaaagcatcttgccacagaatggaacacagtcagcaagctggtgatgggacttggaatcactgtttgtatcttcatcatgttggccaacctattggtcatggtggcaatctatgtcaaccgccgcttccattttcctatttattacctaatggctaatctggctgctgcagacttctttgctgggttggcctacttctatctcatgttcaacacaggacccaatactcggagactgactgttagcacatggctccttcgtcagggcctcattgacaccagcctgacggcatctgtggccaacttactggctattgcaatcgagaggcacattacggttttccgcatgcagctccacacacggatgagcaaccggcgggtagtggtggtcattgtggtcatctggactatggccatcgttatgggtgctatacccagtgtgggctggaactgtatctgtgatattgaaaattgttccaacatggcacccctctacagtgactcttacttagtcttctgggccattttcaacttggtgacctttgtggtaatggtggttctctatgctcacatctttggctatgttcgccagaggactatgagaatgtctcggcatagttctggaccccggcggaatcgggataccatgatgagtcttctgaagactgtggtcattgtgcttggggcctttatcatctgctggactcctggattggttttgttacttctagacgtgtgctgtccacagtgcgacgtgctggcctatgagaaattcttccttctccttgctgaattcaactctgccatgaaccccatcatttactcctaccgcgacaaagaaatgagcgccacctttaggcagatcctctgctgccagcgcagtgagaaccccaccggccccacagaaggctcagaccgctcggcttcctccctcaaccacaccatcttggctggagttcacagcaatgaccactctgtggtttagaacggaaactgagatgaggaaccagccgtcctctcttggaggataaacagcctccccctacccaattgccagggcaaggtggggtgtgagagaggagaaaagtcaactcatgtacttaaacactaaccaatgacagtatttgttcctggaccccacaagacttgatatatattgaaaattagcttatgtgacaaccctcatcttgatccccatcccttctgaaagtaggaagttggagctcttgcaatggaattcaagaacagactctggagtgtccatttagactacactaactagacttttaaaagattttgtgtggtttggtgcaagtcagaataaattctggctagttgaatccacaacttcatttatatacaggcttcccttttttatttttaaaggatacgtttcacttaataaacacgtttatgcctatcagcatgtttgtgatggatgagactatggactgcttttaaactaccataattccattttttcccttacataggaaaactgtaagttggaattatcttttgtttagaaagcatgcatgtaatgtatgtatgcagtatgccttacttaaaaagattaaaaggatactaatgttaaatcttctaggaaatagaacctagacttcaaagccagtatttgtttaggtcatgaagcaaacaatgctctaatcacaatattaactgtttaattaaaatgttgtaacaagtataaaacagggaatgtaagtttattaccaaagtgatatgtattccaaaaaagtcatagaagatgaagcactataatattgttcccatatatttaaaatacccaagtacattctaattaccagtatatcagaggaaaattttcgtagtctttgtaaaataatatactcatcatagaaaacttgaaaaatgcagaaatgtataaaaaagcaaaaatgattactgataatatcacaacccagaagtaaccacctttaaaaagcaacccccatgtatgcctatatgtgtattgtatactttttttacataattggagtcatactgtaaacagttttataagtagatctttttcattgcaaaattgccacattttcttatggcattaaaaattttacaaaaacataattttaatggctatattatattccatttaatggatgcaactcagtttatttaaccattcccatgttgttaactatttaggttgtttctaattttcattattataaagttgcagaaatttggtgtacataaaactgtctccatataattgattattaggatatattcccatgaaggattctttttttaaaaaaatgtgaaatgtcatcttgtacttacacctttcatgaaaagggatttcctgcttttgtactgcatgggtggcagttgtgaggaaaagccagtcaaatgacctttttacaaaagaaatgcagtggtcacttcagttgagagtgactttttaatacaacaagatcaactagaagaattcaactgtctcaagaatcaaggtaccccaatatatctcgcaattccaaactttgtttgagggactcgttatccagctcttggtagccacacctgcaatgtaaaatggaagaaaatgcaaagaaaccaaatgtgccgagtgaataaaggattgtcatatcaattagtgtgggtccatctgtagcaaatgggttgagtgtgtcagtatgtggttggttactgtgtattcgccaggaatcaccccgataggctgccaccctattaggtgatacctgtttaatatgttgtccaggtagactagtagttgcatcagtttgctgtaacaagtaaccagtgaggtaacacagtggtgaagcaggtcaggggaggtcaggaggatgtctgagagaaagaagtccgggagatgaatggctgtctaggaaggaggatgtcagtgcacggttagtgtttgagcagagggcagacttgtaaagtacctgtagtgaaaagaatgtggggacccgattagcagaaaggtgtttgcacgtactttatacaaaatacagaatactttatattggaagtgaaagaaatgaacgtggacttttacacatgtgcatatttttctggaggctatatggattatttgaaatgaaaagcatactaattggactttaataaatcattttcaatca

SEQ ID NO: 11574 - DNA, 2993 bp, Homo sapiens
  source 1..2993: mol_type = unassigned DNA
agaaagcagggctgcatggtgtggggatgctgctgctactcattcctgctcattccagtgttctggaaaatgaggtggacgtctgatttatgaagctccccatccacctatctgagtacctgacttctcaggactgacacctacagcatcaggtacacagcttctcctagcatgacttcgatctgatcagcaaacaagaaaatttgtctcccgtagttctggggcgtgttcaccacctacaaccacagagctgtcatggctgccatctctacttccatccctgtaatttcacagccccagttcacagccatgaatgaaccacagtgcttctacaacgagtccattgccttcttttataaccgaagtggaaagcatcttgccacagaatggaacacagtcagcaagctggtgatgggacttggaatcactgtttgtatcttcatcatgttggccaacctattggtcatggtggcaatctatgtcaaccgccgcttccattttcctatttattacctaatggctaatctggctgctgcagacttctttgctgggttggcctacttctatctcatgttcaacacaggacccaatactcggagactgactgttagcacatggctccttcgtcagggcctcattgacaccagcctgacggcatctgtggccaacttactggctattgcaatcgagaggcacattacggttttccgcatgcagctccacacacggatgagcaaccggcgggtagtggtggtcattgtggtcatctggactatggccatcgttatgggtgctatacccagtgtgggctggaactgtatctgtgatattgaaaattgttccaacatggcacccctctacagtgactcttacttagtcttctgggccattttcaacttggtgacctttgtggtaatggtggttctctatgctcacatctttggctatgttcgccagaggactatgagaatgtctcggcatagttctggaccccggcggaatcgggataccatgatgagtcttctgaagactgtggtcattgtgcttggggcctttatcatctgctggactcctggattggttttgttacttctagacgtgtgctgtccacagtgcgacgtgctggcctatgagaaattcttccttctccttgctgaattcaactctgccatgaaccccatcatttactcctaccgcgacaaagaaatgagcgccacctttaggcagatcctctgctgccagcgcagtgagaaccccaccggccccacagaaggctcagaccgctcggcttcctccctcaaccacaccatcttggctggagttcacagcaatgaccactctgtggtttagaacggaaactgagatgaggaaccagccgtcctctcttggaggataaacagcctccccctacccaattgccagggcaaggtggggtgtgagagaggagaaaagtcaactcatgtacttaaacactaaccaatgacagtatttgttcctggaccccacaagacttgatatatattgaaaattagcttatgtgacaaccctcatcttgatccccatcccttctgaaagtaggaagttggagctcttgcaatggaattcaagaacagactctggagtgtccatttagactacactaactagacttttaaaagattttgtgtggtttggtgcaagtcagaataaattctggctagttgaatccacaacttcatttatatacaggcttcccttttttatttttaaaggatacgtttcacttaataaacacgtttatgcctatcagcatgtttgtgatggatgagactatggactgcttttaaactaccataattccattttttcccttacataggaaaactgtaagttggaattatcttttgtttagaaagcatgcatgtaatgtatgtatgcagtatgccttacttaaaaagattaaaaggatactaatgttaaatcttctaggaaatagaacctagacttcaaagccagtatttgtttaggtcatgaagcaaacaatgctctaatcacaatattaactgtttaattaaaatgttgtaacaagtataaaacagggaatgtaagtttattaccaaagtgatatgtattccaaaaaagtcatagaagatgaagcactataatattgttcccatatatttaaaatacccaagtacattctaattaccagtatatcagaggaaaattttcgtagtctttgtaaaataatatactcatcatagaaaacttgaaaaatgcagaaatgtataaaaaagcaaaaatgattactgataatatcacaacccagaagtaaccacctttaaaaagcaacccccatgtatgcctatatgtgtattgtatactttttttacataattggagtcatactgtaaacagttttataagtagatctttttcattgcaaaattgccacattttcttatggcattaaaaattttacaaaaacataattttaatggctatattatattccatttaatggatgcaactcagtttatttaaccattcccatgttgttaactatttaggttgtttctaattttcattattataaagttgcagaaatttggtgtacataaaactgtctccatataattgattattaggatatattcccatgaaggattctttttttaaaaaaatgtgaaatgtcatcttgtacttacacctttcatgaaaagggatttcctgcttttgtactgcatgggtggcagttgtgaggaaaagccagtcaaatgacctttttacaaaagaaatgcagtggtcacttcagttgagagtgactttttaatacaacaagatcaactagaagaattcaactgtctcaagaatcaaggtaccccaatatatctcgcaattccaaactttgtttgagggactcgttatccagctcttggtagccacacctgcaatgtaaaatggaagaaaatgcaaagaaaccaaatgtgccgagtgaataaaggattgtcata

SEQ ID NO: 11575 - DNA, 2687 bp, Homo sapiens
  source 1..2687: mol_type = unassigned DNA
acggcgcgctgggctcacactgtcccgccgcggacgggctttgtggttgggggcgcgcgtgcgagtgccagtgagagtgtgggtgcgcgctgtgggccgcggcgcgggtgggtggccgtgcgttcttgcgagccggcctgcaggaggcgaggctcccctggcctcccgcacccagcggcggaccgagcccctggagggaagttgccgcagccgcccgggccgccggccctcctgtcccgcgccaggtacacagcttctcctagcatgacttcgatctgatcagcaaacaagaaaatttgtctcccgtagttctggggcgtgttcaccacctacaaccacagagctgtcatggctgccatctctacttccatccctgtaatttcacagccccagttcacagccatgaatgaaccacagtgcttctacaacgagtccattgccttcttttataaccgaagtggaaagcatcttgccacagaatggaacacagtcagcaagctggtgatgggacttggaatcactgtttgtatcttcatcatgttggccaacctattggtcatggtggcaatctatgtcaaccgccgcttccattttcctatttattacctaatggctaatctggctgctgcagacttctttgctgggttggcctacttctatctcatgttcaacacaggacccaatactcggagactgactgttagcacatggctccttcgtcagggcctcattgacaccagcctgacggcatctgtggccaacttactggctattgcaatcgagaggcacattacggttttccgcatgcagctccacacacggatgagcaaccggcgggtagtggtggtcattgtggtcatctggactatggccatcgttatgggtgctatacccagtgtgggctggaactgtatctgtgatattgaaaattgttccaacatggcacccctctacagtgactcttacttagtcttctgggccattttcaacttggtgacctttgtggtaatggtggttctctatgctcacatctttggctatgttcgccagaggactatgagaatgtctcggcatagttctggaccccggcggaatcgggataccatgatgagtcttctgaagactgtggtcattgtgcttggggcctttatcatctgctggactcctggattggttttgttacttctagacgtgtgctgtccacagtgcgacgtgctggcctatgagaaattcttccttctccttgctgaattcaactctgccatgaaccccatcatttactcctaccgcgacaaagaaatgagcgccacctttaggcagatcctctgctgccagcgcagtgagaaccccaccggccccacagaaggctcagaccgctcggcttcctccctcaaccacaccatcttggctggagttcacagcaatgaccactctgtggtttagaacggaaactgagatgaggaaccagccgtcctctcttggaggataaacagcctccccctacccaattgccagggcaaggtggggtgtgagagaggagaaaagtcaactcatgtacttaaacactaaccaatgacagtatttgttcctggaccccacaagacttgatatatattgaaaattagcttatgtgacaaccctcatcttgatccccatcccttctgaaagtaggaagttggagctcttgcaatggaattcaagaacagactctggagtgtccatttagactacactaactagacttttaaaagattttgtgtggtttggtgcaagtcagaataaattctggctagttgaatccacaacttcatttatatacaggcttcccttttttatttttaaaggatacgtttcacttaataaacacgtttatgcctatcagcatgtttgtgatggatgagactatggactgcttttaaactaccataattccattttttcccttacataggaaaactgtaagttggaattatcttttgtttagaaagcatgcatgtaatgtatgtatgcagtatgccttacttaaaaagattaaaaggatactaatgttaaatcttctaggaaatagaacctagacttcaaagccagtatttgtttaggtcatgaagcaaacaatgctctaatcacaatattaactgtttaattaaaatgttgtaacaagtataaaacagggaatgtaagtttattaccaaagtgatatgtattccaaaaaagtcatagaagatgaagcactataatattgttcccatatatttaaaatacccaagtacattctaattaccagtatatcagaggaaaattttcgtagtctttgtaaaataatatactcatcatagaaaacttgaaaaatgcagaaatgtataaaaaagcaaaaatgattactgataatatcacaacccagaagtaaccacctttaaaaagcaacccccatgtatgcctatatgtgtattgtatactttttttacataattggagtcatactgtaaacagttttataagtagatctttttcattgcaaaattgccacattttcttatggcattaaaaattttacaaaaacataattttaatggctatattatattccatttaatggatgcaactcagtttatttaaccattcccatgttgttaactatttaggttgtttctaattttcattattataaagttgcagaaatttggtgt

SEQ ID NO: 11576 - DNA, 1019 bp, Homo sapiens
  source 1..1019: mol_type = unassigned DNA
ctggcggctgacgctccctgagtggcgactccgtctccagccccgctgcggagcgcgggccggatctggggcggccagggcccggagccgcggagccctccccgccgcccggccgagcacgggaccccggcggggtgggcgcagggggcggccccgctctgggcgactgccgaggggcgggcggagggccgggctcggctggcggtggggcgggggccgccgggactgggcgcgcggcctgaagccagcccgggggcggcaggagagggacgcgcggcggcagcgagcgcaggtggacgtctgatttatgaagctccccatccacctatctgagtacctgacttctcaggactgacacctacagcatcaggtacacagcttctcctagcatgacttcgatctgatcagcaaacaagaaaatttgtctcccgtagttctggggcgtgttcaccacctacaaccacagagctgtcatggctgccatctctacttccatccctgtaatttcacagccccagttcacagccatgaatgaaccacagtgcttctacaacgagtccattgccttcttttataaccgaagtggaaagcatcttgccacagaatggaacacagtcagcaagctggtgatgggacttggaatcactgtttgtatcttcatcatgttggccaacctattggtcatggtggcaatctatgtcaaccgccgcttccattttcctatttattacctaatggctaatctggctgctgcagacttctttgctgggttggcctacttctatctcatgttcaacacaggacccaatactcggagactgactgttagcacatggctccttcgtcagggcctcattgacaccagcctgacggcatctgtggccaacttactggctattgcaatcgagaggcacattacggttttccgcatgcagctccacacacggatgagcaaccggcgggtagtggtggtcattgtggtcatctggactatggccatcgttatgggtgctataccc

SEQ ID NO: 11577 - DNA, 2490 bp, Homo sapiens
  source 1..2490: mol_type = unassigned DNA
ctcaagggaacagctcctgcccaggtctgtgggcactcagcatggatttcagtctccctgtgagtgatgggaaagaactaacagaggtggacgtctgatttatgaagctccccatccacctatctgagtacctgacttctcaggactgacacctacagcatcaggtacacagcttctcctagcatgacttcgatctgatcagcaaacaagaaaatttgtctcccgtagttctggggcgtgttcaccacctacaaccacagagctgtcatggctgccatctctacttccatccctgtaatttcacagccccagtgggaggtgatttcttctttggcgagagttcacagccatgaatgaaccacagtgcttctacaacgagtccattgccttcttttataaccgaagtggaaagcatcttgccacagaatggaacacagtcagcaagctggtgatgggacttggaatcactgtttgtatcttcatcatgttggccaacctattggtcatggtggcaatctatgtcaaccgccgcttccattttcctatttattacctaatggctaatctggctgctgcagacttctttgctgggttggcctacttctatctcatgttcaacacaggacccaatactcggagactgactgttagcacatggctccttcgtcagggcctcattgacaccagcctgacggcatctgtggccaacttactggctattgcaatcgagaggcacattacggttttccgcatgcagctccacacacggatgagcaaccggcgggtagtggtggtcattgtggtcatctggactatggccatcgttatgggtgctatacccagtgtgggctggaactgtatctgtgatattgaaaattgttccaacatggcacccctctacagtgactcttacttagtcttctgggccattttcaacttggtgacctttgtggtaatggtggttctctatgctcacatctttggctatgttcgccagaggactatgagaatgtctcggcatagttctggaccccggcggaatcgggataccatgatgagtcttctgaagactgtggtcattgtgcttggggcctttatcatctgctggactcctggattggttttgttacttctagacgtgtgctgtccacagtgcgacgtgctggcctatgagaaattcttccttctccttgctgaattcaactctgccatgaaccccatcatttactcctaccgcgacaaagaaatgagcgccacctttaggcagatcctctgctgccagcgcagtgagaaccccaccggccccacagaaggctcagaccgctcggcttcctccctcaaccacaccatcttggctggagttcacagcaatgaccactctgtggtttagaacggaaactgagatgaggaaccagccgtcctctcttggaggataaacagcctccccctacccaattgccagggcaaggtggggtgtgagagaggagaaaagtcaactcatgtacttaaacactaaccaatgacagtatttgttcctggaccccacaagacttgatatatattgaaaattagcttatgtgacaaccctcatcttgatccccatcccttctgaaagtaggaagttggagctcttgcaatggaattcaagaacagactctggagtgtccatttagactacactaactagacttttaaaagattttgtgtggtttggtgcaagtcagaataaattctggctagttgaatccacaacttcatttatatacaggcttcccttttttatttttaaaggatacgtttcacttaataaacacgtttatgcctatcagcatgtttgtgatggatgagactatggactgcttttaaactaccataattccattttttcccttacataggaaaactgtaagttggaattatcttttgtttagaaagcatgcatgtaatgtatgtatgcagtatgccttacttaaaaagattaaaaggatactaatgttaaatcttctaggaaatagaacctagacttcaaagccagtatttgtttaggtcatgaagcaaacaatgctctaatcacaatattaactgtttaattaaaatgttgtaacaagtataaaacagggaatgtaagtttattaccaaagtgatatgtattccaaaaaagtcatagaagatgaagcactataatattgttcccatatatttaaaatacccaagtacattctaattaccagtatatcagaggaaaattttcgtagtctttgtaaaataatatactcatcatagaaaacttgaaaaatgcagaaatgtataaaaaagcaaaaatgattactgataatatcacaacccagaagtaaccacctttaaaaagcaacccccatgtatgcctatatgtgtattgtatactttttttacataattggagtcatactgtaaacagttttataagtagatctttttcattgcaaaattgccacattttcttatggcatt

SEQ ID NO: 11578 - DNA, 5391 bp, Homo sapiens
  source 1..5391: mol_type = unassigned DNA
agagcctggggcgtgtcacagccgaaggggcagggcggcagcagcaggcgtctaagtaacttcagcgcctgcgcagaggctccccagcgtcgccctaggctgggactctagtaggtcttcggctcagttttggctgcagcgcccgcgtagatcgcttcggccgggttctacgcccggctcaactatgagccggtgcgcccaggcggcggaagtggcggccacagtgccaggtgccggcgtcgggaacgtggggctgcggccgcccatggtgccccgtcaggcgtccttcttcccgccgccggtgccgaaccccttcgtgcagcagacgcagatcggctccgcgaggcgggtccagattgtccttcttgggattatcttgcttccaattcgtgtcttattggttgcgttaattttattacttgcatggccatttgctgcaatttcaacagtatgctgtcctgaaaagctgacccacccaataactggttggaggaggaaaattactcaaacagctttgaaatttctgggtcgtgctatgttcttttcaatgggatttatagttgctgtaaaaggaaagattgcaagtcctttggaagcaccagtttttgttgctgcccctcattcaacattctttgatggaattgcctgtgttgtagctgggttaccttctatggtatctcgaaatgagaatgcacaagtccctctgattggcagactgttacgggctgtgcaaccagttttggtgtcccgtgtagatccggattcccgaaaaaacacaataaatgaaataataaagcgaacaacatcaggaggagaatggccccagatactagttttcccagaaggtacttgtactaatcgttcctgtttgattacttttaaaccaggagccttcattccaggagttccagtgcagccagtcctcctcagatacccaaacaagctggatactgtgacctggacatggcaaggatatacattcattcagctttgtatgcttactttctgccagctcttcacaaaggtagaagttgagtttatgccagttcaagtaccaaatgatgaagaaaaaaatgatcctgtcctttttgccaataaagtccggaatttaatggcagaagctctgggaataccagtaacagatcatacctatgaagactgcagattgatgatttcagcaggacagctaacattgcctatggaagctgggctggtggaatttactaaaattagccgaaaattgaaattagattgggatggtgttcgtaagcatttggatgaatatgcatctattgcgagttcctcaaaaggaggaagaattggaattgaagaattcgccaagtatttaaagttgcctgtttcagatgtcttgagacaactttttgcactctttgacaggaaccatgatggcagcattgacttccgagagtatgtgattggcctggctgtcttgtgcaacccttccaacacagaggagatcatccaggtggcatttaagctgtttgacgttgatgaggatggctacataacggaggaagagttctccaccattctacaggcttcccttggagtgcctgaccttgatgtttctggtctcttcaaggaaatagcccaaggggactcaatttcctatgaggaatttaaaagttttgccttaaagcatccagaatatgctaagatatttacaacatacctagacctccagacgtgccatgtgttttcattaccaaaagaagtccagacaaccccctccaccgccagtaataaagtcagccctgaaaagcatgaagagagtacctcagacaaaaaagatgactgaaagcagtatttccaataaggaaaacacagtagcttttgcttgaaattgtaaaggcacttattgataatacttttaatgtgttggtaatgatgtttaaaattgaaagatttttaaaacaaaaatgatagattttcttactaaaaatgtttttattaaccttgcttttattggaaaaaatcaagcaatatttcgttttcttttgtgttatattgtactttactgattcatttactggtgatacatatgtttttatggattttccagtttaatttgcatatacaaatgaatgcaatggtctattggtgagcattgagcaacactgtataaagttttaaaaatgtaaacactttttaatctactttcctctaaaaatcaataatattctattatttctaatccttttccacttgggaaataacaatgaagaatctgagaatttgacatctataactttacagattcatttttccatttaaatttcagtttcttggatcactgaatatgggaagggagagcttcactaattagacgcagcttcttaagaacttatattctctttgacatacatctctattgtagttttttgttttgttttgttttttgagatggagtcttgctctgtcacccaggctggagtgcagtggtgcaatctcagctcactgcaacctctgcctcctgggttcaagtgattctcgtacctcagactcccgagtagttgggattacaggtgcccaccaccacacccgactaatttttgtatttttagtagccatgtggttttgccatgttggccaggctggtttcgaactcctgacctcaggtgatccacccacctcagcctcccaaagtgctgggattacaggtgtgagccaccgttcccggcctattgtagattttcttaactacttgctaaggaaatcatatccttttacatgaactacaggtttagaacttggttttaagacaactgctatggccagaaggtaaatgggaattgccttattgaaggtaacattgattgcctaataagaaaatgaattgtttgccacagagttgaatttaatttgagttagatagttcagaatgtagcacttgccctataaatgaatcagatttgttctatttatataatattagaattaatatattatcatgtaagtgggaattttattttgttaagtggactctcaaattttagaacttgtgtgaaatatctcccagaaaacacaaaaggtttcaaggtatcacccaaagctagggaatcaacaaacgtactttattaatgcaagaccacaatttaagccccaggcaggaatccaacagtaacatttttcctttaggttaagcagtaatttttttgaattgtcatttttaatgggtctcacacatgcatattgctaatatcattcatgtttgaggttttcaacaaagaaccaatttattaatataatgtacaaaaatagttggttcattttctgaattcagtctttgaaataaaactccttgttttggccgtgtttctgaatgtattggtgattcacccccaagctaattttttaaagtcatttttgaagttgggaagtctcatgagagatgttgaagtatgtatttaatcaagagtcatgatttcaaactagttttacatattaagcagttagtgttctaatttaatgggtaaatgtgtgtttggataaatatctgaaaattttatccttaagtatatataattatttgcctcttatatgtcttaaagctatttaaacaaggtgttaaatgagccaaaacaattaagtaattagaacagtacatttttatcagagtgtctgtcatatgcaatgaatgtatgtaatactaaaaaatcatgactacttttatcaaagaaaaaccacacattaatcctattaatcatgaaagcgtagcattgtaaattaaaggttttctttgaggctcttgaaagtgatcccattgctttcctgttttaaaaatattttatgctctttatttccacttctgtgaatgtgatatttctattttgtgattatgttactgaataaacaaacttgctacataaaattcttagcaattaaaaaaattctgattctgccattttgtctcaaatgtaatatacccttttaatatcatatgtttacatatttatgaatgattaatcatttttgtttgcattaaactttatgaaatgtcagaaatgattttactctaatgaaactcaaattttgcccaaagtagcaatattcttaaagatgttgaattttgactggttgaattttatatagtaacacacaagtcgtgatcatcaatattattgcagaccaggactctgcttatatgccttgctaacaaagatttctttcacagaggcttttctcctctcaagacttaaagtaagaattacattttattaagtcagttaaatgcaccatggcttcatatagtaatataaaaaaactctttgaagtgagaaatattatatcctaaaacctctaaaccacaaacattcaattgaaagagttctgttgaaggataatgacatactgactgcttacagaccaagttgcttgcattttgtatgtttagccctcctttgccactgcttttagagccttggaaggctaagtgtgatagtaatgctagctctaatgcatatttaaaggagactgcctcgcttttagaagacatctggtctgctctctgcatgaggcacagcagtaaagctctttgattcccagaatcaagaactctccccttcagactattaccgaatgcaaggtggttaattgaaggccactaattgatgctcaaatagaaggatattgactatattggaacagatggagtctctactacaaaagtctttgggtatttgtttcttacatagaaaatgctaacatgaatagaaagatactggtgcaagaccattcccgggaaagtagacatacttacatttttttccttttctgctcatttgaatgaactcaattttatgttaaattgttatatcagagtgacaaataagtgctatggcttgatagaagtgaagctcttcacatatattcaaaatacatatcacaaactttggtaaataggatagtaatctgaagaacttttgccctttttaccccatttactgtaactcttgtttctaggtaatcgttctctctcaacaaacttctcaagcgtctgtgtaacaagccacatgttctaacaaattgtctccatcgcacttcaacagccaggtccctattttttataacgtattaaccttattattttcttattattttaaaagaatctatgcacattagcaaaatttaaaagatagagaaaaatataaacagaaaaaattatgtttacttctaccaccctaaatcaactattatcaattttatacatattttactccatcttttttcaaagtttcttacattttccaatgtcattaaaattctctgtgaatgtaaattttaaaaactgtacctactgttttttggaaatctgtaacaagctatgtgtaatcattcttctaatattaaacatattgtgtccagaattta

SEQ ID NO: 11579 - DNA, 832 bp, Homo sapiens
  source 1..832: mol_type = unassigned DNA
agaggctccccagcgtcgccctaggctgggactctagtaggtcttcggctcagttttggctgcagcgcccgcgtagatcgcttcggccgggttctacgcccggctcaactatgagccggtgcgcccaggcggcggaagtggcggccacagtgccaggtgccggcgtcgggaacgtggggctgcggccgcccatggtgccccgtcaggcgtccttcttcccgccgccggtgccgaaccccttcgtgcagcagacgcagatcggctccgcgaggcgggtccagattgtccttcttgggattatcttgcttccaattcgtgtcttattggttgcgttaattttattacttgcatggccatttgctgcaatttcaacagtatgctgtcctgaaaagctgacccacccaataactggttggaggaggtaagaaataattttgtccaaaatattaggacataatattaaattaagatatactaaatcaatataagaagagttcatcatagtttagtcagtgatctaactgctgttagataaaactattttatctgcctactcaataataaattttacagttttatctgcctactcaataataaataatttatttttatttctcatatgaaatacgtagaaattactgcccaaatgccaactacattatgataatcttctaaaagttataattgcctaatgttaaaatattttgttttctgagttattgccaaatgcgatacatccctagttcggaaagatacccaactactatacttgaaaccactgaagctacaaaataccttgctctcagttttcacatttgcttttctccctcta

SEQ ID NO: 11580 - DNA, 616 bp, Homo sapiens
  source 1..616: mol_type = unassigned DNA
ctgcccctcattcaacattctttgatggaattgcctgtgttgtagctgggttaccttctatggtatctcgaaatgagaatgcacaagtccctctgattggcagactgttacgggctgtgcaaccagttttggtgtcccgtgtagatccggattcccgaaaaaacacaataaatgaaataataaagcgaacaacatcaggaggagaatggccccagatactagttttcccagaaggtacttgtactaatcgttcctgtttgattacttttaaaccaggagccttcattccaggagttccagtgcagccagtcctcctcagatacccaaacaagctggatactgtgacctggacatggcaaggatatacattcattcagctttgtatgcttactttctgccagctcttcacaaaggtagaagttgagatgtttctgttcttttgggaaggaagcagcaagcattgtttaaaaatatcttccttcttttgcattttttctcttcgaagatttaaaagaagaattacacaaagaactagaactgcacatttgttaagattgtccttttaaaattattttctgttacaaggaaaaaataaaagattgattatagtgtcata

SEQ ID NO: 11581 - DNA, 5285 bp, Homo sapiens
  source 1..5285: mol_type = unassigned DNA
gaaatacacaaaataactctttagcttgctctgagcatttttttcttttctgatagcaactttttaacgttgtggatccacagaacttactgctttgctttctcttttggggtcataattcctctccccttggagtgtccactccatgcatgtgcacttaggatgtgtggctgtgtgtgtgtttgggaaccctcacggacacataaggttctatgtcatcaagtagaaaacctatctcattatcattataatgtcttcagatgctttctaaggttcacctcttttttaacattagaagtcagtgaatgcagctttcattataatttttaatactttaaaatgtttttgtattagctgccagaatgctcagcagcaaagttatgactcacttctagcaagtgtggtagttcttgcttcaagcatttggtttcatgtagcttttcttcttattttttctttgtcttgattttatcattacttaaaacaattctgttgaatattaacacttggaaaatgaaaaaaagtggagaaataaatcaatgaataaacaaatattttaagtggcataggcacagcatttaatattttgcttcagtagttcttaattaaaaaaaaaaaatccctcattttggtaagcactagggatttaccaacatttagcaaatgatttctgttacacatactcttaaaatattcagtctatttatactatttattaattttctctttatcataaaacttttattcacataaaaacacattataaactttcaatgtggttgcaggagccttcattccaggagttccagtgcagccagtcctcctcagatacccaaacaagctggatactgtgacctggacatggcaaggatatacattcattcagctttgtatgcttactttctgccagctcttcacaaaggtagaagttgagtttatgccagttcaagtaccaaatgatgaagaaaaaaatgatcctgtcctttttgccaataaagtccggaatttaatggcagaagctctgggaataccagtaacagatcatacctatgaagactgcagattgatgatttcagcaggacagctaacattgcctatggaagctgggctggtggaatttactaaaattagccgaaaattgaaattagattgggatggtgttcgtaagcatttggatgaatatgcatctattgcgagttcctcaaaaggaggaagaattggaattgaagaattcgccaagtatttaaagttgcctgtttcagatgtcttgagacaactttttgcactctttgacaggaaccatgatggcagcattgacttccgagagtatgtgattggcctggctgtcttgtgcaacccttccaacacagaggagatcatccaggtggcatttaagctgtttgacgttgatgaggatggctacataacggaggaagagttctccaccattctacaggcttcccttggagtgcctgaccttgatgtttctggtctcttcaaggaaatagcccaaggggactcaatttcctatgaggaatttaaaagttttgccttaaagcatccagaatatgctaagatatttacaacatacctagacctccagacgtgccatgtgttttcattaccaaaagaagtccagacaaccccctccaccgccagtaataaagtcagccctgaaaagcatgaagagagtacctcagacaaaaaagatgactgaaagcagtatttccaataaggaaaacacagtagcttttgcttgaaattgtaaaggcacttattgataatacttttaatgtgttggtaatgatgtttaaaattgaaagatttttaaaacaaaaatgatagattttcttactaaaaatgtttttattaaccttgcttttattggaaaaaatcaagcaatatttcgttttcttttgtgttatattgtactttactgattcatttactggtgatacatatgtttttatggattttccagtttaatttgcatatacaaatgaatgcaatggtctattggtgagcattgagcaacactgtataaagttttaaaaatgtaaacactttttaatctactttcctctaaaaatcaataatattctattatttctaatccttttccacttgggaaataacaatgaagaatctgagaatttgacatctataactttacagattcatttttccatttaaatttcagtttcttggatcactgaatatgggaagggagagcttcactaattagacgcagcttcttaagaacttatattctctttgacatacatctctattgtagttttttgttttgttttgttttttgagatggagtcttgctctgtcacccaggctggagtgcagtggtgcaatctcagctcactgcaacctctgcctcctgggttcaagtgattctcgtacctcagactcccgagtagttgggattacaggtgcccaccaccacacccgactaatttttgtatttttagtagccatgtggttttgccatgttggccaggctggtttcgaactcctgacctcaggtgatccacccacctcagcctcccaaagtgctgggattacaggtgtgagccaccgttcccggcctattgtagattttcttaactacttgctaaggaaatcatatccttttacatgaactacaggtttagaacttggttttaagacaactgctatggccagaaggtaaatgggaattgccttattgaaggtaacattgattgcctaataagaaaatgaattgtttgccacagagttgaatttaatttgagttagatagttcagaatgtagcacttgccctataaatgaatcagatttgttctatttatataatattagaattaatatattatcatgtaagtgggaattttattttgttaagtggactctcaaattttagaacttgtgtgaaatatctcccagaaaacacaaaaggtttcaaggtatcacccaaagctagggaatcaacaaacgtactttattaatgcaagaccacaatttaagccccaggcaggaatccaacagtaacatttttcctttaggttaagcagtaatttttttgaattgtcatttttaatgggtctcacacatgcatattgctaatatcattcatgtttgaggttttcaacaaagaaccaatttattaatataatgtacaaaaatagttggttcattttctgaattcagtctttgaaataaaactccttgttttggccgtgtttctgaatgtattggtgattcacccccaagctaattttttaaagtcatttttgaagttgggaagtctcatgagagatgttgaagtatgtatttaatcaagagtcatgatttcaaactagttttacatattaagcagttagtgttctaatttaatgggtaaatgtgtgtttggataaatatctgaaaattttatccttaagtatatataattatttgcctcttatatgtcttaaagctatttaaacaaggtgttaaatgagccaaaacaattaagtaattagaacagtacatttttatcagagtgtctgtcatatgcaatgaatgtatgtaatactaaaaaatcatgactacttttatcaaagaaaaaccacacattaatcctattaatcatgaaagcgtagcattgtaaattaaaggttttctttgaggctcttgaaagtgatcccattgctttcctgttttaaaaatattttatgctctttatttccacttctgtgaatgtgatatttctattttgtgattatgttactgaataaacaaacttgctacataaaattcttagcaattaaaaaaattctgattctgccattttgtctcaaatgtaatatacccttttaatatcatatgtttacatatttatgaatgattaatcatttttgtttgcattaaactttatgaaatgtcagaaatgattttactctaatgaaactcaaattttgcccaaagtagcaatattcttaaagatgttgaattttgactggttgaattttatatagtaacacacaagtcgtgatcatcaatattattgcagaccaggactctgcttatatgccttgctaacaaagatttctttcacagaggcttttctcctctcaagacttaaagtaagaattacattttattaagtcagttaaatgcaccatggcttcatatagtaatataaaaaaactctttgaagtgagaaatattatatcctaaaacctctaaaccacaaacattcaattgaaagagttctgttgaaggataatgacatactgactgcttacagaccaagttgcttgcattttgtatgtttagccctcctttgccactgcttttagagccttggaaggctaagtgtgatagtaatgctagctctaatgcatatttaaaggagactgcctcgcttttagaagacatctggtctgctctctgcatgaggcacagcagtaaagctctttgattcccagaatcaagaactctccccttcagactattaccgaatgcaaggtggttaattgaaggccactaattgatgctcaaatagaaggatattgactatattggaacagatggagtctctactacaaaagtctttgggtatttgtttcttacatagaaaatgctaacatgaatagaaagatactggtgcaagaccattcccgggaaagtagacatacttacatttttttccttttctgctcatttgaatgaactcaattttatgttaaattgttatatcagagtgacaaataagtgctatggcttgatagaagtgaagctcttcacatatattcaaaatacatatcacaaactttggtaaataggatagtaatctgaagaacttttgccctttttaccccatttactgtaactcttgtttctaggtaatcgttctctctcaacaaacttctcaagcgtctgtgtaacaagccacatgttctaacaaattgtctccatcgcacttcaacagccaggtccctattttttataacgtattaaccttattattttcttattattttaaaagaatctatgcacattagcaaaatttaaaagatagagaaaaatataaacagaaaaaattatgtttacttctaccaccctaaatcaactattatcaattttatacatattttactccatcttttttcaaagtttcttacattttccaatgtcattaaaattctctgtgaatgtaaattttaaaaactgtacctactgttttttggaaatctgtaacaagctatgtgtaatcattcttctaatattaaacatattgtgtccagaa

SEQ ID NO: 11582 - DNA, 712 bp, Homo sapiens
  source 1..712: mol_type = unassigned DNA
gtgatcttagccctctttttagagttgaaatggttcatcaaagttaaatgacatactagttaacacacaagcagacccagggcttagaaacagatctcctgagtacaagcccagtgccccattacctcatataacctatgttctagaaaggtagatgattcaatatattgataatgtataaattaatttacttggcatttaatgtcttaggcttaagacattgttatggaaaggtatatttgtctttcagtttatgccagttcaagtaccaaatgatgaagaaaaaaatgatcctgtcctttttgccaataaagtccggaatttaatggcagaagctctgggaataccagtaacagatcatacctatgaagactgcagattgatgatttcagcaggacagctaacattgcctatggaagctgggctggtggaatttactaaaattagccgaaaattgaaattagattgggatggtgttcgtaagcatttggatgaatatgcatctattgcgagttcctcaaaaggaggaagaattggaattgaagaattcgccaagtatttaaagttgcctgtttcagatgtcttgagacaactttttgcactctttgacaggaaccatgatggcagcattgacttccgagagtatgtgattggcctggctgtcttgtgcaacccttccaacacagaggagatcatccaggtggcatttaag

SEQ ID NO: 11583 - DNA, 482 bp, Homo sapiens
  source 1..482: mol_type = unassigned DNA
cctatgaagactgcagattgatgatttcagcaggacagctaacattgcctatggaagctgggctggtggaatttactaaaattagccgaaaattgaaattagattgggatggtgttcgtaagcatttggatgaatatgcatctattgcgagttcctcaaaaggaggaagaattggaattgaagaattcgccaagtatttaaagttgcctgtttcagatgtcttgagacaactttttgcactctttgacagggtatgttaaaatttaatctttcacatttttactctgtcagtcctacagtgagtaaatcaatatggtaggcaatttgaaaaacttgataggtcagtgttagaagaatcaaggctgagcctatggtttaattgcatgattttgtttttttctccttaatagtaatattaataattgtgtgtgtgtattgtaacatttattatactgtcatatataataaaatatcatatcata

SEQ ID NO: 11584 - DNA, 423 bp, Homo sapiens
  source 1..423: mol_type = unassigned DNA
actagagataacaattggcccaggcagttggaagactggtgagcctttgcagcctatttggttaccgcattttcgcatgaactgatttgaaccatgatggcagcattgacttccgagagtatgtgattggcctggctgtcttgtgcaacccttccaacacagaggagatcatccaggtggcatttaagctgtttgacgttgatgaggatggctacataacggaggaagagttctccaccattctacaggcttcccttggagtgcctgaccttgatgtttctggtctcttcaaggaaatagcccaaggggactcaatttcctatgaggaatttaaaagttttgccttaaagcatccagaatatgctaagatatttacaacatacctagacctccagacgtgccatgtgttttcattaccaaaag

SEQ ID NO: 11585 - DNA, 551 bp, Homo sapiens
  source 1..551: mol_type = unassigned DNA
atgtttgaattattaaagactttattttccaagattattccctaccactatgatcctgagggagctaattcttacattttattttcttcagctgtttgacgttgatgaggatggctacataacggaggaagagttctccaccattctacaggcttcccttggagtgcctgaccttgatgtttctggtctcttcaaggaaatagcccaaggggactcaatttcctatgaggaatttaaaagttttgccttaaagcatccagaatatgctaagatatttacaacatacctagacctccagacgtgccatgtgttttcattaccaaaagaagtccagacaaccccctccaccgccagtaataaagtcagccctgaaaagcatgaagagagtacctcagacaaaaaagatgactgaaagcagtatttccaataaggaaaacacagtagcttttgcttgaaattgtaaaggcacttattgataatacttttaatgtgttggtaatgatgtttaaaattgaaagatttttaaaacaaaaatgatagattttcttact

SEQ ID NO: 11586 - DNA, 2262 bp, Homo sapiens
  source 1..2262: mol_type = unassigned DNA
ggcgccctgacaacgcgggcgggctgggctgcgccgcctgctccccgcccctcggccgcctgcaccgggcggggcccgggccagagcgccgccgccgccgctgctgcagcagcagctgctctgcagagtggtggccggggccagggccggggtgccctccctcccaccttctcccgccatgagccagggaagtccgggggactgggcccccctagatcccacccccggacccccagcatcccccaaccccttcgtgcatgagttacatctctctcgcctccagagggttaagttctgcctcctgggggcattgctggcccccatccgagtgcttctggcctttatcgtcctctttctcctctggccctttgcctggcttcaagtggccggtcttagtgaggagcagcttcaggagccaattacaggatggaggaagactgtgtgccacaacggggtgctaggcctgagccgcctgctgtttttcctgctgggcttcctccggattcgcgttcgtggccagcgagcctctcgccttcaagcccctgtccttgttgctgccccacactccactttctttgaccccattgttctgctgccctgtgacctgcccaaagttgtgtcccgagctgagaacctttccgttcctgtcattggagcccttcttcgattcaaccaagccatcctggtatcccggcatgacccggcttctcgacgcagagtggtggaggaggtccgaaggcgggccacctcaggaggcaagtggccgcaggtgctattctttcctgagggcacctgttccaacaagaaggctttgcttaagttcaaaccaggagccttcatcgcaggggtgcctgtgcagcctgtcctcatccgctaccccaacagtctggacaccaccagctgggcatggaggggtcctggagtactcaaagtcctctggctcacagcctctcagccctgcagcattgtggatgtggagttccttcctgtgtatcaccccagccctgaggagagcagggaccccaccctctatgccaacaatgttcagagggtcatggcacaggctctgggcattccagccaccgaatgtgagtttgtagggagcttacctgtgattgtggtgggccggctgaaggtggcgttggaaccacagctctgggaactgggaaaagtgcttcggaaggctgggctgtccgctggctatgtggacgctggggcagagccaggccggagtcgaatgatcagccaggaagagtttgccaggcagctacagctctctgatcctcagacggtggctggtgcctttggctacttccagcaggataccaagggtttggtggacttccgagatgtggcccttgcactagcagctctggatgggggcaggagcctggaagagctaactcgtctggcctttgagctctttgctgaagagcaagcagagggtcccaaccgcctgctgtacaaagacggcttcagcaccatcctgcacctgctgctgggttcaccccaccctgctgccacagctttgcatgctgagctgtgccaggcaggatccagccaaggcctctccctctgtcagttccagaacttctccctccatgacccactctatgggaaactcttcagcacctacctgcgccccccacacacctctcgaggcacctcccagacaccaaatgcctcatccccaggcaaccccactgctctggccaatgggactgtgcaagcacccaagcagaagggagactgagtgcctcagcctctcaccccctcctcctcagggcagcgctaggggcctcccctatgcctcagccccatctctgctcctgtttgaattttgttattgttgtttggttgttgtttttttaagttgattttaattttttgtttggttgatttttttgtaaaaaactattttatatataaatataaatctatatctatatctattaaaaaaaatgaagtccagtcatattgatgttaccattacttgggaaggaaagggatgaatggttgtaggacgcccgttggaaaatcacaaatgtttccaaggttcgtcctcttggccatagctggatgaatcttcctcttcggacagggctctttcctgcacagaaatcatactgaggttccatatcctccctcctgctgtcatctcctatatgtacattttaacagacttcctcgtgaacctcttttcagcccattccctcttgctctgtcctcattaaagattaaaaaatagcttgctaccattcc

SEQ ID NO: 11587 - DNA, 1357 bp, Homo sapiens
  source 1..1357: mol_type = unassigned DNA
ttccttcctgtgtatcaccccagccctgaggagagcagggaccccaccctctatgccaacaatgttcagagggtcatggcacaggctctgggcattccagccaccgaatgtgagtttgtagggagcttacctgtgattgtggtgggccggctgaaggtggcgttggaaccacagctctgggaactgggaaaagtgcttcggaaggctgggctgtccgctggctatgtggacgctggggcagagccaggccggagtcgaatgatcagccaggaagagtttgccaggcagctacagctctctgatcctcagacggtggctggtgcctttggctacttccagcaggataccaagggtttggtggacttccgagatgtggcccttgcactagcagctctggatgggggcaggagcctggaagagctaactcgtctggcctttgaggtaatggggggtggcggtggtggggggtgcttagtggctatgctcaccccgctccaggaggcctattttggtatgctgtttccagtagcttctagatactaggcatttggtatccaacctagtgccacagtgcctaaaactgcagacccccggcctctatgttgagacctagctgggcacaagaagaaggaagaagaaggaaaaagctataaagtctacagttctgcagaaagggcactggagggtcagggaaggcttgtgcaccacccttttggaagaggaggagcctgtcaggccagtctgtggggcagggtgaggccatggcatgaggagagaacttgactcttatccctttctctcccaagctctttgctgaagagcaagcagagggtcccaaccgcctgctgtacaaagacggcttcagcaccatcctgcacctgctgctgggttcaccccaccctgctgccacagctttgcatgctgagctgtgccaggcaggatccagccaaggcctctccctctgtcagttccagaacttctccctccatgacccactctatgggaaactcttcagcacctacctgcgccccccacacacctctcgaggcacctcccagacaccaaatgcctcatccccaggcaaccccactgctctggccaatgggactgtgcaagcacccaagcagaagggagactgagtgcctcagcctctcaccccctcctcctcagggcagcgctaggggcctcccctatgcctcagccccatctctgctcctgtttgaattttgttattgttgtttggttgttgtttttttaagttgattttaattttttgtttggttgatttttttgtaaaaaactattttatatataaatataaatctatatctatatctattaaaaaaaatgaagtcca

SEQ ID NO: 11588 - DNA, 672 bp, Homo sapiens
  source 1..672: mol_type = unassigned DNA
ttccttcctgtgtatcaccccagccctgaggagagcagggaccccaccctctatgccaacaatgttcagagggtcatggcacaggctctgggcattccagccaccgaatgtgagtttgtagggagcttacctgtgattgtggtgggccggctgaaggtggcgttggaaccacagctctgggaactgggaaaagtgcttcggaaggctgggataccaagggtttggtggacttccgagatgtggcccttgcactagcagctctggatgggggcaggagcctggaagagctaactcgtctggcctttgagctctttgctgaagagcaagcagagggtcccaaccgcctgctgtacaaagacggcttcagcaccatcctgcacctgctgctgggttcaccccaccctgctgccacagctttgcatgctgagctgtgccaggcaggatccagccaaggcctctccctctgtcagttccagaacttctccctccatgacccactctatgggaaactcttcagcacctacctgcgccccccacacacctctcgaggcacctcccagacaccaaatgcctcatccccaggcaaccccactgctctggccaatgggactgtgcaagcacccaagcagaagggagactgagtgcctcagcctctcaccccctcctcctcag

SEQ ID NO: 11589 - DNA, 939 bp, Homo sapiens
  source 1..939: mol_type = unassigned DNA
gggaaggagcccatagttagagattggtgagtatcgaaatctctcttctcttagactcaaagtcctctggctcacagcctctcagccctgcagcattgtggatgtggagttccttcctgtgtatcaccccagccctgaggagagcagggaccccaccctctatgccaacaatgttcagagggtcatggcacaggctctgggcattccagccaccgaatgtgagtttgtagggagcttacctgtgattgtggtgggccggctgaaggtggcgttggaaccacagctctgggaactgggaaaagtgcttcggaaggctgggctgtccgctggctatgtggacgctggggcagagccaggccggagtcgaatgatcagccaggaagagtttgccaggcagctacagctctctgatcctcagacggtggctggtgcctttggctacttccagcaggtaaaggagctggaacaaagagcagagcagaacccaggcttccctccaggctgacatgttcctagtggccgtatcagtcactcacagtttggagtcctcagtggatgttctcacagctgttgttagatggccatcccctgagatccactgaagattcattttttaatcaggcatccagtgcattgaagagcaatgttatcatcatgaggaggaacaagggagaaataatcagtaaggactataaatttctgaaaccactttagagagtggcgaaggtggggaatcataagaccttttggggtgctgggtgagggtctttgaaggagagtcatgaaggttacgtgggaagatgacatgtagaagaaacaacaccggacagttagatggttgagagcttgagacccagctatatctgtaggacttgggcagattattttaaatatcctatagcttctctagaggaattttctcaagattcttagcaagcc

SEQ ID NO: 11590 - DNA, 577 bp, Homo sapiens
  source 1..577: mol_type = unassigned DNA
gggggtggaaatgggatttaggagccttcatcgcaggggtgcctgtgcagcctgtcctcatccgctaccccaacagtctggtgagtcttagtccaagaaagagtggaaagggggagcacaaatccaccccaaatggaaataagtgaaaactgttggtgctttaatgggatgtgcattgggggctgtgaccagaggtgggatcaggccctctgttcaaaggtgattggccagttccagggggaaaaagtaatgctcttatgccctcacctgtgtttctcccataggacaccaccagctgggcatggaggggtcctggagtactcaaagtcctctggctcacagcctctcagccctgcagcattgtggatgtggaggtatggctcccgtgggggcggtgggagaagtacatctcagactcctgaaaccttgggaaaagagggtgggagtggtcatacctcactttgaggttctgataagaattgtgtgtgtctgtgtttcagttccttcctgtgtatcaccccagccctgaggagagcagggaccccaccctctatgccaacaatgttcagagggtcat

SEQ ID NO: 11591 - DNA, 915 bp, Homo sapiens
  source 1..915: mol_type = unassigned DNA
gctgcagcagcagctgctctgcagagtggtggccggggccagggccggggtgccctccctcccaccttctcccgccatgagccagggaagtccgggggactgggcccccctagatcccacccccggacccccagcatcccccaaccccttcgtgcatgagttacatctctctcgcctccagagggttaagttctgcctcctgggggcattgctggcccccatccgagtgcttctggcctttatcgtcctctttctcctctggccctttgcctggcttcaagtggccggtcttagtgaggagcagcttcaggagccaattacaggatggaggaagactgtgtgccacaacggggtgctaggcctgagccgcctgctgtttttcctgctgggcttcctccggattcgcgttcgtggccagcgagcctctcgccttcaagcccctgtccttgttgctgccccacactccactttctttgaccccattgttctgctgccctgtgacctgcccaaagttgtgtcccgagctgagaacctttccgttcctgtcattggagcccttcttcgattcaaccaagccatcctggtatcccggcatgacccggcttctcgacgcagagtggtggaggaggtccgaaggcgggccacctcaggaggcaagtggccgcaggtgggtaagggtctcaagaccatcttctcactttccatgtgctcctgaagaggcttccctttcctctctccacagccttcttcagtcttcttcacctcattctgctcttttttaccccaggtgctattctttcctgagggcacctgttccaacaagaaggctttgcttaagttcaaaccaggtgaataaaatgatagtgggtggtgggctgtaggaaaaagaagttccagatttggggagggactctg

SEQ ID NO: 11592 - DNA, 1349 bp, Homo sapiens
  source 1..1349: mol_type = unassigned DNA
gttttataaatggggtagggaccaactgaaagacaggaaaataaggcccttgatgccattaatcttttatcctcttgccctcattggtatcttcatcccaccttgggtcccagtcccctctcctgttcccacaccacctgtcacatgcaagggatgatggctgtctgctcctgggtctatgctttgtggaagaaggatgctgtggagggagcatatccaagctctaaagtggcattctctcccaccctttgcagttctgcctcctgggggcattgctggcccccatccgagtgcttctggcctttatcgtcctctttctcctctggccctttgcctggcttcaagtggccggtcttagtgaggagcagcttcaggagccaattacaggatggaggaagtaagtgagggatcagcccccagagaccctacttctcttccctgctgtctattcggctccctctttgagaagaagaaaagagagcattctgaaactattctgtctagcttgggtagatgagatgagtcagccaagctcagacgtggttcccagacctcacctctaagtaatgtgccctgataggtcccaaagtggccagagaccttggccccttggtcacatcctatttaagggtaaaagaggggtgccctactttcccggtgtctgaacctgggggcgggtgagggttagaaccactgcttccgctgatacccagccttgccctggcaggactgtgtgccacaacggggtgctaggcctgagccgcctgctgtttttcctgctgggcttcctccggattcgcgttcgtggccagcgagcctctcgccttcaagcccctgtccttgttgctgccccacactccactttctttgaccccattgttctgctgccctgtgacctgcccaaagttgtgtcccgagctgagaacctttccgttcctgtcattggaggtgagagagttcaaagggggtgaagggcagggtgacaactctgggcaaaaaaagtcaggaatggagacactggagtgaagaactggcctcaaagtggggagggactgttggcaagtgaaatataaattaacaccattagtcaaccagtcttagattctgagggctgggacagagagaaggtgttggagggagttctggtcagttctctaaaaggacaactactataaagggattgtcccagggcaaagataacaggccaggcacggtggctcgcgcctataatcccagcacgttgggaggccaaggcgggcggatcacctgaggtcgggagttcgagaccagcctgaccaacatggagaaaccctgtctctactaaaaatacaaaaaaagtagccgggcgt

SEQ ID NO: 11593 - DNA, 657 bp, Homo sapiens
  source 1..657: mol_type = unassigned DNA
ttaaatcctctaagtgctagatgctttttatggctttcggttttataaatggggtagggaccaactgaaagacaggaaaataaggcccttgatgccattaatcttttatcctcttgccctcattggtatcttcatcccaccttgggtcccagtcccctctcctgttcccacaccacctgtcacatgcaagggatgatggctgtctgctcctgggtctatgctttgtggaagaaggatgctgtggagggagcatatccaagctctaaagtggcattctctcccaccctttgcagttctgcctcctgggggcattgctggcccccatccgagtgcttctggcctttatcgtcctctttctcctctggccctttgcctggcttcaagtggccggtcttagtgaggagcagcttcaggagccaattacaggatggaggaagactgtgtgccacaacggggtgctaggcctgagccgcctgctgtttttcctgctgggcttcctccggattcgcgttcgtggccagcgagcctctcgccttcaagcccctgtccttgttgctgccccacactccactttctttgaccccattgttctgctgccctgtgacctgcccaaagttgtgtcccgagctgagaacctttccgttcctgtcattggag

SEQ ID NO: 11594 - DNA, 341 bp, Homo sapiens
  source 1..341: mol_type = unassigned DNA
gtgtggggagcgggcgtcggaaggacccgtgaggataggaaaatggggccatttgagccctggcaaagttctgcctcctgggggcattgctggcccccatccgagtgcttctggcctttatcgtcctctttctcctctggccctttgcctggcttcaagtggccggtcttagtgaggagcagcttcaggagccaattacaggatggaggaagactgtgtgccacaacggggtgctaggcctgagccgcctgctgtttttcctgctgggcttcctccggattcgcgttcgtggccagcgagcctctcgccttcaagcccctgtccttgttgctgccccacac

SEQ ID NO: 11595 - DNA, 1719 bp, Homo sapiens
  source 1..1719: mol_type = unassigned DNA
cagcatcccccaaccccttcgtgcatgagttacatctctctcgcctccagagggttaagttctgcctcctgggggcattgctggcccccatccgagtgcttctggcctttatcgtcctctttctcctctggccctttgcctggcttcaagtggccggtcttagtgaggagcagcttcaggagccaattacaggatggaggaagactgtgtgccacaacggggtgctaggcctgagccgcctgctgtttttcctgctgggcttcctccggattcgcgttcgtggccagcgagcctctcgccttcaagcccctgtccttgttgctgccccacactccactttctttgaccccattgttctgctgccctgtgacctgcccaaagttgtgtcccgagctgagaacctttccgttcctgtcattggagcccttcttcgattcaaccaagccatcctggtatcccggcatgacccggcttctcgacgcagagtggtggaggaggtccgaagcgggccacctcaggaggcaagtggccgcagtgctattctttcctgagggcacctgttccaacaagaaggctttgcttaagttcaaaccaggagccttcatcgcaggggtgcctgtgcagcctgtcctcatccgctaccccaacagtctggacaccaccagctgggcatggaggggtcctggagtactcaaagtcctctggctcacagcctctcagccctgcagcattgtggatgtggagttccttcctgtgtatcaccccagccctgaggagagcagggaccccaccctctatgccaacaatgttcagagggtcatggcacaggctctgggcattccagccaccgaatgtgagtttgtagggagcttacctgtgattgtggtgggccggctgaaggtggcgttggaaccacagctctgggaactgggaaaagtgcttcggaaggctgggctgtccgctggctatgtggacgctggggcagagccaggccggagtcgaatgatcagccaggaagagtttgccaggcagctacagctctctgatcctcagacggtggctggtgcctttggctacttccagcaggataccaagggtttggtggacttccgagatgtggcccttgcactagcagctctggatgggggcaggagcctggaagagctaactcgtctggcctttgagctctttgctgaagagcaagcagagggtcccaaccgcctgctgtacaaagacggcttcagcaccatcctgcacctgctgctgggttcaccccaccctgctgccacagctttgcatgctgagctgtgccaggcaggatccagccaaggcctctccctctgtcagttccagaacttctccctccatgacccactctatgggaaactcttcagcacctacctgcgccccccacacacctctcgaggcacctcccagacaccaaatgcctcatccccaggcaaccccactgctctggccaatgggactgtgcaagcacccaagcagaagggagactgagtgcctcagcctctcaccccctcctcctcagggcagcgctaggggcctcccctatgcctcagccccatctctgctcctgtttgaattttgttattgttgtttggttgttgtttttttaagttgattttaattttttgtttggttgatttttttgtaaaaaactattttatatataaatataaatctatatctatatctatt

SEQ ID NO: 11596 - DNA, 560 bp, Homo sapiens
  source 1..560: mol_type = unassigned DNA
aacagtttgtatgctggaagagttctgaaaagatctctgagggctggaagtgctaaggacaatttcataaagaagaaagaagagattttatcgacatcgaaagtaaatttgccctaaggacccctgaagacacagctgaggacacttgccacctcattcccggagtagcagagtccgtggctacctgtcatttcaatcacagcagcaaaaccttcatggtgatccatggctggacggtaacaggaatgtatgagagttgggtgccaaaacttgtggccgccctgtacaagagagaaccagactccaatgtcattgtggtggactggctgtcacgggctcaggagcattacccagtgtccgcgggctacaccaaactggtgggacaggatgtggcccggtttatcaactggatggaggaggagtttaactaccctctggacaatgtccatctcttgggatacagccttggagcccatgctgctggcattgcaggaagtctgaccaataagaaagtcaacagaattactggcctcgatccagctggacctaactttgagtat

SEQ ID NO: 11597 - DNA, 629 bp, Homo sapiens
  source 1..629: mol_type = unassigned DNA
gacaaacaggattcgtcaaaagagaggtgtattaaagtgccgatcaaatgtaatttaacagctaaactttccctccttggaaaacagggaaagctgcccacttctagctgccctgccatcccctttaaagggcgacttgctcagcgccaaaccgcggctccagccctctccagcctccggctcagccggctcatcagtcggtccgcgccttgcagctcctccagagggacgcgccccgagatggagagcaaagccctgctcgtgctgactctggccgtgtggctccagagtctgaccgcctcccgcggaggggtggccgccgccgaccaaagaagagattttatcgacatcgaaagtaaatttgccctaaggacccctgaagacacagctgaggacacttgccacctcattcccggagtagcagagtccgtggctacctgtcatttcaatcacagcagcaaaaccttcatggtgatccatggctggacggtaacaggaatgtatgagagttgggtgccaaaacttgtggccgccctgtacaagagagaaccagactccaatgtcattgtggtggactggctgtcacgggctcaggagcattacccagtgtccgcgggctacaccaaact

SEQ ID NO: 11598 - DNA, 559 bp, Homo sapiens
  source 1..559: mol_type = unassigned DNA
aaactttccctccttggaaaacagtcacataagcagccttggcgtgaaaacagtgtcagactcgattccccctcttcctcctcctcaagggaaagctgcccacttctagctgccctgccatcccctttaaagggcgacttgctcagcgccaaaccgcggctccagccctctccagcctccggctcagccggctcatcagtcggtccgcgccttgcagctcctccagagggacgcgccccgagatggagagcaaagccctgctcgtgctgactctggccgtgtggctccagagtctgaccgcctcccgcggaggggtggccgccgccgaccaaagaagagattttatcgacatcgaaagtaaatttgccctaaggacccctgaagacacagctgaggacacttgccacctcattcccggagtagcagagtccgtggctacctgtcatttcaatcacagcagcaaaaccttcatggtgatccatggctggacggtaacaggaatgtatgagagttgggtgccaaaacttgtggccgccctgtacaagagagaaccagactc

SEQ ID NO: 11599 - DNA, 3846 bp, Homo sapiens
  source 1..3846: mol_type = unassigned DNA
tttaacgtgaatcgatgtaaacctgtgtttggtgcttagacagggggcccccgggtagagtggaaccccttaagctaagcgaacaggagcctaacaaagcaaatttttccgtctgccctttccccctcttctcgttggcagggttgatcctcattactgtttgctcaaacgtttagaagtgaatttaggtccctccccccaacttatgattttatagccaataggtgatgaggtttatttgcatatttccagtcacataagcagccttggcgtgaaaacagtgtcagactcgattccccctcttcctcctcctcaagggaaagctgcccacttctagctgccctgccatcccctttaaagggcgacttgctcagcgccaaaccgcggctccagccctctccagcctccggctcagccggctcatcagtcggtccgcgccttgcagctcctccagagggacgcgccccgagatggagagcaaagccctgctcgtgctgactctggccgtgtggctccagagtctgaccgcctcccgcggaggggtggccgccgccgaccaaagaagagattttatcgacatcgaaagtaaatttgccctaaggacccctgaagacacagctgaggacacttgccacctcattcccggagtagcagagtccgtggctacctgtcatttcaatcacagcagcaaaaccttcatggtgatccatggctggacggtaacaggaatgtatgagagttgggtgccaaaacttgtggccgccctgtacaagagagaaccagactccaatgtcattgtggtggactggctgtcacgggctcaggagcattacccagtgtccgcgggctacaccaaactggtgggacaggatgtggcccggtttatcaactggatggaggaggagtttaactaccctctggacaatgtccatctcttgggatacagccttggagcccatgctgctggcattgcaggaagtctgaccaataagaaagtcaacagaattactggcctcgatccagctggacctaactttgagtatgcagaagccccgagtcgtctttctcctgatgatgcagattttgtagacgtcttacacacattcaccagagggtcccctggtcgaagcattggaatccagaaaccagttgggcatgttgacatttacccgaatggaggtacttttcagccaggatgtaacattggagaagctatccgcgtgattgcagagagaggacttggagatgtggaccagctagtgaagtgctcccacgagcgctccattcatctcttcatcgactctctgttgaatgaagaaaatccaagtaaggcctacaggtgcagttccaaggaagcctttgagaaagggctctgcttgagttgtagaaagaaccgctgcaacaatctgggctatgagatcaataaagtcagagccaaaagaagcagcaaaatgtacctgaagactcgttctcagatgccctacaaagtcttccattaccaagtaaagattcatttttctgggactgagagtgaaacccataccaatcaggcctttgagatttctctgtatggcaccgtggccgagagtgagaacatcccattcactctgcctgaagtttccacaaataagacctactccttcctaatttacacagaggtagatattggagaactactcatgttgaagctcaaatggaagagtgattcatactttagctggtcagactggtggagcagtcccggcttcgccattcagaagatcagagtaaaagcaggagagactcagaaaaaggtgatcttctgttctagggagaaagtgtctcatttgcagaaaggaaaggcacctgcggtatttgtgaaatgccatgacaagtctctgaataagaagtcaggctgaaactgggcgaatctacagaacaaagaacggcatgtgaattctgtgaagaatgaagtggaggaagtaacttttacaaaacatacccagtgtttggggtgtttcaaaagtggattttcctgaatattaatcccagccctacccttgttagttattttaggagacagtctcaagcactaaaaagtggctaattcaatttatggggtatagtggccaaatagcacatcctccaacgttaaaagacagtggatcatgaaaagtgctgttttgtcctttgagaaagaaataattgtttgagcgcagagtaaaataaggctccttcatgtggcgtattgggccatagcctataattggttagaacctcctattttaattggaattctggatctttcggactgaggccttctcaaactttactctaagtctccaagaatacagaaaatgcttttccgcggcacgaatcagactcatctacacagcagtatgaatgatgttttagaatgattccctcttgctattggaatgtggtccagacgtcaaccaggaacatgtaacttggagagggacgaagaaagggtctgataaacacagaggttttaaacagtccctaccattggcctgcatcatgacaaagttacaaattcaaggagatataaaatctagatcaattaattcttaataggctttatcgtttattgcttaatccctctctcccccttcttttttgtctcaagattatattataataatgttctctgggtaggtgttgaaaatgagcctgtaatcctcagctgacacataatttgaatggtgcagaaaaaaaaaaagaaaccgtaattttattattagattctccaaatgattttcatcaatttaaaatcattcaatatctgacagttactcttcagttttaggcttaccttggtcatgcttcagttgtacttccagtgcgtctcttttgttcctggctttgacatgaaaagataggtttgagttcaaattttgcattgtgtgagcttctacagattttagacaaggaccgtttttactaagtaaaagggtggagaggttcctggggtggattcctaagcagtgcttgtaaaccatcgcgtgcaatgagccagatggagtaccatgagggttgctatttgttgtttttaacaactaatcaagagtgagtgaacaactatttataaactagatctcctatttttcagaatgctcttctacgtataaatatgaaatgataaagatgtcaaatatctcagaggctatagctgggaacccgactgtgaaagtatgtgatatctgaacacatactagaaagctctgcatgtgtgttgtccttcagcataattcggaagggaaaacagtcgatcaagggatgtattggaacatgtcggagtagaaattgttcctgatgtgccagaacttcgaccctttctctgagagagatgatcgtgcctataaatagtaggaccaatgttgtgattaacatcatcaggcttggaatgaattctctctaaaaataaaatgatgtatgatttgttgttggcatcccctttattaattcattaaatttctggatttgggttgtgacccagggtgcattaacttaaaagattcactaaagcagcacatagcactgggaactctggctccgaaaaactttgttatatatatcaaggatgttctggctttacattttatttattagctgtaaatacatgtgtggatgtgtaaatggagcttgtacatattggaaaggtcattgtggctatctgcatttataaatgtgtggtgctaactgtatgtgtctttatcagtgatggtctcacagagccaactcactcttatgaaatgggctttaacaaaacaagaaagaaacgtacttaactgtgtgaagaaatggaatcagcttttaataaaattgacaacattttattaccac

SEQ ID NO: 11600 - DNA, 554 bp, Homo sapiens
  source 1..554: mol_type = unassigned DNA
agactcgattccccctcttcctcctcctcaagggaaagctgcccacttctagctgccctgccatcccctttaaagggcgacttgctcagcgccaaaccgcggctccagccctctccagcctccggctcagccggctcatcagtcggtccgcgccttgcagctcctccagagggacgcgccccgagatggagagcaaagccctgctcgtgctgactctggccgtgtggctccagagtctgaccgcctcccgcggaggggtggccgccgccgaccttattttgaagttacagatttttaaattttgagttgaaaaaaaagagcaaatttagattaaggaatgagaagtagtcctcgcagcctcatgaatctcctgaaatttcgaacggcaaaatctaaaatctacaagttattaccttcttacagtaaatagaaagaagagattttatcgacatcgaaagtaaatttgccctaaggacccctgaagacacagctgaggacacttgccacctcattcccggagtagcagagtccgtggctacctgtcatttcaatca

SEQ ID NO: 11601 - DNA, 566 bp, Homo sapiens
  source 1..566: mol_type = unassigned DNA
agactcgattccccctcttcctcctcctcaagggaaagctgcccacttctagctgccctgccatcccctttaaagggcgacttgctcagcgccaaaccgcggctccagccctctccagcctccggctcagccggctcatcagtcggtccgcgccttgcagctcctccagagggacgcgccccgagatggagagcaaagccctgctcgtgctgactctggccgtgtggctccagagtctgaccgcctcccgcggaggggtggccgccgccgaccaaagaagagattttatcgacatcgaaagtaaatttgccctaaggacccctgaagacacagctgaggacacttgccacctcattcccggagtagcagagtccgtggctacctgtcatttcaatcacagcagcaaaaccttcatggtgatccatggctggacggtgtattgggctgatgtatctatgacaagtggtaggtgggtattttaagaaagcttgtgtcatcatcttcaggtaacaggaatgtatgagagttgggtgccaaaacttgtggccgccctgtacaagagagaa

SEQ ID NO: 11602 - DNA, 463 bp, Homo sapiens
  source 1..463: mol_type = unassigned DNA
agcctccggctcagccggctcatcagtcggtccgcgccttgcagctcctccagagggacgcgccccgagatggagagcaaagccctgctcgtgctgactctggccgtgtggctccagagtctgaccgcctcccgcggaggggtggccgccgccgaccaaagaagagattttatcgacatcgaaagtaaatttgccctaaggacccctgaagacacagctgaggacacttgccacctcattcccggagtagcagagtccgtggctacctgtcatttcaatcacagcagcaaaaccttcatggtgatccatggctggacggtaagggaggctctttggggaagagtggattggggtggtgaggtatcctgactggcctgcccaattgttggggacccagtgatgggtccgcaccccacatctcacgtggatctccttacacttgaataaagacagttctggctca

SEQ ID NO: 11603 - DNA, 5835 bp, Homo sapiens
  source 1..5835: mol_type = unassigned DNA
atttctcttccgagagcttcagtttcctcacgtgccaagcggacgggttggaagttggtctttgccagctctgacaccttcattgcagttggctgaaccttgtgtcaaccatccattccaggagccagctatctgagattccaacaatgtctcacccatcttggctgccacccaaaagcactggtgagcccctcggccatgtgcctgcacggatggagaccacccattcctttgggaaccccagcatttcagtgtctacacaacagccacccaaaaagtttgccccggtagttgctccaaaacctaagtacaacccatacaaacaacctggaggtgagggtgattttcttccacccccacctccacctctagatgattccagtgcccttccatctatctctggaaactttcctcctccaccacctcttgatgaagaggctttcaaagtacaggggaatcccggaggcaagacacttgaggagaggcgctccagcctggacgctgagattgactccttgaccagcatcttggctgaccttgagtgcagctccccctataagcctcggcctccacagagctccactggttcaacagcctctcctccagtttcgaccccagtcacaggacacaagagaatggtcatcccgaaccaaccccctctaacagcaaccaagaagtctacattgaaaccacagcctgcaccccaggctggacccatccctgtggctccaatcggaacactcaaaccccagcctcagccagtcccagcctcctacaccacggcctccacttcttcaaggcctacctttaatgtgcaggtgaagtcagcccagcccagccctcattatatggctgccccttcatcaggacaaatttatggctcagggccccagggctataacactcagccagttcctgtctctgggcagtgtccacctccttcaacacggggaggcatggattatgcctacattccaccaccaggacttcagccggagcctgggtatgggtatgcccccaaccagggacgctattatgaaggctactatgcagcagggccaggctatgggggcagaaatgactctgaccctacctatggtcaacaaggtcacccaaatacctggaaacgggaaccagggtacactcctcctggagcagggaaccagaaccctcctgggatgtatccagtcactggtcccaagaagacctatatcacagatcctgtttcagccccctgtgcgccaccattgcagccaaagggtggccattcagggcaactggggccttcgtcagttgccccttcattccgcccagaggatgagcttgagcacctgaccaaaaagatgctgtatgacatggaaaatccacctgctgacgaatactttggtgagtggggcctagagctgacttctgaagtaactatcttgctctgatttccttccttagtaattggaactattatcagctccactggtaaagtatttgagtccagatgcatgagagttgatatacatccccgcacaactaagtaattgtaggatttgcatttgcaagactgccatagatgtgatgtctacttagcttatactaaaatttcagtggtccttagagtttccttagatacaaattttattgttgagacttattttttaccagtctaggcaacatggggagaccctgtctccattaaaaatacaaaaattagctgagtgtggtggcatgtgcctgcagtcccagctactcagaaggctgaggctggagaatcacctgagcctgggaggtcgaggctgcagtgagctgtggctcagtgagctgtggttgtgccactgcactccagcctggacaacagagtgagaccctgtttttttgttttttgtttttgtttttgttttttgttttaaaaaagaagacattttttgacaacttattagcttcccattaggcagaaataggatttctgtgtatgttcccatttctcactggtctaaagattcaagtaaaaaatgtggaattggatattgtctgatatccaatttccagattgtactcttaatttttttttctatctcagttgaagaaatgatgttttctttgtagttttaattttcccctcttcaaacttgttaataactaggaatggttaatccttccaatccatgaatataatgcaaatttatgaattatatgccgattgtgaggttctgtggacgcataacctgtcctcagtgaggttaaaattgttcagaaagaggtaagacaagcatacaaataattactagtctaggtagaaagtgataaaagacatgagaaggcttaggtcaattgttgcaaattttatttttattttattttattttatttatttttgagacagagccttgctctgtcacccaggctagagtatactggcgtgatcttggctcactgcaacctccacctccggattttgagcaattctcctgcctcagcctcccgagtagctgggattacaggtgcccaccgccacacctggctagtttttgtatttttagtagagacgaggtttcgccatgttggccaggctggtcttgaactcctgacctcaggtgatccacccgcctcagcctcccaaagtgctgggattacaggtgtgagccactgcgcccggccagaagttttaaaagctccatttattaggagcatccggaatactttggtaaagaattggtggcacttgaatctgagccctttaaaccagtgcctttcacattttctgtggtagaagaccattttcctcccaatctgttggagaccagtatttttgttgagtcagttaaaattaattactagggaaataaaagacacaaaataaaatggaagatgaaattttatcattattagagttaactgttaacgaattactcttttaaatttttatactagtttctaaatattaatcctttgttcctgtatttatctcatccagggtgataagcatttcttagacacccatccatggaccactttttgagtggcactgctttaaggacaaatagagaaacgacatttggggaacagtattagtaaaggcacaaagatggggaaattgcacaggatttttgcttcttcaaatattttctattttcatgtcttttttgctcctatatgggaatatgtaatgacaggtcaactgaccacaccagtccaaaaacacacagtagatgaagtaggaggtattaggatatgaaaaccctggcttttatttgtgttggggtggcagtttagcttagctaaaagagcaaaaagagtgggaatgaaacatctggttgtggtctcttctctgtccctcgctggccaagcaatactggcatgtcacccatctgcctgagccccatttcccacctcactatatcaacggttggggcaaatgttctctagcatttctttcaacagtaataagttcaatgtacaaacatccttaatctaaagtataacaataaagctaaacataaattgatggagattaacaacaatgcatggagaacagtaaaacaaaacatagaaaatccacgaaggtttctagttacatcaaaatacacaaaaagtttattaatgctcttgtcattgccatgtgaggagggtttataatggggtctaaaatacattttttaaaagtgaaaaataaggtctctgtatttaggtcctattaaaaaggaaaagctgacttaccaagtatatatgcttcaaatatcatagcaacaaaatatattgccacaaaaaaaaaactgaacatagatgctaattgcatgaatgaatatatattgaacactctgggaaacagatataaattattacctttcccttcaagaactgtccaagctctactacttagtagcttagaaaacttgaacaagtattattccctctaaaccttcatttttgttttgttttatctgtaatatgggaataataactagcttatactgttgttttaagaaatggatgaaatatttatacaaagcacttagccaagttcttggcatgtagaatatgctcaatacaatactcaaggttctcccatgctcttggggcttatagtttatttaagacataagatatgctcgttaaaaatccattaataatgctcaatttaagtttaagttcctagcaacaatagaacgtatgtcactggtaagtaatcattgccaaatggggatgaataaccatttgagaatttggaaaaatggctaacttttattgagtgcttatgatatggcagcactatattttatttacattataggaattaactcatttcactcttataggaaaacataaccctgtgaaatagatactattatcattttcagattttgaaattaaggcacagaaatattaatttgcctaatgtcaacagctaatacattgcagaactgaattagaatgcagatctgtacatttacacaccacactgtaaaagatggggaaagctagccaggctacatatttagaagagtgtttatggtggagattagctttggacagatgggaaataagagatgagcattctcttctaggtacacagaattaacaaaatataagttgaggccaggattatttaaagaaaatttacgttatgtagaaaacaaaaaaaaaagtgcctatggtaatattcaggctgctctgctaggtggtggtgggggtagatgtgggtcttacctttgaagttcttatagtctaataggatatgtgtacagagttatggtgttataagcacaaggcagaaagtgacaagtgacttaatcaatgttcaccaagtgttctttgagaattcagaaaaaggaaagagaaaatcaagagagagaaatggaaaagtatttatggaatacttagcctttgagtaagtctttaaaattgtgctaattgagatttggaagtaggaagatagtagagaagtgaagtcatttctcatgaggggagtttttgacataacagggaataaaaccactggagtgaagtgtccacgtgagaagtagcaaatattgggaaataaggttcaagtagtaggttaggaccaatctagggaaggctgtcaatgtccggctaaaggctaagaacgttattgtctataatgagcccttgcacattgagatcacatgccatgagaactgctctgtggatagtggttaaaaacatgcactccagagccaggatgcacttcttaccagcaagatgaaatcaagaggcaaaggactagtgaaaagaactgtcctttattgttccgtgctttaaacatttctcaagcaccttctctgtgcctgctactgtgctgggtgttcaggacacccaaatgcagaggctctgccctcatggggctcacgggttcctaggaaggacaagagagtcacagatgtcaaggattttagtgcagatattagcactgtgttgggtgtgactgagctgctatgtgagagtccataagtctgcctgaggatgagcggaaagaatacatagcagtgtgtttgcatcagcagggcctgacccaagagcgataaagtcttctcttcctttctgtcagagttttacctttggcctattctggactgcaaatagcattgccaagcacttcccttaaataacttctcttttttgcaggactatcctctcagccctgccaaaaccccatcacctactctttctttactactttgcctatttaatgctggaatttttatttaaactgtagctgatttactgaaggtaattaagtgctttcatgctgtagatctcctgctagactacaggctgtacttgggagtgagagtgaacaaaatgtaaataaatgatgtcaacaga

SEQ ID NO: 11604 - DNA, 612 bp, Homo sapiens
  source 1..612: mol_type = unassigned DNA
ggggaggaaggagggggaaaggcaccaaccagcagccgctccagccctgccgaagtttcactttttgtctgtgggttcgttcccgggtcccgcgcgagctttcccgggataagtagctttagcgatcgggagacagccgggcgctgcaagattccaacaatgtctcacccatcttggctgccacccaaaagcactggtgagcccctcggccatgtgcctgcacggatggagaccacccattcctttgggaaccccagcatttcagtgtctacacaacagccacccaaaaagtttgccccggtagttgctccaaaacctaagtacaacccatacaaacaacctggaggtgagggtgattttcttccacccccacctccacctctagatgattccagtgcccttccatctatctctggaaactttcctcctccaccacctcttgatgaagaggctttcaaagtacaggggaatcccggaggcaagacacttgaggagaggcgctccagcctggacgctgagattgactccttgaccagcatcttggctgaccttgagtgcagctccccctataagcctcggcctccacagagctccactggttcaacagcctct

SEQ ID NO: 11605 - DNA, 521 bp, Homo sapiens
  source 1..521: mol_type = unassigned DNA
gaggaaggagggggaaaggcaccaaccagcagccgctccagccctgccgaagtttcactttttgtctgtgggttcgttcccgggtcccgcgcgagctttcccgggataagtagctttagcgatcgggagacagccgggcgctgcaaggtgggaactttgaggctcagagacagagcagaagacagaacctggtcttctgattccctgtgttctgcttttttcattgttccactggacgctcatcagagggaagatctttttcctcaattgggacatggatgaacctggaaaccatcattctcagcaaactatcgcaaggacagaaaaccaaagaccgcatgttcttactcacagattccaacaatgtctcacccatcttggctgccacccaaaagcactggtgagcccctcggccatgtgcctgcacggatggagaccacccattcctttgggaaccccagcatttcagtgtctacacaacagccacccaaaaagtttgccccggtagttgctccaaaacc

SEQ ID NO: 11606 - DNA, 502 bp, Homo sapiens
  source 1..502: mol_type = unassigned DNA
actttttgtctgtgggttcgttcccgggtcccgcgcgagctttcccgggataagtagctttagcgatcgggagacagccgggcgctgcaaggtgggaactttgaggctcagagacagagcagaagacagaacctggtcttctgattccctgtgttctgcttttttcattgttccactggacgctcatcagagggaagatctttttcctcaattgattccaacaatgtctcacccatcttggctgccacccaaaagcactggtgagcccctcggccatgtgcctgcacggatggagaccacccattcctttgggaaccccagcatttcagtgtctacacaacagccacccaaaaagtttgccccggtagttgctccaaaacctaagtacaacccatacaaacaacctggaggtgagggtgattttcttccacccccacctccacctctagatgattccagtgcccttccatctatctctggaaactttcctcctccaccacct

SEQ ID NO: 11607 - DNA, 343 bp, Homo sapiens
  source 1..343: mol_type = unassigned DNA
gtgggttcgttcccgggtcccgcgcgagctttcccgggataagtagctttagcgatcgggagacagccgggcgctgcaagcattgcagttggctgaaccttgtgtcaaccatccattccaggagccagctatctgagattccaacaatgtctcacccatcttggctgccacccaaaagcactggtgagcccctcggccatgtgcctgcacggatggagaccacccattcctttgggaaccccagcatttcagtgtctacacaacagccacccaaaaagtttgccccggtagttgctccaaaacctaagtacaacccatacaaacaacctggaggtgagggtga

SEQ ID NO: 11608 - DNA, 386 bp, Homo sapiens
  source 1..386: mol_type = unassigned DNA
aggaattgaagagaatcctgacaagtggcatgttgggaaaggcctgaaggaagccagaccagcttgctctcagagctccttgggtcccctgcggcccccaggtgatcttcagcaagacctgcattgcagttggctgaaccttgtgtcaaccatccattccaggagccagctatctgagattccaacaatgtctcacccatcttggctgccacccaaaagcactggtgagcccctcggccatgtgcctgcacggatggagaccacccattcctttgggaaccccagcatttcagtgtctacacaacagccacccaaaaagtttgccccggtagttgctccaaaacctaagtacaacccatacaaacaacctggaggtgagggtgatt

SEQ ID NO: 11609 - DNA, 535 bp, Homo sapiens
  source 1..535: mol_type = unassigned DNA
cccaccctgcccccacccttcccccttcattcctctgtcccttgttctggaagctgaggcgagaatgtctcagttctgttcccttcaggcttcgagaccaccgccttgctgtgtcccgtagtggactgagggcctgcaagagggagtgagggctagtggagggccagctgcctgtgggggctggacatcgtattccaacaatgtctcacccatcttggctgccacccaaaagcactggtgagcccctcggccatgtgcctgcacggatggagaccacccattcctttgggaaccccagcatttcagtgtctacacaacagccacccaaaaagtttgccccggtagttgctccaaaacctaagtacaacccatacaaacaacctggaggtgagggtgattttcttccacccccacctccacctctagatgattccagtgcccttccatctatctctggaaactttcctcctccaccacctcttgatgaagaggctttcaaagtacaggggaatcccggaggcaagacacttgagga

SEQ ID NO: 11610 - DNA, 400 bp, Homo sapiens
  source 1..400: mol_type = unassigned DNA
aatgtctcagttctgttcccttcaggcttcgagaccaccgccttgctgtgtcccgtagtggactgagggcctgcaagagggagtgagggctagtggagggccagctgcctgtgggggctggacatcgtgtgggaactttgaggctcagagacagagcagaagacagaacctggtcttctgattccctgtgttctgcttttttcattgttccactggacgctcatcagagggaagatctttttcctcaattgattccaacaatgtctcacccatcttggctgccacccaaaagcactggtgagcccctcggccatgtgcctgcacggatggagaccacccattcctttgggaaccccagcatttcagtgtctacacaacagccacccaaaaagtttgcccc

SEQ ID NO: 11611 - DNA, 18277 bp, Homo sapiens
  source 1..18277: mol_type = unassigned DNA
gtcacttttatttgggggtgtggacagctgctttcccaggggagtacttcttacagtgggatttcaagacaagatcggcctgaagaaaaattatatttgtatattttttaaaaagtgggaactttgaggctcagagacagagcagaagacagaacctggtcttctgattccctgtgttctgcttttttcattgttccactggacgctcatcagagggaagatctttttcctcaattgattccaacaatgtctcacccatcttggctgccacccaaaagcactggtgagcccctcggccatgtgcctgcacggatggagaccacccattcctttgggaaccccagcatttcagtgtctacacaacagccacccaaaaagtttgccccggtagttgctccaaaacctaagtacaacccatacaaacaacctggaggtgagggtgattttcttccacccccacctccacctctagatgattccagtgcccttccatctatctctggaaactttcctcctccaccacctcttgatgaagaggctttcaaagtacaggggaatcccggaggcaagacacttgaggagaggcgctccagcctggacgctgagattgactccttgaccagcatcttggctgaccttgagtgcagctccccctataagcctcggcctccacagagctccactggttcaacagcctctcctccagtttcgaccccagtcacaggacacaagagaatggtcatcccgaaccaaccccctctaacagcaaccaagaagtctacattgaaaccacagcctgcaccccaggctggacccatccctgtggctccaatcggaacactcaaaccccagcctcagccagtcccagcctcctacaccacggcctccacttcttcaaggcctacctttaatgtgcaggtgaagtcagcccagcccagccctcattatatggctgccccttcatcaggacaaatttatggctcagggccccagggctataacactcagccagttcctgtctctgggcagtgtccacctccttcaacacggggaggcatggattatgcctacattccaccaccaggacttcagccggagcctgggtatgggtatgcccccaaccagggacgctattatgaaggctactatgcagcagggccaggctatgggggcagaaatgactctgaccctacctatggtcaacaaggtcacccaaatacctggaaacgggaaccagggtacactcctcctggagcagggaaccagaaccctcctgggatgtatccagtcactggtcccaagaagacctatatcacagatcctgtttcagccccctgtgcgccaccattgcagccaaagggtggccattcagggcaactggggccttcgtcagttgccccttcattccgcccagaggatgagcttgagcacctgaccaaaaagatgctgtatgacatggaaaatccacctgctgacgaatactttggccgctgtgctcgctgtggagaaaacgtagttggggaaggtacaggatgcactgccatggatcaggtcttccacgtggattgttttacctgcatcatctgcaacaacaagctccgagggcagccattctatgctgtggaaaagaaagcatactgcgagccctgctacattaatactctggagcagtgcaatgtgtgttccaagcccatcatggagcggattctccgagccaccgggaaggcctatcatcctcactgtttcacctgcgtgatgtgccaccgcagcctggatgggatcccattcactgtggatgctggcgggctcattcactgcattgaggacttccacaagaaatttgccccgcgatgttctgtgtgcaaggagcctattatgccagccccgggccaggaggagactgtccgtattgtggctttggatcgagatttccatgttcactgctaccgatgcgaggattgcggtggtctcctgtctgaaggagataaccaaggctgctaccccttggatgggcacatcctctgcaagacctgcaactctgcccgcatcagggtgttgaccgccaaggcgagcactgacctttagattcagtcacctgttcagccggcactgagaagaacgaacacaagaaaaagataagaaatactagagtaaaggccatcaaactacgcgatagtctctgttcttcatctgctattaaccttgccttagaaacacataaattatgagattttttttaaaagttgttaccaaatacacatttcacattgaatcatgtaggatcttgatgggcctttgttcccaaggacttccacatttttgcacagattatgctccatcccattcacttctgcattcctgtaacttttaatccctatgtttgtctcacttttcatctggttgaatggcttttcttagtgtggtatttgctgtcacatagtttttcctgggtgagtctgccaactcacaggtgcttttaggcttgaaatctccatcctatcatttccgttttgcctgtgactgtaaagagtagccattcttttcccatgtattgaagaggatattcttctcttgctttatactactcacgtccttggggagggaaatgcacaatttttttttgttaggctgtaaagaatttaagctgtaaattacataagttagaacaagcccaaatttaatttgcaaccatcagaattcagaatctatagtgaccagtgatcaaggctaattggaaaagagttatcggcccatagctaataagtagtgacagacaaccaagcttcaatatttttctaaagaaattacaggtgggatatgctagaaaaggcattttggggttatgtttaaaaaaacattattgtcccacaatattaccttaagatttttcttttccgcactacctgaacattgtaatacagacaaacttgatttcttctagaagataacattttcaatactgtcccacttctcatcttaaaaatattgtcatgtttattctaatatccaacacaactatcaaaattgcctttttctctagaggatgaaggctgtgaaaaaaccgttcaaattctcttctttttcttttttattaccaggtccattttgcctgacaattgcaaatcagagcatacaaaataaaactgtgcagttttgtttggtttactttcaaaagagtagaaagcttgaaaagattctgaaaccacagtttcattattctcataatccttctgcaactgaaattacatattgcaggagacattttcatatcatcaatgtgacatttacaccacactttcaaagacaatcactgaaacaaaaattgtctttatgagctaaaaatatgcagaatctctgcctagaatctttattcaaacttttattagccagtgaaacacttgcttgccaactgccaagccatacttattaagttcgaacatgtttcacttaaggagagacacctagcttagtcatggcaagttgccattttgtaaactaaggattttggactgagatttcttaaatctttcttcaaatctcccacaagtatatacttttaaattatggagtattttaagtctacaaaaaggtataaataataatataatgaattcctatatacctaatacccagtttaagacaccaaatataacaagtataattacatcctccaatgtaccgtttccttattccacagatatctttttcattattgtgaagtgatgttcagatttctagttttttttctagtttttaattttaacatcagaactgaaataaaaaattatggatacgtgttttgaattgcaaactattcctcaggaattccaattaaatttattttacttgaataggaatgatcataaaagtgattctttttttgtgactagaaattcttaagccgatggtcactatagctcatccttaatgtatggctcatttgcttttgtcactaaacggttttgtgttagaaccaccaaaattatagcttttaagagcttcctttgaccactgtctttttcttaccctagttctcttatctttgatcgtatatttctcataatgtgaaatatgatgagattcacttaggggcagcatgttagttttgggaggcaatgtcaactgtgtctctgaattcctgtcttccaaattgaagccagaccatgctgatgacctcaagtagcactgactatttgacaatagggctgataatgtaatcggcttgaattttgacttagtaactttttatgtaatactttcggagaaattctctttaggacaaagcagagagtccaatttattgagggatagattgtatctcttaaagtggtcatattattattaattttgccaaaagaagaagaatttattgaatatttatactataaaatgcagtaacattctacttgcttattacatttaaatccttgtgtaactgaatgtttacatgtcaagaggaaaagctgtaagaaaatgctgtcacagacccatccctgtggcatcgtcagcagaatactgcttgcttacaatctttattatgcattcttataacataacctcagagtatctttaccaaaggtttttaaagtaaatctctttttaagatagacttattcttttataataatgaatgtgcactcatacatatgtagaaacatttagatttagagttttttttttctttcacaaggtataataaggaaaggatcctacaatattttattctagggtttcttaaatatatgatttatattactgtcttttctattaatcatttgatttaaacaatgccaagtcactcttttttagttgcatgaaattttgcctgcaacagagagaaaaagattgtattactttaatgattataatcatactgtctgctgatataatatcataattgttgtggtttaaatacataaatagtagaaaaatcagagtctataacagaaagtttgtaaaaatatactgattttgaaaagtatcaggaatataaatatttggtaattctgtgtaacaagagagacatggaaaaggaaaaaaatccactatatcatgggctctgcagaacatatcaaaataggatttcttaaatttttcaacccccagaccatactgactcaacatggagtctcactggccaagaaaattgcctttaaaactcgaaaataaggccaggtgtggtgactcacacttgtaatcccagcaatttgggaggctgagacaggaggattgcctgaggccaggagtttgacaccagcctgggcaacatagtgagaccttgtctctacaaaaaataaaataaaataaaaaccaaattagccagacatggtggcatgcgcttgtttaaaaaaacaaataaataaataatcgactcaaaaataagtcatgtgtcccagcataaggcatcaggttgttagatgctggcatctctgcagctcaaagatgtgggttctttttcttgtcattaacacattgttatttctgtaggagcaacttctctgatcaaaattacttttctgggtatgtgctgattaagggggtggacttatcaacactataattgttccctatgaaagattccacagagatgtttatggtgaggtttaaaggatatgaaactctacatttaaacaagtattttatatttgggtacagaggaagaaagagagggctttttccatggggctatagtagagagttagtggaatatagacaggactctgaaaacacaacttccagccatttttttagttagtaaaaatcctattaatgtgaaccagccaggaataacagtgttatttctattggatatggtttgggcttctcttgtcaaatctgtgtcggctgccccctgatccttccattatcaagttttgaagggtgttggggaaattatggcagctgctagggagatcagggaaacactgatgtaacctcaaagcctctcaccattcctcttggcttggaaaggctttattttttcatatacatttctagaaatattgctattctaccttagtatttcacatttgtagttcaaacaagcgattgtccatctgttgcctagagctatagtacatgtgtgttatgaatgaaatatgacagcatgttccatacccctgctttagccatctgtgggaaaccagcaaactgaaaaagacacctctgcaaaatgtgcctcaagtccatttcttgggatcgctcgtttggtgcactctcgtgggagacaatcagagaacaacatatacttgtgccttattttcaaagaatctatttacactactatgaatattccactgaagagtcaatgatgtaaatgataaccaccaaatctcaaaaatatactcaccaaaaagtaaaaaagtaaaaaaaaaaaaaaaagaaagaaagaaaagaaagagagagaagtcaacttttcatcttaatatattctagtagtatttattttttccttgtcttggaagtatctcataggtctttaaatgagtaaaacatttttatgccagaaggtgatataatggatgttagtgttttttatttgattttacagtagttttagtcagataatgaggacagagacttcaacttgattctttaccaccattcagcatattttttaattgtcttcattgtatttgcttaatagtggtccagacaagttcaaaacttgttctcagtgaggcattaatatggtgcaaccatgaatatttcaggccaagttattcacttgacagataactagaatgaaacttttctcatgaggctgttgtttggttagcatagccttatttcaaaccttaaaaagttacctgactgaagctactatgacttggtaaggattcttcctctcttgctttcttcctcccttcctttcttcctcttccttcctcctcttcttattttctttcctactttccatcctacctattagtgttgctgtacttggattttttgtaaattaaatcaatgcattatgattttagggaattatgattatattcataaggggaaggctaccagaaaatatatgtggcatccataaaatcttcttttataggggcatattttttaggttgtatttattcgtaaagtgaaatgagataatagagtctttctgtttcatgttaatgaattttcatcagggactgaggtcatagattcttggaaaattcatttgtgactgatctagttttctcagctgtatgcaaagtaatctttcaaagactaggttaagattttttttttaagtctgaagcaatgtaaccccaaaaaattataattttaatgatggcattttattttattccattgcagcttgataactttccttatagcaaaggaataactattgtattttcagaattttaacacagattaacacttagcctgtaagactaataatatattgtaatagttgatactaaaatatttttcagcaggttggacagcaccagtttttcttagatcacagactacaggcagaatttcccttcaatccagaaaaaaggacactaatttccttttctatttaattttcctggcccttgtgcaaaaaattgtggactctatcttagttacaacatgcatgtcccttattttgtggagagctgtgtgaaagatgcgttttttttctttttttcttttttttttttttgagacggagtctggctctgtcacccaggctggagtgcaatggcacgatctcctctcactgcaagctccgcctcccaggttcacgccattctcctgtctcagcctcccgagtagctgggactacaggcgcctgccaccacgcccggctaatttttttgtatttttagtagagatggagtttcacagtgttagccaggatggcctcgatctcctgacctcgtgatccacccgcctcggcctcccaaagtgctgggattacaggcgtgagccaccgtgccccgcgtgtttttttctttagctgattgacaggtccccttcaaagttacaaaaaaaagtgctaatttttgctgttaaattctggttgttatttaattgacagaagtctcttgatgcacgaataaatatctctacatctagcctttgttaaaaataaaaattaatattctacaaacacctacatatactagagaggggtgaaacactgcagctaattcctttataatactttcagatgattgcattaagcctttcatgttatgtggcattgttaatttttcctagatacccatccacttaagggccagagaaatccttattcatttaactctggtgggcatttatgtaacatacccaaataaaaacgttattaaacagccacaatcgcattcagtcaacttggcactgaatgtagcttctaaaatcagttctctaccctacgaatggaatgttctaccaagaaagagaagcatcaccatgtcatcttgtgttctacaccactatagagagttacagttgcccccaaacacgaatgctattcccaaataaaatagaatcatgctttgggaggccaaggcgggccgatcacgaggtcaggagatcgagaccatcctggctaacacggtgaaaccccgtctctactaaaaaaaaaaaaaaatacaaaaaattagcctggctcagtggcgggcgcctgtagtcccagctactcaggaggctgaggcaggagaatggcgtgaacccgggaagcggagctttcagtgagccgagatagcgccactgcagtccggcctgggcgaaagagcgagactccgtctcaaaaaaaaaaaaaaaaaaataggatcatggcccttttaaagatctgaatcttctctgttattttcctgatgaatcaccatcccatatcttcttagtcctggccagtatgtagttgcgctcacatacgtctattctagctctgtagctccacaaaacaagtcttaagtccaaatctttgcctcttcatgtctgatatcaccaactcattcagcttttcttcacttattgacatagtgtcatgtcctatcactctctgctgcttctttaaacagtggacacaaacatattttctaattttcagtgtactcagtgaaacttggcagttcaccatgagtcaggctaggttgaaaggctttctttagggttgaaagtaaacgaaattggaatcacccaaagagaatttccccaaaaaacctcagacccagaagtgtaaaagctacagaaggatagaactcccatgtctacagacagttctgttactttttgttctgtactattttggatgttgccaaaatcaaattcatcctgaaaacaggaagcaagctaatgcatatgccatccatgagattcccacttctgggtcagttcatattccattcaaccttttccttttatccttgtcttcttcagaataagacatttttcctccatattttcatattaaatattaacactttataggttctactttaatatatggacactttacaggttatacataaatatttgctggttgattgatttcgagattcattcattctgtgctcaaatatttgtacctagagacgttacatgttagaaaaagtgagcagcttctttctctaatcatttaggagtccatatttttcttttctttttgttctcccaacatccttatctcttactcagctcttcaatttataattaccaaataatcactgttagagaatcagcccctaagtaactttgattctggccaactgtaataagatccaaccacttaaatctgtacttactcaataggaaggaatgtgacatcaggaagagtcattccagtgacattagtaagactttatggagtacataaaatttgataagaaatcttgagctgattctttgacttgatttagaagttgagaaaagagtatttaaggcacaacagggaaacatgggctatactcagagaagaccctctgcattggccaaaatatcatggattctggaaattccttcttaacagaaaaaaaaggcttccaaataatcaggctgaatgggaagaaaaaggcatagaggaagcctgaggaagtatttacttgcttttcccatctctttataattggaagagaagatgatctgccaaaatataacccagcatgcacagtatggacaggaagcagccctccatgaactttattatcacagaatatgagcattcttattgatccacagctacatcttctattcttgcagcaagggtacatgtcctttgaccctccacaaaagaacaagcaggacatctctattttcctattgagtctgagtccattattagaaaggacttcccagccatcttttctacttggtattaaaattcccttacagattcattgctaagtgccaattctttttttttcttttgagacggagtcttgctctgtcgcccaggctggagtgcagtggcgcaatctcggctcactgcaagctccgcttctcgggttcacgccattctcctgcctcagcctcccgagtagctgggactacagacgcccgccaccgcgcccagctaattttttttgtacttttagtagagacggggtttcaccgtggtctcgatctcctgacctcgtgatccgcccgcctcggcctcccaaagtgccaattctgactctacttaaacatcacctgtatcagggagctcattattccttgaggtcttacatttctttcagcacattttgttccaagctacacgactttaaaacagagccagcctttggggcatatgttctctttggtgccacacaaaacctgtagtacatgatacagtgttgcttcccccctccttttccttccatatatatttgttttgttttgggcattgcattacttttttgaatttttaagaatctctaaaattagtctgaaggatgttctgagggccagacattagaatttgtgagtttttttgttgctggttgtactttcctatttagaagacagaccgttctgacagttgttgtgtagcttcatgccttccccagtaactaacccatgaacagtacaccccttttatctgacttgttgataatgaccttaaaaatgttaggaaatgggccgggcgcggtggctcgtgcctgtaatccagcactttgggaggccgaggcgagcggatcatgaggtcaagagatcgagaccatcctggtcaacatggtgaaaccccgactctactaaaaaaaatacaaaaattagccgggcgtgttggcgggcgcctgtagtcccaactacttgggaggctgaggcaggagaatcacctgaacccaggaggcagaggttgcagtgagcagagattgcgccactgcactccagcctgggcgacagaacgagactccgtctcaaaaaaaaaaaaaaaaaaaaaaggttgggaaatattggtgtataatccccatgtctaacaaggaagaagtcaaaagcaaaagatagtggtattgccgaaaactcattatttctagttagttcatctgtggaaaaggatatcgttcttgaggagaggggttctattatgctatagttttctatggaaatgtacaaatgctttcctcattgctctggatgactatttagtttaaataatatacctttgtcatggggaagaccatgattgtggcttcttctaccccaactttgaatgagagagcactgtaagcagaaactgccatcagtctcctgggcaggacctggaggtaactttctgagctgtaaaatagtaattcctaagagagcttacaaactgcttccacacagaaaatagcgcagggaggacagttattagtacccctattctagaagagaaagctgaggctcaagccattaagtgacttgccaaaagctgtgacatagctgggaagtggcagatttggggatataaccaggtcttgcaagtccagtgctgtctccaagtagccacgctcacagctgagaacaccttagaggacaatatcgacttcttacagactaccaagcccccagtcatccagggaaattcagagaccaattgactgccaggtggcaaatccacatgtgtactgcggtctttagagatcatttagagcttgcacacatctgtgtcttcttgtgggaaacctctaggtattctgtctgatcagcactgtgaggaagttggtgggaaaaggccactgataagaacaaacaatgggcagaaggaagcacattgcaataaatttccccagagagagttcctttacattccattcaccaaaaacctctctggaactgtcaggttcagaatatcaaccaagaccatatcatttagaattcattggcatgtagaggtgactcgattcctaaaagaagcctctctcccatgaaccacgatgtacgttccacagaggcagaaaccgccgtaggttagcaatgcattttagtctttctctccattcacatttactgagagcacaccacgtgcatgttgctgcaacaggcatttccgatagagccgatccatgagctaacaatgtctgaaaacaaatgttatggaactgttggcatttctgagatttggcctttgccatttgatagactttgcttcccaggatgctgtcattttgtgattttttataattacaaggaatttggtaccatgttgttttcaaaaaacctcctagaaagtctccatgtatgctctagaagttgctctacgtaacagttcagcaagcaagtgttccttctcttgagctgcgtccctcaggaagctgtacctttagggtgtgctttccactttttatttcctctcatttcactcctttcattgtttgctatatcctaaaatatgtgaagtgagagaaaaaatatcatttcttctcattaaatctcctgcattaaatctaagaatcctttaaaataatcacacctgataagtgttttatgcatttccctccctggagtgttatcatccatcaagccagtatcatcatccacctgcttattccttgggactaatgagagccaagttaaatagcaaatgacttctcaccccttcctagtcctcatgcctgaggaataagggcgacattaatgggagcgggagagtggtggctttggttgagatgcacgttcacagactagaaaagtgcctcacctccatggtgtatatgtgccaccttttcttaatccagtctatcattgttggacatttgggttggttccaagtctttgctattgtgaatagtgccgcaataaacataagtgtgcatgtgtctttatagcagcatgatttataatcctttgggtatatacccagtaatgggatggctgggtcaaatggtatttctagttctagatccctgaggaatctccacactgacttccacaatggttgaactagttcacagtcccaccaacagtgtaaaagtgttcttatttctccacatcctctccagcacctgttgtttcctgactttttaatgattgccattctaactggtgtgagatggtatctcatagtggttttgatttgcatttctctgatggccagtgatggtgagcattttttcatgtgtttcttggctgcataaatgtcttcttttgagaagtgtctgttcaatactatgcagccataaaaaatgatgagttcatgtcctttgtagggacatggatgaaattggaaatcatcattctcagtaaactatctcaaggacaaaaaaccaaacaccacatgttctcactcacaggtgggaattgaacaatgagaacacatggacacaggaaggggaacatcacactctggggactgttgtggggtggagggaggagggagggatagcattaggagatatacctaatgctaaatgacgagttaatgggtgcagcacaccagcatggcacatgtatacatatgtaactaacctgcacattgtgcacatgtaccctaaaacttaaagtataataataatgaaataaaattaaaaaaaaaaaagaaaagtgcctcacctccctgtgaggcttgatgaatattgtggccagtgagtggaaaatgattcttgtcgaatagacagagtattcccaccccaggaatggattaatagaagacacaatttgagcacttctcagaattatctagtatgcctgagtagagactcacatgggtggaatctgtgttgtctcatcagagggaataaaaagacaatgaggtggtaaatgtgaaaaaagcagccttttagaaaaacattattttcaaatacctttataaatcatctaatttatcttcacataatataaagaaaaaactaataaaaattttcgtatttcactttacataatatgttctcccatatttagggatcatacaattgtattgtcttcaaaacacacacacacacacatacacacacacacacacacacacacacaccccttccaagaaagctgatccttcagaaaataaatcttatttttaagcacttgggttttcaggccagaaaattaataaatcctaaacctgacccatttttgtaacagctaaaaaggagaagaaaaagctagttaaattttgtgtggatccatttatctcttaaaatatgccaaagcaatttgaggtgggggtggaaacaggtatttatctctcatgcgtgattctctctttatatttctatctgttgggaaaagggtaaagaactattcttggtcattattgatgtattgtgttgccactttgtatggtgcctgctgtgctttatcccgaggcatagcagtaatcgttactatcttgactctttccttcatcacaagagagtaaatatgaagtctgaatgtcgttcctcacccccaaattgtttaactctgcttccaaactagtttaagaaatgcaaaatgggaagagctagcttttcttagatacatttcttccttttttattctttcttgggagacgttaagtataaaagggaaaaagtcagttccttcttctctctctttctctttgggtgacagcaatgctcacttagtaattataaactggaaataggagagtagcttgagcaggttatgatatatctgcccaatgtgtttcattccttcaaacataaactttgagagtaaaagagatttttataatttaaatgccaacgacaggaatggcctcatgttttaactttcaaataataaatggggagttggtatttgggcagagtttgcattttactaatcctatatactttgagcttagtttttagaattgtgtcaaatacatcaacatatcaggattatagtgccaaaaatagttaaagtgccttggtcctccctctgtaggcagcaaattgaaactaacatgggaccatgccatccttctagcataatggagaagtctgaactgaggagtatctttgatgaaagacatttaggaccctagaaactaaatcttgtcaccaagactttatagtaaagtagtagcaaaattatttttaaaagactttcttccttttactacccatttcctctcttgggaaagctgatgagcaaattatccaagactcatttctttattaggcaaagtcagaatatttcccctctgaaaatctgaattatgccctcattctttttcaagaaatatctcaaagagcaaatagaattaaacatgacacttgattgtctgattatttggcatgtataaaattatcatgtggcttaatgtgccttaagtgaaaatttaaacttagacctgaaacctttacagttggatgtagcgttgagcttttgcatgttttctgtataataaaccacttttgttttgtttgttttgtcttttaacctacacctttatcattactctaacagatttagggcttctctttctctacagctaagtaagggaatatgtgcaattatgagacatacaaaaaaggaaagggaaaggactttctaagtagcaaatctgtgccatgaagtagatgtggcgtgaagatacagagcctgaggatagtaattttccctgagccacgcacacaggcttttatttcatgccttttctctttctgtgccgtcacctttgagaaaaacgattgcaccttctccaagtctgcctttttaacagctacagttaagttggcaagacttccccagctctgaatatagccatttgccgactccggcctctttgcgagactgactcaaatctgtgatcttctgttcagcatacacatcagcaaagtgagaagatgagcactaaatataggctctattaactttacttttagatttactgccttcaaaaagtgcctattctgagcaacataaacgttattccttacatatgtatgtacacacggtacccagagtcgtactgtgcagccttcaaaaacataccatcagaaagagtaggtgctgagataaggaaactttgccaaatgaaagaaagtcactcacttccaatatcccctctcaagcggctaccgtgaaacgggctgcaaacacattccctgagcatcccttgctgatacagcttctttatatttatatcctactggatggtagcatattgctaaggtttcctgtactctgcttcaagggaatgtaagctttatggcattgaaacatttagggaaaaaaaagatgtttaagagaattaatagagccgtagtctgtattaggatgtgtgtcatatgtgtgttctataaactaagcatcggtgggtttagagtgttaaagtgtcagcacattccttctccttttgtctctcaggctaacatgagagaaaatagaaaagtcttggctgtggggattggaagctcagggggccaaatgtccttgccagatccttagagcattactttgactcctaaaaatagtagtgtatgttatttgatggcttttgtttccatagttccatcactgacaaaactgtcaatactgttgatggagcagcagcatagcctagagtgatgcattcttacccagaggtggcaataggagagggtccatgtaaataggacgaggtagacagtgcatgattgtaggagaagggttgaagggaggacatgattccaaaaaagatcgttctcaatgtgtcgtctgactcaaccagctggcagattacacttgccaagtcgttccctttccttctaagtcagttggctccatattcacttgaatatgcctctgtttgggcaaagcaagatacctccacttaacctttatccaaggaagctcttggtgtcctcttggtcataaagttgtctcctacctaacccagttttaccaaatggaagtaaaaggggacaaactatggaagatggactccatgccattgcagtcagccaccattctcttttccatataaggagccccattacataagctacgggtgaggttggaacagctatgtttcataatttcaagagtgtgaccaccctgctctagtcatcatcattggatgaatccagttgactctttggcaaaagggtgatacttttcactaaaaatgcctactcttcctgttgatgttccttttctgtttttaccttgtccaatttccacactagtcattttttttattttttagaggatcagattttagcgctggaaaatgagttcaaaaatttcagtgtaatgtcataaggatgttgggatacagagattttttttttccttggaaacaaatggactgggaagaaacacagcatggctttgctctgagtttcaatctgatgattatgaccatggaagatagtcttatgtaaaggttaaatggtgtttacaagtggatagataaggcggagatggtgagaagccgggttttctctatgctaaatgtgtctactaagagcagcacttcctactagctaagcacaatcatagccccaccgtgatgagctgctagtctgaataacattccctgacttagggaaaggcacacaaaaacatataaagaatatgtctattttcatatgtgtgatactgacagagccatggtattcctaaaatataggtttctcttttttcttgtattcttagcaaattgcatttattcactacattacaaaccatcactgatgtatccaaaatagcacacatagttcagtatgaaaataagagaataaaatctgttataagcaagtgatttaggtattttcttttgtgtttatgcattatctgactatattaaaacctgtttttctatttaccttctatcagttttctctaccaattatgttttttcaatgctctataagaatgaatatggaaattatatttcttttttctgtaaaagagttgcaactactttattatatttagaaatccaataaacttcttattacattta

SEQ ID NO: 11612 - DNA, 479 bp, Homo sapiens
  source 1..479: mol_type = unassigned DNA
gatgggtatttgctttcatttctaatgaaatttcaggcctctagggtaggatatcaaaattggtagatcatttgcaatttattttatcccaaacacctcactttacagtcagagaaactgaggcccagagaagtaaaatgagttgctcaaggtctcagagagcaagaaatagagatgggacttgagcacctagatctctggtattgctgtcctgtagttcatggagctggcagatggatacatctgtgacctgggatgatggagagactgctggacccttcagaggatctcatctcaagattccaacaatgtctcacccatcttggctgccacccaaaagcactggtgagcccctcggccatgtgcctgcacggatggagaccacccattcctttgggaaccccagcatttcagtgtctacacaacagccacccaaaaagtttgccccggtagttgctccaaaacctaagtacaaccca

SEQ ID NO: 11613 - DNA, 412 bp, Homo sapiens
  source 1..412: mol_type = unassigned DNA
cattgcagttggctgaaccttgtgtcaaccatccattccaggagccagctatctgaggtgattttcttccacccccacctccacctctagatgattccagtgcccttccatctatctctggaaactttcctcctccaccacctcttgatgaagaggctttcaaagtacaggggaatcccggaggcaagacacttgaggagaggcgctccagcctggacgctgagattgactccttgaccagcatcttggctgaccttgagtgcagctccccctataagcctcggcctccacagagctccactggttcaacagcctctcctccagtttcgaccccagtcacaggacacaagagaatggtcatcccgaaccaaccccctctaacagcaaccaagaagtctacattgaaaccaca

SEQ ID NO: 11614 - DNA, 499 bp, Homo sapiens
  source 1..499: mol_type = unassigned DNA
agaatttgaagtcatttgtgcataaaagatgaatactggataaatcacagaaggcccctggcctcatgtagccatccttgtcttcggggattctcttgaagcaagagaatgagccccaacattggggaaaaggaagttttatggggtttaattgctgctgatcatcgaggcaggattaccagcctagccatgctgcattcagcctggattttgttggagatattttacatgttcctgctcgtctattccaagtctcctaaatagtgattttcttccacccccacctccacctctagatgattccagtgcccttccatctatctctggaaactttcctcctccaccacctcttgatgaagaggctttcaaagtacaggggaatcccggaggcaagacacttgaggagaggcgctccagcctggacgctgagattgactccttgaccagcatcttggctgaccttgagtgcagctccccctataagcctcggcctccacag

SEQ ID NO: 11615 - DNA, 578 bp, Homo sapiens
  source 1..578: mol_type = unassigned DNA
aggtgattttcttccacccccacctccacctctagatgattccagtgcccttccatctatctctggaaactttcctcctccaccacctcttgatgaagaggctttcaaagtacaggggaatcccggaggcaagacacttgaggagaggcgctccagcctggacgctgagattgactccttgaccagcatcttggctgaccttgagtgcagctccccctataagcctcggcctccacagaggaaagcagctaaacaggatgttggctggtaacaccagcaaagtggaatcaacctcaaaggagatggtgtcagagtggtgttcaatgcctgagcttctaccgagtgagtcacttgtgtgaaaatgtcttgacacagatagaattgaggtgcccacactatatctgatcacagaaatgttaatgcagaatagcaaactggctttcatcttcatgggattgcaggctgggggataaaagggggtgcatttttaaaggtcatctctattgcttatgagaaaacaatgtatcacatcccatgcatctgtgagactgtatatcaagaatcagaaataaatacat

SEQ ID NO: 11616 - DNA, 564 bp, Homo sapiens
  source 1..564: mol_type = unassigned DNA
tttgtagaaagtagttcagtggctgagaatctggcataatattttatttttatgaaatttcagtaaacattattgagcaacttgtaggtttcaggctccacgatagggatgcaagcatgtaagacctctgtccagcaactgagaggtaaaactacaatgagaaagatagactgagctccactggttcaacagcctctcctccagtttcgaccccagtcacaggacacaagagaatggtcatcccgaaccaaccccctctaacagcaaccaagaagtctacattgaaaccacagcctgcaccccaggctggacccatccctgtggctccaatcggaacactcaaaccccagcctcagccagtcccagcctcctacaccacggcctccacttcttcaaggcctacctttaatgtgcaggtgaagtcagcccagcccagccctcattatatggctgccccttcatcaggacaaatttatggctcagggccccagggctataacactcagccagttcctgtctctgggcagtgtccacctccttcaacacggggaggcatggattatg

SEQ ID NO: 11617 - DNA, 998 bp, Homo sapiens
  source 1..998: mol_type = unassigned DNA
cagtctaggcagaagaaattgcaattgtgaaaggaagatttgcgtgaaagaatggtgtttttggctgagtgaggaatttgaagtatctggaaaatggaagctccactggttcaacagcctctcctccagtttcgaccccagtcacaggacacaagagaatggtcatcccgaaccaaccccctctaacagcaaccaagaagtctacattgaaaccacagcctgcaccccaggctggacccatccctgtggctccaatcggaacactcaaaccccagcctcagccagtcccagcctcctacaccacggcctccacttcttcaaggcctacctttaatgtgcaggtgaagtcagcccagcccagccctcattatatggctgccccttcatcaggacaaatttatggctcagggccccagggctataacactcagccagttcctgtctctgggcagtgtccacctccttcaacacggggaggcatggattatgcctacattccaccaccaggacttcagccggagcctgggtatgggtatgcccccaaccagggacgctattatgaaggctactatgcagcagggccaggctatgggggcagaaatgactctgaccctacctatggtcaacaaggtcacccaaatacctggaaacgggaaccagggtacactcctcctggagcagggaaccagaaccctcctgggatgtatccagtcactggtcccaagaagacctatatcacagatcctgtttcagccccctgtgcgccaccattgcagccaaagggtggccattcagggcaactggggccttcgtcagttgccccttcattccgcccagaggatgagcttgagcacctgaccaaaaagatgctgtatgacatggaaaatccacctgctgacgaatactttggccgctgtgctcgctgtggagaaaacgtagttggggaaggtacaggatgcactgccatggatcaggtcttccacgtggattgttttacc

SEQ ID NO: 11618 - DNA, 582 bp, Homo sapiens
  source 1..582: mol_type = unassigned DNA
atttacacttgcaggctgttatgctttccagaaaactttttccgtaggttgcgaaagtgattaatctgctgttaaaactgacaaagaaggttctctgataagagaaagaattaaatgaggaatttttctttaaaaaagctccactggttcaacagcctctcctccagtttcgaccccagtcacaggacacaagagaatggtcatcccgaaccaaccccctctaacagcaaccaagaagtctacattgaaaccacagcctgcaccccaggctggacccatccctgtggctccaatcggaacactcaaaccccagcctcagccagtcccagcctcctacaccacggcctccacttcttcaaggcctacctttaatgtgcaggtgaagtcagcccagcccagccctcattatatggctgccccttcatcaggacaaatttatggctcagggccccagggctataacactcagccagttcctgtctctgggcagtgtccacctccttcaacacggggaggcatggattatgcctacattccaccaccaggacttcagccggagcctgggtatgggtatgcccccaa

SEQ ID NO: 11619 - DNA, 888 bp, Homo sapiens
  source 1..888: mol_type = unassigned DNA
atggtcatcccgaaccaaccccctctaacagcaaccaagaagtctacattgaaaccacagcctgcaccccaggctggacccatccctgtggctccaatcggaacactcaaaccccagcctcagccagtcccagcctcctacaccacggcctccacttcttcaaggcctacctttaatgtgcaggtgaagtcagcccagcccagccctcattatatggctgccccttcatcaggacaaatttatggctcagggccccagggctataacactcagccagttcctgtctctgggcagtgtccacctccttcaacacggggaggcatggattatgcctacattccaccaccaggacttcagccggagcctgggtatgggtatgcccccaaccagggacgctattatgaaggctactatgcagcagggccaggctatgggggcagaaatgactctgaccctacctatggtcaacaaggtcacccaaatacctggaaacgggaaccagggtacactcctcctggagcagggaaccagaaccctcctgggatgtatccagtcactggtcccaagaagacctatatcacagatcctgtttcagccccctgtgcgccaccattgcagccaaagggtggccattcagggcaactggggccttcgtcagttgccccttcattccgcccagaggatgagcttgagcacctgaccaaaaagatgctgtatgacatggaaaatccacctgctgacgaatactttgaatgctgataatgccaagctgtgtttacagtccaaatttttgctgaagaccttcaactttgcactctccctgtgtggtatctcttgcccaagacagaacttcaaataaaatcacatagctgatgcaagaaaccgtta

SEQ ID NO: 11620 - DNA, 368 bp, Homo sapiens
  source 1..368: mol_type = unassigned DNA
atacttttgcttctggttctcctctggcagatcaagcaaatacaatccaagtgcgtgcagcccgttcccattcaaaatgtatccgtcataataacagcattctcgctgacgcattagactcaaggtggacttaatttggagatcacctatgaagacatctgtggaaggaatggcctcagcattgcagtcactttcgaagtcaagaggtattctagacagaccacacagcatgtatagaatgctgataatgccaagctgtgtttacagtccaaatttttgctgaagaccttcaactttgcactctccctgtgtggtatctcttgcccaagacagaacttcaaataaaatcacatagctgatgcaagaaa

SEQ ID NO: 11621 - DNA, 300 bp, Homo sapiens
  source 1..300: mol_type = unassigned DNA
aatttcagagccagaaagatccttaaaaaggcagtgtactccaacttcctctgaagcttgtgtcctacctacagaattcccaaccactctgcttgaatgtctccaaagaggaaaaaatttagaagagaagacaaggaaaattaatcacaagataggcaatgaataggcaagtgaatgctgataatgccaagctgtgtttacagtccaaatttttgctgaagaccttcaactttgcactctccctgtgtggtatctcttgcccaagacagaacttcaaataaaatcacatagctgatgcaa

SEQ ID NO: 11622 - DNA, 548 bp, Homo sapiens
  source 1..548: mol_type = unassigned DNA
gttaatcctgatgcacagaactgggaataggccagatgccacattaatcaatttaagaatgctggagcttcgcagaatactgcatgaacaacgagaaccgtggccctgaaagactcaaaaccctacagtatatgaaactattgcaggatgtgtggatgttcaaaggaataacagacttggaagcaatgcttactgaattttgatgtattaaaggatgtcaagtccaagagagagataaggtctcagaagacagaactagaaccatggggccgctgtgctcgctgtggagaaaacgtagttggggaaggtacaggatgcactgccatggatcaggtcttccacgtggattgttttacctgcatcatctgcaacaacaagctccgagggcagccattctatgctgtggaaaagaaagcatactgcgagccctgctacattaatactctggagcagtgcaatgtgtgttccaagcccatcatggagcggattctccgagccaccgggaaggcctatcatcctcactgtttcacctgcgtgatgtgccaccg

SEQ ID NO: 11623 - DNA, 18277 bp, Homo sapiens; identical to SEQ ID NO: 11611
  source 1..18277: mol_type = unassigned DNA

SEQ ID NO: 11624 - DNA, 18220 bp, Homo sapiens
  source 1..18220: mol_type = unassigned DNA
gtgggaactttgaggctcagagacagagcagaagacagaacctggtcttctgattccctgtgttctgcttttttcattgttccactggacgctcatcagagggaagatctttttcctcaattgcattgcagttggctgaaccttgtgtcaaccatccattccaggagccagctatctgagattccaacaatgtctcacccatcttggctgccacccaaaagcactggtgagcccctcggccatgtgcctgcacggatggagaccacccattcctttgggaaccccagcatttcagtgtctacacaacagccacccaaaaagtttgccccggtagttgctccaaaacctaagtacaacccatacaaacaacctggaggtgagggtgattttcttccacccccacctccacctctagatgattccagtgcccttccatctatctctggaaactttcctcctccaccacctcttgatgaagaggctttcaaagtacaggggaatcccggaggcaagacacttgaggagaggcgctccagcctggacgctgagattgactccttgaccagcatcttggctgaccttgagtgcagctccccctataagcctcggcctccacagagctccactggttcaacagcctctcctccagtttcgaccccagtcacaggacacaagagaatggtcatcccgaaccaaccccctctaacagcaaccaagaagtctacattgaaaccacagcctgcaccccaggctggacccatccctgtggctccaatcggaacactcaaaccccagcctcagccagtcccagcctcctacaccacggcctccacttcttcaaggcctacctttaatgtgcaggtgaagtcagcccagcccagccctcattatatggctgccccttcatcaggacaaatttatggctcagggccccagggctataacactcagccagttcctgtctctgggcagtgtccacctccttcaacacggggaggcatggattatgcctacattccaccaccaggacttcagccggagcctgggtatgggtatgcccccaaccagggacgctattatgaaggctactatgcagcagggccaggctatgggggcagaaatgactctgaccctacctatggtcaacaaggtcacccaaatacctggaaacgggaaccagggtacactcctcctggagcagggaaccagaaccctcctgggatgtatccagtcactggtcccaagaagacctatatcacagatcctgtttcagccccctgtgcgccaccattgcagccaaagggtggccattcagggcaactggggccttcgtcagttgccccttcattccgcccagaggatgagcttgagcacctgaccaaaaagatgctgtatgacatggaaaatccacctgctgacgaatactttggccgctgtgctcgctgtggagaaaacgtagttggggaaggtacaggatgcactgccatggatcaggtcttccacgtggattgttttacctgcatcatctgcaacaacaagctccgagggcagccattctatgctgtggaaaagaaagcatactgcgagccctgctacattaatactctggagcagtgcaatgtgtgttccaagcccatcatggagcggattctccgagccaccgggaaggcctatcatcctcactgtttcacctgcgtgatgtgccaccgcagcctggatgggatcccattcactgtggatgctggcgggctcattcactgcattgaggacttccacaagaaatttgccccgcgatgttctgtgtgcaaggagcctattatgccagccccgggccaggaggagactgtccgtattgtggctttggatcgagatttccatgttcactgctaccgatgcgaggattgcggtggtctcctgtctgaaggagataaccaaggctgctaccccttggatgggcacatcctctgcaagacctgcaactctgcccgcatcagggtgttgaccgccaaggcgagcactgacctttagattcagtcacctgttcagccggcactgagaagaacgaacacaagaaaaagataagaaatactagagtaaaggccatcaaactacgcgatagtctctgttcttcatctgctattaaccttgccttagaaacacataaattatgagattttttttaaaagttgttaccaaatacacatttcacattgaatcatgtaggatcttgatgggcctttgttcccaaggacttccacatttttgcacagattatgctccatcccattcacttctgcattcctgtaacttttaatccctatgtttgtctcacttttcatctggttgaatggcttttcttagtgtggtatttgctgtcacatagtttttcctgggtgagtctgccaactcacaggtgcttttaggcttgaaatctccatcctatcatttccgttttgcctgtgactgtaaagagtagccattcttttcccatgtattgaagaggatattcttctcttgctttatactactcacgtccttggggagggaaatgcacaatttttttttgttaggctgtaaagaatttaagctgtaaattacataagttagaacaagcccaaatttaatttgcaaccatcagaattcagaatctatagtgaccagtgatcaaggctaattggaaaagagttatcggcccatagctaataagtagtgacagacaaccaagcttcaatatttttctaaagaaattacaggtgggatatgctagaaaaggcattttggggttatgtttaaaaaaacattattgtcccacaatattaccttaagatttttcttttccgcactacctgaacattgtaatacagacaaacttgatttcttctagaagataacattttcaatactgtcccacttctcatcttaaaaatattgtcatgtttattctaatatccaacacaactatcaaaattgcctttttctctagaggatgaaggctgtgaaaaaaccgttcaaattctcttctttttcttttttattaccaggtccattttgcctgacaattgcaaatcagagcatacaaaataaaactgtgcagttttgtttggtttactttcaaaagagtagaaagcttgaaaagattctgaaaccacagtttcattattctcataatccttctgcaactgaaattacatattgcaggagacattttcatatcatcaatgtgacatttacaccacactttcaaagacaatcactgaaacaaaaattgtctttatgagctaaaaatatgcagaatctctgcctagaatctttattcaaacttttattagccagtgaaacacttgcttgccaactgccaagccatacttattaagttcgaacatgtttcacttaaggagagacacctagcttagtcatggcaagttgccattttgtaaactaaggattttggactgagatttcttaaatctttcttcaaatctcccacaagtatatacttttaaattatggagtattttaagtctacaaaaaggtataaataataatataatgaattcctatatacctaatacccagtttaagacaccaaatataacaagtataattacatcctccaatgtaccgtttccttattccacagatatctttttcattattgtgaagtgatgttcagatttctagttttttttctagtttttaattttaacatcagaactgaaataaaaaattatggatacgtgttttgaattgcaaactattcctcaggaattccaattaaatttattttacttgaataggaatgatcataaaagtgattctttttttgtgactagaaattcttaagccgatggtcactatagctcatccttaatgtatggctcatttgcttttgtcactaaacggttttgtgttagaaccaccaaaattatagcttttaagagcttcctttgaccactgtctttttcttaccctagttctcttatctttgatcgtatatttctcataatgtgaaatatgatgagattcacttaggggcagcatgttagttttgggaggcaatgtcaactgtgtctctgaattcctgtcttccaaattgaagccagaccatgctgatgacctcaagtagcactgactatttgacaatagggctgataatgtaatcggcttgaattttgacttagtaactttttatgtaatactttcggagaaattctctttaggacaaagcagagagtccaatttattgagggatagattgtatctcttaaagtggtcatattattattaattttgccaaaagaagaagaatttattgaatatttatactataaaatgcagtaacattctacttgcttattacatttaaatccttgtgtaactgaatgtttacatgtcaagaggaaaagctgtaagaaaatgctgtcacagacccatccctgtggcatcgtcagcagaatactgcttgcttacaatctttattatgcattcttataacataacctcagagtatctttaccaaaggtttttaaagtaaatctctttttaagatagacttattcttttataataatgaatgtgcactcatacatatgtagaaacatttagatttagagttttttttttctttcacaaggtataataaggaaaggatcctacaatattttattctagggtttcttaaatatatgatttatattactgtcttttctattaatcatttgatttaaacaatgccaagtcactcttttttagttgcatgaaattttgcctgcaacagagagaaaaagattgtattactttaatgattataatcatactgtctgctgatataatatcataattgttgtggtttaaatacataaatagtagaaaaatcagagtctataacagaaagtttgtaaaaatatactgattttgaaaagtatcaggaatataaatatttggtaattctgtgtaacaagagagacatggaaaaggaaaaaaatccactatatcatgggctctgcagaacatatcaaaataggatttcttaaatttttcaacccccagaccatactgactcaacatggagtctcactggccaagaaaattgcctttaaaactcgaaaataaggccaggtgtggtgactcacacttgtaatcccagcaatttgggaggctgagacaggaggattgcctgaggccaggagtttgacaccagcctgggcaacatagtgagaccttgtctctacaaaaaataaaataaaataaaaaccaaattagccagacatggtggcatgcgcttgtttaaaaaaacaaataaataaataatcgactcaaaaataagtcatgtgtcccagcataaggcatcaggttgttagatgctggcatctctgcagctcaaagatgtgggttctttttcttgtcattaacacattgttatttctgtaggagcaacttctctgatcaaaattacttttctgggtatgtgctgattaagggggtggacttatcaacactataattgttccctatgaaagattccacagagatgtttatggtgaggtttaaaggatatgaaactctacatttaaacaagtattttatatttgggtacagaggaagaaagagagggctttttccatggggctatagtagagagttagtggaatatagacaggactctgaaaacacaacttccagccatttttttagttagtaaaaatcctattaatgtgaaccagccaggaataacagtgttatttctattggatatggtttgggcttctcttgtcaaatctgtgtcggctgccccctgatccttccattatcaagttttgaagggtgttggggaaattatggcagctgctagggagatcagggaaacactgatgtaacctcaaagcctctcaccattcctcttggcttggaaaggctttattttttcatatacatttctagaaatattgctattctaccttagtatttcacatttgtagttcaaacaagcgattgtccatctgttgcctagagctatagtacatgtgtgttatgaatgaaatatgacagcatgttccatacccctgctttagccatctgtgggaaaccagcaaactgaaaaagacacctctgcaaaatgtgcctcaagtccatttcttgggatcgctcgtttggtgcactctcgtgggagacaatcagagaacaacatatacttgtgccttattttcaaagaatctatttacactactatgaatattccactgaagagtcaatgatgtaaatgataaccaccaaatctcaaaaatatactcaccaaaaagtaaaaaagtaaaaaaaaaaaaaaaagaaagaaagaaaagaaagagagagaagtcaacttttcatcttaatatattctagtagtatttattttttccttgtcttggaagtatctcataggtctttaaatgagtaaaacatttttatgccagaaggtgatataatggatgttagtgttttttatttgattttacagtagttttagtcagataatgaggacagagacttcaacttgattctttaccaccattcagcatattttttaattgtcttcattgtatttgcttaatagtggtccagacaagttcaaaacttgttctcagtgaggcattaatatggtgcaaccatgaatatttcaggccaagttattcacttgacagataactagaatgaaacttttctcatgaggctgttgtttggttagcatagccttatttcaaaccttaaaaagttacctgactgaagctactatgacttggtaaggattcttcctctcttgctttcttcctcccttcctttcttcctcttccttcctcctcttcttattttctttcctactttccatcctacctattagtgttgctgtacttggattttttgtaaattaaatcaatgcattatgattttagggaattatgattatattcataaggggaaggctaccagaaaatatatgtggcatccataaaatcttcttttataggggcatattttttaggttgtatttattcgtaaagtgaaatgagataatagagtctttctgtttcatgttaatgaattttcatcagggactgaggtcatagattcttggaaaattcatttgtgactgatctagttttctcagctgtatgcaaagtaatctttcaaagactaggttaagattttttttttaagtctgaagcaatgtaaccccaaaaaattataattttaatgatggcattttattttattccattgcagcttgataactttccttatagcaaaggaataactattgtattttcagaattttaacacagattaacacttagcctgtaagactaataatatattgtaatagttgatactaaaatatttttcagcaggttggacagcaccagtttttcttagatcacagactacaggcagaatttcccttcaatccagaaaaaaggacactaatttccttttctatttaattttcctggcccttgtgcaaaaaattgtggactctatcttagttacaacatgcatgtcccttattttgtggagagctgtgtgaaagatgcgttttttttctttttttcttttttttttttttgagacggagtctggctctgtcacccaggctggagtgcaatggcacgatctcctctcactgcaagctccgcctcccaggttcacgccattctcctgtctcagcctcccgagtagctgggactacaggcgcctgccaccacgcccggctaatttttttgtatttttagtagagatggagtttcacagtgttagccaggatggcctcgatctcctgacctcgtgatccacccgcctcggcctcccaaagtgctgggattacaggcgtgagccaccgtgccccgcgtgtttttttctttagctgattgacaggtccccttcaaagttacaaaaaaaagtgctaatttttgctgttaaattctggttgttatttaattgacagaagtctcttgatgcacgaataaatatctctacatctagcctttgttaaaaataaaaattaatattctacaaacacctacatatactagagaggggtgaaacactgcagctaattcctttataatactttcagatgattgcattaagcctttcatgttatgtggcattgttaatttttcctagatacccatccacttaagggccagagaaatccttattcatttaactctggtgggcatttatgtaacatacccaaataaaaacgttattaaacagccacaatcgcattcagtcaacttggcactgaatgtagcttctaaaatcagttctctaccctacgaatggaatgttctaccaagaaagagaagcatcaccatgtcatcttgtgttctacaccactatagagagttacagttgcccccaaacacgaatgctattcccaaataaaatagaatcatgctttgggaggccaaggcgggccgatcacgaggtcaggagatcgagaccatcctggctaacacggtgaaaccccgtctctactaaaaaaaaaaaaaaatacaaaaaattagcctggctcagtggcgggcgcctgtagtcccagctactcaggaggctgaggcaggagaatggcgtgaacccgggaagcggagctttcagtgagccgagatagcgccactgcagtccggcctgggcgaaagagcgagactccgtctcaaaaaaaaaaaaaaaaaaataggatcatggcccttttaaagatctgaatcttctctgttattttcctgatgaatcaccatcccatatcttcttagtcctggccagtatgtagttgcgctcacatacgtctattctagctctgtagctccacaaaacaagtcttaagtccaaatctttgcctcttcatgtctgatatcaccaactcattcagcttttcttcacttattgacatagtgtcatgtcctatcactctctgctgcttctttaaacagtggacacaaacatattttctaattttcagtgtactcagtgaaacttggcagttcaccatgagtcaggctaggttgaaaggctttctttagggttgaaagtaaacgaaattggaatcacccaaagagaatttccccaaaaaacctcagacccagaagtgtaaaagctacagaaggatagaactcccatgtctacagacagttctgttactttttgttctgtactattttggatgttgccaaaatcaaattcatcctgaaaacaggaagcaagctaatgcatatgccatccatgagattcccacttctgggtcagttcatattccattcaaccttttccttttatccttgtcttcttcagaataagacatttttcctccatattttcatattaaatattaacactttataggttctactttaatatatggacactttacaggttatacataaatatttgctggttgattgatttcgagattcattcattctgtgctcaaatatttgtacctagagacgttacatgttagaaaaagtgagcagcttctttctctaatcatttaggagtccatatttttcttttctttttgttctcccaacatccttatctcttactcagctcttcaatttataattaccaaataatcactgttagagaatcagcccctaagtaactttgattctggccaactgtaataagatccaaccacttaaatctgtacttactcaataggaaggaatgtgacatcaggaagagtcattccagtgacattagtaagactttatggagtacataaaatttgataagaaatcttgagctgattctttgacttgatttagaagttgagaaaagagtatttaaggcacaacagggaaacatgggctatactcagagaagaccctctgcattggccaaaatatcatggattctggaaattccttcttaacagaaaaaaaaggcttccaaataatcaggctgaatgggaagaaaaaggcatagaggaagcctgaggaagtatttacttgcttttcccatctctttataattggaagagaagatgatctgccaaaatataacccagcatgcacagtatggacaggaagcagccctccatgaactttattatcacagaatatgagcattcttattgatccacagctacatcttctattcttgcagcaagggtacatgtcctttgaccctccacaaaagaacaagcaggacatctctattttcctattgagtctgagtccattattagaaaggacttcccagccatcttttctacttggtattaaaattcccttacagattcattgctaagtgccaattctttttttttcttttgagacggagtcttgctctgtcgcccaggctggagtgcagtggcgcaatctcggctcactgcaagctccgcttctcgggttcacgccattctcctgcctcagcctcccgagtagctgggactacagacgcccgccaccgcgcccagctaattttttttgtacttttagtagagacggggtttcaccgtggtctcgatctcctgacctcgtgatccgcccgcctcggcctcccaaagtgccaattctgactctacttaaacatcacctgtatcagggagctcattattccttgaggtcttacatttctttcagcacattttgttccaagctacacgactttaaaacagagccagcctttggggcatatgttctctttggtgccacacaaaacctgtagtacatgatacagtgttgcttcccccctccttttccttccatatatatttgttttgttttgggcattgcattacttttttgaatttttaagaatctctaaaattagtctgaaggatgttctgagggccagacattagaatttgtgagtttttttgttgctggttgtactttcctatttagaagacagaccgttctgacagttgttgtgtagcttcatgccttccccagtaactaacccatgaacagtacaccccttttatctgacttgttgataatgaccttaaaaatgttaggaaatgggccgggcgcggtggctcgtgcctgtaatccagcactttgggaggccgaggcgagcggatcatgaggtcaagagatcgagaccatcctggtcaacatggtgaaaccccgactctactaaaaaaaatacaaaaattagccgggcgtgttggcgggcgcctgtagtcccaactacttgggaggctgaggcaggagaatcacctgaacccaggaggcagaggttgcagtgagcagagattgcgccactgcactccagcctgggcgacagaacgagactccgtctcaaaaaaaaaaaaaaaaaaaaaaggttgggaaatattggtgtataatccccatgtctaacaaggaagaagtcaaaagcaaaagatagtggtattgccgaaaactcattatttctagttagttcatctgtggaaaaggatatcgttcttgaggagaggggttctattatgctatagttttctatggaaatgtacaaatgctttcctcattgctctggatgactatttagtttaaataatatacctttgtcatggggaagaccatgattgtggcttcttctaccccaactttgaatgagagagcactgtaagcagaaactgccatcagtctcctgggcaggacctggaggtaactttctgagctgtaaaatagtaattcctaagagagcttacaaactgcttccacacagaaaatagcgcagggaggacagttattagtacccctattctagaagagaaagctgaggctcaagccattaagtgacttgccaaaagctgtgacatagctgggaagtggcagatttggggatataaccaggtcttgcaagtccagtgctgtctccaagtagccacgctcacagctgagaacaccttagaggacaatatcgacttcttacagactaccaagcccccagtcatccagggaaattcagagaccaattgactgccaggtggcaaatccacatgtgtactgcggtctttagagatcatttagagcttgcacacatctgtgtcttcttgtgggaaacctctaggtattctgtctgatcagcactgtgaggaagttggtgggaaaaggccactgataagaacaaacaatgggcagaaggaagcacattgcaataaatttccccagagagagttcctttacattccattcaccaaaaacctctctggaactgtcaggttcagaatatcaaccaagaccatatcatttagaattcattggcatgtagaggtgactcgattcctaaaagaagcctctctcccatgaaccacgatgtacgttccacagaggcagaaaccgccgtaggttagcaatgcattttagtctttctctccattcacatttactgagagcacaccacgtgcatgttgctgcaacaggcatttccgatagagccgatccatgagctaacaatgtctgaaaacaaatgttatggaactgttggcatttctgagatttggcctttgccatttgatagactttgcttcccaggatgctgtcattttgtgattttttataattacaaggaatttggtaccatgttgttttcaaaaaacctcctagaaagtctccatgtatgctctagaagttgctctacgtaacagttcagcaagcaagtgttccttctcttgagctgcgtccctcaggaagctgtacctttagggtgtgctttccactttttatttcctctcatttcactcctttcattgtttgctatatcctaaaatatgtgaagtgagagaaaaaatatcatttcttctcattaaatctcctgcattaaatctaagaatcctttaaaataatcacacctgataagtgttttatgcatttccctccctggagtgttatcatccatcaagccagtatcatcatccacctgcttattccttgggactaatgagagccaagttaaatagcaaatgacttctcaccccttcctagtcctcatgcctgaggaataagggcgacattaatgggagcgggagagtggtggctttggttgagatgcacgttcacagactagaaaagtgcctcacctccatggtgtatatgtgccaccttttcttaatccagtctatcattgttggacatttgggttggttccaagtctttgctattgtgaatagtgccgcaataaacataagtgtgcatgtgtctttatagcagcatgatttataatcctttgggtatatacccagtaatgggatggctgggtcaaatggtatttctagttctagatccctgaggaatctccacactgacttccacaatggttgaactagttcacagtcccaccaacagtgtaaaagtgttcttatttctccacatcctctccagcacctgttgtttcctgactttttaatgattgccattctaactggtgtgagatggtatctcatagtggttttgatttgcatttctctgatggccagtgatggtgagcattttttcatgtgtttcttggctgcataaatgtcttcttttgagaagtgtctgttcaatactatgcagccataaaaaatgatgagttcatgtcctttgtagggacatggatgaaattggaaatcatcattctcagtaaactatctcaaggacaaaaaaccaaacaccacatgttctcactcacaggtgggaattgaacaatgagaacacatggacacaggaaggggaacatcacactctggggactgttgtggggtggagggaggagggagggatagcattaggagatatacctaatgctaaatgacgagttaatgggtgcagcacaccagcatggcacatgtatacatatgtaactaacctgcacattgtgcacatgtaccctaaaacttaaagtataataataatgaaataaaattaaaaaaaaaaaagaaaagtgcctcacctccctgtgaggcttgatgaatattgtggccagtgagtggaaaatgattcttgtcgaatagacagagtattcccaccccaggaatggattaatagaagacacaatttgagcacttctcagaattatctagtatgcctgagtagagactcacatgggtggaatctgtgttgtctcatcagagggaataaaaagacaatgaggtggtaaatgtgaaaaaagcagccttttagaaaaacattattttcaaatacctttataaatcatctaatttatcttcacataatataaagaaaaaactaataaaaattttcgtatttcactttacataatatgttctcccatatttagggatcatacaattgtattgtcttcaaaacacacacacacacacatacacacacacacacacacacacacacaccccttccaagaaagctgatccttcagaaaataaatcttatttttaagcacttgggttttcaggccagaaaattaataaatcctaaacctgacccatttttgtaacagctaaaaaggagaagaaaaagctagttaaattttgtgtggatccatttatctcttaaaatatgccaaagcaatttgaggtgggggtggaaacaggtatttatctctcatgcgtgattctctctttatatttctatctgttgggaaaagggtaaagaactattcttggtcattattgatgtattgtgttgccactttgtatggtgcctgctgtgctttatcccgaggcatagcagtaatcgttactatcttgactctttccttcatcacaagagagtaaatatgaagtctgaatgtcgttcctcacccccaaattgtttaactctgcttccaaactagtttaagaaatgcaaaatgggaagagctagcttttcttagatacatttcttccttttttattctttcttgggagacgttaagtataaaagggaaaaagtcagttccttcttctctctctttctctttgggtgacagcaatgctcacttagtaattataaactggaaataggagagtagcttgagcaggttatgatatatctgcccaatgtgtttcattccttcaaacataaactttgagagtaaaagagatttttataatttaaatgccaacgacaggaatggcctcatgttttaactttcaaataataaatggggagttggtatttgggcagagtttgcattttactaatcctatatactttgagcttagtttttagaattgtgtcaaatacatcaacatatcaggattatagtgccaaaaatagttaaagtgccttggtcctccctctgtaggcagcaaattgaaactaacatgggaccatgccatccttctagcataatggagaagtctgaactgaggagtatctttgatgaaagacatttaggaccctagaaactaaatcttgtcaccaagactttatagtaaagtagtagcaaaattatttttaaaagactttcttccttttactacccatttcctctcttgggaaagctgatgagcaaattatccaagactcatttctttattaggcaaagtcagaatatttcccctctgaaaatctgaattatgccctcattctttttcaagaaatatctcaaagagcaaatagaattaaacatgacacttgattgtctgattatttggcatgtataaaattatcatgtggcttaatgtgccttaagtgaaaatttaaacttagacctgaaacctttacagttggatgtagcgttgagcttttgcatgttttctgtataataaaccacttttgttttgtttgttttgtcttttaacctacacctttatcattactctaacagatttagggcttctctttctctacagctaagtaagggaatatgtgcaattatgagacatacaaaaaaggaaagggaaaggactttctaagtagcaaatctgtgccatgaagtagatgtggcgtgaagatacagagcctgaggatagtaattttccctgagccacgcacacaggcttttatttcatgccttttctctttctgtgccgtcacctttgagaaaaacgattgcaccttctccaagtctgcctttttaacagctacagttaagttggcaagacttccccagctctgaatatagccatttgccgactccggcctctttgcgagactgactcaaatctgtgatcttctgttcagcatacacatcagcaaagtgagaagatgagcactaaatataggctctattaactttacttttagatttactgccttcaaaaagtgcctattctgagcaacataaacgttattccttacatatgtatgtacacacggtacccagagtcgtactgtgcagccttcaaaaacataccatcagaaagagtaggtgctgagataaggaaactttgccaaatgaaagaaagtcactcacttccaatatcccctctcaagcggctaccgtgaaacgggctgcaaacacattccctgagcatcccttgctgatacagcttctttatatttatatcctactggatggtagcatattgctaaggtttcctgtactctgcttcaagggaatgtaagctttatggcattgaaacatttagggaaaaaaaagatgtttaagagaattaatagagccgtagtctgtattaggatgtgtgtcatatgtgtgttctataaactaagcatcggtgggtttagagtgttaaagtgtcagcacattccttctccttttgtctctcaggctaacatgagagaaaatagaaaagtcttggctgtggggattggaagctcagggggccaaatgtccttgccagatccttagagcattactttgactcctaaaaatagtagtgtatgttatttgatggcttttgtttccatagttccatcactgacaaaactgtcaatactgttgatggagcagcagcatagcctagagtgatgcattcttacccagaggtggcaataggagagggtccatgtaaataggacgaggtagacagtgcatgattgtaggagaagggttgaagggaggacatgattccaaaaaagatcgttctcaatgtgtcgtctgactcaaccagctggcagattacacttgccaagtcgttccctttccttctaagtcagttggctccatattcacttgaatatgcctctgtttgggcaaagcaagatacctccacttaacctttatccaaggaagctcttggtgtcctcttggtcataaagttgtctcctacctaacccagttttaccaaatggaagtaaaaggggacaaactatggaagatggactccatgccattgcagtcagccaccattctcttttccatataaggagccccattacataagctacgggtgaggttggaacagctatgtttcataatttcaagagtgtgaccaccctgctctagtcatcatcattggatgaatccagttgactctttggcaaaagggtgatacttttcactaaaaatgcctactcttcctgttgatgttccttttctgtttttaccttgtccaatttccacactagtcattttttttattttttagaggatcagattttagcgctggaaaatgagttcaaaaatttcagtgtaatgtcataaggatgttgggatacagagattttttttttccttggaaacaaatggactgggaagaaacacagcatggctttgctctgagtttcaatctgatgattatgaccatggaagatagtcttatgtaaaggttaaatggtgtttacaagtggatagataaggcggagatggtgagaagccgggttttctctatgctaaatgtgtctactaagagcagcacttcctactagctaagcacaatcatagccccaccgtgatgagctgctagtctgaataacattccctgacttagggaaaggcacacaaaaacatataaagaatatgtctattttcatatgtgtgatactgacagagccatggtattcctaaaatataggtttctcttttttcttgtattcttagcaaattgcatttattcactacattacaaaccatcactgatgtatccaaaatagcacacatagttcagtatgaaaataagagaataaaatctgttataagcaagtgatttaggtattttcttttgtgtttatgcattatctgactatattaaaacctgtttttctatttaccttctatcagttttctctaccaattatgttttttcaatgctctataagaatgaatatggaaattatatttcttttttctgtaaaagagttgcaactactttattatatttagaaatccaataaacttcttattacattta

SEQ ID NO: 11625 - DNA, 4710 bp, Homo sapiens
  source 1..4710: mol_type = unassigned DNA
ccgcagtccttagcttcccggggacaggaaaccttcaagaccgagctgccacggccgcctccccgcccgccccccattctacgcgcctgcccacaccctcctcccctccttccagcgcctttcggtggagcactgcggcactcagcccgagctgccgttttcccctcgcggggaacgctgtgacccccccgcaggagcggcggggcggggtgggggggcccgggagaagatggcgacgccgggaagcgaaccccaacctttcgtcccggccctttcggtagctactctgcacccacttcatcatccccaccaccaccaccaccaccatcagcaccacggaggaaccggcgcccccggcggggcgggtggtggcggcggtggcagcgggggcttcaacctgcccttgaaccggggtctggagcgcgcgcttgaggaggcggccaactccggggggctgaacctgagcgccaggaaattgaaggaatttccccgtaccgcagcccccgggcacgacctctcggacacggtgcaggcagacttatctaaaaacagactggttgaagttccaatggaattgtgccattttgtatcactggaaattcttaatctgtatcacaactgtatcagagtcattcctgaggccatcgttaatctgcagatgctgacttacctgaacttgagtcgaaatcagctgtccgccctgcctgcctgcctgtgtggtctgcctctcaaagtcttaatcgcaagtaacaacaaacttggatcattaccagaagagataggtcagctcaaacagttaatggagctggatgtcagctgcaacgagatcacagcgttgccccagcagataggtcagttgaaatctctacgagaactgaatgtcagaagaaattaccttaaagttttaccacaagaactagtagatctttccttggtaaagtttgacttttcctgcaacaaagtgctcgtgattccaatttgttttagagagatgaagcagctgcaagtgttactacttgagaataaccctctgcagtctcctccagcacagatttgcacaaagggcaaagttcacatatttaagtatctgagcatacaagcatgccagattaagacagctgactccctttatctccacaccatggagaggccacatttacaccagcacgtggaagatggcaagaaggattctgattcgggagttggaagtgataatggagataagcgattatctgccaccgagccttctgacgaagacactgttagcctcaatgtgccaatgtcaaacatcatggaagaagaacagatcatcaaggaggactcgtgccatcgccttagccccgttaaaggggaatttcatcaggaatttcaaccggagccttcccttttgggtgacagcaccaactcaggagaagaaagagaccagtttactgatagagcagatggtctccattcggaatttatgaactataaggcaagggcagaagactgtgaagagctgttacggatagaagaggatgtgcactggcaaactgagggcataataagttcatccaaagatcaggacatggatatagcaatgatcgagcagctgagagaagcagtagatttgctgcaagatcccaatggattaagcacagatattacagagagaagtgttttaaacctatatcctatgggatcagcagaagccttagaattacaagattctgcactgaatggtcaaatacagctggagacatctccggtgtgtgaggtgcaaagtgatctaacattacagagtaacgggagccagtattctccaaatgagattagagagaactcccctgcagtctctcctaccacaaacagcacagctccatttggcctgaagcctcgatcagtgtttctaagacctcagagaaatttggaatctatagacccgcagtttacaatccggaggaaaatggagcagatgagagaagagaaagagctggtggaacaacttcgtgagagcattgagatgagattgaaggtcagtctacacgaagacctgggggcagccctcatggatggtgtcgtcctctgccatctggtcaaccacatccgcccacggtcggttgcaagcatccatgtcccatcaccagcggttcccaaacttagcatggccaaatgcagaagaaatgtggaaaactttttggaagcatgccgaaaattaggagtaccagaggaaaagctatgtctcccccaccacatccttgaagaaaaaggcctggtcaaagtgggcattaccattcaagcattactagacatcaccgtaacgaaggctctgttcacatgaaactaccccttctccattgggggctcagactctgctctcatccaggatcctgaactctgctccaggcacctgttcaaccctctctcccacccactgcctgtcacttcactgactccagttacattgaaacaattttcagtctaagggaggattttctacctttcagagctgacctccgactttaagacttgacaggtatttatcttgaaaccagagagggagctggaggaaaaaaaaactgagcagcacatcaatgccttttccaccctccttcatcctttccacactcaccgactgccattaccaaaacgccaagcacaaccgttttgcagcaagacgcattcgttttattaaaaccaaactcgttatgtatttagtggggggaggggggcacaatcaggtttttcaccaccaaatttttcgagaggtttcttgagaccattgccttttaaaaaactattttcgacatacaaaatatttatataaatattatttattagtgagttgttattcatcctttggatgcaaattgtaaattaggaaactattttattactgcttttttgtggttaaacactttattttaatataaatgttgagttattttctatcctctttggtgtgcggtagtttaggtctcagtaatgtttctggtatatatgattccaaaaaaaagcgaaaaacaggtgcttttaggacacaacttttctggggaggcaatattgacactttggtttgtggaacgttggtcttatttatatttctgcattccatccagtttcctacattccagcagccctctgtcccccaatataatgaactgactaaaatcaagagagcaccccaaagttatttgtaaatagctgtgatggaaaaaaaaaagacatattaaacttgaagctaaaatgtgaacaattattttttggattcatacttcttttgctatgcacaaaacattcacgttttaacacaaagaaataataagtgttagcatcgtgtgtcttgaagtatacttttgcactgtaacttgggttacgttaaagagagcttagcaccaaaggtagataatgaagaaatggcataggaaagtggagatgataaaaagttgattgttgaaccaaaaagggtttgaagggaagcttcgactgagtatcagaaattacttaaggcacataggacctgaatcaggaaaccagcacttcttacaactgccagttttaaaagaggaaatgattctgagatgtgctcattttattttaatttggtggttggtggttttccaagtagtctgtaaaatcctgcaagattcacagtctctggtgtgaaacctcagaagtgagtcgttgtgagcctgtgggcagcaccaccaaggcaggctaaggggagggtgcagtaagtggagtttgtgaggctgagtggctgaggagggagcaagtgcaacaaaatagggctagagaagaaccagccaaggagtggaacccatgctgctctcagagattcacggaacacggcagccttctgcaggcagttccatgcatgtgcactcacgctgcaatcacagatgtcccagtaattaacctttctaagtcttgtgaatgctgactgcactttcacctcctcgaaaagccattggaagtttttagagcagcagcagccacagtttgtaagacaaatgtagagggggacgcaaaagaaaagacaccaccaggaggaggattcagtgtgcagtcagcacagaccaacatcaaccaaggcaatggctgccctccactcttgggaagatggggggaggtttctgaaaacggaaatttggattggcagctagcagttatttcctatcagatgtactgtgcactttaacctaacttaaaatgtattttaatatttttctgtactgcacaaatacctgttttgtcaaatagcataatgatgtaaagaaacattttggacaaagagtgtatacaatttaagcaacattcaaaggttgactatataagtaggagtttagcctgctgcaccttcacgggcattcagaatgcggggtcctgaaatattttcttacgtgtatatatggtagcatgaagctttgtaatcattgttttgagagatttttttttcaaaattaaagtatttcttttgatattaatttttattattttcttgaagttggttgtgtaatgtaaatggcttcagtcttctgtaaaattgcttttttttcttttaaatgcagtccttctatggctaagacgtcttcaagatccttgtacactgtttatatgtgcaataaaatgcatggccagctgacagtatcgtcagtggacagaatgtatatagtgcaaatatccttccttttattatttaacagccattaaaatcttggatttgtacaa

SEQ ID NO: 11626 - DNA, 2070 bp, Homo sapiens
  source 1..2070: mol_type = unassigned DNA
gcagtccttagcttcccggggacaggaaaccttcaagaccgagctgccacggccgcctccccgcccgccccccattctacgcgcctgcccacaccctcctcccctccttccagcgcctttcggtggagcactgcggcactcagcccgagctgccgttttcccctcgcggggaacgctgtgacccccccgcaggagcggcggggcggggtgggggggcccgggagaagatggcgacgccgggaagcgaaccccaacctttcgtcccggccctttcggtagctactctgcacccacttcatcatccccaccaccaccaccaccaccatcagcaccacggaggaaccggcgcccccggcggggcgggtggtggcggcggtggcagcgggggcttcaacctgcccttgaaccggggtctggagcgcgcgcttgaggaggcggccaactccggggggctgaacctgagcgccaggaaattgaaggaatttccccgtaccgcagcccccgggcacgacctctcggacacggtgcaggcagacttatctaaaaacagactggttgaagttccaatggaattgtgccattttgtatcactggaaattcttaatctgtatcacaactgtatcagagtcattcctgaggccatcgttaatctgcagatgctgacttacctgaacttgagtcgaaatcagctgtccgccctgcctgcctgcctgtgtggtctgcctctcaaagtcttaatcgcaagtaacaacaaacttggatcattaccagaagagataggtcagctcaaacagttaatggagctggatgtcagctgcaacgagatcacagcgttgccccagcagataggtcagttgaaatctctacgagaactgaatgtcagaagaaattaccttaaagttttaccacaagaactagtagatctttccttggtaaagtttgacttttcctgcaacaaagtgctcgtgattccaatttgttttagagagatgaagcagctgcaagtgttactacttgagaataaccctctgcagtctcctccagcacagatttgcacaaagggcaaagttcacatatttaagtatctgagcatacaagcatgccagattaagacagctgactccctttatctccacaccatggagaggccacatttacaccagcacgtggaagatggcaagaaggattctgattcgggagttggaagtgataatggagataagcgattatctgccaccgagccttctgacgaagacactgttagcctcaatgtgccaatgtcaaacatcatggaagaagaacagatcatcaaggaggactcgtgccatcgccttagccccgttaaaggggaatttcatcaggaatttcaaccggagccttcccttttgggtgacagcaccaactcaggagaagaaagagaccagtttactgatagagcagatggtctccattcggaatttatgaactataaggcaagggcagaagactgtgaagagctgttacggatagaagaggatgtgcactggcaaactgagggcataataagttcatccaaagatcaggacatggatatagcaatgatcgagcagctgagagaagcagtagatttgctgcaagatcccaatggattaagcacagatattacagagagaagtgttttaaacctatatcctatgggatcagcagaagccttagaattacaagattctgcactgaatggtcaaatacagctggagacatctccggtgtgtgaggtaaggctgctggtagattcaccagaactctgtgcaatattttgccatggaatactggccaccacattctgtaaagatttgtcagggagtgaaacatctttattaatgaggccaatattcagatttgttcaggacacatttttcaacttgtttatacgtttgcctctttagttctgcttttctgctatacctcaccctctgttgaagatgagagttggctatttctattagattctgtagatttttttacctcagatcatcttgctgagtcaagcgatggcaactaaaatacatagggaatctgcctgtgtgtcag

SEQ ID NO: 11627 - DNA, 4131 bp, Homo sapiens
  source 1..4131: mol_type = unassigned DNA
cttcaagaccgagctgccacggccgcctccccgcccgccccccattctacgcgcctgcccacaccctcctcccctccttccagcgcctttcggtggagcactgcggcactcagcccgagctgccgttttcccctcgcggggaacgctgtgacccccccgcaggagcggcggggcggggtgggggggcccgggagaagatggcgacgccgggaagcgaaccccaacctttcgtcccggccctttcggtagctactctgcacccacttcatcatccccaccaccaccaccaccaccatcagcaccacggaggaaccggcgcccccggcggggcgggtggtggcggcggtggcagcgggggcttcaacctgcccttgaaccggggtctggagcgcgcgcttgaggaggcggccaactccggggggctgaacctgagcgccaggaaattgaaggaatttccccgtaccgcagcccccgggcacgacctctcggacacggtgcaggcagacttatctaaaaacagactggttgaagttccaatggaattgtgccattttgtatcactggaaattcttaatctgtatcacaactgtatcagagtcattcctgaggccatcgttaatctgcagatgctgacttacctgaacttgagtcgaaatcagctgtccgccctgcctgcctgcctgtgtggtctgcctctcaaagtcttaatcgcaagtaacaacaaacttggatcattaccagaagagataggtcagctcaaacagttaatggagctggatgtcagctgcaacgagatcacagcgttgccccagcagataggtcagttgaaatctctacgagaactgaatgtcagaagaaattaccttaaagttttaccacaagaactagtagatctttccttggtaaagtttgacttttcctgcaacaaagtgctcgtgattccaatttgttttagagagatgaagcagctgcaagtgttactacttgagaataaccctctgcagtctcctccagcacagatttgcacaaagggcaaagttcacatatttaagtatctgagcatacaagcatgccagattaagacagctgactccctttatctccacaccatggagaggccacatttacaccagcacgtggaagatggcaagaaggattctgattcgggagttggaagtgataatggagataagcgattatctgccaccgagccttctgacgaagacactgttagcctcaatgtgccaatgtcaaacatcatggaagaagaacagatcatcaaggaggactcgtgccatcgccttagccccgttaaaggggaatttcatcaggaatttcaaccggagccttcccttttgggtgacagcaccaactcaggagaagaaagagaccagtttactgatagagcagatggtctccattcggaatttatgaactataaggcaagggcagaagactgtgaagagctgttacggatagaagaggatgtgcactggcaaactgagggcataataagttcatccaaagatcaggacatggatatagcaatgatcgagcagctgagagaagcagtagatttgctgcaagatcccaatggattaagcacagatattacagagagaagtgttttaaacctatatcctatgggatcagcagaagccttagaattacaagattctgcactgaatggtcaaatacagctggagacatctccggtgtgtgaggtgcaaagtgatctaacattacagagtaacgggagccagtattctccaaatgagattagagagaactcccctgcagtctctcctaccacaaacagcacagctccatttggcctgaagcctcgatcagtgtttctaagacctcagagaaatttggaatctatagacccgcagtttacaatccggaggaaaatggagcagatgagagaagagaaagagctggtggaacaacttcgtgagagcattgagatgagattgaaggtcagtctacacgaagacctgggggcagccctcatggatggtgtcgtcctctgccatctggtcaaccacatccgcccacggtcggttgcaagcatccatgtcccatcaccagcggttcccaaacttagcatggccaaatgcagaagaaatgtggaaaactttttggaagcatgccgaaaattaggagtaccagaggctgacctctgctctccgtgtgacatcctgcagttggattttcgtcacattcgaaagactgttgacactctgctggcactcggggagaaagccccaccaccaacttctgccctccgctccagggaccttataggcttctgtcttgtccatattctctttatagtgctggtctatatcacttaccactggaatgctctgtccgcataatgtctgcacgtgcatccaaacgctgtgctctgtcgccctcaacctttgcagggtccttcctacctttgagcctttgccttgcaaacttccatccctgtcatgtcttcagttatctctcgagttttgaagctgaacagtagcaaatcagattttccagaagcacaaactttgtagaatacagtttagtataattcctctcacttactgaaatacaacgacgacgactgcaaagtgtatgcacaccgcatgcttcctcatccacatagtgccagcagcagtgccacgcagttcctcctctccctcccggtgagctgctgccctgggcagaggggaggagaattccaggacaagagtgtcaaggacagggatttagcatatggaagtctttcctttgggtcagtattgaactagaattctaattcgggactgggcaattgagctgtataggggccaccttgcagggaggacagaaaactaacattttggcccaacttgatctatacaaaactttaataataccactactgaccaagttggacgtgtacacgtactcacactgccttgatggccattcgattggattcctcccaaatttcctaaaaagggagccgcgaagggcgctgggcagtgtggccgccaacttccaccccggcaagcccctctgtcctatgcagaagggcgctcaagggaaggaagtgtcgttgctgttagagcctcacgtggaggagtcacttaaacaccagttttttactgcttaattccttgttaggtcttctcttgaggctcttagaaaagcgttttccagagagatttctatttttgaacaatggaacggatcactgcttttttgccacatcacatagtaactgccggtccagaatgtgacggattcgactctattcattttcaaataaagccatgagccgtggaacattcttggtcctggtgcttgggttatgatggcaggagtcaagaagaagattactttcattctagaagaatgtagtttctctaattatttgaaatgttcatttagcctttgattttcactgatattaactagcaaactgctttaagtcagctcaaaggattatatagtaactatatctgcatttggagcaatgtgatcagtttgcatttaaaaggaaaaaaaagaattttatcttagccagaatgtccctggattcaggggtgtctttgtataatatgagagggccttgttccaaggtcaaggcagcctccttattttacatgctgtttgccaaatcttgtttcttagcttggggagatgatggacttagcttcctcaagataaatttctagtttattaagatgcaaacagctctcatagatggctactacgaagaaaatcttatttttctgaacattttcatgaatccaggggacttgaaaatatggaagacccacatagttagaagaatatatttataaagattccttgctgctaagtcagatcagatttgctaacaggaagcattctttacatgacagtatcttgagttatgtgagttttttttcctcctgactttgtgttgattggtgaaatgcagggtatgtggaagttatctaattaacctcagttgtatatgaataacccacagatgtactgaattacttttggtgctatcttgtactcttcaatctgtaacacaataaaatccctttgtacgatgtctaatgagcaccctgagccataaattgcttaataaacacattttgggtgatt

SEQ ID NO: 11628 - DNA, 3314 bp, Homo sapiens
  source 1..3314: mol_type = unassigned DNA
acaccctcctcccctccttccagcgcctttcggtggagcactgcggcactcagcccgagctgccgttttcccctcgcggggaacgctgtgacccccccgcaggagcggcggggcggggtgggggggcccgggagaagatggcgacgccgggaagcgaaccccaacctttcgtcccggccctttcggtagctactctgcacccacttcatcatccccaccaccaccaccaccaccatcagcaccacggaggaaccggcgcccccggcggggcgggtggtggcggcggtggcagcgggggcttcaacctgcccttgaaccggggtctggagcgcgcgcttgaggaggcggccaactccggggggctgaacctgagcgccaggaaattgaaggaatttccccgtaccgcagcccccgggcacgacctctcggacacggtgcaggcagacttatctaaaaacagactggttgaagttccaatggaattgtgccattttgtatcactggaaattcttaatctgtatcacaactgtatcagagtcattcctgaggccatcgttaatctgcagatgctgacttacctgaacttgagtcgaaatcagctgtccgccctgcctgcctgcctgtgtggtctgcctctcaaagtcttaatcgcaagtaacaacaaacttggatcattaccagaagagataggtcagctcaaacagttaatggagctggatgtcagctgcaacgagatcacagcgttgccccagcagataggtcagttgaaatctctacgagaactgaatgtcagaagaaattaccttaaagttttaccacaagaactagtagatctttccttggtaaagtttgacttttcctgcaacaaagtgctcgtgattccaatttgttttagagagatgaagcagctgcaagtgttactacttgagaataaccctctgcagtctcctccagcacagatttgcacaaagggcaaagttcacatatttaagtatctgagcatacaagcatgccagattaagacagctgactccctttatctccacaccatggagaggccacatttacaccagcacgtggaagatggcaagaaggattctgattcgggagttggaagtgataatggagataagcgattatctgccaccgagccttctgacgaagacactgttagcctcaatgtgccaatgtcaaacatcatggaagaagaacagatcatcaaggaggactcgtgccatcgccttagccccgttaaaggggaatttcatcaggaatttcaaccggagccttcccttttgggtgacagcaccaactcaggagaagaaagagaccagtttactgatagagcagatggtctccattcggaatttatgaactataaggcaagggcagaagactgtgaagagctgttacggatagaagaggatgtgcactggcaaactgagggcataataagttcatccaaagatcaggacatggatatagcaatgatcgagcagctgagagaagcagtagatttgctgcaagatcccaatggattaagcacagatattacagagagaagtgttttaaacctatatcctatgggatcagcagaagccttagaattacaagattctgcactgaatggtcaaatacagctggagacatctccggtgtgtgaggtgcaaagtgatctaacattacagagtaacgggagccagtattctccaaatgagattagagagaactcccctgcagtctctcctaccacaaacagcacagctccatttggcctgaagcctcgatcagacccagccctcattcttcctcctatctccttcaacacacttacacaggcacagacatgggacagctctagctacagtgttccatctgaaggagacagtgacaatgtgtttctaagacctcagagaaatttggaatctatagacccgcagtttacaatccggaggaaaatggagcagatgagagaagagaaagagctggtggaacaacttcgtgagagcattgagatgagattgaaggtcagtctacacgaagacctgggggcagccctcatggatggtgtcgtcctctgccatctggtcaaccacatccgcccacggtcggttgcaagcatccatgtcccatcaccagcggttcccaaacttagcatggccaaatgcagaagaaatgtggaaaactttttggaagcatgccgaaaattaggagtaccagaggctgacctctgctctccgtgtgacatcctgcagttggattttcgtcacattcgaaagactgttgacactctgctggcactcggggagaaagccccaccaccaacttctgccctccgctccagggaccttataggcttctgtcttgtccatattctctttatagtgctggtctatatcacttaccactggaatgctctgtccgcataatgtctgcacgtgcatccaaacgctgtgctctgtcgccctcaacctttgcagggtccttcctacctttgagcctttgccttgcaaacttccatccctgtcatgtcttcagttatctctcgagttttgaagctgaacagtagcaaatcagattttccagaagcacaaactttgtagaatacagtttagtataattcctctcacttactgaaatacaacgacgacgactgcaaagtgtatgcacaccgcatgcttcctcatccacatagtgccagcagcagtgccacgcagttcctcctctccctcccggtgagctgctgccctgggcagaggggaggagaattccaggacaagagtgtcaaggacagggatttagcatatggaagtctttcctttgggtcagtattgaactagaattctaattcgggactgggcaattgagctgtataggggccaccttgcagggaggacagaaaactaacattttggcccaacttgatctatacaaaactttaataataccactactgaccaagttggacgtgtacacgtactcacactgccttgatggccattcgattggattcctcccaaatttcctaaaaagggagccgcgaagggcgctgggcagtgtggccgccaacttccaccccggcaagcccctctgtcctatgcagaagggcgctcaagggaaggaagtgtcgttgctgttagagcctcacgtggaggagtcacttaaacaccagttttttactgcttaattccttgttaggtcttctcttgaggctcttagaaaagcgttttccagagagatttctatttttgaacaatggaacggatcactgcttttttgccacatcacatagtaactgccggtccagaatgtga

SEQ ID NO: 11629 - DNA, 554 bp, Homo sapiens
  source 1..554: mol_type = unassigned DNA
atcgggtggtatccattgagcactgtcctggtgaggacaggttgatagatcacctgaagccttttagatgagaccaggatgtcagctgcaacgagatcacagcgttgccccagcagataggtcagttgaaatctctacgagaactgaatgtcagaagaaattaccttaaagttttaccacaagaactagtagatctttccttggtaaagtttgacttttcctgcaacaaagtgctcgtgattccaatttgttttagagagatgaagcagctgcaagtgttactacttgagaataaccctctgcagtctcctccagcacagatttgcacaaagggcaaagttcacatatttaagtatctgagcatacaagcatgccagattaagacagctgactccctttatctccacaccatggagaggccacatttacaccagcacgtggaagatggcaagaaggattctgattcgggagttggaagtgataatggagataagcgattatctgccaccgagccttctgacgaagacactgttagcctcaatgtgccaatgtca

SEQ ID NO: 11630 - DNA, 545 bp, Homo sapiens
  source 1..545: mol_type = unassigned DNA
gaaacgaggctctgctgccttctatggtgaaaggggagagcttttccaggttcaaaagtaaagcgggatatttaaggccttgatctcactggaatcatttgtatctttagttctgtgatgccaagtgggacctgcatgggatttggatgtcagctgcaacgagatcacagcgttgccccagcagataggtcagttgaaatctctacgagaactgaatgtcagaagaaattaccttaaagttttaccacaagaactagtagatctttccttggtaaagtttgacttttcctgcaacaaagtgctcgtgattccaatttgttttagagagatgaagcagctgcaagtgttactacttgagaataaccctctgcagtctcctccagcacagatttgcacaaagggcaaagttcacatatttaagtatctgagcatacaagcatgccagattaagacagctgactccctttatctccacaccatggagaggccacatttacaccagcacgtggaagatggcaagaaggattctgattcgggagttggaa

SEQ ID NO: 11631 - DNA, 5273 bp, Homo sapiens
  source 1..5273: mol_type = unassigned DNA
gctctctggccgcggcgtggggacagcgaggcgcactggggcctcccagcgcggggccggccgcgccgtccagcccgaggtctacggctttgcgctccgagcccagaggaagatgcctgccggcaccgagctcgggctgcggggctgaacgcctgtcttccaggcgcagcggcagcactgccctcggccggtgtcggtagcggcactcggcgtgccccgggcggacgaagagcgcaggctgggtacaccttgcccgaatcggcggagttcgcagctagcgcgggcgggccggccggcccggatgggcgcggggtttgcggcccccgccgggtgctccggagcggcccgggcaccgggggcacgctgagtgccggagccgcggccgcagagagaacttggggcgggggccatgccccggtgcggagtctagagccgagcggagcgccccgcgggcccgcccgcgtctgcggccgttcgggtcctcacagtccccgcgcccggagttcgcagcgcgctccagacaagatggcgcggccggtccggggagggctcggggccccgcgccgctcgccttgccttctccttctctggctgcttttgcttcggctggagccggtgaccgccgcggccggcccgcgggcgccctgcgcggccgcctgcacttgcgctggggactcgctggactgcggtgggcgcgggctggctgcgttgcccggggacctgccctcctggacgcggagcctaaacctgagttacaacaaactctctgagattgaccctgctggttttgaggacttgccgaacctacaggaagtgtacctcaataataatgagttgacagcggtaccatccctgggcgctgcttcatcacatgtcgtctctctctttctgcagcacaacaagattcgcagcgtggaggggagccagctgaaggcctacctttccttagaagtgttagatctgagtttgaacaacatcacggaagtgcggaacacctgctttccacacggaccgcctataaaggagctcaacctggcaggcaatcggattggcaccctggagttgggagcatttgatggtctgtcacggtcgctgctaactcttcgcctgagcaaaaacaggatcacccagcttcctgtaagagcattcaagctacccaggctgacacaactggacctcaatcggaacaggattcggctgatagagggcctcaccttccaggggctcaacagcttggaggtgctgaagcttcagcgaaacaacatcagcaaactgacagatggggccttctggggactgtccaagatgcatgtgctgcacctggagtacaacagcctggtagaagtgaacagcggctcgctctacggcctcacggccctgcatcagctccacctcagcaacaattccatcgctcgcattcaccgcaagggctggagcttctgccagaagctgcatgagttggtcctgtccttcaacaacctgacacggctggacgaggagagcctggccgagctgagcagcctgagtgtcctgcgtctcagccacaattccatcagccacattgcggagggtgccttcaagggactcaggagcctgcgagtcttggatctggaccataacgagatttcgggcacaatagaggacacgagcggcgccttctcagggctcgacagcctcagcaagctgactctgtttggaaacaagatcaagtctgtggctaagagagcattctcggggctggaaggcctggagcacctgaaccttggagggaatgcgatcagatctgtccagtttgatgcctttgtgaagatgaagaatcttaaagagctccatatcagcagcgacagcttcctgtgtgactgccagctgaagtggctgcccccgtggctaattggcaggatgctgcaggcctttgtgacagccacctgtgcccacccagaatcactgaagggtcagagcattttctctgtgccaccagagagtttcgtgtgcgatgacttcctgaagccacagatcatcacccagccagaaaccaccatggctatggtgggcaaggacatccggtttacatgctcagcagccagcagcagcagctcccccatgacctttgcctggaagaaagacaatgaagtcctgaccaatgcagacatggagaactttgtccacgtccacgcgcaggacggggaagtgatggagtacaccaccatcctgcacctccgtcaggtcactttcgggcacgagggccgctaccaatgtgtcatcaccaaccactttggctccacctattcacataaggccaggctcaccgtgaatgtgttgccatcattcaccaaaacgccccacgacataaccatccggaccaccaccatggcccgcctcgaatgtgctgccacaggtcacccaaaccctcagattgcctggcagaaggatggaggcacggatttccccgctgcccgtgagcgacgcatgcatgtcatgccggatgacgacgtgtttttcatcactgatgtgaaaatagatgacgcaggggtttacagctgtactgctcagaactcagccggttctatttcagctaatgccaccctgactgtcctagagaccccatccttggtggtccccttggaagaccgtgtggtatctgtgggagaaacagtggccctccaatgcaaagccacggggaaccctccgccccgcatcacctggttcaagggggaccgcccgctgagcctcactgagcggcaccacttgacccctgacaaccagctcctggtggttcagaacgtggtggcagaggatgcgggccgatatacctgtgagatgtccaacaccctgggcacggagcgagctcacagccagctgagcgtcctgcccgcagcaggctgcaggaaggatgggaccacggtaggcatcttcaccattgctgtcgtgagcagcatcgtcctgacgtcactggtctgggtgtgcatcatctaccagaccaggaagaagagtgaagagtacagtgtcaccaacacagatgaaaccgtcgtgccaccagatgttccaagctacctctcttctcaggggaccctttctgaccgacaagaaaccgtggtcaggaccgagggtggccctcaggccaatgggcacattgagagcaatggtgtgtgtccaagagatgcaagccactttccagagcccgacactcacagcgttgcctgcaggcagccaaagctctgtgctgggtctgcgtatcacaaagagccgtggaaagcgatggagaaagctgaagggacacctgggccacataagatggaacacggtggccgggtcgtatgcagtgactgcaacaccgaagtggactgttactccaggggacaagccttccacccccagcctgtgtccagagacagcgcacagccaagtgcgccaaatggcccggagccgggtgggagtgaccaagagcattctccacatcaccagtgcagcaggactgccgctgggtcctgccccgagtgccaagggtcgctctaccccagtaaccacgatagaatgctgacggctgtgaagaaaaagccaatggcatctctagatgggaaaggggattcttcctggactttagcaaggttgtatcacccggactccacagagctacagcctgcatcttcattaacttcaggcagtccagagcgcgcggaagcccagtacttgcttgtttccaatggccacctccccaaagcatgtgacgccagtcccgagtccacgccactgacaggacagctccccgggaaacagagggtgccactgctgttggcaccaaaaagctaggttttgtctacctcagttcttgtcataccaatctctacgggaaagagaggtaggagaggctgcgaggaagcttgggttcaagcgtcactcatctgtacatagttgtaactcccatgtggagtatcagtcgctcacaggacttggatctgaagcacagtaaacgcaagaggggatttgtgtacaaaaggcaaaaaaagtatttgatatcattgtacataagagttttcagagatttcatatatatcttttacagaggctattttaatctttagtgcatggttaacagaaaaaaattatacaattttgacaatattatttttcgtatcaggttgctgtttaattttggagggggtggggaaatagttctggtgccttaacgcatggctggaatttatagaggctacaaccacatttgttcacaggagtttttggtgcggggtgggaaggatggaaggccttggatttatattgcacttcatagacccctaggctgctgtgcggtgggactccacatgcgccggaaggagcttcaggtgagcactgctcatgtgtggatgcccctgcaacaggcttccctgtctgtagagccaggggtgcaagtgccatccacacttgcagtgaatggcttttccttttaggtttaagtcctgtctgtctgtaaggcgtagaatctgtccgtctgtaaggcgtagaatgagggttgttaatccatcacaagcaaaaggtcagaacagttaaacactgcctttcctcctcctcttattttatgataaaagcaaatgtggccttctcagtatcattcgattgctatttgagacttttaaattaaggtaaaggctgctggtgttggtacctgtggatttttctatactgatgttttcgttttgccaatataatgagtattacattggccttgggggacagaaaggaggaagttctgacttttcagggctaccttatttctactaaggacccagagcaggcctgtccatgccattccttcgcacagatgaaactgagctgggactggaaaggacagcccttgacctgggttctgggtataatttgcacttttgagactggtagctaaccatcttatgagtgccaatgtgtcatttagtaaaacttaaatagaaacaaggtccttcaaatgttcctttggccaaaagctgaagggagttactgagaaaatagttaacaattactgtcaggtgtcatcactgttcaaaaggtaagcacatttagaattttgttcttgacagttaactgactaatcttacttccacaaaatatgtgaatttgctgcttctgagaggcaatgtgaaagagggagtattacttttatgtacaaagttatttatttatagaaattttggtacagtgtacattgaaaaccatgtaaaatattgaagtgtctaacaaatggcattgaagtgtctttaataaaggttcatttataaatgtca

SEQ ID NO: 11632 - DNA, 5283 bp, Homo sapiens
  source 1..5283: mol_type = unassigned DNA
gattgttcggctgcgaggtcggcgggactcttgctgcgcggaggagccgtgcggaacccgaggctgcgcgcgcgcgcgcgctctctggccgcggcgtggggacagcgaggcgcactggggcctcccagcgcggggccggccgcgccgtccagcccgaggtctacggctttgcgctccgagcccagaggaagatgcctgccggcaccgagctcgggctgcggggctgaacgcctgtcttccaggcgcagcggcagcactgccctcggccggtgtcggtagcggcactcggcgtgccccgggcggacgaagagcgcaggctgggtacaccttgcccgaatcggcggagttcgcagctagcgcgggcgggccggccggcccggatgggcgcggggtttgcggcccccgccgggtgctccggagcggcccgggcaccgggggcacgctgagtgccggagccgcggccgcagagagaacttggggcgggggccatgccccggtgcggagtctagagccgagcggagcgccccgcgggcccgcccgcgtctgcggccgttcgggtcctcacagtccccgcgcccggagttcgcagcgcgctccagacaagatggcgcggccggtccggggagggctcggggccccgcgccgctcgccttgccttctccttctctggctgcttttgcttcggctggagccggtgaccgccgcggccggcccgcgggcgccctgcgcggccgcctgcacttgcgctggggactcgctggactgcggtgggcgcgggctggctgcgttgcccggggacctgccctcctggacgcggagcctaaacctgagttacaacaaactctctgagattgaccctgctggttttgaggacttgccgaacctacaggaagtgtacctcaataataatgagttgacagcggtaccatccctgggcgctgcttcatcacatgtcgtctctctctttctgcagcacaacaagattcgcagcgtggaggggagccagctgaaggcctacctttccttagaagtgttagatctgagtttgaacaacatcacggaagtgcggaacacctgctttccacacggaccgcctataaaggagctcaacctggcaggcaatcggattggcaccctggagttgggagcatttgatggtctgtcacggtcgctgctaactcttcgcctgagcaaaaacaggatcacccagcttcctgtaagagcattcaagctacccaggctgacacaactggacctcaatcggaacaggattcggctgatagagggcctcaccttccaggggctcaacagcttggaggtgctgaagcttcagcgaaacaacatcagcaaactgacagatggggccttctggggactgtccaagatgcatgtgctgcacctggagtacaacagcctggtagaagtgaacagcggctcgctctacggcctcacggccctgcatcagctccacctcagcaacaattccatcgctcgcattcaccgcaagggctggagcttctgccagaagctgcatgagttggtcctgtccttcaacaacctgacacggctggacgaggagagcctggccgagctgagcagcctgagtgtcctgcgtctcagccacaattccatcagccacattgcggagggtgccttcaagggactcaggagcctgcgagtcttggatctggaccataacgagatttcgggcacaatagaggacacgagcggcgccttctcagggctcgacagcctcagcaagctccttttattagagccatcccagtctgctggctgcagctccccgtcccagccccatatgtctgctgggggaaggactctgtttggaaacaagatcaagtctgtggctaagagagcattctcggggctggaaggcctggagcacctgaaccttggagggaatgcgatcagatctgtccagtttgatgcctttgtgaagatgaagaatcttaaagagctccatatcagcagcgacagcttcctgtgtgactgccagctgaagtggctgcccccgtggctaattggcaggatgctgcaggcctttgtgacagccacctgtgcccacccagaatcactgaagggtcagagcattttctctgtgccaccagagagtttcgtgtgcgatgacttcctgaagccacagatcatcacccagccagaaaccaccatggctatggtgggcaaggacatccggtttacatgctcagcagccagcagcagcagctcccccatgacctttgcctggaagaaagacaatgaagtcctgaccaatgcagacatggagaactttgtccacgtccacgcgcaggacggggaagtgatggagtacaccaccatcctgcacctccgtcaggtcactttcgggcacgagggccgctaccaatgtgtcatcaccaaccactttggctccacctattcacataaggccaggctcaccgtgaatgtgttgccatcattcaccaaaacgccccacgacataaccatccggaccaccaccatggcccgcctcgaatgtgctgccacaggtcacccaaaccctcagattgcctggcagaaggatggaggcacggatttccccgctgcccagaccccatccttggtggtccccttggaagaccgtgtggtatctgtgggagaaacagtggccctccaatgcaaagccacggggaaccctccgccccgcatcacctggttcaagggggaccgcccgctgagcctcactgagcggcaccacttgacccctgacaaccagctcctggtggttcagaacgtggtggcagaggatgcgggccgatatacctgtgagatgtccaacaccctgggcacggagcgagctcacagccagctgagcgtcctgcccgcagcaggctgcaggaaggatgggaccacggtaggcatcttcaccattgctgtcgtgagcagcatcgtcctgacgtcactggtctgggtgtgcatcatctaccagaccaggaagaagagtgaagagtacagtgtcaccaacacagatgaaaccgtcgtgccaccagatgttccaagctacctctcttctcaggggaccctttctgaccgacaagaaaccgtggtcaggaccgagggtggccctcaggccaatgggcacattgagagcaatggtgtgtgtccaagagatgcaagccactttccagagcccgacactcacagcgttgcctgcaggcagccaaagctctgtgctgggtctgcgtatcacaaagagccgtggaaagcgatggagaaagctgaagggacacctgggccacataagatggaacacggtggccgggtcgtatgcagtgactgcaacaccgaagtggactgttactccaggggacaagccttccacccccagcctgtgtccagagacagcgcacagccaagtgcgccaaatggcccggagccgggtgggagtgaccaagagcattctccacatcaccagtgcagcaggactgccgctgggtcctgccccgagtgccaagggtcgctctaccccagtaaccacgatagaatgctgacggctgtgaagaaaaagccaatggcatctctagatgggaaaggggattcttcctggactttagcaaggttgtatcacccggactccacagagctacagcctgcatcttcattaacttcaggcagtccagagcgcgcggaagcccagtacttgcttgtttccaatggccacctccccaaagcatgtgacgccagtcccgagtccacgccactgacaggacagctccccgggaaacagagggtgccactgctgttggcaccaaaaagctaggttttgtctacctcagttcttgtcataccaatctctacgggaaagagaggtaggagaggctgcgaggaagcttgggttcaagcgtcactcatctgtacatagttgtaactcccatgtggagtatcagtcgctcacaggacttggatctgaagcacagtaaacgcaagaggggatttgtgtacaaaaggcaaaaaaagtatttgatatcattgtacataagagttttcagagatttcatatatatcttttacagaggctattttaatctttagtgcatggttaacagaaaaaaattatacaattttgacaatattatttttcgtatcaggttgctgtttaattttggagggggtggggaaatagttctggtgccttaacgcatggctggaatttatagaggctacaaccacatttgttcacaggagtttttggtgcggggtgggaaggatggaaggccttggatttatattgcacttcatagacccctaggctgctgtgcggtgggactccacatgcgccggaaggagcttcaggtgagcactgctcatgtgtggatgcccctgcaacaggcttccctgtctgtagagccaggggtgcaagtgccatccacacttgcagtgaatggcttttccttttaggtttaagtcctgtctgtctgtaaggcgtagaatctgtccgtctgtaaggcgtagaatgagggttgttaatccatcacaagcaaaaggtcagaacagttaaacactgcctttcctcctcctcttattttatgataaaagcaaatgtggccttctcagtatcattcgattgctatttgagacttttaaattaaggtaaaggctgctggtgttggtacctgtggatttttctatactgatgttttcgttttgccaatataatgagtattacattggccttgggggacagaaaggaggaagttctgacttttcagggctaccttatttctactaaggacccagagcaggcctgtccatgccattccttcgcacagatgaaactgagctgggactggaaaggacagcccttgacctgggttctgggtataatttgcacttttgagactggtagctaaccatcttatgagtgccaatgtgtcatttagtaaaacttaaatagaaacaaggtccttcaaatgttcctttggccaaaagctgaagggagttactgagaaaatagttaacaattactgtcaggtgtcatcactgttcaaaaggtaagcacatttagaattttgttcttgacagttaactgactaatcttacttccacaaaatatgtgaatttgctgcttctgagaggcaatgtgaaagagggagtattacttttatgtacaaagttatttatttatagaaattttggtacagtgtacattgaaaaccatgtaaaatattgaagtgtctaacaaatggcattgaagtgtctttaataaaggttcatttataaatgtca

SEQ ID NO: 11633 - DNA, 4129 bp, Homo sapiens
  source 1..4129: mol_type = unassigned DNA
actatttgaccttcctgctgtgacaagaaaggtcaccgccagcatttcactcttcagtcagagctgccctctctgctggcagcattgattcctgctgcagcttctcacaggagacaagagttccttttctctccctggcctgtgtctgcaagggctcggggggaaaatttaagaaccaagaaccttgtggaaagttggagagggcaggatgggggcctggtctccaggtgtgatgtctcgcctgggcactgtgacctgctcctggaagctgggaagccattgagtcatcggccatgggatttgcattgttggaggggcctgggctgagttggcctcatccctctgatcctggcgagtgggtcacaagtctgactcagcacccagatgtcctccctggctcagagtcagcgccctgcaggccttgggaggagatgggctccgggctccagacccactggctgggatctggaccataacgagatttcgggcacaatagaggacacgagcggcgccttctcagggctcgacagcctcagcaagctgactctgtttggaaacaagatcaagtctgtggctaagagagcattctcggggctggaaggcctggagcacctgaaccttggagggaatgcgatcagatctgtccagtttgatgcctttgtgaagatgaagaatcttaaagagctccatatcagcagcgacagcttcctgtgtgactgccagctgaagtggctgcccccgtggctaattggcaggatgctgcaggcctttgtgacagccacctgtgcccacccagaatcactgaagggtcagagcattttctctgtgccaccagagagtttcgtgtgcgatgacttcctgaagccacagatcatcacccagccagaaaccaccatggctatggtgggcaaggacatccggtttacatgctcagcagccagcagcagcagctcccccatgacctttgcctggaagaaagacaatgaagtcctgaccaatgcagacatggagaactttgtccacgtccacgcgcaggacggggaagtgatggagtacaccaccatcctgcacctccgtcaggtcactttcgggcacgagggccgctaccaatgtgtcatcaccaaccactttggctccacctattcacataaggccaggctcaccgtgaatgtgttgccatcattcaccaaaacgccccacgacataaccatccggaccaccaccatggcccgcctcgaatgtgctgccacaggtcacccaaaccctcagattgcctggcagaaggatggaggcacggatttccccgctgcccgtgagcgacgcatgcatgtcatgccggatgacgacgtgtttttcatcactgatgtgaaaatagatgacgcaggggtttacagctgtactgctcagaactcagccggttctatttcagctaatgccaccctgactgtcctagagaccccatccttggtggtccccttggaagaccgtgtggtatctgtgggagaaacagtggccctccaatgcaaagccacggggaaccctccgccccgcatcacctggttcaagggggaccgcccgctgagcctcactgagcggcaccacttgacccctgacaaccagctcctggtggttcagaacgtggtggcagaggatgcgggccgatatacctgtgagatgtccaacaccctgggcacggagcgagctcacagccagctgagcgtcctgcccgcagcaggctgcaggaaggatgggaccacggtaggcatcttcaccattgctgtcgtgagcagcatcgtcctgacgtcactggtctgggtgtgcatcatctaccagaccaggaagaagagtgaagagtacagtgtcaccaacacagatgaaaccgtcgtgccaccagatgttccaagctacctctcttctcaggggaccctttctgaccgacaagaaaccgtggtcaggaccgagggtggccctcaggccaatgggcacattgagagcaatggtgtgtgtccaagagatgcaagccactttccagagcccgacactcacagcgttgcctgcaggcagccaaagctctgtgctgggtctgcgtatcacaaagagccgtggaaagcgatggagaaagctgaagggacacctgggccacataagatggaacacggtggccgggtcgtatgcagtgactgcaacaccgaagtggactgttactccaggggacaagccttccacccccagcctgtgtccagagacagcgcacagccaagtgcgccaaatggcccggagccgggtgggagtgaccaagagcattctccacatcaccagtgcagcaggactgccgctgggtcctgccccgagtgccaagggtcgctctaccccagtaaccacgatagaatgctgacggctgtgaagaaaaagccaatggcatctctagatgggaaaggggattcttcctggactttagcaaggttgtatcacccggactccacagagctacagcctgcatcttcattaacttcaggcagtccagagcgcgcggaagcccagtacttgcttgtttccaatggccacctccccaaagcatgtgacgccagtcccgagtccacgccactgacaggacagctccccgggaaacagagggtgccactgctgttggcaccaaaaagctaggttttgtctacctcagttcttgtcataccaatctctacgggaaagagaggtaggagaggctgcgaggaagcttgggttcaagcgtcactcatctgtacatagttgtaactcccatgtggagtatcagtcgctcacaggacttggatctgaagcacagtaaacgcaagaggggatttgtgtacaaaaggcaaaaaaagtatttgatatcattgtacataagagttttcagagatttcatatatatcttttacagaggctattttaatctttagtgcatggttaacagaaaaaaattatacaattttgacaatattatttttcgtatcaggttgctgtttaattttggagggggtggggaaatagttctggtgccttaacgcatggctggaatttatagaggctacaaccacatttgttcacaggagtttttggtgcggggtgggaaggatggaaggccttggatttatattgcacttcatagacccctaggctgctgtgcggtgggactccacatgcgccggaaggagcttcaggtgagcactgctcatgtgtggatgcccctgcaacaggcttccctgtctgtagagccaggggtgcaagtgccatccacacttgcagtgaatggcttttccttttaggtttaagtcctgtctgtctgtaaggcgtagaatctgtccgtctgtaaggcgtagaatgagggttgttaatccatcacaagcaaaaggtcagaacagttaaacactgcctttcctcctcctcttattttatgataaaagcaaatgtggccttctcagtatcattcgattgctatttgagacttttaaattaaggtaaaggctgctggtgttggtacctgtggatttttctatactgatgttttcgttttgccaatataatgagtattacattggccttgggggacagaaaggaggaagttctgacttttcagggctaccttatttctactaaggacccagagcaggcctgtccatgccattccttcgcacagatgaaactgagctgggactggaaaggacagcccttgacctgggttctgggtataatttgcacttttgagactggtagctaaccatcttatgagtgccaatgtgtcatttagtaaaacttaaatagaaacaaggtccttcaaatgttcctttggccaaaagctgaagggagttactgagaaaatagttaacaattactgtcaggtgtcatcactgttcaaaaggtaagcacatttagaattttgttcttgacagttaactgactaatcttacttccacaaaatatgtgaatttgctgcttctgagaggcaatgtgaaagagggagtattacttttatgtacaaagttatttatttatagaaattttggtacagtgtacattgaaaaccatgtaaaatattgaagtgtctaacaaatggcattgaagtgtctttaataaaggttcatttataaatgtc

SEQ ID NO: 11634 - DNA, 2336 bp, Homo sapiens
  source 1..2336: mol_type = unassigned DNA
attattactgtttactagcagctcggagggaagactggaggagggcaagacagagaggacggctgccgctcgattcccccagcccgtccccagtgacggggagctcagcagagtgcgagtgtcaagtaaatatttggaaagccctagtggagctcgatgatagaggagagcctgtggactctgtttggaaacaagatcaagtctgtggctaagagagcattctcggggctggaaggcctggagcacctgaaccttggagggaatgcgatcagatctgtccagtttgatgcctttgtgaagatgaagaatcttaaagagctccatatcagcagcgacagcttcctgtgtgactgccagctgaagtggctgcccccgtggctaattggcaggatgctgcaggcctttgtgacagccacctgtgcccacccagaatcactgaagggtcagagcattttctctgtgccaccagagagtttcgtgtgcgatgacttcctgaagccacagatcatcacccagccagaaaccaccatggctatggtgggcaaggacatccggtttacatgctcagcagccagcagcagcagctcccccatgacctttgcctggaagaaagacaatgaagtcctgaccaatgcagacatggagaactttgtccacgtccacgcgcaggacggggaagtgatggagtacaccaccatcctgcacctccgtcaggtcactttcgggcacgagggccgctaccaatgtgtcatcaccaaccactttggctccacctattcacataaggccaggctcaccgtgaatgtgttgccatcattcaccaaaacgccccacgacataaccatccggaccaccaccatggcccgcctcgaatgtgctgccacaggtcacccaaaccctcagattgcctggcagaaggatggaggcacggatttccccgctgcccgtgagcgacgcatgcatgtcatgccggatgacgacgtgtttttcatcactgatgtgaaaatagatgacgcaggggtttacagctgtactgctcagaactcagccggttctatttcagctaatgccaccctgactgtcctagagaccccatccttggtggtccccttggaagaccgtgtggtatctgtgggagaaacagtggccctccaatgcaaagccacggggaaccctccgccccgcatcacctggttcaagggggaccgcccgctgagcctcactgagcggcaccacttgacccctgacaaccagctcctggtggttcagaacgtggtggcagaggatgcgggccgatatacctgtgagatgtccaacaccctgggcacggagcgagctcacagccagctgagcgtcctgcccgcagcaggctgcaggaaggatgggaccacggtaggcatcttcaccattgctgtcgtgagcagcatcgtcctgacgtcactggtctgggtgtgcatcatctaccagaccaggaagaagagtgaagagtacagtgtcaccaacacagatgaaaccgtcgtgccaccagatgttccaagctacctctcttctcaggggaccctttctgaccgacaagaaaccgtggtcaggaccgagggtggccctcaggccaatgggcacattgagagcaatggtgtgtgtccaagagatgcaagccactttccagagcccgacactcacagcgttgcctgcaggcagccaaagctctgtgctgggtctgcgtatcacaaagagccgtggaaagcgatggagaaagctgaagggacacctgggccacataagatggaacacggtggccgggtcgtatgcagtgactgcaacaccgaagtggactgttactccaggggacaagccttccacccccagcctgtgtccagagacagcgcacagccaagtgcgccaaatggcccggagccgggtgggagtgaccaagagcattctccacatcaccagtgcagcaggactgccgctgggtcctgccccgagtgccaagggtcgctctaccccagtaaccacgatagaatgctgacggctgtgaagaaaaagccaatggcatctctagatgggaaaggggattcttcctggactttagcaaggttgtatcacccggactccacagagctacagcctgcatcttcattaacttcaggcagtccagagcgcgcggaagcccagtacttgcttgtttccaatggccacctccccaaagcatgtgacgccagtcccgagtccacgccactgacaggacagctccccgggaaacagagggtgccactgctgttggcaccaaaaagctaggttttgtctacctcagttcttgtcataccaatctctac

SEQ ID NO: 11635 - DNA, 580 bp, Homo sapiens
  source 1..580: mol_type = unassigned DNA
gaaacaacatcagcaaactgacagatggggccttctggggactgtccaagatgcatgtgctgcacctggagtacaacagcctggtagaagtgaacagcggctcgctctacggcctcacggccctgcatcagctccacctcagcaacaattccatcgctcgcattcaccgcaagggctggagcttctgccagaagctgcatgagttgtaagtgtcctcggctctgggctgtggcagtgtttttagacactgcttggaggtgaaagtgctaggcctggttcgttccaccacacagtggcctcggggagggctcagagacaggccagtagccctgttcccaaaccagccaggcccagggtggaaccctcagcgatttgagccccagtcccttcctcatctccccttcacttcctctgcatttggattagcaggggctccaggagtagcagctaggtccctgcagggagccttggcccccaaggtcctgttgggtttggagacagttccaggggtagaaagttcctggggaagggcagctatggcagagtgctcacaggagccattttgagagtgactgtgtgt

SEQ ID NO: 11636 - DNA, 598 bp, Homo sapiens
  source 1..598: mol_type = unassigned DNA
gagttggactggagctgtctggctgcacaggacagggcacatcctttatggcagcacaacaagattcgcagcgtggaggggagccagctgaaggcctacctttccttagaagtgttagatctgagtttgaacaacatcacggaagtgcggaacacctgctttccacacggaccgcctataaaggagctcaacctggcaggcaatcggattggcaccctggagttgggagcatttgatggtctgtcacggtcgctgctaactcttcgcctgagcaaaaacaggatcacccagcttcctgtaagagcattcaagctacccaggctgacacaactggacctcaatcggaacaggattcggctgatagagggcctcaccttccaggggctcaacagcttggaggtgctgaagcttcagcgaaacaacatcagcaaactgacagatggggccttctggggactgtccaagatgcatgtgctgcacctggagtacaacagcctggtagaagtgaacagcggctcgctctacggcctcacggccctgcatcagctccacctcagcaacaattccatcgctcgcattcaccgcaagggctggagct

SEQ ID NO: 11637 - DNA, 689 bp, Homo sapiens
  source 1..689: mol_type = unassigned DNA
agccggtgaagcgggaggggcgggatcacagcgagcgctccaatggccctcgaggctggccacggtggactccggcagccaatgagcagcaggcggggaggcgtggcggggcgctgttgcaaagcatccaacgtgggccagcaggcggccgcggagcgcggagcctaggggaaacctgagttacaacaaactctctgagattgaccctgctggttttgaggacttgccgaacctacaggaagtgtacctcaataataatgagttgacagcggtaccatccctgggcgctgcttcatcacatgtcgtctctctctttctgcagcacaacaagattcgcagcgtggaggggagccagctgaaggcctacctttccttagaagtgttagatctgagtttgaacaacatcacggaagtgcggaacacctgctttccacacggaccgcctataaaggagctcaacctggcaggcaatcggattggcaccctggagttgggagcatttgatggtctgtcacggtcgctgctaactcttcgcctgagcaaaaacaggatcacccagcttcctgtaagagcattcaagctacccaggctgacacaactggacctcaatcggaacaggattcggctgatagagggcctcaccttccaggggctcaacagcttggaggtgctgaagcttcagcgaaaca

SEQ ID NO: 11638 - DNA, 504 bp, Homo sapiens
  source 1..504: mol_type = unassigned DNA
acatttgatgatcgagaaataccaaagtgggtattttgagcatcagtagactttagtatactgattatggtgttgactgattcgattttaagatatgagcagcatgatttctgaaacctgagttacaacaaactctctgagattgaccctgctggttttgaggacttgccgaacctacaggaagtgtacctcaataataatgagttgacagcggtaccatccctgggcgctgcttcatcacatgtcgtctctctctttctgcagcacaacaagattcgcagcgtggaggggagccagctgaaggcctacctttccttagaagtgttagatctgagtttgaacaacatcacggaagtgcggaacacctgctttccacacggaccgcctataaaggagctcaacctggcaggcaatcggattggcaccctggagttgggagcatttgatggtctgtcacggtcgctgctaactcttcgcctgagcaaaaacaggatcacccagctt

SEQ ID NO: 11639 - DNA, 409 bp, Homo sapiens
  source 1..409: mol_type = unassigned DNA
ctgagtgatttttttcatttgattatttgcagaatatgttcttttgccatagggaatatgtggctgcttagcttactgaagagaggtagcagcaagtacagaaccttctcctgagtggagatccttggataggatactagaggaatgattccagttcaagatacaattttgtcatcttaatataagcctttaatgtgcattatccgcttgttcagttgtggtttttggttaacaaggggaagcatcacaatacaaaaaaagaaacctgagttacaacaaactctctgagattgaccctgctggttttgaggacttgccgaacctacaggaagtgtacctcaataataatgagttgacagcggtaccatccctgggcgctgcttcatcacatgtcgtctctctctttctg

SEQ ID NO: 11640 - DNA, 5273 bp, Homo sapiens; identical to SEQ ID NO: 11631
  source 1..5273: mol_type = unassigned DNA

SEQ ID NO: 11641 - DNA, 5283 bp, Homo sapiens; identical to SEQ ID NO: 11632
  source 1..5283: mol_type = unassigned DNA

SEQ ID NO: 11642 - DNA, 4129 bp, Homo sapiens; identical to SEQ ID NO: 11633
  source 1..4129: mol_type = unassigned DNA

SEQ ID NO: 11643 - DNA, 2336 bp, Homo sapiens; identical to SEQ ID NO: 11634
  source 1..2336: mol_type = unassigned DNA

SEQ ID NO: 11644 - DNA, 580 bp, Homo sapiens; identical to SEQ ID NO: 11635
  source 1..580: mol_type = unassigned DNA

SEQ ID NO: 11645 - DNA, 598 bp, Homo sapiens; identical to SEQ ID NO: 11636
  source 1..598: mol_type = unassigned DNA

SEQ ID NO: 11646 - DNA, 689 bp, Homo sapiens; identical to SEQ ID NO: 11637
  source 1..689: mol_type = unassigned DNA

SEQ ID NO: 11647 - DNA, 504 bp, Homo sapiens; identical to SEQ ID NO: 11638
  source 1..504: mol_type = unassigned DNA

SEQ ID NO: 11648 - DNA, 409 bp, Homo sapiens; identical to SEQ ID NO: 11639
  source 1..409: mol_type = unassigned DNA

SEQ ID NO: 11649 - DNA, 1693 bp, Homo sapiens
  source 1..1693: mol_type = unassigned DNA
ggggaacagcggtgcgagctccaggcccatgcactgaggaggcggaaacaaggggagcccccagagctccatcaagccccctccaaaggctcccctacccggtccacgccccccaccccccctccccgcctcctcccaattgtgcatttttgcagccggaggcggctccgagatggggctgtgagcttcgcccggggagggggaaagagcagcgaggagtgaagcgggggggtggggtgaagggtttggatttcggggcagggggcgcacccccgtcagcaggccctccccaaggggctcggaactctacctcttcacccacgcccctggtgcgctttgccgaaggaaagaataagaacagagaaggaggagggggaaaggaggaaaagggggaccccccaactggggggggtgaaggagagaagtagcaggaccagaggggaaggggctgctgcttgcatcagcccacaccatgctgaccccgccgttgctcctgctgctgcccctgctctcagctctggtcgcggcggctatcgacgcccctaagacttgcagccccaagcagtttgcctgcagagatcaaataacctgtatctcaaagggctggcggtgcgacggtgagagggactgcccagacggatctgacgaggcccctgagatttgtccacagagtaaggcccagcgatgccagccaaacgagcataactgcctgggtactgagctgtgtgttcccatgtcccgcctctgcaatggggtccaggactgcatggacggctcagatgaggggccccactgccgagagctccaaggcaactgctctcgcctgggctgccagcaccattgtgtccccacactcgatgggcccacctgctactgcaacagcagctttcagcttcaggcagatggcaagacctgcaaagattttgatgagtgctcagtgtacggcacctgcagccagctatgcaccaacacagacggctccttcatatgtggctgtgttgaaggatacctcctgcagccggataaccgctcctgcaaggccaagaacgagccagtagaccggccccctgtgctgttgatagccaactcccagaacatcttggccacgtacctgagtggggcccaggtgtctaccatcacacctacgagcacgcggcagaccacagccatggacttcagctatgccaacgagaccgtatgctgggtgcatgttggggacagtgctgctcagacgcagctcaagtgtgcccgcatgcctggcctaaagggcttcgtggatgagcacaccatcaacatctccctcagtctgcaccgcaggagcaggaagagagcccaggagaacgaggtgacacaacacggctaagctccagactggctggtggaaggaagagctgaagtcgggacccagcaggaaacaaggagcatgaggccacatcgtttagcagagcttctgccaggctcgccaggaggtctccttcccaccttcgaagtcctcagactctccgccatctctcccaggcccaggcgagatccctgagtaggattactagacagactgtcctctcccactgtcttggagtgtcccaaggccagagaggcaggatcctggcagtagaagagagggggaaaatgatgtcccagctctagaacaacagactcagtcttcaataaatatttgttcaatggatcaata

SEQ ID NO: 11650 - DNA, 14897 bp, Homo sapiens
  source 1..14897: mol_type = unassigned DNA
cagcggtgcgagctccaggcccatgcactgaggaggcggaaacaaggggagcccccagagctccatcaagccccctccaaaggctcccctacccggtccacgccccccaccccccctccccgcctcctcccaattgtgcatttttgcagccggaggcggctccgagatggggctgtgagcttcgcccggggagggggaaagagcagcgaggagtgaagcgggggggtggggtgaagggtttggatttcggggcagggggcgcacccccgtcagcaggccctccccaaggggctcggaactctacctcttcacccacgcccctggtgcgctttgccgaaggaaagaataagaacagagaaggaggagggggaaaggaggaaaagggggaccccccaactggggggggtgaaggagagaagtagcaggaccagaggggaaggggctgctgcttgcatcagcccacaccatgctgaccccgccgttgctcctgctgctgcccctgctctcagctctggtcgcggcggctatcgacgcccctaagacttgcagccccaagcagtttgcctgcagagatcaaataacctgtatctcaaagggctggcggtgcgacggtgagagggactgcccagacggatctgacgaggcccctgagatttgtccacagagtaaggcccagcgatgccagccaaacgagcataactgcctgggtactgagctgtgtgttcccatgtcccgcctctgcaatggggtccaggactgcatggacggctcagatgaggggccccactgccgagagctccaaggcaactgctctcgcctgggctgccagcaccattgtgtccccacactcgatgggcccacctgctactgcaacagcagctttcagcttcaggcagatggcaagacctgcaaagattttgatgagtgctcagtgtacggcacctgcagccagctatgcaccaacacagacggctccttcatatgtggctgtgttgaaggatacctcctgcagccggataaccgctcctgcaaggccaagaacgagccagtagaccggccccctgtgctgttgatagccaactcccagaacatcttggccacgtacctgagtggggcccaggtgtctaccatcacacctacgagcacgcggcagaccacagccatggacttcagctatgccaacgagaccgtatgctgggtgcatgttggggacagtgctgctcagacgcagctcaagtgtgcccgcatgcctggcctaaagggcttcgtggatgagcacaccatcaacatctccctcagtctgcaccacgtggaacagatggccatcgactggctgacaggcaacttctactttgtggatgacatcgatgataggatctttgtctgcaacagaaatggggacacatgtgtcacattgctagacctggaactctacaaccccaagggcattgccctggaccctgccatggggaaggtgtttttcactgactatgggcagatcccaaaggtggaacgctgtgacatggatgggcagaaccgcaccaagctcgtcgacagcaagattgtgtttcctcatggcatcacgctggacctggtcagccgccttgtctactgggcagatgcctatctggactatattgaagtggtggactatgagggcaagggccgccagaccatcatccagggcatcctgattgagcacctgtacggcctgactgtgtttgagaattatctctatgccaccaactcggacaatgccaatgcccagcagaagacgagtgtgatccgtgtgaaccgctttaacagcaccgagtaccaggttgtcacccgggtggacaagggtggtgccctccacatctaccaccagaggcgtcagccccgagtgaggagccatgcctgtgaaaacgaccagtatgggaagccgggtggctgctctgacatctgcctgctggccaacagccacaaggcgcggacctgccgctgccgttccggcttcagcctgggcagtgacgggaagtcatgcaagaagccggagcatgagctgttcctcgtgtatggcaagggccggccaggcatcatccggggcatggatatgggggccaaggtcccggatgagcacatgatccccattgaaaacctcatgaacccccgagccctggacttccacgctgagaccggcttcatctactttgccgacaccaccagctacctcattggccgccagaagattgatggcactgagcgggagaccatcctgaaggacggcatccacaatgtggagggtgtggccgtggactggatgggagacaatctgtactggacggacgatgggcccaaaaagacaatcagcgtggccaggctggagaaagctgctcagacccgcaagactttaatcgagggcaaaatgacacaccccagggctattgtggtggatccactcaatgggtggatgtactggacagactgggaggaggaccccaaggacagtcggcgtgggcggctggagagggcgtggatggatggctcacaccgagacatctttgtcacctccaagacagtgctttggcccaatgggctaagcctggacatcccggctgggcgcctctactgggtggatgccttctacgaccgcatcgagacgatactgctcaatggcacagaccggaagattgtgtatgaaggtcctgagctgaaccacgcctttggcctgtgtcaccatggcaactacctcttctggactgagtatcggagtggcagtgtctaccgcttggaacggggtgtaggaggcgcaccccccactgtgacccttctgcgcagtgagcggccccccatctttgagatccgaatgtatgatgcccagcagcagcaagttggcaccaacaaatgccgggtgaacaatggcggctgcagcagcctgtgcttggccacccctgggagccgccagtgcgcctgtgctgaggaccaggtgttggacgcagacggcgtcacttgcttggcgaacccatcctacgtgcctccaccccagtgccagccaggcgagtttgcctgtgccaacagccgctgcatccaggagcgctggaagtgtgacggagacaacgattgcctggacaacagtgatgaggccccagccctctgccatcagcacacctgcccctcggaccgattcaagtgcgagaacaaccggtgcatccccaaccgctggctctgcgacggggacaatgactgtgggaacagtgaagatgagtccaatgccacttgttcagcccgcacctgcccccccaaccagttctcctgtgccagtggccgctgcatccccatctcctggacgtgtgatctggatgacgactgtggggaccgctctgatgagtctgcttcgtgtgcctatcccacctgcttccccctgactcagtttacctgcaacaatggcagatgtatcaacatcaactggagatgcgacaatgacaatgactgtggggacaacagtgacgaagccggctgcagccactcctgttctagcacccagttcaagtgcaacagcgggcgttgcatccccgagcactggacctgcgatggggacaatgactgcggagactacagtgatgagacacacgccaactgcaccaaccaggccacgaggccccctggtggctgccacactgatgagttccagtgccggctggatggactatgcatccccctgcggtggcgctgcgatggggacactgactgcatggactccagcgatgagaagagctgtgagggagtgacccacgtctgcgatcccagtgtcaagtttggctgcaaggactcagctcggtgcatcagcaaagcgtgggtgtgtgatggcgacaatgactgtgaggataactcggacgaggagaactgcgagtccctggcctgcaggccaccctcgcacccttgtgccaacaacacctcagtctgcctgccccctgacaagctgtgtgatggcaacgacgactgtggcgacggctcagatgagggcgagctctgcgaccagtgctctctgaataacggtggctgcagccacaactgctcagtggcacctggcgaaggcattgtgtgttcctgccctctgggcatggagctggggcccgacaaccacacctgccagatccagagctactgtgccaagcatctcaaatgcagccaaaagtgcgaccagaacaagttcagcgtgaagtgctcctgctacgagggctgggtcctggaacctgacggcgagagctgccgcagcctggaccccttcaagccgttcatcattttctccaaccgccatgaaatccggcgcatcgatcttcacaaaggagactacagcgtcctggtgcccggcctgcgcaacaccatcgccctggacttccacctcagccagagcgccctctactggaccgacgtggtggaggacaagatctaccgcgggaagctgctggacaacggagccctgactagtttcgaggtggtgattcagtatggcctggccacacccgagggcctggctgtagactggattgcaggcaacatctactgggtggagagtaacctggatcagatcgaggtggccaagctggatgggaccctccggaccaccctgctggccggtgacattgagcacccaagggcaatcgcactggatccccgggatgggatcctgttttggacagactgggatgccagcctgccccgcattgaggcagcctccatgagtggggctgggcgccgcaccgtgcaccgggagaccggctctgggggctggcccaacgggctcaccgtggactacctggagaagcgcatcctttggattgacgccaggtcagatgccatttactcagcccgttacgacggctctggccacatggaggtgcttcggggacacgagttcctgtcgcacccgtttgcagtgacgctgtacgggggggaggtctactggactgactggcgaacaaacacactggctaaggccaacaagtggaccggccacaatgtcaccgtggtacagaggaccaacacccagccctttgacctgcaggtgtaccacccctcccgccagcccatggctcccaatccctgtgaggccaatgggggccagggcccctgctcccacctgtgtctcatcaactacaaccggaccgtgtcctgcgcctgcccccacctcatgaagctccacaaggacaacaccacctgctatgagtttaagaagttcctgctgtacgcacgtcagatggagatccgaggtgtggacctggatgctccctactacaactacatcatctccttcacggtgcccgacatcgacaacgtcacagtgctagactacgatgcccgcgagcagcgtgtgtactggtctgacgtgcggacacaggccatcaagcgggccttcatcaacggcacaggcgtggagacagtcgtctctgcagacttgccaaatgcccacgggctggctgtggactgggtctcccgaaacctgttctggacaagctatgacaccaataagaagcagatcaatgtggcccggctggatggctccttcaagaacgcagtggtgcagggcctggagcagccccatggccttgtcgtccaccctctgcgtgggaagctctactggaccgatggtgacaacatcagcatggccaacatggatggcagcaatcgcaccctgctcttcagtggccagaagggccccgtgggcctggctattgacttccctgaaagcaaactctactggatcagctccgggaaccataccatcaaccgctgcaacctggatgggagtgggctggaggtcatcgatgccatgcggagccagctgggcaaggccaccgccctggccatcatgggggacaagctgtggtgggctgatcaggtgtcggaaaagatgggcacatgcagcaaggctgacggctcgggctccgtggtccttcggaacagcaccaccctggtgatgcacatgaaggtctatgacgagagcatccagctggaccataagggcaccaacccctgcagtgtcaacaacggtgactgctcccagctctgcctgcccacgtcagagacgacccgctcctgcatgtgcacagccggctatagcctccggagtggccagcaggcctgcgagggcgtaggttcctttctcctgtactctgtgcatgagggaatcaggggaattcccctggatcccaatgacaagtcagatgccctggtcccagtgtccgggacctcgctggctgtcggcatcgacttccacgctgaaaatgacaccatctactgggtggacatgggcctgagcacgatcagccgggccaagcgggaccagacgtggcgtgaagacgtggtgaccaatggcattggccgtgtggagggcattgcagtggactggatcgcaggcaacatctactggacagaccagggctttgatgtcatcgaggtcgcccggctcaatggctccttccgctacgtggtgatctcccagggtctagacaagccccgggccatcaccgtccacccggagaaagggtacttgttctggactgagtggggtcagtatccgcgtattgagcggtctcggctagatggcacggagcgtgtggtgctggtcaacgtcagcatcagctggcccaacggcatctcagtggactaccaggatgggaagctgtactggtgcgatgcacggacagacaagattgaacggatcgacctggagacaggtgagaaccgcgaggtggttctgtccagcaacaacatggacatgttttcagtgtctgtgtttgaggatttcatctactggagtgacaggactcatgccaacggctctatcaagcgcgggagcaaagacaatgccacagactccgtgcccctgcgaaccggcatcggcgtccagcttaaagacatcaaagtcttcaaccgggaccggcagaaaggcaccaacgtgtgcgcggtggccaatggcgggtgccagcagctgtgcctgtaccggggccgtgggcagcgggcctgcgcctgtgcccacgggatgctggctgaagacggagcatcgtgccgcgagtatgccggctacctgctctactcagagcgcaccattctcaagagtatccacctgtcggatgagcgcaacctcaatgcgcccgtgcagcccttcgaggaccctgagcacatgaagaacgtcatcgccctggcctttgactaccgggcaggcacctctccgggcacccccaatcgcatcttcttcagcgacatccactttgggaacatccaacagatcaacgacgatggctccaggaggatcaccattgtggaaaacgtgggctccgtggaaggcctggcctatcaccgtggctgggacactctctattggacaagctacacgacatccaccatcacgcgccacacagtggaccagacccgcccaggggccttcgagcgtgagaccgtcatcactatgtctggagatgaccacccacgggccttcgttttggacgagtgccagaacctcatgttctggaccaactggaatgagcagcatcccagcatcatgcgggcggcgctctcgggagccaatgtcctgacccttatcgagaaggacatccgtacccccaatggcctggccatcgaccaccgtgccgagaagctctacttctctgacgccaccctggacaagatcgagcggtgcgagtatgacggctcccaccgctatgtgatcctaaagtcagagcctgtccaccccttcgggctggccgtgtatggggagcacattttctggactgactgggtgcggcgggcagtgcagcgggccaacaagcacgtgggcagcaacatgaagctgctgcgcgtggacatcccccagcagcccatgggcatcatcgccgtggccaacgacaccaacagctgtgaactctctccatgccgaatcaacaacggtggctgccaggacctgtgtctgctcactcaccagggccatgtcaactgctcatgccgagggggccgaatcctccaggatgacctcacctgccgagcggtgaattcctcttgccgagcacaagatgagtttgagtgtgccaatggcgagtgcatcaacttcagcctgacctgcgacggcgtcccccactgcaaggacaagtccgatgagaagccatcctactgcaactcccgccgctgcaagaagactttccggcagtgcagcaatgggcgctgtgtgtccaacatgctgtggtgcaacggggccgacgactgtggggatggctctgacgagatcccttgcaacaagacagcctgtggtgtgggcgagttccgctgccgggacgggacctgcatcgggaactccagccgctgcaaccagtttgtggattgtgaggacgcctcagatgagatgaactgcagtgccaccgactgcagcagctacttccgcctgggcgtgaagggcgtgctcttccagccctgcgagcggacctcactctgctacgcacccagctgggtgtgtgatggcgccaatgactgtggggactacagtgatgagcgcgactgcccaggtgtgaaacgccccagatgccctctgaattacttcgcctgccctagtgggcgctgcatccccatgagctggacgtgtgacaaagaggatgactgtgaacatggcgaggacgagacccactgcaacaagttctgctcagaggcccagtttgagtgccagaaccatcgctgcatctccaagcagtggctgtgtgacggcagcgatgactgtggggatggctcagacgaggctgctcactgtgaaggcaagacgtgcggcccctcctccttctcctgccctggcacccacgtgtgcgtccccgagcgctggctctgtgacggtgacaaagactgtgctgatggtgcagacgagagcatcgcagctggttgcttgtacaacagcacttgtgacgaccgtgagttcatgtgccagaaccgccagtgcatccccaagcacttcgtgtgtgaccacgaccgtgactgtgcagatggctctgatgagtcccccgagtgtgagtacccgacctgcggccccagtgagttccgctgtgccaatgggcgctgtctgagctcccgccagtgggagtgtgatggcgagaatgactgccacgaccagagtgacgaggctcccaagaacccacactgcaccagccaagagcacaagtgcaatgcctcgtcacagttcctgtgcagcagtgggcgctgtgtggctgaggcactgctctgcaacggccaggatgactgtggcgacagctcggacgagcgtggctgccacatcaatgagtgtctcagccgcaagctcagtggctgcagccaggactgtgaggacctcaagatcggcttcaagtgccgctgtcgccctggcttccggctgaaggacgacggccggacgtgtgctgatgtggacgagtgcagcaccaccttcccctgcagccagcgctgcatcaacactcatggcagctataagtgtctgtgtgtggagggctatgcaccccgcggcggcgacccccacagctgcaaggctgtgactgacgaggaaccgtttctgatcttcgccaaccggtactacctgcgcaagctcaacctggacgggtccaactacacgttacttaagcagggcctgaacaacgccgttgccttggattttgactaccgagagcagatgatctactggacagatgtgaccacccagggcagcatgatccgaaggatgcaccttaacgggagcaatgtgcaggtcctacaccgtacaggcctcagcaaccccgatgggctggctgtggactgggtgggtggcaacctgtactggtgcgacaaaggccgggacaccatcgaggtgtccaagctcaatggggcctatcggacggtgctggtcagctctggcctccgtgagcccagggctctggtggtggatgtgcagaatgggtacctgtactggacagactggggtgaccattcactgatcggccgcatcggcatggatgggtccagccgcagcgtcatcgtggacaccaagatcacatggcccaatggcctgacgctggactatgtcactgagcgcatctactgggccgacgcccgcgaggactacattgaatttgccagcctggatggctccaatcgccacgttgtgctgagccaggacatcccgcacatctttgcactgaccctgtttgaggactacgtctactggaccgactgggaaacaaagtccattaaccgagcccacaagaccacgggcaccaacaaaacgctcctcatcagcacgctgcaccggcccatggacctgcatgtcttccatgccctgcgccagccagacgtgcccaatcacccctgcaaggtcaacaatggtggctgcagcaacctgtgcctgctgtcccccgggggagggcacaaatgtgcctgccccaccaacttctacctgggcagcgatgggcgcacctgtgtgtccaactgcacggctagccagtttgtatgcaagaacgacaagtgcatccccttctggtggaagtgtgacaccgaggacgactgcggggaccactcagacgagcccccggactgccctgagttcaagtgccggcccggacagttccagtgctccacaggtatctgcacaaaccctgccttcatctgcgatggcgacaatgactgccaggacaacagtgacgaggccaactgtgacatccacgtctgcttgcccagtcagttcaaatgcaccaacaccaaccgctgtattcccggcatcttccgctgcaatgggcaggacaactgcggagatggggaggatgagagggactgccccgaggtgacctgcgcccccaaccagttccagtgctccattaccaaacggtgcatcccccgggtctgggtctgcgaccgggacaatgactgtgtggatggcagtgatgagcccgccaactgcacccagatgacctgtggtgtggacgagttccgctgcaaggattcgggccgctgcatcccagcgcgttggaagtgtgacggagaggatgactgtggggatggctcggatgagcccaaggaagagtgtgatgaacgcacctgtgagccataccagttccgctgcaagaacaaccgctgcgtgcccggccgctggcagtgcgactacgacaacgattgcggtgacaactccgatgaagagagctgcacccctcggccctgctccgagagtgagttctcctgtgccaacggccgctgcatcgcggggcgctggaaatgcgatggagaccacgactgcgcggacggctcggacgagaaagactgcaccccccgctgtgacatggaccagttccagtgcaagagcggccactgcatccccctgcgctggcgctgtgacgcagacgccgactgcatggacggcagcgacgaggaggcctgcggcactggcgtgcggacctgccccctggacgagttccagtgcaacaacaccttgtgcaagccgctggcctggaagtgcgatggcgaggatgactgtggggacaactcagatgagaaccccgaggagtgtgcccggttcgtgtgccctcccaaccggcccttccgttgcaagaatgaccgcgtctgtctgtggatcgggcgccaatgcgatggcacggacaactgtggggatgggactgatgaagaggactgtgagccccccacagcccacaccacccactgcaaagacaagaaggagtttctgtgccggaaccagcgctgcctctcctcctccctgcgctgcaacatgttcgatgactgcggggacggctctgacgaggaggactgcagcatcgaccccaagctgaccagctgcgccaccaatgccagcatctgtggggacgaggcacgctgcgtgcgcaccgagaaagcggcctactgtgcctgccgctcgggcttccacaccgtgcccggccagcccggatgccaagacatcaacgagtgcctgcgcttcggcacctgctcccagctctgcaacaacaccaagggcggccacctctgcagctgcgctcggaacttcatgaagacgcacaacacctgcaaggccgaaggctctgagtaccaggtcctgtacatcgctgatgacaatgagatccgcagcctgttccccggccacccccattcggcttacgagcaggcattccagggtgacgagagtgtccgcattgatgctatggatgtccatgtcaaggctggccgtgtctattggaccaactggcacacgggcaccatctcctaccgcagcctgccacctgctgcgcctcctaccacttccaaccgccaccggcgacagattgaccggggtgtcacccacctcaacatttcagggctgaagatgcccagaggcatcgccatcgactgggtggccggaaacgtgtactggaccgactcgggccgagatgtgattgaggtggcgcagatgaagggcgagaaccgcaagacgctcatctcgggcatgattgacgagccccacgccattgtggtggacccactgagggggaccatgtactggtcagactggggcaaccaccccaagattgagacggcagcgatggatgggacgcttcgggagacactggtgcaggacaacattcagtggcccacaggcctggccgtggattatcacaatgagcggctgtactgggcagacgccaagctttcagtcatcggcagcatccggctcaatggcacggaccccattgtggctgctgacagcaaacgaggcctaagtcaccccttcagcatcgacgtctttgaggattacatctatggtgtcacctacatcaataatcgtgtcttcaagatccataagtttggccacagccccttggtcaacctgacagggggcctgagccacgcctctgacgtggtcctttaccatcagcacaagcagcccgaagtgaccaacccatgtgaccgcaagaaatgcgagtggctctgcctgctgagccccagtgggcctgtctgcacctgtcccaatgggaagcggctggacaacggcacatgcgtgcctgtgccctctccaacgccccccccagatgctccccggcctggaacctgtaacctgcagtgcttcaacggtggcagctgtttcctcaatgcacggaggcagcccaagtgccgctgccaaccccgctacacgggtgacaagtgtgaactggaccagtgctgggagcactgtcgcaatgggggcacctgtgctgcctccccctctggcatgcccacgtgccggtgccccacgggcttcacgggccccaaatgcacccagcaggtgtgtgcgggctactgtgccaacaacagcacctgcactgtcaaccagggcaaccagccccagtgccgatgcctacccggcttcctgggcgaccgctgccagtaccggcagtgctctggctactgtgagaactttggcacatgccagatggctgctgatggctcccgacaatgccgctgcactgcctactttgagggatcgaggtgtgaggtgaacaagtgcagccgctgtctcgaaggggcctgtgtggtcaacaagcagagtggggatgtcacctgcaactgcacggatggccgggtggcccccagctgtctgacctgcgtcggccactgcagcaatggcggctcctgtaccatgaacagcaaaatgatgcctgagtgccagtgcccaccccacatgacagggccccggtgtgaggagcacgtcttcagccagcagcagccaggacatatagcctccatcctaatccctctgctgttgctgctgctgctggttctggtggccggagtggtattctggtataagcggcgagtccaaggggctaagggcttccagcaccaacggatgaccaacggggccatgaacgtggagattggaaaccccacctacaagatgtacgaaggcggagagcctgatgatgtgggaggcctactggacgctgactttgccctggaccctgacaagcccaccaacttcaccaaccccgtgtatgccacactctacatggggggccatggcagtcgccactccctggccagcacggacgagaagcgagaactcctgggccggggccctgaggacgagataggggaccccttggcatagggccctgccccgtcggactgcccccagaaagcctcctgccccctgccagtgaagtccttcagtgagcccctccccagccagcccttccctggccccgccggatgtataaatgtaaaaatgaaggaattacattttatatgtgagcgagcaagccggcaagcgagcacagtattatttctccatcccctccctgcctgctccttggcacccccatgctgccttcagggagacaggcagggagggcttggggctgcacctcctaccctcccaccagaacgcaccccactgggagagctggtggtgcagccttcccctccctgtataagacactttgccaaggctctcccctctcgccccatccctgcttgcccgctcccacagcttcctgagggctaattctgggaagggagagttctttgctgcccctgtctggaagacgtggctctgggtgaggtaggcgggaaaggatggagtgttttagttcttgggggaggccaccccaaaccccagccccaactccaggggcacctatgagatggccatgctcaacccccctcccagacaggccctccctgtctccagggcccccaccgaggttcccagggctggagacttcctctggtaaacattcctccagcctcccctcccctggggacgccaaggaggtgggccacacccaggaagggaaagcgggcagccccgttttggggacgtgaacgttttaataatttttgctgaattcctttacaactaaataacacagatattgttataaataaaattgtaaaaaaaaaaa

SEQ ID NO: 11651 - DNA, 2169 bp, Homo sapiens
  source 1..2169: mol_type = unassigned DNA
gcgggggggtggggtgaagggtttggatttcggggcagggggcgcacccccgtcagcaggccctccccaaggggctcggaactctacctcttcacccacgcccctggtgcgctttgccgaaggaaagaataagaacagagaaggaggagggggaaaggaggaaaagggggaccccccaactggggggggtgaaggagagaagtagcaggaccagaggggaaggggctgctgcttgcatcagcccacaccatgctgaccccgccgttgctcctgctgctgcccctgctctcagctctggtcgcggcggctatcgacgcccctaagacttgcagccccaagcagtttgcctgcagagatcaaataacctgtatctcaaagggctggcggtgcgacggtgagagggactgcccagacggatctgacgaggcccctgagatttgtccacagagtaaggcccagcgatgccagccaaacgagcataactgcctgggtactgagctgtgtgttcccatgtcccgcctctgcaatggggtccaggactgcatggacggctcagatgaggggccccactgccgagagctccaaggcaactgctctcgcctgggctgccagcaccattgtgtccccacactcgatgggcccacctgctactgcaacagcagctttcagcttcaggcagatggcaagacctgcaaagattttgatgagtgctcagtgtacggcacctgcagccagctatgcaccaacacagacggctccttcatatgtggctgtgttgaaggatacctcctgcagccggataaccgctcctgcaaggccaagaacgagccagtagaccggccccctgtgctgttgatagccaactcccagaacatcttggccacgtacctgagtggggcccaggtgtctaccatcacacctacgagcacgcggcagaccacagccatggacttcagctatgccaacgagaccgtatgctgggtgcatgttggggacagtgctgctcagacgcagctcaagtgtgcccgcatgcctggcctaaagggcttcgtggatgagcacaccatcaacatctccctcagtctgcacctgtgtgtgttttcgaaatcacaacaggaaatggggtagtgatttgtctagaggggaggcaaagaaggggcagacagcagtccctctgagtctaatgaactggctgctgctgctggaaggggtgctacctccccactgtgctgggcacccctggaccctctcagcctcccaccctgcctacaaagcacttccagacttcacatgtgaaagctaaccatgcccatccttggcctttctgacccatgggatgccaggctgtttggggaggggtggctctagccaccccactctttggccttaggccccctgcatcctggcacttttgcttcccattcctgttctgagtttcctaatcatttaacagctcactcttgctcctcctctctcctggcccgggccagccctgtgtctcccggcccagatccagccctgtcctctcctcccccgctgtctccttgaaattgcctctccacccagactgctcccagcactccccttgctgttttcaagccaaaggaagtaacttaagcaagagagatgtgttttagagcccggcaaggatttctcaatagagggaagaccctaagatgggctgagtggaatccaggcatcatccctgggatctaggtcgaaatgcctcttggggacctaagccaggcaggggaaggtagcaggacataaccacaggctggaatcacaggcaggagcaggaagagagcccaggagaacgaggtgacacaacacggctaagctccagactggctggtggaaggaagagctgaagtcgggacccagcaggaaacaaggagcatgaggccacatcgtttagcagagcttctgccaggctcgccaggaggtctccttcccaccttcgaagtcctcagactctccgccatctctcccaggcccaggcgagatccctgagtaggattactagacagactgtcctctcccactgtcttggagtgtcccaaggccagagaggcaggatcctggcagtagaagagagggggaaaatgatgtcccagctctagaacaacagactcagtcttcaataaatatttgttcaatggatcaata

SEQ ID NO: 11652 - DNA, 2175 bp, Homo sapiens
  source 1..2175: mol_type = unassigned DNA
ggagagaagtagcaggaccagaggggaaggggctgctgcttgcatcagcccacaccatgctgaccccgccgttgctcctgctgctgcccctgctctcagctctggtcgcggcggctatcgacgcccctaagacttgcagccccaagcagtttgcctgcagagatcaaataacctgtatctcaaagggctggcggtgcgacggtgagagggactgcccagacggatctgacgaggcccctgagatttgtccacagagtaaggcccagcgatgccagccaaacgagcataactgcctgggtactgagctgtgtgttcccatgtcccgcctctgcaatggggtccaggactgcatggacggctcagatgaggggccccactgccgagagctccaaggcaactgctctcgcctgggctgccagcaccattgtgtccccacactcgatgggcccacctgctactgcaacagcagctttcagcttcaggcagatggcaagacctgcaaagattttgatgagtgctcagtgtacggcacctgcagccagctatgcaccaacacagacggctccttcatatgtggctgtgttgaaggatacctcctgcagccggataaccgctcctgcaaggccaagaacgagccagtagaccggccccctgtgctgttgatagccaactcccagaacatcttggccacgtacctgagtggggcccaggtgtctaccatcacacctacgagcacgcggcagaccacagccatggacttcagctatgccaacgagaccgtatgctgggtgcatgttggggacagtgctgctcagacgcagctcaagtgtgcccgcatgcctggcctaaagggcttcgtggatgagcacaccatcaacatctccctcagtctgcaccacgtggaacagatggccatcgactggctgacaggcaacttctactttgtggatgacatcgatgataggatctttgtctgcaacagaaatggggacacatgtgtcacattgctagacctggaactctacaaccccaagggcattgccctggaccctgccatggggaaggtgtttttcactgactatgggcagatcccaaaggtggaacgctgtgacatggatgggcagaaccgcaccaagctcgtcgacagcaagattgtgtttcctcatggcatcacgctggacctggtcagccgccttgtctactgggcagatgcctatctggactatattgaagtggtggactatgagggcaagggccgccagaccatcatccagggcatcctggtgagggagctactgtctgaggttttgtgggggaaccatgatccagggccttctggtgaggggggaagcctctgtaggggaaccgttctctgagtctcctggtaaagagcgtggatgccccaggcctctagtgggagtggggtgggcttgaatactgcagagaaaggacaagatacgggttccactgtgatgggaacagtcattttagaaacaccacttctgtttacttcctgtttctcatttgacccttataataacccctagctgatgaacagggaggtggttcagttccctttcagcagatgaaaaagcaggatcaaagaggttaggtgatttgcctgtgtttacaaagccgggtgatagcactggaacttgttctagaagccttgctggctcagaggtggcatctccattgtgggataattagtgtgagcaaccagcccagtttgcctaggactgtcccagttttagccctgaaagtctggtaagccagcaaacccttacctttgtcttaggcaaactaggacagttggccaccgcagataagctatgtgggtagtcaggggtgttacaggacttgcttggggcaagtgtgtcctcttagccctcataacagactaagaatgtcctctgtggacagagtttagagcccatctctaattcagtctaaaatcactaaagtgtctaacgagtgcctaattctgtgaaggacagggtttctgccctcaaggggtctgagtagagtgggtgagataagtccacaaatcactgtgccagacacggatagatagcagtgtcacggaggatgtatagaaggagaaaacatctctggttagaagattccataaattctttaaagacatgctctgtagaggatgagtgggatcttggt

SEQ ID NO: 11653 - DNA, 1847 bp, Homo sapiens
  source 1..1847: mol_type = unassigned DNA
ttgataaatttcacgtaatttactcaaccgtttctctactgttggatgtttaggttgtttccagttttttgatataatcacaacccatgtttgttgagcatggactgtgtgctcagcactgtcatggacatttcccttgcagtaatttgtttacccctaaaaacatcctggtgggaaaagtggttttattatccccattttacagatgaaaaaactgaggcccaaagttagagcaggatttaaacccatgaagtttgacccagagcctgttttgtaatcatgcctctgctatttgtcacatcatcatgcctgcccatattctggatggtttccttaggatagaatcccggaagtgaaaatgggtcagtgcagccatagtgtacacctaggagggagtggctggggtcaggagagggcgttggctgagagggttaaggaatggaggggccaaggtaatgggaggatcatccacatggaagttgaagtcaccaagaactgaaccaggagtgattttggagaaagtgctggtgagccaggagctaaaaacccttacagatgacagggtgcagcctgggagccttccagaagtagaggttggtacagaagcatgatgtaaggggaagaacagtccagggaacagcagtgaggagcaaggaggacacataccagcctccaggtccatggtccatgggatacgggaggggaaatcgccacccatggggccatgggaagtttcagagattagagaggggtgggagatgagtcagaccaggcaagcgcccagctgtgaggtctggagaccgggctcacacaggagcctgcacttgtggaggttaccaaggcacagacaaaggacgtcgtgatttagctgctaatgggccaagacagatagtgatggtgaggcatacgttctggggacaggatgggtggagcctgcgcggatgtggtgccatcttcacttctgctggtgggaccgatgaaactgtgaaataaaaagtccagggaccggggcagggccctggggttcccggagatgacttccaaggggaagttcatggagaagtcagggaaggagtggggagagcctgttcggtggtgacagaggtatagaggccatgggctctcttggacaccatttgattctcaggtcacactgaagtacagtaagcattaagtagagtaaacatcactattgttgcttgggaaagaattgcagtttccatccagataatttgtttcatgaggaattttgtactagaaaaaattactttgtattattaaaaaatagtaaaacaaacaaaaatggtgcaaagggcttagtacttgtcccacgaccggggtctgactttccccctcacgatcctgtggtgcccacagcgaacccatcctacgtgcctccaccccagtgccagccaggcgagtttgcctgtgccaacagccgctgcatccaggagcgctggaagtgtgacggagacaacgattgcctggacaacagtgatgaggccccagccctctgccatcagcacacctgcccctcggaccgattcaagtgcgagaacaaccggtgcatccccaaccgctggctctgcgacggggacaatgactgtgggaacagtgaagatgagtccaatgccacttgttcaggtgtggagcggggctcagatcacacgaggcacccctcagtcaaggaggcaggggagacgagggggccaggttcagtggctcatgcctataatctcagcactttgggaggccaaggtgagaggatcacttgagcccaggagctcaagaccagcctggccaacatagtgagacctcccactctttacaaaaaaaatttaaaaaaa

SEQ ID NO: 11654 - DNA, 292 bp, Homo sapiens
  source 1..292: mol_type = unassigned DNA
ctatcccacctgcttccccctgactcagtttacctgcaacaatggcagatgtatcaacatcaactggagatgcgacaatgagaaggattgtggggacggctctgacgaacagacctgtcctgagcctgccgacaatgactgtggggacaacagtgacgaagccggctgcagccactcctgttctagcacccagttcaagtgcaacagcgggcgttgcatccccgagcactggacctgcgatggggacaatgactgcggagactacagtgatgagacacacgccaactgcacc

SEQ ID NO: 11655 - DNA, 418 bp, Homo sapiens
  source 1..418: mol_type = unassigned DNA
cccgcccaggggccttcgagcgtgagaccgtcatcactatgtctggagatgaccacccacgggccttcgttttggacgagtgccagaacctcatgttctggaccaactggaatgagcagcatcccagcatcatgcgggcggcgctctcgggagccaatgtcctgacccttatcgagaaggacatccgtacccccaatggcctggccatcgaccaccgtgccgagaagctctacttctctgacgccaccctggacaagatcgagcggtgcgagtatgacggctcccaccgctatgtgaactctctccatgccgaatcaacaacggtggctgccaggacctgtgtctgctcactcaccagggccatgtcaactgctcatgccgagggggccgaatcctccaggatgacctcacctgccga

SEQ ID NO: 11656 - DNA, 499 bp, Homo sapiens
  source 1..499: mol_type = unassigned DNA
tcccacgcagccccatacctggcctttccgaactcaccatagcccaacctgccccataacaccctgacccctgcctcaacttctttgaaacatccaagcccctcaaaagaaagacttctgagtcccccagacccccaccaacccctcttgcccccacctgccctccagtttgtatgcaagaacgacaagtgcatccccttctggtggaagtgtgacaccgaggacgactgcggggaccactcagacgagcccccggactgccctgagttcaagtgccggcccggacagttccagtgctccacaggtatctgcacaaaccctgccttcatctgcgatggcgacaatgactgccaggacaacagtgacgaggccaactgtgacatccacgtctgcttgcccagtcagttcaaatgcaccaacaccaaccgctgtattcccggcatcttccgctgcaatgggcaggacaactgcggagatggggaggatgagagggactgcc

SEQ ID NO: 11657 - DNA, 550 bp, Homo sapiens
  source 1..550: mol_type = unassigned DNA
aatgggcaggacaactgcggagatggggaggatgagagggactgccccgaggtgacctgcgcccccaaccagttccagtgctccattaccaaacggtgcatcccccgggtctgggtctgcgaccgggacaatgactgtgtggatggcagtgatgagcccgccaactgcacccagatgacctgtggtgtggacgagttccgctgcaaggattcgggccgctgcatcccagcgcgttggaagtgtgacggagaggatgactgtggggatggctcggatgagcccaaggaagagtgtggtgagccgagaccccactccaggaggaagacagtctacctggatgaacgcacctgtgagccataccagttccgctgcaagaacaaccgctgcgtgcccggccgctggcagtgcgactacgacaacgattgcggtgacaactccgatgaagagagctgcacccctcggccctgctccgagagtgagttctcctgtgccaacggccgctgcatcgcggggcgctggaaatgcgatggagaccacgactgcgcggacg

SEQ ID NO: 11658 - DNA, 611 bp, Homo sapiens
  source 1..611: mol_type = unassigned DNA
cccccatccctgtgctgtgcctctacccatcatccttgattgacctctccccaaaccctggtgcttgtctcagtggtcttgcccccgctcccctccccaaacacagtctgttctgagggcaaggccagggacctgtgtcctctctggtgtctgtcccatggggtaagtgcgagcccgcctgtgcccagctgttccataggagcagccagtgggctctgccaggactggctcggcctctgggtcagtcagctgtggccttcagagacacggggatgggccttgggctcgggactgtggcactactgaggcctggagtccttgtgcccaccctcctgggcctgtctccccctgtccttcccagcccctcggccctgctccgagagtgagttctcctgtgccaacggccgctgcatcgcggggcgctggaaatgcgatggagaccacgactgcgcggacggctcggacgagaaagactgcaccccccgctgtgacatggaccagttccagtgcaagagcggccactgcatccccctgcgctggcgctgtgacgcagacgccgactgcatggacggcagcgacgaggaggcctgcggcactggcggtgcgcccct

SEQ ID NO: 11659 - DNA, 1284 bp, Homo sapiens
  source 1..1284: mol_type = unassigned DNA
tggaaatgcgatggagaccacgactgcgcggacggctcggacgagaaagactgcaccccccgctgtgacatggaccagttccagtgcaagagcggccactgcatccccctgcgctggcgctgtgacgcagacgccgactgcatggacggcagcgacgaggaggcctgcggcactggcgtgcggacctgccccctggacgagttccagtgcaacaacaccttgtgcaagccgctggcctggaagtgcgatggcgaggatgactgtggggacaactcagatgagaaccccgaggagtgtgcccggttcgtgtgccctcccaaccggcccttccgttgcaagaatgaccgcgtctgtctgtggatcgggcgccaatgcgatggcacggacaactgtggggatgggactgatgaagaggactgtggtgagcagggggccgacgagaggcctgcaggggacgggtagtgcacagtggggtgagtctggtcctcgtgggagctgcactggggttagggttaaccaggaggactcgcccaggaaggggaggatccattgctaggagcctgggggcttttcgttaggaaagagaagcccctggggaaggctctgggggctgcctgatgccttaggtcttggaggtggggctgggaacccaaatgtttgacctgctccccctgcaagccttgtcacttaggaattgggagccactgttatctatggggttgccgtgggaggaggaggcaggggagaatacccagggcctaaagcctctgccctcctcagagccccccacagcccacaccacccactgcaaagacaagaaggagtttctgtgccggaaccagcgctgcctctcctcctccctgcgctgcaacatgttcgatgactgcggggacggctctgacgaggaggactgcagcatcgaccccaagctgaccagctgcgccaccaatgccagcatctgtggggacgaggcacgctgcgtgcgcaccgagaaagcggcctactgtgcctgccgctcgggcttccacaccgtgcccggccagcccggatgccaagacatcaacgagtgcctgcgcttcggcacctgctcccagctctgcaacaacaccaagggcggccacctctgcagctgcgctcggaacttcatgaagacgcacaacacctgcaaggccgaaggtgccggagccaccagagggcagaaaggctgggtggggcagggcgaccaggatatcaaacggggccgacttggaatggaatgtcttcctgcggacatcttgcccagac

SEQ ID NO: 11660 - DNA, 5114 bp, Homo sapiens
  source 1..5114: mol_type = unassigned DNA
tcttcatgcaacaaatatttattaagcatttaccatgtaccaggcactgccataggtgttagggacgtagtagtaaacaagacacagggcccctgaatacacatttttgtgcgggttgtgcccagctcaatgccccctagtctaggggaccagttgagctgaaatccagcaaaccctgagggctgtgcccatctaggccccaccccacaagtccctccgagacagtctgctgccacaagaagaaaagccctgcctattttcccttcctgggggcagtgagacagtgcctgtccctcgctgacctgcctgggctctgcagtacagagggggcaggtgaagcccgggatgagaaaagactgggccttggagcggaaatcccaactgtgcgggcagatgtcttggctctgccttggtaggccaggcacagggatgggaacccggtcttccattcccagcccagtgctgttcccgcgtccccgctgtggaactacacagcccagtgctgttcccacgtccccgctgtggaactacacagcacagtgccctgccacataccagagaaggagtgccctctgaactcctccagacacccctgaaaaatggcctcttctcccctaaataccagagggggcagtttggccccaccaagtagaaatttaagagacctggttccaatttggctgtgccactgcttgcctggtgacccctctgagcctggaacccccacctgtggagacaggggtctgggtgggctcatggctcattctatctcttggctccccctggcaccagtgcggacctgccccctggacgagttccagtgcaacaacaccttgtgcaagccgctggcctggaagtgcgatggcgaggatgactgtggggacaactcagatgagaaccccgaggagtgtgcccggttcgtgtgccctcccaaccggcccttccgttgcaagaatgaccgcgtctgtctgtggatcgggcgccaatgcgatggcacggacaactgtggggatgggactgatgaagaggactgtggtgagcagggggccgacgagaggcctgcaggggacgggtagtgcacagtggggtgagtctggtcctcgtgggagctgcactggggttagggttaaccaggaggactcgcccaggaaggggaggatccattgctaggagcctgggggcttttcgttaggaaagagaagcccctggggaaggctctgggggctgcctgatgccttaggtcttggaggtggggctgggaacccaaatgtttgacctgctccccctgcaagccttgtcacttaggaattgggagccactgttatctatggggttgccgtgggaggaggaggcaggggagaatacccagggcctaaagcctctgccctcctcagagccccccacagcccacaccacccactgcaaagacaagaaggagtttctgtgccggaaccagcgctgcctctcctcctccctgcgctgcaacatgttcgatgactgcggggacggctctgacgaggaggactgcagcatcgaccccaagctgaccagctgcgccaccaatgccagcatctgtggggacgaggcacgctgcgtgcgcaccgagaaagcggcctactgtgcctgccgctcgggcttccacaccgtgcccggccagcccggatgccaagacatcaacgagtgcctgcgcttcggcacctgctcccagctctgcaacaacaccaagggcggccacctctgcagctgcgctcggaacttcatgaagacgcacaacacctgcaaggccgaaggctctgagtaccaggtcctgtacatcgctgatgacaatgagatccgcagcctgttccccggccacccccattcggcttacgagcaggcattccagggtgacgagagtgtccgcattgatgctatggatgtccatgtcaaggctggccgtgtctattggaccaactggcacacgggcaccatctcctaccgcagcctgccacctgctgcgcctcctaccacttccaaccgccaccggcgacagattgaccggggtgtcacccacctcaacatttcagggctgaagatgcccagaggcatcgccatcgactgggtggccggaaacgtgtactggaccgactcgggccgagatgtgattgaggtggcgcagatgaagggcgagaaccgcaagacgctcatctcgggcatgattgacgagccccacgccattgtggtggacccactgagggggtgggcaagggccctggggggaggcctctgggctggtggtaggaagcccccgggacagggttgggggctgcacccacatgcgtgcccttccctcccaggccagcctgaggacagagtccttttcagtcccttgggtcttctcggccacccctgcctggccctccccatgctgcctctgcccagggcccccagctgggcctgcttgggcagggatctgacctctgcttggccggctgtcatgcacagccacactctgccctggggaacagctctgccagcgtcggtggctctgaatgagcacactgtggttttagaggaaaagcccctcaacctgctcagaagcagactcccgcctgcttctctgtagaaggacagaatgccctcctcccagtccccagcagtccctgtccccagaccaagaagctggtgtcctgcctgggcctgcctcctctggccctccggcctgcccacactcaccccttctccctccccaggaccatgtactggtcagactggggcaaccaccccaagattgagacggcagcgatggatgggacgcttcgggagacactggtgcaggacaacattcagtggcccacaggcctggccgtggattatcacaatgagcggctgtactgggcagacgccaagctttcagtcatcggcagcatccggctcaatggcacggaccccattgtggctgctgacagcaaacgaggcctaagtcaccccttcagcatcgacgtctttgaggattacatctatggtgtcacctacatcaataatcgtgtcttcaagatccataagtttggccacagccccttggtcaacctgacagggggcctgagccacgcctctgacgtggtcctttaccatcagcacaagcagcccgaagtgaccaacccatgtgaccgcaagaaatgcgagtggctctgcctgctgagccccagtgggcctgtctgcacctgtcccaatgggaagcggctggacaacggcacatgcgtgcctgtgccctctccaacgccccccccagatgctccccggcctggaacctgtaacctgcagtgcttcaacggtggcagctgtttcctcaatgcacggaggcagcccaagtgccgctgccaaccccgctacacgggtgacaagtgtgaactggaccagtgctgggagcactgtcgcaatgggggcacctgtgctgcctccccctctggcatgcccacgtgccggtgccccacgggcttcacgggccccaaatgcacccagcaggtgtgtgcgggctactgtgccaacaacagcacctgcactgtcaaccagggcaaccagccccagtgccgatgcctacccggcttcctgggcgaccgctgccagtaccggcagtgctctggctactgtgagaactttggcacatgccagatggctgctgatggctcccgacaatgccgctgcactgcctactttgagggatcgaggtgtgaggtgaacaagtgcagccgctgtctcgaaggggcctgtgtggtcaacaagcagagtggggatgtcacctgcaactgcacggatggccgggtggcccccagctgtctgacctgcgtcggccactgcagcaatggcggctcctgtaccatgaacagcaaaatgatgcctgagtgccagtgcccaccccacatgacagggccccggtgtgaggagcacgtcttcagccagcagcagccaggacatatagcctccatcctaatccctctgctgttgctgctgctgctggttctggtggccggagtggtattctggtataagcggcgagtccaaggggctaagggcttccagcaccaacggatgaccaacggggccatgaacgtggagattggaaaccccacctacaagatgtacgaaggcggagagcctgatgatgtgggaggcctactggacgctgactttgccctggaccctgacaagcccaccaacttcaccaaccccgtgtatgccacactctacatggggggccatggcagtcgccactccctggccagcacggacgagaagcgagaactcctgggccggggccctgaggacgagataggggaccccttggcatagggccctgccccgtcggactgcccccagaaagcctcctgccccctgccagtgaagtccttcagtgagcccctccccagccagcccttccctggccccgccggatgtataaatgtaaaaatgaaggaattacattttatatgtgagcgagcaagccggcaagcgagcacagtattatttctccatcccctccctgcctgctccttggcacccccatgctgccttcagggagacaggcagggagggcttggggctgcacctcctaccctcccaccagaacgcaccccactgggagagctggtggtgcagccttcccctccctgtataagacactttgccaaggctctcccctctcgccccatccctgcttgcccgctcccacagcttcctgagggctaattctgggaagggagagttctttgctgcccctgtctggaagacgtggctctgggtgaggtaggcgggaaaggatggagtgttttagttcttgggggaggccaccccaaaccccagccccaactccaggggcacctatgagatggccatgctcaacccccctcccagacaggccctccctgtctccagggcccccaccgaggttcccagggctggagacttcctctggtaaacattcctccagcctcccctcccctggggacgccaaggaggtgggccacacccaggaagggaaagcgggcagccccgttttggggacgtgaacgttttaataatttttgctgaattcctttacaactaaataacacagatattgttataaataaaattgt

SEQ ID NO: 11661 - DNA, 16535 bp, Homo sapiens
  source 1..16535: mol_type = unassigned DNA
aaagacagaaccccagagaaaaacgctgccaattcgttgctttattgttccctgcctggggacctcaatagccttttccattaaccttcccttcttacgcaacggttaatgactttgggggttgttttgctttctgtttctgctgagtcactaaattttgcctctttgtccccaggtgctgctcagcataaaagttaaaagtgcaattcaggaagtactgggattctgtgtagagccgaggaaaccatttccctaagagaagctctgttccttggcttgtccttccttcccgggaaggaagcttccgaggaacgaagggagaagctttgttttgcctgcagaagcagccctgtgctcggctgagggttctcagctggctgtgaactgcggagcattgtaggcgcctggctggctcaggccaatgcagaagtctctcccttctccaaagacccaaatccccacagaaccagcttcgagttactttcccttcaaggggattaaaataattgtgatttgtggcgctctccgttcgcggtggtattttcctgttgtgttaaatgcctcttattaagtaatagatgtgatttatgtgaacgacgaaggggtgtgtggtggattcggtgattaatcagtgaattcccatccgctggcatctctcactgcccctcttgcgtgatgtaagatcagacgtaccctgcattgaaaagtcaagacacacgggcgtctcgctcgcgctcacacacgctctgcctcctctctcccgcacgcgcgcatccctccaccttccacatcctgctccaggcaggagaaggctgactggctggactcattgagctgaagaatttccagtgacatttgtaaatgacgccgctcgattccaggctccaagcggcccctgccgccgccgccgccgccgggccgaaggtgccgccgagcagtctccagcgcaggcttccttaccgggcgaccacaatgtccgagtttctcctcgccttactcactctctcgggattattgccgattgccagggtgctgaccgtgggagccgaccgagatcagcagttgtgtgatcctggtgaatttctttgccacgatcacgtgacttgtgtctcccagagctggctgtgtgatggggaccctgactgccctgatgattcagacgagtctttagatacctgtcccgaggaggtagaaatcaagtgccccttgaatcacattgcttgccttggtaccaacaaatgtgttcatttatcccagctgtgcaatggtgtcttggactgcccagatgggtatgacgaaggagtacattgtcaggaactgttatccaattgccaacagctgaattgtcagtataaatgtacaatggtcagaaatagtacaagatgttactgtgaggatggattcgaaataacagaagatgggagaagctgtaaagatcaagatgaatgtgctgtttatggtacatgcagccagacctgcagaaacacacatggatcctacacttgcagttgtgtggaaggctacctaatgcagccagacaacagatcttgcaaggctaaaattgaacctacagatagaccacctatactattaattgcaaattttgaaacaattgaggttttctatcttaatggaagtaaaatggcaactctaagctcagtcaatggaaatgaaattcatactctggattttatttataatgaagatatgatttgttggattgaatcaagagaatcttcaaatcaactcaaatgtatccagataacaaaagcaggaggattaacagatgaatggacaatcaatattcttcaatccttccacaatgtgcaacaaatggcgattgactggctcactcgaaatctctattttgtggaccatgtcggtgaccggatctttgtttgtaattccaacggttctgtatgtgtcaccctgattgatctggagcttcacaatcctaaagcaatagcagtagatccaatagcaggaaaacttttctttactgactacgggaatgtcgccaaagtggagagatgtgacatggatgggatgaaccgaacaaggataattgattcaaagacagagcagccagctgcactggcactagacctagtcaacaaattggtttactgggtagatctttacttggactatgtgggagtagtggactatcaaggaaaaaatagacacactgtcattcaaggcagacaagttagacatctttatggtataactgtgtttgaagattatttgtatgcaaccaattctgataactacaatatcgtaaggataaaccgatttaatgggactgatattcactcattaattaaaattgagaatgcttggggaatccgaatttatcaaaaaagaactcaaccaacagtcagaagccatgcatgtgaagtcgatccatatggaatgccagggggctgttcacacatctgtctactcagcagcagttacaaaactcggacttgtcgctgcaggactggcttcaacttgggaagtgatggcaggtcatgcaaaagaccaaagaatgagttgttcctcttttatgggaaaggacgcccaggaattgttagaggaatggacttgaataccaagatagctgatgaatacatgatccccatagaaaatctggtaaaccctcgtgctttagactttcacgcagaaaccaattacatctactttgctgacaccaccagtttcctaattggccggcagaagatagatggcacagagagagaaaccatcctgaaagatgatctggataatgtagagggcattgctgtggactggattggaaataatctttactggaccaatgatggccataggaaaaccattaatgtggccaggctggaaaaagcttctcagagtcggaagactcttttagagggtgaaatgtctcatcccagaggaattgtggtggatccagttaatggttggatgtattggacagactgggaggaagatgaaatagatgacagcgtgggaaggattgagaaggcctggatggatggattcaatcggcagatttttgtgacttcaaagatgctgtggccaaacggtttaactctggactttcacaccaacacattatactggtgtgatgcctattacgatcatattgaaaaagtatttttgaatgggactcacaggaagattgtttacagtgggagagagttgaaccaccctttcggactgtcgcatcatggaaattatgtgttctggactgattatatgaatggttccatttttcaactagatttgataacaagtgaggtgacattgctgaggcatgaaagaccacccctatttgggcttcagatttatgatccacgaaagcaacaaggtgacaatatgtgccgagtaaataatgggggctgtagtacactttgcttggctatcccaggaggccgggtgtgtgcttgtgccgataatcaacttttggatgaaaatgggacaacttgcacatttaatcctggagaagcactacctcacatatgtaaagctggagagtttcgctgcaaaaacagacactgtatccaagctcggtggaaatgtgatggcgacgatgactgcctagacggaagcgatgaggattcagtaaactgcttcaatcatagctgtcctgatgatcagtttaaatgccagaataatcgctgcatccccaagagatggctttgtgatggagctaatgactgtgggagcaatgaagatgaatccaatcaaacttgcacagccagaacatgccaggtagaccagttttcttgcggaaatgggcgttgcattcccagagcatggctgtgtgacagggaagacgactgtggtgaccagacagatgaaatggcatcttgtgaattcccaacttgtgagccactaacccaattcgtatgcaaaagtggaagatgcattagcagcaaatggcactgcgactctgatgacgactgtggggacgggagtgatgaggtgggctgtgttcactcttgctttgataatcagttcagatgttccagtggcagatgcatcccaggccactgggcctgtgatggtgacaatgactgtggggacttcagtgatgaagcccagatcaattgtactaaagaagagattcattctcctgctggttgtaacggaaatgaatttcagtgccaccctgatggtaattgcgttcctgatttgtggcgctgtgatggagaaaaagactgtgaagatggtagtgatgaaaaaggttgcaatggtaccatacgattgtgtgaccacaaaaccaagttttcctgttggagtacagggagatgcatcaacaaagcatgggtgtgtgatggagatattgattgcgaagatcagtcagatgaagatgactgtgacagtttcttgtgtggaccacccaagcatccttgtgctaatgacacctcagtctgcctgcagccagagaaactctgcaatgggaaaaaggattgtcctgatggctctgatgaaggctatctctgtgatgagtgttcgctgaacaatggaggctgtagcaaccactgttctgttgttcctggaagaggaattgtctgttcctgccctgaaggacttcaactcaacaaagacaataaaacatgtgaaattgtggattattgtagcaatcatctaaagtgcagccaagtatgtgagcagcacaagcacacagtcaagtgctcatgttatgaaggttggaagctggatgtagacggtgaaagttgtacaagtgttgatccttttgaagcattcatcatcttttctattcgtcatgagatcagaaggattgatcttcacaaaagagactatagtctacttgttcctggattgagaaacacaatagcacttgattttcacttcaatcaaagtttactttattggacagatgttgtagaagacagaatataccggggaaagctttctgaaagtggaggtgtcagtgccattgaagtggttgtggagcatggcctggctactccagaaggcctgacagtcgactggatagcaggaaacatatactggatagacagcaatctggaccaaatcgaagtggccaaactagatggctccctaagaactacactaatagcaggagccatggaacaccccagggccattgctttggacccaagatatggaattcttttctggacagactgggatgcaaattttcctcgcattgaatctgcctctatgagtggtgctgggagaaaaaccatctataaagacatgaaaactggggcttggcctaatggactaactgtggaccactttgagaaaaggatagtgtggacagacgccaggtcagatgctatttattcagccctctatgatggaacaaacatgatagaaatcatccgaggtcatgaatacctttcccatccctttgctgtgtctctatatgggagtgaagtctactggacagactggaggaccaacacattgtccaaagccaataagtggacagggcagaatgtcagtgtgattcagaaaaccagtgcacagccatttgaccttcagatataccatcccagtcgccagccacaggctcccaatccttgtgcagctaatgatggcaaaggcccctgctctcacatgtgtctaatcaatcacaataggagtgctgcctgtgcgtgcccccacttgatgaagctttcttcagacaagaagacctgctatgaaatgaaaaaatttcttctttatgcaagacgttctgaaatcagaggagtggatattgacaatccatactttaacttcatcacggcatttacagtccctgatattgatgacgttactgtgatagacttcgatgcatctgaggaacgtttatactggacagatattaaaacacaaaccattaaacgagcttttattaacggaactgggttagaaactgttatttcaagagatattcagagtatcagagggctagcagtggattgggtgtcacgtaatttatactggattagctcagaatttgatgaaacgcaaattaatgtggcaaggctagatggctctttgaaaacctcaattatccatggaatcgataagccacagtgtcttgcagctcacccagtcaggggaaaactctactggaccgatggaaacacaattaacatggcaaatatggatggcagtaatagcaagattctgtttcagaatcagaaggagccagttggtctatcgatagactatgtggaaaacaagctttattggatcagttcagggaatggaaccataaatagatgcaacctggatggtggtaatttagaagtaatcgagtcaatgaaagaagaattaacaaaagctacagccctaaccatcatggataagaaactgtggtgggcagaccaaaacttagcccagctaggaacctgcagcaaaagagacggaagaaaccccaccatcctacggaataagacttctggggtagttcatatgaaagtctatgataaagaagcacagcaaggcagcaattcctgccaactaaacaatggtggatgctctcaactttgtttaccaacatctgaaactacaaggacttgtatgtgtacagtgggatattatctccaaaagaaccgtatgtcatgtcaaggtatagaatcatttcttatgtactctgttcatgaaggaatcaggggaatacctcttgaaccaagtgacaaaatggatgctttgatgcctatatcaggaacttcatttgccgtgggaatagatttccatgcagaaaatgataccatctactggacagacatgggcttcaataaaattagcagagctaaaagagatcagacttggaaagaagatatcattaccaatggcttgggaagagtggaagggatagctgttgactggattgctggtaacatatattggacagatcatggtttcaacttaattgaagttgcaagactcaatggttctttccgttatgtaattatttcccaaggcctggatcaaccaagatctatagctgtgcacccagagaaaggcctcttgttctggactgaatggggacaaatgccctgtattggaaaggctcgcttggatggctcagagaaggttgtccttgtaagcatgggaatagcatggccgaatggcatctccatcgactatgaggaaaataaattgtactggtgtgatgctcgcacagacaagatagagagaatcgaccttgagactggagggaatcgcgagatggtgctgtcaggaagcaatgtggatatgttttcagttgcagtctttggggcttacatctactggtctgacagagcacatgcaaacgggtctgtcagaaggggccacaagaatgatgccacagaaacgataaccatgagaaccggccttggagtcaacctgaaggaggttaaaatatttaaccgagtaagagagaaagggaccaatgtttgtgccagggacaatggtggctgtaagcaactctgtctttatcgaggaaattcccggagaacttgtgcttgtgcccatggatatttggcagaagatggagttacttgcctgaggcatgaaggctatttactgtattcaggaagaacaatattaaaaagtatacatctttctgatgaaaccaatttaaattccccaataaggccatatgagaatccacgttatttcaagaatgtcatagccttggcttttgactataatcaaagaagaaaaggtaccaaccgaatcttttacagtgatgcacactttggaaatatacagcttattaaagacaactgggaagacagacaagtaattgttgaaaatgtgggttctgtggaaggacttgcctatcacagagcctgggatacactgtactggacaagctctaccacctcatccatcaccagacacactgtggaccagactcggcctggagcatttgacagggaagctgtcatcaccatgtcagaagatgaccatccacatgtgctagccttggatgaatgtcaaaatttaatgttttggaccaactggaatgaacaacatccaagtatcatgagatctactctgactgggaaaaatgctcaagtggtggtcagtacagacatactcactccaaatggacttactatcgactaccgtgcagagaagctgtatttctcagatggcagtctaggaaaaattgaaaggtgtgaatacgatggatcccagagacatgtgatagttaaatctgggccagggactttcctcagtttggctgtttatgacaattatatattctggtcggactggggaagaagagctatactgcggtccaacaagtacacaggaggagatacaaaaattcttcgttccgatattccacatcagccaatgggaatcatagctgttgccaatgacaccaatagctgtgaactttctccatgtgcattattgaatggaggctgccatgacttgtgccttttaactcccaatgggagagtgaattgttcctgcagaggggaccgaatattgctagaggacaacagatgtgtgactaaaaattcctcctgcaacgcttattcggagtttgaatgtggaaatggtgagtgcattgactaccagctcacctgtgatggcattcctcactgtaaagataaatcagatgaaaaactgctctactgtgaaaacagaagctgtcgaagaggcttcaagccatgctataatcgccgctgcattcctcatggcaagttatgtgatggagaaaatgactgcggagacaactctgatgaattagattgtaaagtttcaacctgtgccacggttgagttccgctgtgcagatgggacttgtattccaagatcagcacgatgcaaccagaacatagattgtgcagatgcttcagatgaaaagaactgcaataacacagactgcacacatttctataagcttggagtgaaaaccacagggttcataagatgtaattctacctcactgtgtgttctgccaacctggatatgcgacgggtctaatgactgtggagactattcagatgaattaaagtgcccagttcaaaacaaacacaaatgtgaagaaaattattttagttgtcctagtggaagatgcattttgaatacctggatatgcgatggtcagaaagattgtgaggatggacgtgatgaattccactgtgattcttcttgctcttggaaccaatttgcttgttccgcacaaaaatgtatttctaagcattggatttgtgatggagaagatgactgtggggatgggttagatgaaagtgacagcatttgtggtgccataacctgtgctgctgacatgttcagctgccagggctctcgtgcctgcgtgccccgacattggctttgtgatggtgaaagggactgtccagatggaagcgatgagctttccacagcaggctgcgctcccaataatacatgtgatgaaaatgctttcatgtgccataataaagtatgcattcccaagcaatttgtttgtgaccatgatgacgactgtggagatggctctgatgagtcaccgcagtgtggatatcgacagtgtggtacagaagaatttagttgtgctgatgggcggtgtcttctaaatactcaatggcagtgtgatggagactttgactgtcctgaccattctgatgaagcacctttaaacccaaagtgtaaaagtgcagaacagtcatgcaacagttcattttttatgtgcaaaaatggcaggtgcattcccagtggaggtctttgcgacaataaggatgactgtggcgatggttcagatgagagaaactgccatataaatgaatgtttgagtaagaaagtcagtggatgttctcaagactgtcaagaccttccggtcagttataagtgcaaatgctggcctggattccaactgaaggatgacggcaaaacatgtgtagacattgatgaatgctcttcaggctttccctgtagccagcaatgcatcaatacatacgggacttacaagtgcctctgtacagatgggtatgaaatacaacctgataacccaaatggctgcaaatcgctctcagatgaagaaccttttttaattcttgctgatcatcatgagataaggaaaattagcactgatggctccaactacacacttttaaaacagggattaaacaatgttattgctatagactttgattacagagaagaattcatctattggatcgattctagccgacccaatggcagtcgcataaatagaatgtgtttaaatggaagtgacattaaggtagttcataacacagcggtccccaatgcacttgctgtcgattggattggaaaaaacctctattggtctgacacagaaaaaagaatcattgaagtatccaaactcaatggcttgtaccctactatactcgttagcaaaaggctgaagtttcccagagacttgtctttagatcctcaagctggatatttgtattggattgactgctgcgagtatcctcatattggccgtgttggaatggatggaaccaatcagagtgttgtcatagaaaccaagatttctagacctatggcactaacaatagattatgttaatcgtagactctactgggccgatgaaaatcacattgaatttagcaacatggatggatctcatagacacaaagtccctaatcaagatattccaggggtgattgcactaacattgtttgaagactacatctactggactgatgggaaaaccaagtcactcagccgtgcccataaaacatcgggagcagacagactctcactgatttactcatggcatgccatcacagatatccaggtgtatcattcttatagacaacctgatgtctccaaacatctctgcatgataaataatggtggttgcagtcatttgtgccttttagcccctggaaaaacccacacttgtgcatgtcccactaacttctatctggcagctgataataggacttgcttatccaactgcacagccagccagtttcgttgcaaaactgacaaatgtattccattctggtggaaatgtgacaccgtggatgactgtggtgatggatctgatgaacctgatgactgtcctgaatttagatgtcagccaggccgatttcagtgtgggactggactctgtgctctaccagctttcatctgtgatggagagaatgattgtggagacaattctgatgaactcaactgtgacacacatgtctgcctgtcaggtcaattcaaatgtaccaagaaccagaaatgtatcccagtaaacttaagatgtaatgggcaagatgactgtggtgatgaggaagatgaaagagactgtcctgaaaacagctgttctccagactatttccagtgtaagactacgaagcattgcatttccaagctgtgggtttgtgacgaggatccagactgtgcagatgcatcagacgaggccaactgcgataaaaagacttgtggacctcatgaattccagtgtaaaaacaacaactgtattcccgatcactggcggtgtgatagccaaaatgactgcagtgataattcagatgaagaaaactgtaagccacagacatgtacattgaaagatttcctctgtgccaatggggactgtgtttcttcaaggttttggtgtgatggagattttgactgtgcagatggctctgatgagagaaattgtgagacaagttgttccaaagatcagttccggtgttccaatggtcagtgtataccagcaaaatggaaatgtgatggccatgaagactgcaaatatggggaagatgagaaaagctgtgagccagcttctcctacttgctcatcacgtgaatatatatgtgccagtgatggatgtatttcagcatctttgaaatgtaatggagaatatgattgtgctgatggttcagatgagatggactgtgtgactgaatgtaaggaagatcagtttcggtgcaaaaataaagcccactgtattccaattagatggctgtgtgatggaattcatgactgtgtggatggcagtgatgaagagaactgtgaaagaggaggaaatatatgtagagctgatgagttcctttgcaataattctctctgcaaactacatttctgggtgtgtgatggagaggacgactgtggagacaactctgatgaagcccctgatatgtgtgtcaaatttctttgtccatccacgagacctcacagatgcagaaataacagaatatgcctacagtcggagcaaatgtgcaatgggattgatgaatgcggtgacaattcagatgaagatcactgtggtggtaagctgacatataaagcaaggccttgtaaaaaggatgagtttgcttgtagtaataaaaaatgcatccctatggatctccagtgtgatcgacttgatgactgcggagatggttcagatgagcaaggatgcagaatagctcctactgaatatacctgtgaagataatgtgaatccatgtggagatgatgcatattgtaatcaaataaaaacatctgttttctgtcgctgtaagcctggatttcagagaaacatgaaaaacagacaatgtgaagaccttaatgaatgtttggtgtttggcacatgttcccatcaatgtataaatgtggaaggatcatataaatgtgtgtgtgaccagaattttcaagaaagaaataacacctgcatagcagaaggctctgaagatcaagttctctacattgctaatgacactgatatcctgggttttatatatccattcaactacagtggcgatcatcaacaaatttctcatattgaacataattcaagaataacagggatggatgtatattatcaaagagatatgattatttggagtactcagtttaatccaggcggaattttctacaaaaggatccatggcagagaaaaaaggcaagcaaacagtggcttgatttgtcctgaatttaaaaggcccagggacattgcagttgactgggtggctggaaacatttactggactgatcattctagaatgcattggttcagttactacactactcactggaccagtctgaggtactctatcaacgtagggcagctgaatggccccaactgcaccagactcttaacaaatatggctggagaaccctatgctattgcagtaaatcctaaaagagggatgatgtactggactgttgttggggatcattcccatatagaagaagcagccatggatggtacactgagaaggattttagtacaaaagaacttacagagacccacaggtttggctgtggattattttagtgaacgcatatattgggctgactttgagctctccatcattggcagtgttctgtatgatggctctaattcagtagtctctgtcagcagcaaacaaggtttattacatccacataggatcgatatctttgaagattatatatatggagcaggacctaaaaatggtgtatttcgagttcaaaaatttggccatggttcagtagagtacttagctttaaatattgataaaacaaaaggtgttttgatatctcatcgttataaacaactagatttacccaatccatgcttggatttagcatgcgaatttctttgcttgctaaatccttctggggccacttgtgtgtgtccagaaggaaaatatttgattaatggcacctgcaatgatgacagcctgttagatgattcatgtaagttaacttgtgaaaatggaggaagatgcattttaaatgagaaaggtgatttgaggtgtcactgttggcccagttattcaggagaaagatgtgaagtcaaccactgtagcaactactgccagaatggaggaacttgcgtaccatcagttctagggagacccacctgcagctgtgcactgggtttcactgggccaaactgtggtaagacagtctgtgaggatttttgtcaaaatggaggaacctgcattgtgactgctggaaaccagccttactgccactgccagccggaatacaccggagacagatgtcagtactacgtgtgccaccactattgtgtgaattctgaatcatgtaccattggggatgatggaagtgttgaatgtgtctgtccaacgcgctatgaaggaccaaaatgtgaggttgacaagtgtgtaaggtgccatggggggcactgcattataaataaagacagtgaagatatattttgcaactgcactaatggaaagattgcctctagctgtcagttatgtgatggctactgttacaatggtggcacatgccagctggaccccgagacaaatgtacctgtgtgtctatgctccaccaactggtcaggcacacagtgtgaaaggccagccccaaagagcagcaagtctgatcatatcagcacaagaagcattgccatcattgtgcctctcgtcctcttggtgactttgataaccaccttagtaattggtttagtgctttgtaaaagaaaaagaaggacaaaaacaattagaagacaacctattatcaatggaggaataaatgtagaaattggcaatccatcttataacatgtatgaggtagatcatgatcacaacgatggaggtcttttagatcctggctttatgatagacccaacaaaggccaggtacatagggggaggacccagtgctttcaagcttccacacacagcgccgcccatctacctaaactctgatttgaaaggaccactaactgctgggccaacaaattactccaatccggtatatgcaaaattatatatggatgggcaaaactgtcgaaactccttaggaagtgttgatgaaaggaaagaactgcttccaaagaaaatagaaattggtataagagagacagtggcataatcagtgatatcttttatatgctgtataaatgtataaaatataaggattacttttgtatgttccaacagtattatacttgttttggcatcagcattacctctttctttatctttttcctggttaattgttttctgagttttttgggttttattttttgctgatgactattgattgaccatttgtatggtatttttatgaaaaagaactgcactacagtacaatttacaacaatgctgctgatatgacacacctttgaatttgttaaaattaaaaacaacgtattcctttgtagtgtgaatatgagcaatctattttatatgaacttttttggttgtacttaatcaacgaggagaatctctgcacttttccattatacggtttgaaggctgtaatacagtgtcatattatttttctgtttaaattgatggaaaaatgattgaatggtcaactctcttctttgtgcccataaagatcgattcagactctgctgaaaatatatagctctcacaagttcagcatcacctgctttgaaattagccttagattgccaaccaatagatgagaattttgaggaaaaaaattaaaaatatgtaaaattaataatttgcatgaacacagatgactacattttccaaaacttagtggactctatgtgatgtactaaatgtatacaccttgtaagcaatagttatatttaggtggtagaacatagcaaaaatataaccgaaagttggccgactgcacttgctatggaataagaccttttattctccctcagtctcgagataaatagccagcctagagcacaacagggcattgggtacttgcatcttaggtatttcttcccagtcacatccattttgtggaagattaacccaaccccttacactacactgaacactaaagaataatatataagcacacaaattggtgacagaatttcaattacgtgaacgcatcctctttgctaggtcaaaaaacaaagggcaaagcagacattttagtatacagagtgattggcaaatattttcaagatttaatatgagcaacccattatttgccctatccaaaatatattcaagggccttccaagttgtagaagaacaatgatcttcccataatcaaaagtggagagtcgaaatgctgtgccagttgctctggtattcaggtttctctgggttttacagaacgcatggaccccattcacgtttggtttgtttatcttcaaatttgagttgaaacgagtgcgatttatttaagttgtatataaaaataaaaggatagcatttttatacaaatatctttaaaggcacaaaagatttattcacaagttttggagggctttttgttcctctgatagacatgactgacttttagctgtcataatgtattaacctaacagatgaaatatgttaaatatgtggttgctctttatccctttgtacaagcattaaaaaaactgctgttttataagaagactttttgttgtactatgtgcatgcatactacctatttctaaactttgccatattgaggcctttataaactattgatttatgtaatactagtgcaattttgcttgaacaatgttatgcatatcataaactttttcaggttcttgtttaagtacattttttaaattgaacagtatttttcattttggttataatatagtcattttgcctatgtttctacaatgaagtgttaaatactttataaaaaattgttgactgacttatttaaatgaaattctacatatttaa

SEQ ID NO: 11662 - DNA, 3810 bp, Homo sapiens
  source 1..3810: mol_type = unassigned DNA
gtagtaataaaaaatgcatccctatggatctccagtgtgatcgacttgatgactgcggagatggttcagatgagcaaggatgcagaatagctcctactgaatatacctgtgaagataatgtgaatccatgtggagatgatgcatattgtaatcaaataaaaacatctgttttctgtcgctgtaagcctggatttcagagaaacatgaaaaacagacaatgtgaagaccttaatgaatgtttggtgtttggcacatgttcccatcaatgtataaatgtggaaggatcatataaatgtgtgtgtgaccagaattttcaagaaagaaataacacctgcatagcagaaggctctgaagatcaagttctctacattgctaatgacactgatatcctgggttttatatatccattcaactacagtggcgatcatcaacaaatttctcatattgaacataattcaagaataacagggatggatgtatattatcaaagagatatgattatttggagtactcagtttaatccaggcggaattttctacaaaaggatccatggcagagaaaaaaggcaagcaaacagtggcttgatttgtcctgaatttaaaaggcccagggacattgcagttgactgggtggctggaaacatttactggactgatcattctagaatgcattggttcagttactacactactcactggaccagtctgaggtactctatcaacgtagggcagctgaatggccccaactgcaccagactcttaacaaatatggctggagaaccctatgctattgcagtaaatcctaaaagagggatgatgtactggactgttgttggggatcattcccatatagaagaagcagccatggatggtacactgagaaggattttagtacaaaagaacttacagagacccacaggtttggctgtggattattttagtgaacgcatatattgggctgactttgagctctccatcattggcagtgttctgtatgatggctctaattcagtagtctctgtcagcagcaaacaaggtttattacatccacataggatcgatatctttgaagattatatatatggagcaggacctaaaaatggtgtatttcgagttcaaaaatttggccatggttcagtagagtacttagctttaaatattgataaaacaaaaggtgttttgatatctcatcgttataaacaactagatttacccaatccatgcttggatttagcatgcgaatttctttgcttgctaaatccttctggggccacttgtgtgtgtccagaaggaaaatatttgattaatggcacctgcaatgatgacagcctgttagatgattcatgtaagttaacttgtgaaaatggaggaagatgcattttaaatgagaaaggtgatttgaggtgtcactgttggcccagttattcaggagaaagatgtgaagtcaaccactgtagcaactactgccagaatggaggaacttgcgtaccatcagttctagggagacccacctgcagctgtgcactgggtttcactgggccaaactgtggtaagacagtctgtgaggatttttgtcaaaatggaggaacctgcattgtgactgctggaaaccagccttactgccactgccagccggaatacaccggagacagatgtcagtactacgtgtgccaccactattgtgtgaattctgaatcatgtaccattggggatgatggaagtgttgaatgtgtctgtccaacgcgctatgaaggaccaaaatgtgaggttgacaagtgtgtaaggtgccatggggggcactgcattataaataaagacagtgaagatatattttgcaactgcactaatggaaagattgcctctagctgtcagttatgtgatggctactgttacaatggtggcacatgccagctggaccccgagacaaatgtacctgtgtgtctatgctccaccaactggtcaggcacacagtgtgaaaggccagccccaaagagcagcaagtctgatcatatcagcacaagaagcattgccatcattgtgcctctcgtcctcttggtgactttgataaccaccttagtaattggtttagtgctttgtaaaagaaaaagaaggacaaaaacaattagaagacaacctattatcaatggaggaataaatgtagaaattggcaatccatcttataacatgtatgaggtagatcatgatcacaacgatggaggtcttttagatcctggctttatgatagacccaacaaagccaacaaattactccaatccggtatatgcaaaattatatatggatgggcaaaactgtcgaaactccttaggaagtgttgatgaaaggaaagaactgcttccaaagaaaatagaaattggtataagagagacagtggcataatcagtgatatcttttatatgctgtataaatgtataaaatataaggattacttttgtatgttccaacagtattatacttgttttggcatcagcattacctctttctttatctttttcctggttaattgttttctgagttttttgggttttattttttgctgatgactattgattgaccatttgtatggtatttttatgaaaaagaactgcactacagtacaatttacaacaatgctgctgatatgacacacctttgaatttgttaaaattaaaaacaacgtattcctttgtagtgtgaatatgagcaatctattttatatgaacttttttggttgtacttaatcaacgaggagaatctctgcacttttccattatacggtttgaaggctgtaatacagtgtcatattatttttctgtttaaattgatggaaaaatgattgaatggtcaactctcttctttgtgcccataaagatcgattcagactctgctgaaaatatatagctctcacaagttcagcatcacctgctttgaaattagccttagattgccaaccaatagatgagaattttgaggaaaaaaattaaaaatatgtaaaattaataatttgcatgaacacagatgactacattttccaaaacttagtggactctatgtgatgtactaaatgtatacaccttgtaagcaatagttatatttaggtggtagaacatagcaaaaatataaccgaaagttggccgactgcacttgctatggaataagaccttttattctccctcagtctcgagataaatagccagcctagagcacaacagggcattgggtacttgcatcttaggtatttcttcccagtcacatccattttgtggaagattaacccaaccccttacactacactgaacactaaagaataatatataagcacacaaattggtgacagaatttcaattacgtgaacgcatcctctttgctaggtcaaaaaacaaagggcaaagcagacattttagtatacagagtgattggcaaatattttcaagatttaatatgagcaacccattatttgccctatccaaaatatattcaagggccttccaagttgtagaagaacaatgatcttcccataatcaaaagtggagagtcgaaatgctgtgccagttgctctggtattcaggtttctctgggttttacagaacgcatggaccccattcacgtttggtttgtttatcttcaaatttgagttgaaacgagtgcgatttatttaagttgtatataaaaataaaaggatagcatttttatacaaatatctttaaaggcacaaaagatttattcacaagttttggagggctttttgttcctctgatagacatgactgacttttagctgtcataatgtattaacctaacagatgaaatatgtt

SEQ ID NO: 11663 - DNA, 839 bp, Homo sapiens
  source 1..839: mol_type = unassigned DNA
ggagacccacctgcagctgtgcactgggtttcactgggccaaactgtggtaagacagtctgtgaggatttttgtcaaaatggaggaacctgcattgtgactgctggaaaccagccttactgccactgccagccggaatacaccggagacagatgtcagtactacgtgtgccaccactattgtgtgaattctgaatcatgtaccattggggatgatggaagtgttgaatgtgtctgtccaacgcgctatgaaggaccaaaatgtgaggttgacaagtgtgtaaggtgccatggggggcactgcattataaataaagacagtgaagatatattttgcaactgcactaatggaaagattgcctctagctgtcagttatgtgatggctactgttacaatggtggcacatgccagctggaccccgagacaaatgtacctgtgtgtctatgctctgtggggtttaaaagtcagcgctgtgaccagaaagagaacccttgtgatcactactgtcagaatgaggggatttgcactttaactgcgtttaatgagccgagatgcaaatgctccaccaactggtcaggcacacagtgtgaaaggccagccccaaagagcagcaagtctgatcatatcagcacaagaagcattgccatcattgtgcctctcgtcctcttggtgactttgataaccaccttagtaattggtttagtgctttgtaaaagaaaaagaaggacaaaaacaattagaagacaacctattatcaatggaggaataaatgtagaaattggcaatccatcttataacatgtatgaggtagatcatgatcacaacgatggaggtctttta

SEQ ID NO: 11664 - DNA, 2621 bp, Homo sapiens
  source 1..2621: mol_type = unassigned DNA
gcattgaaaagtcaagacacacgggcgtctcgctcgcgctcacacacgctctgcctcctctctcccgcacgcgcgcatccctccaccttccacatcctgctccaggcaggagaaggctgactggctggactcattgagctgaagaatttccagtgacatttgtaaatgacgccgctcgattccaggctccaagcggcccctgccgccgccgccgccgccgggccgaaggtgccgccgagcagtctccagcgcaggcttccttaccgggcgaccacaatgtccgagtttctcctcgccttactcactctctcgggattattgccgattgccagggtgctgaccgtgggagccgaccgagatcagcagttgtgtgatcctggtgaatttctttgccacgatcacgtgacttgtgtctcccagagctggctgtgtgatggggaccctgactgccctgatgattcagacgagtctttagatacctccagaacatgccaggtagaccagttttcttgcggaaatgggcgttgcattcccagagcatggctgtgtgacagggaagacgactgtggtgaccagacagatgaaatggcatcttgtgaattcccaacttgtgagccactaacccaattcgtatgcaaaagtggaagatgcattagcagcaaatggcactgcgactctgatgacgactgtggggacgggagtgatgaggtgggctgtgttcactcttgctttgataatcagttcagatgttccagtggcagatgcatcccaggccactgggcctgtgatggtgacaatgactgtggggacttcagtgatgaagcccagatcaattgtactaaagaagagattcattctcctgctggttgtaacggaaatgaatttcagtgccaccctgatggtaattgcgttcctgatttgtggcgctgtgatggagaaaaagactgtgaagatggtagtgatgaaaaaggttgcaatggtaccatacgattgtgtgaccacaaaaccaagttttcctgttggagtacagggagatgcatcaacaaagcatgggtgtgtgatggagatattgattgcgaagatcagtcagatgaagatgactgtgacagtttcttgtgtggaccacccaagcatccttgtgctaatgacacctcagtctgcctgcagccagagaaactctgcaatgggaaaaaggattgtcctgatggctctgatgaaggctatctctgtgatgagtgttcgctgaacaatggaggctgtagcaaccactgttctgttgttcctggaagaggaattgtctgttcctgccctgaaggacttcaactcaacaaagacaataaaacatgtgaaattgtggattattgtagcaatcatctaaagtgcagccaagtatgtgagcagcacaagcacacagtcaagtgctcatgttatgaaggttggaagctggatgtagacggtgaaagttgtacaagtgttgatccttttgaagcattcatcatcttttctattcgtcatgagatcagaaggattgatcttcacaaaagagactatagtctacttgttcctggattgagaaacacaatagcacttgattttcacttcaatcaaagtttactttattggacagatgttgtagaagacagaatataccggggaaagctttctgaaagtggaggtgtcagtgccattgaagtggttgtggagcatggcctggctactccagaaggcctgacagtcgactggatagcaggaaacatatactggatagacagcaatctggaccaaatcgaagtggccaaactagatggctccctaagaactacactaatagcaggagccatggaacaccccagggccattgctttggacccaagatatggaattcttttctggacagactgggatgcaaattttcctcgcattgaatctgcctctatgagtggtgctgggagaaaaaccatctataaagacatgaaaactggggcttggcctaatggactaactgtggaccactttgagaaaaggatagtgtggacagacgccaggtcagatgctatttattcagccctctatgatggaacaaacatgatagaaatcatccgaggtcatgaatacctttcccatccctttgctgtgtctctatatgggagtgaagtctactggacagactggaggaccaacacattgtccaaagccaataagtggacagggcagaatgtcagtgtgattcagaaaaccagtgcacagccatttgaccttcagatataccatcccagtcgccagccacaggctcccaatccttgtgcagctaatgatggcaaaggcccctgctctcacatgtgtctaatcaatcacaataggagtgctgcctgtgcgtgcccccacttgatgaagctttcttcagacaagaagacctgctatgaaatgaaaaaatttcttctttatgcaagacgttctgaaatcagaggagtggatattgacaatccatactttaacttcatcacggcatttacagtccctgatattgatgacgttactgtgatagacttcgatgcatctgaggaacgtttatactggacagatattaaaacacaaaccattaaacgagcttttattaacgg

SEQ ID NO: 11665 - DNA, 514 bp, Homo sapiens
  source 1..514: mol_type = unassigned DNA
atcagcagttgtgtgatcctggtgaatttctttgccacgatcacgtgacttgtgtctcccagagctggctgtgtgatggggaccctgactgccctgatgattcagacgagtctttagataccttttgttttgaaaacctttaaaagggaggaagaaaacaaaatctctcagcttacagtctgtacggtaataggccacaggtcagatttggccagcaggctatataatttgccaaatctttgttgtagtagcgtagctgaaatatatctgctatacagttgaggcaggtctgtgctcaggcactgctgctccatggaacagcataacctcacacaatgaatgcacgaagcacagagttttgtttgcatctaccagtcatggtgccagactgatgcaatatggtgtagtctacatatgctgggttttgtttccttctattttttcatacttccttattggttaggattgcatttgactgcatgttatagaaacagtgacttaactgaataggggt

SEQ ID NO: 11666 - DNA, 15808 bp, Homo sapiens
  source 1..15808: mol_type = unassigned DNA
aaagtgcagggggcgggccgggcggcagggggcctgcccgctggattcccgcatgcttgttccggggcggtcgggtctaaagggctttatgcactgtctggagggtggggactggcgcgggtagaaaacgggatgcctcgggcgtgggggcaggcttttggccactaggagctggcggaggtgcagacctaaaggagcgttcgctagcagaggcgctgccggtgcggtgtgctacgcgcgcccacctcccggggaaggaacggcgaggccggggaccgtcgcggagatggatcgcgggccggcagcagtggcgtgcacgctgctcctggctctcgtcgcctgcctagcgccggccagtggccaagaatgtgacagtgcgcattttcgctgtggaagtgggcattgcatccctgcagactggaggtgtgatgggaccaaagactgttcagatgacgcggatgaaattggctgcgctgttgtgacctgccagcagggctatttcaagtgccagagtgagggacaatgcatccccaactcctgggtgtgtgaccaagatcaagactgtgatgatggctcagatgaacgtcaagattgctcacaaagtacatgctcaagtcatcagataacatgctccaatggtcagtgtatcccaagtgaatacaggtgcgaccacgtcagagactgccccgatggagctgatgagaatgactgccagtacccaacatgtgagcagcttacttgtgacaatggggcctgctataacaccagtcagaagtgtgattggaaagttgattgcagggactcctcagatgaaatcaactgcactgagatatgcttgcacaatgagttttcatgtggcaatggagagtgtatccctcgtgcttatgtctgtgaccatgacaatgattgccaagacggcagtgacgaacatgcttgcaactatccgacctgcggtggttaccagttcacttgccccagtggccgatgcatttatcaaaactgggtttgtgatggagaagatgactgtaaagataatggagatgaagatggatgtgaaagcggtcctcatgatgttcataaatgttccccaagagaatggtcttgcccagagtcgggacgatgcatctccatttataaagtttgtgatgggattttagattgcccaggaagagaagatgaaaacaacactagtaccggaaaatactgtagtatgactctgtgctctgccttgaactgccagtaccagtgccatgagacgccgtatggaggagcgtgtttttgtcccccaggttatatcatcaaccacaatgacagccgtacctgtgttgagtttgatgattgccagatatggggaatttgtgaccagaagtgtgaaagccgacctggccgtcacctgtgccactgtgaagaagggtatatcttggagcgtggacagtattgcaaagctaatgattcctttggcgaggcctccattatcttctccaatggtcgggatttgttaattggtgatattcatggaaggagcttccggatcctagtggagtctcagaatcgtggagtggccgtgggtgtggctttccactatcacctgcaaagagttttttggacagacaccgtgcaaaataaggttttttcagttgacattaatggtttaaatatccaagaggttctcaatgtttctgttgaaaccccagagaacctggctgtggactgggttaataataaaatctatctagtggaaaccaaggtcaaccgcatagatatggtaaatttggatggaagctatcgggttacccttataactgaaaacttggggcatcctagaggaattgccgtggacccaactgttggttatttatttttctcagattgggagagcctttctggggaacctaagctggaaagggcattcatggatggcagcaaccgtaaagacttggtgaaaacaaagctgggatggcctgctggggtaactctggatatgatatcgaagcgtgtttactgggttgactctcggtttgattacattgaaactgtaacttatgatggaattcaaaggaagactgtagttcatggaggctccctcattcctcatccctttggagtaagcttatttgaaggtcaggtgttctttacagattggacaaagatggccgtgctgaaggcaaacaagttcacagagaccaacccacaagtgtactaccaggcttccctgaggccctatggagtgactgtttaccattccctcagacagccctatgctaccaatccgtgtaaagataacaatgggggctgtgagcaggtctgtgtcctcagccacagaacagataatgatggtttgggtttccgttgcaagtgcacattcggcttccaactggatacagatgagcgccactgcattgctgttcagaatttcctcattttttcatcccaagttgctattcgtgggatcccgttcaccttgtctacccaggaagatgtcatggttccagtttcggggaatccttctttctttgtcgggattgattttgacgcccaggacagcactatctttttttcagatatgtcaaaacacatgatttttaagcaaaagattgatggcacaggaagagaaattctcgcagctaacagggtggaaaatgttgaaagtttggcttttgattggatttcaaagaatctctattggacagactctcattacaagagtatcagtgtcatgaggctagctgataaaacgagacgcacagtagttcagtatttaaataacccacggtcggtggtagttcatccttttgccgggtatctattcttcactgattggttccgtcctgctaaaattatgagagcatggagtgacggatctcacctcttgcctgtaataaacactactcttggatggcccaatggcttggccatcgattgggctgcttcacgattgtactgggtagatgcctattttgataaaattgagcacagcacctttgatggtttagacagaagaagactgggccatatagagcagatgacacatccgtttggacttgccatctttggagagcatttattttttactgactggagactgggtgccattattcgagtcaggaaagcagatggtggagaaatgacagttatccgaagtggcattgcttacatactgcatttgaaatcgtatgatgtcaacatccagactggttctaacgcctgtaatcaacccacgcatcctaacggtgactgcagccacttctgcttcccggtgccaaatttccagcgagtgtgtgggtgcccttatggaatgaggctggcttccaatcacttgacatgcgagggggacccaaccaatgaaccacccacagagcagtgtggcttattttccttcccctgtaaaaatggcagatgtgtgcccaattactatctctgtgatggagtcgatgattgtcatgataacagtgatgagcaactatgtggcacacttaataatacctgttcatcttcggcgttcacctgtggccatggggagtgcattcctgcacactggcgctgtgacaaacgcaacgactgtgtggatggcagtgatgagcacaactgccccacccacgcacctgcttcctgccttgacacccaatacacctgtgataatcaccagtgtatctcaaagaactgggtctgtgacacagacaatgattgtggggatggatctgatgaaaagaactgcaattcgacagagacatgccaacctagtcagtttaattgccccaatcatcgatgtattgacctatcgtttgtctgtgatggtgacaaggattgtgttgatggatctgatgaggttggttgtgtattaaactgtactgcttctcaattcaagtgtgccagtggggataaatgtattggcgtcacaaatcgttgtgatggtgtttttgattgcagtgacaactcggatgaagcaggctgtccaaccaggcctcctggtatgtgccactcagatgaatttcagtgccaagaagatggtatctgcatcccgaacttctgggaatgtgatgggcatccagactgcctctatggatctgatgagcacaatgcctgtgtccccaagacttgcccttcatcatatttccactgtgacaacggaaactgcatccacagggcatggctctgtgatcgggacaatgactgcggggatatgagtgatgagaaggactgccctactcagccctttcgctgtcctagttggcaatggcagtgtcttggccataacatctgtgtgaatctgagtgtagtgtgtgatggcatctttgactgccccaatgggacagatgagtccccactttgcaatgggaacagctgctcagatttcaatggtggttgtactcacgagtgtgttcaagagccctttggggctaaatgcctatgtccattgggattcttacttgccaatgattctaagacctgtgaagacatagatgaatgtgatattctaggctcttgtagccagcactgttacaatatgagaggttctttccggtgctcgtgtgatacaggctacatgttagaaagtgatgggaggacttgcaaagttacagcatctgagagtctgctgttacttgtggcaagtcagaacaaaattattgccgacagtgtcacctcccaggtccacaatatctattcattggtcgagaatggttcttacattgtagctgttgattttgattcaattagtggtcgtatcttttggtctgatgcaactcagggtaaaacctggagtgcgtttcaaaatggaacggacagaagagtggtatttgacagtagcatcatcttgactgaaactattgcaatagattgggtaggtcgtaatctttactggacagactatgctctggaaacaattgaagtctccaaaattgatgggagccacaggactgtgctgattagtaaaaacctaacaaatccaagaggactagcattagatcccagaatgaatgagcatctactgttctggtctgactggggccaccaccctcgcatcgagcgagccagcatggacggcagcatgcgcactgtcattgtccaggacaagatcttctggccctgcggcttaactattgactaccccaacagactgctctacttcatggactcctatcttgattacatggacttttgtgattataatggacaccatcggagacaggtgatagccagtgatttgattatacggcacccctatgccctaactctctttgaagactctgtgtactggactgaccgtgctactcgtcgggttatgcgagccaacaagtggcatggagggaaccagtcagttgtaatgtataatattcaatggccccttgggattgttgcggttcatccttcgaaacaaccaaattccgtgaatccatgtgccttttcccgctgcagccatctctgcctgctttcctcacaggggcctcatttttactcctgtgtttgtccttcaggatggagtctgtctcctgatctcctgaattgcttgagagatgatcaacctttcttaataactgtaaggcaacatataatttttggaatctcccttaatcctgaggtgaagagcaatgatgctatggtccccatagcagggatacagaatggtttagatgttgaatttgatgatgctgagcaatacatctattgggttgaaaatccaggtgaaattcacagagtgaagacagatggcaccaacaggacagtatttgcttctatatctatggtggggccttctatgaacctggccttagattggatttcaagaaacctttattctaccaatcctagaactcagtcaatcgaggttttgacactccacggagatatcagatacagaaaaacattgattgccaatgatgggacagctcttggagttggctttccaattggcataactgttgatcctgctcgtgggaagctgtactggtcagaccaaggaactgacagtggggttcctgccaagatcgccagtgctaacatggatggcacatctgtgaaaactctctttactgggaacctcgaacacctggagtgtgtcactcttgacatcgaagagcagaaactctactgggcagtcactggaagaggagtgattgaaagaggaaacgtggatggaacagatcgaatgatcctggtacaccagctttcccacccctggggaattgcagtccatgattctttcctttattatactgatgaacagtatgaggtcattgaaagagttgataaggccactggggccaacaaaatagtcttgagagataatgttccaaatctgaggggtcttcaagtttatcacagacgcaatgccgccgaatcctcaaatggctgtagcaacaacatgaatgcctgtcagcagatttgcctgcctgtaccaggaggattgttttcctgcgcctgtgccactggatttaaactcaatcctgataatcggtcctgctctccatataactctttcattgttgtttcaatgctgtctgcaatcagaggctttagcttggaattgtcagatcattcagaaaccatggtgccggtggcaggccaaggacgaaacgcactgcatgtggatgtggatgtgtcctctggctttatttattggtgtgattttagcagctcagtggcatctgataatgcgatccgtagaattaaaccagatggatcttctctgatgaacattgtgacacatggaataggagaaaatggagtccggggtattgcagtggattgggtagcaggaaatctttatttcaccaatgcctttgtttctgaaacactgatagaagttctgcggatcaatactacttaccgccgtgttcttcttaaagtcacagtggacatgcctaggcatattgttgtagatcccaagaacagatacctcttctgggctgactatgggcagagaccaaagattgagcgttctttccttgactgtaccaatcgaacagtgcttgtgtcagagggcattgtcacaccacggggcttggcagtggaccgaagtgatggctacgtttattgggttgatgattctttagatataattgcaaggattcgtatcaatggagagaactctgaagtgattcgttatggcagtcgttacccaactccttatggcatcactgtttttgaaaattctatcatatgggtagataggaatttgaaaaagatcttccaagccagcaaggaaccagagaacacagagccacccacagtgataagagacaatatcaactggctaagagatgtgaccatctttgacaagcaagtccagccccggtcaccagcagaggtcaacaacaacccttgcttggaaaacaatggtgggtgctctcatctctgctttgctctgcctggattgcacaccccaaaatgtgactgtgcctttgggaccctgcaaagtgatggcaagaattgtgccatttcaacagaaaatttcctcatctttgccttgtctaattccttgagaagcttacacttggaccctgaaaaccatagcccacctttccaaacaataaatgtggaaagaactgtcatgtctctagactatgacagtgtaagtgatagaatctacttcacacaaaatttagcctctggagttggacagatttcctatgccaccctgtcttcagggatccatactccaactgtcattgcttcaggtatagggactgctgatggcattgcctttgactggattactagaagaatttattacagtgactacctcaaccagatgattaattccatggctgaagatgggtctaaccgcactgtgatagcccgcgttccaaaaccaagagcaattgtgttagatccctgccaagggtacctgtactgggctgactgggatacacatgccaaaatcgagagagccacattgggaggaaacttccgcgtacccattgtgaacagcagtctggtcatgcccagtgggctgactctggactatgaagaggaccttctctactgggtggatgctagtctgcagaggattgaacgcagcactctgacgggcgtggatcgtgaagtcattgtcaatgcagccgttcatgcttttggcttgactctctatggccagtatatttactggactgacttgtacacacaaagaatttaccgagctaacaaatatgacgggtcaggtcagattgcaatgaccacaaatttgctctcccagcccaggggaatcaacactgttgtgaagaaccagaaacaacagtgtaacaatccttgtgaacagtttaatgggggctgcagccatatctgtgcaccaggtccaaatggtgccgagtgccagtgtccacatgagggcaactggtatttggccaacaacaggaagcactgcattgtggacaatggtgaacgatgtggtgcatcttccttcacctgctccaatgggcgctgcatctcggaagagtggaagtgtgataatgacaacgactgtggggatggcagtgatgagatggaaagtgtctgtgcacttcacacctgctcaccgacagccttcacctgtgccaatgggcgatgtgtccaatactcttaccgctgtgattactacaatgactgtggtgatggcagtgatgaggcagggtgcctgttcagggactgcaatgccaccacggagtttatgtgcaataacagaaggtgcatacctcgtgagtttatctgcaatggtgtagacaactgccatgataataacacttcagatgagaaaaattgccctgatcgcacttgccagtctggatacacaaaatgtcataattcaaatatttgtattcctcgcgtttatttgtgtgacggagacaatgactgtggagataacagtgatgaaaaccctacttattgcaccactcacacgtgcagcagcagtgagttccaatgcgcatctgggcgctgtattcctcaacattggtattgtgatcaagaaacagattgttttgatgcctctgatgaacctgcctcttgtggtcactctgagcgaacatgcctagctgatgagttcaagtgtgatggtgggaggtgcatcccaagcgaatggatctgtgacggtgataatgactgtggggatatgagtgacgaggataaaaggcaccagtgtcagaatcaaaactgctcggattccgagtttctctgtgtaaatgacagacctccggacaggaggtgcattccccagtcttgggtctgtgatggcgatgtggattgtactgacggctacgatgagaatcagaattgcaccaggagaacttgctctgaaaatgaattcacctgtggttacggactgtgtatcccaaagatattcaggtgtgaccggcacaatgactgtggtgactatagcgacgagaggggctgcttataccagacttgccaacagaatcagtttacctgtcagaacgggcgctgcattagtaaaaccttcgtctgtgatgaggataatgactgtggagacggatctgatgagctgatgcacctgtgccacaccccagaacccacgtgtccacctcacgagttcaagtgtgacaatgggcgctgcatcgagatgatgaaactctgcaaccacctagatgactgtttggacaacagcgatgagaaaggctgtggcattaatgaatgccatgacccttcaatcagtggctgcgatcacaactgcacagacaccttaaccagtttctattgttcctgtcgtcctggttacaagctcatgtctgacaagcggacttgtgttgatattgatgaatgcacagagatgccttttgtctgtagccagaagtgtgagaatgtaataggctcctacatctgtaagtgtgccccaggctacctccgagaaccagatggaaagacctgccggcaaaacagtaacatcgaaccctatctcatttttagcaaccgttactatttgagaaatttaactatagatggctatttttactccctcatcttggaaggactggacaatgttgtggcattagattttgaccgagtagagaagagattgtattggattgatacacagaggcaagtcattgagagaatgtttctgaataagacaaacaaggagacaatcataaaccacagactaccagctgcagaaagtctggctgtagactgggtttccagaaagctctactggttggatgcccgcctggatggcctctttgtctctgacctcaatggtggacaccgccgcatgctggcccagcactgtgtggatgccaacaacaccttctgctttgataatcccagaggacttgcccttcaccctcaatatgggtacctctactgggcagactggggtcaccgcgcatacattgggagagtaggcatggatggaaccaacaagtctgtgataatctccaccaagttagagtggcctaatggcatcaccattgattacaccaatgatctactctactgggcagatgcccacctgggttacatagagtactctgatttggagggccaccatcgacacacggtgtatgatggggcactgcctcaccctttcgctattaccatttttgaagacactatttattggacagattggaatacaaggacagtggaaaagggaaacaaatatgatggatcaaatagacagacactggtgaacacaacacacagaccatttgacatccatgtgtaccatccatataggcagcccattgtgagcaatccctgtggtaccaacaatggtggctgttctcatctctgcctcatcaagccaggaggaaaagggttcacttgcgagtgtccagatgacttccgcacccttcagctgagtggcagcacctactgcatgcccatgtgctccagcacccagttcctgtgcgctaacaatgaaaagtgcattcctatctggtggaaatgtgatggacagaaagactgctcagatggctctgatgaactggccctttgcccgcagcgcttctgccgactgggacagttccagtgcagtgacggcaactgcaccagcccgcagactttatgcaatgctcaccaaaattgccctgatgggtctgatgaagaccgtcttctttgtgagaatcaccactgtgactccaatgaatggcagtgcgccaacaaacgttgcatcccagaatcctggcagtgtgacacatttaacgactgtgaggataactcagatgaagacagttcccactgtgccagcaggacctgccggccgggccagtttcggtgtgctaatggccgctgcatcccgcaggcctggaagtgtgatgtggataatgattgtggagaccactcggatgagcccattgaagaatgcatgagctctgcccatctctgtgacaacttcacagaattcagctgcaaaacaaattaccgctgcatcccaaagtgggccgtgtgcaatggtgtagatgactgcagggacaacagtgatgagcaaggctgtgaggagaggacatgccatcctgtgggggatttccgctgtaaaaatcaccactgcatccctcttcgttggcagtgtgatgggcaaaatgactgtggagataactcagatgaggaaaactgtgctccccgggagtgcacagagagcgagtttcgatgtgtcaatcagcagtgcattccctcgcgatggatctgtgaccattacaacgactgtggggacaactcagatgaacgggactgtgagatgaggacctgccatcctgaatattttcagtgtacaagtggacattgtgtacacagtgaactgaaatgcgatggatccgctgactgtttggatgcgtctgatgaagctgattgtcccacacgctttcctgatggtgcatactgccaggctactatgttcgaatgcaaaaaccatgtttgtatcccgccatattggaaatgtgatggcgatgatgactgtggcgatggttcagatgaagaacttcacctgtgcttggatgttccctgtaattcaccaaaccgtttccggtgtgacaacaatcgctgcatttatagtcatgaggtgtgcaatggtgtggatgactgtggagatggaactgatgagacagaggagcactgtagaaaaccgacccctaaaccttgtacagaatatgaatataagtgtggcaatgggcattgcattccacatgacaatgtgtgtgatgatgccgatgactgtggtgactggtccgatgaactgggttgcaataaaggaaaagaaagaacatgtgctgaaaatatatgcgagcaaaattgtacccaattaaatgaaggaggatttatctgctcctgtacagctgggttcgaaaccaatgtttttgacagaacctcctgtctagatatcaatgaatgtgaacaatttgggacttgtccccagcactgcagaaataccaaaggaagttatgagtgtgtctgtgctgatggcttcacgtctatgagtgaccgccctggaaaacgatgtgcagctgagggtagctctcctttgttgctactgcctgacaatgtccgaattcgaaaatataatctctcatctgagaggttctcagagtatcttcaagatgaggaatatatccaagctgttgattatgattgggatcccaaggacataggcctcagtgttgtgtattacactgtgcgaggggagggctctaggtttggtgctatcaaacgtgcctacatccccaactttgaatccggccgcaataatcttgtgcaggaagttgacctgaaactgaaatacgtaatgcagccagatggaatagcagtggactgggttggaaggcatatttactggtcagatgtcaagaataaacgcattgaggtggctaaacttgatggaaggtacagaaagtggctgatttccactgacctggaccaaccagctgctattgctgtgaatcccaaactagggcttatgttctggactgactggggaaaggaacctaaaatcgagtctgcctggatgaatggagaggaccgcaacatcctggttttcgaggaccttggttggccaactggcctttctatcgattatttgaacaatgaccgaatctactggagtgacttcaaggaggacgttattgaaaccataaaatatgatgggactgataggagagtcattgcaaaggaagcaatgaacccttacagcctggacatctttgaagaccagttatactggatatctaaggaaaagggagaagtatggaaacaaaataaatttgggcaaggaaagaaagagaaaacgctggtagtgaacccttggctcactcaagttcgaatctttcatcaactcagatacaataagtcagtgcccaacctttgcaaacagatctgcagccacctctgccttctgagacctggaggatacagctgtgcctgtccccaaggctccagctttatagaggggagcaccactgagtgtgatgcagccatcgaactgcctatcaacctgccccccccatgcaggtgcatgcacggaggaaattgctattttgatgagactgacctccccaaatgcaagtgtcctagcggctacaccggaaaatattgtgaaatggcgttttcaaaaggcatctctccaggaacaaccgcagtagctgtgctgttgacaatcctcttgatcgtcgtaattggagctctggcaattgcaggattcttccactatagaaggaccggctcccttttgcctgctctgcccaagctgccaagcttaagcagtctcgtcaagccctctgaaaatgggaatggggtgaccttcagatcaggggcagatcttaacatggatattggagtgtctggttttggacctgagactgctattgacaggtcaatggcaatgagtgaagactttgtcatggaaatggggaagcagcccataatatttgaaaacccaatgtactcagccagagacagtgctgtcaaagtggttcagccaatccaggtgactgtatctgaaaatgtggataataagaattatggaagtcccataaacccttctgagatagttccagagacaaacccaacttcaccagctgctgatggaactcaggtgacaaaatggaatctcttcaaacgaaaatctaaacaaactaccaactttgaaaatccaatctatgcacagatggagaacgagcaaaaggaaagtgttgctgcgacaccacctccatcaccttcgctccctgctaagcctaagcctccttcgagaagagacccaactccaacctattctgcaacagaagacacttttaaagacaccgcaaatcttgttaaagaagactctgaagtatagctataccagctatttagggaataattagaaacacacttttgcacatatattttttacaaacagatgaaaaaagttaacattcagtactttatgaaaaaaatatatttttccctgtttgcctatagttggaggtatcctgtgtgtctttttttacttatgccgtctcatatttttacaaataattatcacaatgtactatatgtatatctttgcactgaagttgtctgaaggtaatactataaatatattgtatatttgtaaattttggaaagattatcctgttactgaatttgctaataaagatgtctgctgatttggttggtgatcattatagtaaatgatccaacaagaaaaggaattgactggggacctttagccgtgtctaaagaagaggcaccactcatatttcctataaaattatctaggaaaggaatccaggccccgctcttgggtccatttttacacattagcacttaattaatgttcaatattacatgtcaatttgattaatggctatgttgataggggccactatgtgttgtatagacatctggacttgactgtagactcctcagataatacagaaggtaggaaaagcaattcagtttggcccttctgtgtgttggcattgtctaaccagaactctctgtttcatgtgtgttctctcactagctgccaagacaacatttttatttgtgatgtctatgaggaaatcccatatcattaagtgccagtgtcctgcattgagtttgtggttaattaaatgagctcttctgctgatggaccctggagcaatttctcccctcacctgacattcaaggtggtcacctgccctagtagttggagctcagtagctgaatttctgaaaccaaatctgtgtcttcataaaataaggtgcaaaaaaaaaaaataccagttaagtaaagcctcaactgggtttttgtttctatgaaaatatcattataatcactatttatttcctaagttgaacctgaatagaaagggaaaccattcttattaagctttttattaggccctgtggctaaatgtgtacatttatattagaatgtactgtacagtccagatcttttctttaattcttattggttttttttttttttttttttttagagatggagtcttgctatattgccaaggctgatcttgaagtcctgggctcaagtgatcctcccacctcagcctcctgagtggttggggttacgggcgtgagccactgtgcctggcttccagctctcctcttaaatagtgggtatagtctgcacaacaggaaccatggcaggaatatacactttcccatagcaaatagcatacctgactctctgtgctaatattgcacatttgttaaacaatgaatgaatggatggatggatggatggatgaatgaatgaaacatatactactgattattttattccagagttctcaaaatatttgttgctgatattttgagtgctgactgtaattactttgattagataaacaactggaaataatgctgctgaaaaagttctaataaatgtgtattttatcaga

SEQ ID NO: 11667 - DNA, 556 bp, Homo sapiens
  source 1..556: mol_type = unassigned DNA
agtagaagcctaagaacataacagctagtgaatgatttgctttttcctttcaggtgtcctagcggctacaccggaaaatattgtgaaatggcgttttcaaaaggcatctctccaggaacaaccgcagtagctgtgctgttgacaatcctcttgatcgtcgtaattggagctctggcaattgcaggattcttccactatagaaggaccggctcccttttgcctgctctgcccaagctgccaagcttaagcagtctcgtcaagccctctgaaaatgggaatggggtgaccttcagatcaggggcagatcttaacatggatattggagtgtctggttttggacctgagactgctattgacaggtcaatggcaatgagtgaagactttgtcatggaaatggggaagcagcccataatatttgaaaacccaatgtactcagccagagacagtgctgtcaaagtggttcagccaatccaggtgactgtatctgaaaatgtggataataagaattatggaagtcccataaacccttctgagatagttccagagacaaacccaa

SEQ ID NO: 11668 - DNA, 557 bp, Homo sapiens
  source 1..557: mol_type = unassigned DNA
tttgcctgaagaaaggtgacttctaacaactgtctgtgattctcagaaagctctactggttggatgcccgcctggatggcctctttgtctctgacctcaatggtggacaccgccgcatgctggcccagcactgtgtggatgccaacaacaccttctgctttgataatcccagaggacttgcccttcaccctcaatatgggtacctctactgggcagactggggtcaccgcgcatacattgggagagtaggcatggatggaaccaacaagtctgtgataatctccaccaagttagagtggcctaatggcatcaccattgattacaccaatgatctactctactgggcagatgcccacctgggttacatagagtactctgatttggagggccaccatcgacacacggtgtatgatggggcactgcctcaccctttcgctattaccatttttgaagacactatttattggacagattggaatacaaggacagtggaaaagggaaacaaatatgatggatcaaatagacagacactggtgaacacaacacacagaccattt

SEQ ID NO: 11669 - DNA, 4007 bp, Homo sapiens
  source 1..4007: mol_type = unassigned DNA
aggcttttggccactaggagctggcggaggtgcagacctaaaggagcgttcgctagcagaggcgctgccggtgcggtgtgctacgcgcgcccacctcccggggaaggaacggcgaggccggggaccgtcgcggagatggatcgcgggccggcagcagtggcgtgcacgctgctcctggctctcgtcgcctgcctagcgccggccagtggccaagaatgtgacagtgcgcattttcgctgtggaagtgggcattgcatccctgcagactggaggtgtgatgggaccaaagactgttcagatgacgcggatgaaattggctgcgctgttgtgacctgccagcagggctatttcaagtgccagagtgagggacaatgcatccccaactcctgggtgtgtgaccaagatcaagactgtgatgatggctcagatgaacgtcaagattgctcacaaagtacatgctcaagtcatcagataacatgctccaatggtcagtgtatcccaagtgaatacaggtgcgaccacgtcagagactgccccgatggagctgatgagaatgactgccagtacccaacatgtgagcagcttacttgtgacaatggggcctgctataacaccagtcagaagtgtgattggaaagttgattgcagggactcctcagatgaaatcaactgcactgagatatgcttgcacaatgagttttcatgtggcaatggagagtgtatccctcgtgcttatgtctgtgaccatgacaatgattgccaagacggcagtgacgaacatgcttgcaactatccgacctgcggtggttaccagttcacttgccccagtggccgatgcatttatcaaaactgggtttgtgatggagaagatgactgtaaagataatggagatgaagatggatgtgaaagcggtcctcatgatgttcataaatgttccccaagagaatggtcttgcccagagtcgggacgatgcatctccatttataaagtttgtgatgggattttagattgcccaggaagagaagatgaaaacaacactagtaccggaaaatactgtagtatgactctgtgctctgccttgaactgccagtaccagtgccatgagacgccgtatggaggagcgtgtttttgtcccccaggttatatcatcaaccacaatgacagccgtacctgtgttgagtttgatgattgccagatatggggaatttgtgaccagaagtgtgaaagccgacctggccgtcacctgtgccactgtgaagaagggtatatcttggagcgtggacagtattgcaaagctaatgattcctttggcgaggcctccattatcttctccaatggtcgggatttgttaattggtgatattcatggaaggagcttccggatcctagtggagtctcagaatcgtggagtggccgtgggtgtggctttccactatcacctgcaaagagttttttggacagacaccgtgcaaaataaggttttttcagttgacattaatggtttaaatatccaagaggttctcaatgtttctgttgaaaccccagagaacctggctgtggactgggttaataataaaatctatctagtggaaaccaaggtcaaccgcatagatatggtaaatttggatggaagctatcgggttacccttataactgaaaacttggggcatcctagaggaattgccgtggacccaactgttgggaagactgtagttcatggaggctccctcattcctcatccctttggagtaagcttatttgaaggtcaggtgttctttacagattggacaaagatggccgtgctgaaggcaaacaagttcacagagaccaacccacaagtgtactaccaggcttccctgaggccctatggagtgactgtttaccattccctcagacagccctatgctaccaatccgtgtaaagataacaatgggggctgtgagcaggtctgtgtcctcagccacagaacagataatgatggtttgggtttccgttgcaagtgcacattcggcttccaactggatacagatgagcgccactgcattggaagagaaattctcgcagctaacagggtggaaaatgttgaaagtttggcttttgattggatttcaaagaatctctattggacagactctcattacaagagtatcagtgtcatgaggctagctgataaaacgagacgcacagtagttcagtatttaaataacccacggtcggtggtagttcatccttttgccgggtatctattcttcactgattggttccgtcctgctaaaattatgagagcatggagtgacggatctcacctcttgcctgtaataaacactactcttggatggcccaatggcttggccatcgattgggctgcttcacgattgtactgggtagatgcctattttgataaaattgagcacagcacctttgatggtttagacagaagaagactgggccatatagagcagatgacacatccgtttggacttgccatctttggagagcatttattttttactgactggagactgggtgccattattcgagtcaggaaagcagatggtggagaaatgacagttatccgaagtggcattgcttacatactgcatttgaaatcgtatgatgtcaacatccagactggttctaacgcctgtaatcaacccacgcatcctaacggtgactgcagccacttctgcttcccggtgccaaatttccagcgagtgtgtgggtgcccttatggaatgaggctggcttccaatcacttgacatgcgagggggacccaaccaatgaaccacccacagagcagtgtggcttattttccttcccctgtaaaaatggcagatgtgtgcccaattactatctctgtgatggagtcgatgattgtcatgataacagtgatgagcaactatgtggcacacttaataatacctgttcatcttcggcgttcacctgtggccatggggagtgcattcctgcacactggcgctgtgacaaacgcaacgactgtgtggatggcagtgatgagcacaactgccccacccacgcacctgcttcctgccttgacacccaatacacctgtgataatcaccagtgtatctcaaagaactgggtctgtgacacagacaatgattgtggggatggatctgatgaaaagaactgcaattcgacagagacatgccaacctagtcagtttaattgccccaatcatcgatgtattgacctatcgtttgtctgtgatggtgacaaggattgtgttgatggatctgatgaggttggttgtgtattaaactgtactgcttctcaattcaagtgtgccagtggggataaatgtattggcgtcacaaatcgttgtgatggtgtttttgattgcagtgacaactcggatgaagcaggctgtccaaccaggcctcctggtatgtgccactcagatgaatttcagtgccaagaagatggtatctgcatcccgaacttctgggaatgtgatgggcatccagactgcctctatggatctgatgagcacaatgcctgtgtccccaagacttgcccttcatcatatttccactgtgacaacggaaactgcatccacagggcatggctctgtgatcgggacaatgactgcggggatatgagtgatgagaaggactgccctactcagccctttcgctgtcctagttggcaatggcagtgtcttggccataacatctgtgtgaatctgagtgtagtgtgtgatggcatctttgactgccccaatgggacagatgagtccccactttgcagtaagtttcctgaccacagtttactggccataaactcattctgaacagtagcctggtgtgcatcaccattgtcacagtcactgtgtagctttgtaggaaggatttcagttcctctatgagttcacatctgtgtagggggtaaccataattgaattcaaatacatcaccattggataattttctgattaaatcctttgtacttggttatgtgtttttacttctttttatgtctttgttt

SEQ ID NO: 11670 - DNA, 567 bp, Homo sapiens
  source 1..567: mol_type = unassigned DNA
atttgtgacaagaaattatttagcttttcaggcatttaattgaactaactacagctttaattataataaagcaaaactaacaaattgtatgatatatatgtgtcttttataacaggaagactgtagttcatggaggctccctcattcctcatccctttggagtaagcttatttgaaggtcaggtgttctttacagattggacaaagatggccgtgctgaaggcaaacaagttcacagagaccaacccacaagtgtactaccaggcttccctgaggccctatggagtgactgtttaccattccctcagacagccctatgctaccaatccgtgtaaagataacaatgggggctgtgagcaggtctgtgtcctcagccacagaacagataatgatggtttgggtttccgttgcaagtgcacattcggcttccaactggatacagatgagcgccactgcattgctgttcagaatttcctcattttttcatcccaagttgctattcgtgggatcccgttcaccttgtctacccaggaagatgtcatggttccagtttcggggaatccttctt

SEQ ID NO: 11671 - DNA, 7819 bp, Homo sapiens
  source 1..7819: mol_type = unassigned DNA
gctggagtccgccggcggcctcgccgctgccggccgctcacggaggaactacaattcccaggagaccgcgcggtgggtgggggcggggtagtgggcggggcatcggcaggctaggttttctccgcgcagcgccagtcgcagaggaagatggcgccgcggagggtcaggtcgtttctgcgcgggctcccggcgctgctactgctgctgctcttcctcgggccctggcccgctgcgagccacggcggcaagtactcgcgggagaagaaccagcccaagccgtccccgaaacgcgagtccggagaggagttccgcatggagaagttgaaccagctgtgggagaaggcccagcgactgcatcttcctcccgtgaggctggccgagctccacgctgatctgaagatacaggagagggacgaactcgcctggaagaaactaaagcttgacggcttggacgaagatggggagaaggaagcgagactcatacgcaacctcaatgtcatcttggccaagtatggtctggacggaaagaaggacgctcggcaggtgaccagcaactccctcagtggcacccaggaagacgggctggatgaccccaggctggaaaagctgtggcacaaggcgaagacctctgggaaattctccggcgaagaactggacaagctctggcgggagttcctgcatcacaaagagaaagttcacgagtacaacgtcctgctggagaccctgagcaggaccgaagaaatccacgagaacgtcattagcccctcggacctgagcgacatcaagggcagcgtcctgcacagcaggcacacggagctgaaggagaagctgcgcagcatcaaccagggcctggaccgcctgcgcagggtcagccaccagggctacagcactgaggctgagttcgaggagcccagggtgattgacctgtgggacctggcgcagtccgccaacctcacggacaaggagctggaggcgttccgggaggagctcaagcacttcgaagccaaaatcgagaagcacaaccactaccagaagcagctggagattgcgcacgagaagctgaggcacgcagagagcgtgggcgacggcgagcgtgtgagccgcagccgcgagaagcacgccctgctggaggggcggaccaaggagctgggctacacggtgaagaagcatctgcaggacctgtccggcaggatctccagagctcggcacaacgaactctgaaggcattggggagcccagcccggcagggaagaggccagcgtgaaggacctgggctcttggccgtggcatttccgtggacagcccgccgtcagggtggctggggctggcacgggtgtcgaggcaggaaggattgtttctggtgactgcagccgctgccgtcgcgacacagggcttggtggtggtagcatttgggtctgagatcggcccagctctgactgaaggggcttggcttccactcagcatcagcgtggcagtcaccaccccagtgaggacctcgatgtccagctgctgtcaggtctgatagtcctctgctaaaacaacacgatttacataaaaaatcttacacatctgccaccggaaataccatgcacagagtccttaaaaaatagagtgcagtatttaaaccacccgcttgttggctggtcactaagtgtcctggtggctggggccggagccagtgctcttgaagggatcgcgtcatagccagcttcccctctgggccctgtgggtctttgcagccaacctccttttcccgtgagacggcccggcctgatttaaagccaagagcgcttgagttgagtttgaggggaagatgtggagcgtgtggttctgtggacagtcagagactgtggcctgggggcagcgtctttcaactctcacctctgcagctcagggacctcgggagacctcaccaaacctgcagggcctccgtgtccctaagtgtgctgtgtaaatgccccatctcatgggggagagacagccacggaggccttcctctgaccatagctgatggactggcggttgctcaggtccggctccgagaatgttcctgtgtctgagcctggaagaggctcgggtctggctccaggcgtggttcccttcccgtgtctgagcctggaagaggctcgggtccggctccgagcgtggttcccttcccgtgtctgagcctggaagaggctcgggtccggctccgagcgtggttcccttcccgtgtctgagcctggaagaggctcgggtccggctccgagcgtggttcccttcccgtgtctgagcctggaagaggctcgggtccggctccgagcgtggttcccttcccgtgtctgagcctggaagaggctcgggtccggctctgggcgtggttcccttcccgtgtctgagcctggaagaggctcgggtccggctctgggcgtggttcccgtgtctgagcctggaagaggctcgggtccgggtccagctccgagcgtggttcccgtgtttgaacctggaagaggctccaccaggcgtattgtgttttgactgcagctggatcttggcttgactgttgagatctgccaaacatccgctaagctatcatttctgagaaaggtcaaggctagaggcagcatgtcgggagttggcgcatcagggttggaagggccccagggtacagcatgtgggtgcctgttcctttgtggacttgtgtgtgtgtggctggtggggcggggggtggattctggttcttttttttcccattatcctgagagccttaaggtactcagtgtgttggtgagactcagccctgtcatctagcagaagtgtgttccttttcattgctgtatagtattccattgcatgactgtcctgtgctctgattttaatgcactttattgtgggtggatatttgagttgcttcctttctggggtaataacactcacttggaaatagctgtggtgaacactcgtgtgggggtgggggtgggggccaactctaggagcacctaatggatcttacgaagcgtgttgtccaagtatagagatgattccaaagtggttggactgtgtttctttctcccagctgggtggaaggagaacactagtggattgctgagacttggtgctcggtatttttaattatggacagcctggctggcgttttgtggtgtctaattgcggagtagcgtgtcttactgtataatggcctcttttgtatgtgggagaccatggtgttgaggggaggcagttacacaaaaaacccagataccgagtgttagttccatgggtgtggctggtcatggtgcgcactcacgaaggatgtaggtgatgccctccactccgcagagccagtcccacaggggtacccattctgactcctaccaccgcagctccctacctcccgcctgccatgggttccacgtgcatggctctgggcagtctgtgtctttgcgtgcgtctgtgtatgtctgcgtgtatctgcttacattcgctcagcatctgagattcacccaggcttttgcgtggatcagcggcagactcctgattgccgcgtggcggcctgttgtgtgggtgtgtgccgcgtgtgtatccagtccctactcaggagtgtacgtttccagtgtgggttgcagtcaggatccatttctcccttaactttcagattatttgctgcataggcttttttctcctaatttggcgcctttgtcagaaatcaactgacctacctgtgtgggtctgtttctgtttgtccttacgctcttgccattgccacactttagacaaggtcttgctctgtccctcaggctggagtgcagtagcgtgatctcagctcactgcacccttgacctcccatactccagcaatcccctcgcctcagtctcctgagtagtagctgcgaccacaggcgtgtgtcaccacacccggctgattttattttttttatttttattttttttgtagagacggggttttactatgttgcccaggcaggtcttgatctgggctcaagtgatgctcctgtctcagcctcccaaactactgggattacaggttgtaggtgtgagccatggtgcccggccgccacactgtcttggctacagttgggtttataataaaccctgaatcgaggtgatgtgcattttccaactcttctttttaaagattcttgtggctgtttatgtccttggtgtttccatatatgttttacaatcagtgtctcaatttctaccaaaaaaacatgccttctggaatttcaatagcaattcccttgaacgcatttttgaataccttttctgaatgtcttgaatacatgttgggaagaatcggtgtcttaacagtctccagtgtccacgcgttgactgccgtgtgtgactccagtcggcgtctcaacagtctccagtgtccacgcgttgactgccgtgtgtgactccagtcggcgtctcagcagtctccagtgtccacgcgttgactgccgtgtgtgactccagtcggcgtctcagcagtctccagtgtccacgcgttgactgccgtgtgtgactccagtcggcgtctcagcagtctccggtgtccacgcgttgactgccgtgtgtgactccagtcggcgtctcaacagtctccggtgtccacgcgttgactgccgtgtgtgactccagtcggcgtctcaacagtctccggtgtccacgcgttgactgccgtgtgtgactccagtcggcgtctcaacagtctccggtgtccacgcgttgactgccgtgtgtgactccagtcggcgtctcaacagtctccggtgtccacgcgttgactgccgtgtgtgactccagtcggcgtctcaacagtctccggtgtccacgcgttgactgccgtgtgtgactccagtcggcgtctcaacagtctccggtgtccacgcgttgactgccgtgtgtgactccagtcggcgtctcaacagtctccggtgtccacgcgttgactgccgtgtgtgactccagtcggcgtctcaacagtctccggtgtccatgcgttgactgccatgtatgactccaggtattgagttcatcttcaacttctcccaacaatgaactggagttttctgtgcatgtgtctggcatgttttcctttagatctagtcctaggtgttcgatatgctattgaggactgtgtatttttatttcatttgtcacctgtgcgtggtgctttaatcctgtgccctaaactcccgccttggccatggcggtgtttctgtggactcgtggggtttccgtgtgcacacgcgtgtcctctgtctgacagtggctttgcttccccttgtcagtctgtgcctcggcttctcactgcactggtgaggtgagccggcgctcgctaatcttattcccagtctcggtgaacatgggctcagtctctcccggctcagtgttgggtttgcactggtgcacttacaggcagaagagcttcctcatttgctgagggcttttcctgaatccgtgttgaatgtggtcagctgcctttcctgcacctagtgagatgctcatgaggtcacttccttaccgcattactgtagtgaattacgctgactttcatatgccaagatgacctggcatttccaggtaagtccctgtggccatggtgcattggccttttctctgcatggccagatgagatttgctcataccgggctaaggacctcctgtgtaggaatgctcttgagggacactgggcttggatgttcattgtcttgtcatgtgatgtgtctgtcatggtttgatattgcattaagtgggcctcctgaaacaagttctgccatagtttgtataggattggcattatttgtttcatagagatgtgatgggtgaggccatctatgcctgccattttctttttgcttaggtttttcattaagaacttgatttttaaaaatagacatgaggcctggcatggtggctcacgcttgtaatcccagcactttgggaggccaacgtggatggatcacctgaggtcaggagtttgagaccaacctagtcaacatggtgaaaccccgtctccattaaaaatataaaaattagcagggtgtggtggtgcatgcctgtaatcccagctactctggaggctgaggcaggagaatcacttgaactcaggaggtggaggttgcagtgagctgagatcacaccactgcactccagcctgggcaacagagcgaggctctgtctcaaaaaaaaagacatgaggcttttggattttctgtttcttcctttgtcatttttttaaagataggtttgtcgcagaatttcatctaagttatcaaaacaatttacataaatcattcacagtatcctctgtgcagtgatgtccattctcattcctgctctgggccatttgtgttttcttttccccctgatcagactagctaagagtttatcatttttacagatattttccccaaagaaacctacttttgggtccattgattttttttttctattgttttctttttcattgacttttgctcttttcttatgaatttcctttcttctacctattttgtgttcaatttgctgtccttgttttaggttcttttgatagaggcttagatcattgatgaagaatatgaaagaatgggataatacagttaaaaacttggtctacttatgcccattagagaaaacattcttaagcacgcatggaatcttttaaaaatggacgaggtactaggacccaaagcaaatgtcagtaattcgcagatgataatgtataaatatatgatatgtaggtaaataatacaaatcacattctttggccagagtgcaattgaggaggaaatcagtaacaaaaagacaattaaatccatttgattcttttgttttcgttttgtagtaacttgcacttccctggtgccagaggcatgacacctttttgtctgctcttggccatttgggtggcgtctttgggaagggcctacttaattcttttgcctatttaaaaaactgggtcttggaaatcttgtctttttttttgagtcaggatctttctcgcacaggcttggagtgcagtggtgcgatcatagctcactgcaacctcaaactcctgggctcaagcgagcctcccacctcggtcttctgagtagctgggactacaggcatgcatcactatgctctgctaatttaaagaaaaggttttttttatagagactgggtctcgctgtgttgcccaggctggtctcggagtcctggtctcaagtgattcacctgcctccacctcgcggagtgccaggattacaggtggcgggagccgccacacccagcctggtcttagcgttattcccaggtctaggtgtgagtccttcctcagatatgtgttgtgaataatttccgatcctctggcttgctattttactttcttaatggttatcttttggaaagcaaaggtttccagtttgatgaaatctaatttttattttttatttttccgttctagtggtctttctattttctcatcaaattgagactttggggaaactacacagcagcaaaccaggatatatcctcttaaaaacagctcgagccggccgggtgcggtggctcatgcctggaatcccagcactttgggaggtggaggtgggcggatcacgtgaggtcaggagtttgagaccagcctggccaacatggtgaaaccccatctctactaaaaataaaaaattagccaggcatggtggcaggcacctgtaatcccagctacttgggaggctgaggcaggagaatggcttgaacctgggaggcagaggttgcagtgagccgagatcgcgccattgcactccggcctggggacaagagcaagacttcgcctcaaaaaaaaaaaaaaa

SEQ ID NO: 11672 - DNA, 1078 bp, Homo sapiens
  source 1..1078: mol_type = unassigned DNA
gttggagcggggcccaggggtcggaggcggaggggggcgcagccggggcacctgtgccctacgcgccctgtccttggcacagcctcccccaagtgtcaggtggggcgccccgaccccttctgcagcaggaaaggtacccgtgccggcgacgacgccgtgtgaagcagctgcatcttcctcccgtgaggctggccgagctccacgctgatctgaagatacaggagagggacgaactcgcctggaagaaactaaagcttgacggcttggacgaagatggggagaaggaagcgagactcatacgcaacctcaatgtcatcttggccaagtatggtctggacggaaagaaggacgctcggcaggtgaccagcaactccctcagtggcacccaggaagacgggctggatgaccccaggctggaaaagctgtggcacaaggcgaagacctctgggaaattctccggcgaagaactggacaagctctggcgggagttcctgcatcacaaagagaaagttcacgagtacaacgtcctgctggagaccctgagcaggaccgaagaaatccacgagaacgtcattagcccctcggacctgagcgacatcaagggcagcgtcctgcacagcaggcacacggagctgaaggagaagctgcgcagcatcaaccagggcctggaccgcctgcgcagggtcagccaccagggctacagcactgaggctgagttcgaggagcccagggtgattgacctgtgggacctggcgcagtccgccaacctcacggacaaggagctggaggcgttccgggaggagctcaagcacttcgaagccaaaatcgagaagcacaaccactaccagaagcagctggagattgcgcacgagaagctgaggcacgcagagagcgtgggcgacggcgagcgtgtgagccgcagccgcgagaagcacgccctgctggaggggcggaccaaggagctgggctacacggtgaagaagcatctgcaggacctgtccggcaggatctccagagctcggcacaacgaactctgaaggcattggggagcccagcccggcagggaagaggccagcgt

SEQ ID NO: 11673 - DNA, 1167 bp, Homo sapiens
  source 1..1167: mol_type = unassigned DNA
gaagatggcgccgcggagggtcaggtcgtttctgcgcgggctcccggcgctgctactgctgctgctcttcctcgggccctggcccgctgcgagccacggcggcaagtactcgcgggagaagaaccagcccaagccgtccccgaaacgcgagtccggagaggagttccgcatggagaagttgaaccagctgtgggagaaggcccagcgaaacctcccggtggccagcctcctccgaggtcagtttctcgctgtgtcctggtccgtcctgctcgtggctcacaggctcctccccttcgttcgcagctgcatcttcctcccgtgaggctggccgagctccacgctgatctgaagatacaggagagggacgaactcgcctggaagaaactaaagcttgacggcttggacgaagatggggagaaggaagcgagactcatacgcaacctcaatgtcatcttggccaagtatggtctggacggaaagaaggacgctcggcaggtgaccagcaactccctcagtggcacccaggaagacgggctggatgaccccaggctggaaaagctgtggcacaaggcgaagacctctgggaaattctccggcgaagaactggacaagctctggcgggagttcctgcatcacaaagagaaagttcacgagtacaacgtcctgctggagaccctgagcaggaccgaagaaatccacgagaacgtcattagcccctcggacctgagcgacatcaagggcagcgtcctgcacagcaggcacacggagctgaaggagaagctgcgcagcatcaaccagggcctggaccgcctgcgcagggtcagccaccagggctacagcactgaggctgagttcgaggagcccagggtgattgacctgtgggacctggcgcagtccgccaacctcacggacaaggagctggaggcgttccgggtaaggaaacacggccctctccttctagctctctcctgtggtgaagattctcttgcagtttccgggtaaggaaatgcagccctctcctccaagctctctctctcaagattctcgcagtttcttccttaaccactcggtgaacctgcttgcgttttccttctcatctgcgtgggaactcgtgtttcaggggcggggccaggctctggagggaggggctttggttcttttgtccgt

SEQ ID NO: 11674 - DNA, 1170 bp, Homo sapiens
  source 1..1170: mol_type = unassigned DNA
gcagaggaagatggcgccgcggagggtcaggtcgtttctgcgcgggctcccggcgctgctactgctgctgctcttcctcgggccctggcccgctgcgagccacggcggcaagtactcgcgggagaagaaccagcccaagccgtccccgaaacgcgagtccggagaggagttccgcatggagaagttgaaccagctgtgggagaaggcccagcgactgcatcttcctcccgtgaggctggccgagctccacgctgatctgaagatacaggagagggacgaactcgcctggaagaaactaaagcttgacggcttggacgaagatggggagaaggaagcgagactcatacgcaacctcaatggaaaccatatcaaatagaacctcccctctctcctagtcatcttggccaagtatggtctggacggaaagaaggacgctcggcaggtgaccagcaactccctcagtggcacccaggaagacgggctggatgaccccaggctggaaaagctgtggcacaaggcgaagacctctgggaaattctccggcgaagaactggacaagctctggcgggagttcctgcatcacaaagagaaagttcacgagtacaacgtcctgctggagaccctgagcaggaccgaagaaatccacgagaacgtcattagcccctcggacctgagcgacatcaagggcagcgtcctgcacagcaggcacacggagctgaaggagaagctgcgcagcatcaaccagggcctggaccgcctgcgcagggtcagccaccagggctacagcactgaggctggtgagtgcccgcccgggactgttggttcccgagggtggggccgtctctggttgtgttttggggacaagcaggcaggtgcttgtagcgacgggaacctgggcctgtggacgcagcggagaccctcggcgcgctcagtctacccacgggtggtcacaggcctcgctcccaggagctgctccgtgaaggtcactcgccgtccccagccttgtacctggagactagcagagggcagtggcggcagcgggcctgggagcagcccttcccagcgtctccccagcctcagcagcacggcccctcccgtgctgctgttggccaagaacagagaccactcgtcaaacatagctccgtctccatctcatgccacccacaccgt

SEQ ID NO: 11675 - DNA, 2527 bp, Homo sapiens
  source 1..2527: mol_type = unassigned DNA
acttctggggcagccgtgagcagcgggcacacgggcagccacgaaagcagcagcgagggtggtgcaaacacctcaaaactacaccgaatccagtagcgcctggcgcccccggcgcgcaaggccgcctctactccgcctcatctttgtcccaagtcctttcacagtctgccttcctcaaacggcccgatgcgcccccgtctttgccggagtaagcagaccgccagcagccggcccgcaggtcagtcgaccctctctggatgcaggtcgccgggaaaacccggagcggagcatccctcgggccgggaaacgccctcggcgcgcacccactggcgcgcatgctcagtccgcgcggcggctgcgagtaggaagctccgcgcggcggcgggggcggcgacggcgactggcgggtgggagtggaggcaccggctggcgggcgggggtacagggacggggcaggggctcccgctccaggttccttgaagcacttccgaccgcgaagcccggcgcgagaagcgagctaacccaagagccaacaacgagcgcggagagggcagcggactgagcggagccgccggccagagcgggctcggagcccgggtctccgccgctcgggacccggctaggcggcggcgggggcggcgatgttccactgcatccccctgtggcggtgcaaccgtcatgtggagagcatcgacaagcgccactgctcgctggtctacgtccccgaggagatctaccgctatgcccggagcctggaggagctgctgctggacgccaaccagctccgcgagctgcccgagcaatttttccagctagtcaaattacgaaagcttggacttagtgataatgaaattcagcggctccctccagaaatagcaaacttcatgcagctggtggaactagatgtgtctcgaaatgagattcctgaaattccagaaagcatttcattctgtaaagcactgcaggtagctgacttcagcggaaacccactgactaggttgccagaaagctttcctgaattacagaatttaacatgtctttctgtaaatgacatctcactacagtctctacctgaaaatattggcaatctttataacctggcttcactggaactgagagagaatcttcttacatatcttcctgactctcttacccagctgcgaagactagaagaacttgatttaggaaacaatgaaatatataatttgaatcaattggagccctcttacatctaaaagatctctggttggatggaaatcaactgtcagaattacctcaggaaataggaaatctgaagaacctgctgtgtttagatgtctctgaaaacaggttggaaagacttcctgaagaaatcagtggcctgacttcattaacggatttagtcatttcccagaacttattagaaacgattccggatggcattggaaaactaaagaaactgtcaatcttgaaggtggatcagaatagactcacacagttgcctgaagcagttggggaatgtgaaagtctcactgagttagttcttacagaaaatcagctcctgaccctgcctaaaagcattggaaaactaaagaagttgagcaacttgaatgcagacagaaataaattagtgtccttaccaaaagaggtatgtgcttttagagaaatcacatgataataattatgaagaaataataataatacataagggatcaaaaatgtcaaatgctttgaaaagacgcatgtgttgttttttaaaggtgtgaactctaaatctgtgagtatagagccaactggaggaattatgtcaaagaatgatcatcagtaacattaaggagagttggaaaaggtgaatttataggattttaaatgggagaaagaaagagattgacattttgggtttgatatacagagaatggtgacaccattggcagaaattgataatttgggagtttgacagaggaagtggatgcctttgggtttgatttttgaatttaatgtgaaattaagctccatcccataagcaattggaattataaaaattgatcttgatgcaaccatatttctgggcagagatttacattgggccatgctcatgtcttggatgaggttgaacaaactgttcacaaaggcatacacatagaggaaggtgaatgggaagctaaagccagcttcctaggactttttttttggttagtagtctaagcacgagaaaatgagacatcaccatctgttgtggagagtagctgtatggactgagaggcatttaaattctggcaagggaggtggaaatgctgacaatgaggaggaagcttatagtgggtcaaacaaggaggtgtctagtgtgttgtttaaaaagaaggcttacaattagccaggcgtggtggcgggcgcctgtagtcccagctactcgggaggctgaggcaagagaattgcctgaacccgggaggctaaggttgcagtgagccgagaccacgccactgcactccagcccgggtgacagagcgagactctatctcaaaaaaaaaaaaaaaaaaaaaatgaaaag

SEQ ID NO: 11676 - DNA, 3180 bp, Homo sapiens
  source 1..3180: mol_type = unassigned DNA
ggaagctccgcgcggcggcgggggcggcgacggcgactggcgggtgggagtggaggcaccggctggcgggcgggggtacagggacggggcaggggctcccgctccaggttccttgaagcacttccgaccgcgaagcccggcgcgagaagcgagctaacccaagagccaacaacgagcgcggagagggcagcggactgagcggagccgccggccagagcgggctcggagcccgggtctccgccgctcgggacccggctaggcggcggcgggggcggcgatgttccactgcatccccctgtggcggtgcaaccgtcatgtggagagcatcgacaagcgccactgctcgctggtctacgtccccgaggagatctaccgctatgcccggagcctggaggagctgctgctggacgccaaccagctccgcgagctgcccgagcaatttttccagctagtcaaattacgaaagcttggacttagtgataatgaaattcagcggctccctccagaaatagcaaacttcatgcagctggtggaactagatgtgtctcgaaatgagattcctgaaattccagaaagcatttcattctgtaaagcactgcaggtagctgacttcagcggaaacccactgactaggttgccagaaagctttcctgaattacagaatttaacatgtctttctgtaaatgacatctcactacagtctctacctgaaaatattggcaatctttataacctggcttcactggaactgagagagaatcttcttacatatcttcctgactctcttacccagctgcgaagactagaagaacttgatttaggaaacaatgaaatatataatttgccagaatcaattggagccctcttacatctaaaagatctctggttggatggaaatcaactgtcagaattacctcaggaaataggaaatctgaagaacctgctgtgtttagatgtctctgaaaacaggttggaaagacttcctgaagaaatcagtggcctgacttcattaacggatttagtcatttcccagaacttattagaaacgattccggatggcattggaaaactaaagaaactgtcaatcttgaaggtggatcagaatagactcacacagttgcctgaagcagttggggaatgtgaaagtctcactgagttagttcttacagaaaatcagctcctgaccctgcctaaaagcattggaaaactaaagaagttgagcaacttgaatgcagacagaaataaattagtgtccttaccaaaagagatcggcgggtgctgcagcctcactgtgttctgtgtacgtgacaacagactaactcggatacctgcagaggtgtcacaggcaacagaacttcatgtcctggatgtggcagggaacaggttgctgcatctacctttatccctgactgccttgaagttgaaggctctgtggctatctgacaaccagtcccagcccctgcttacattccagacagacacagactacaccacaggagagaagattttaacctgtgtcttacttcctcagctgccttctgaacctacttgtcaagagaatctgcctcgctgtggtgcactggagaacttggtaaatgatgtctctgatgaagcctggaacgagcgtgctgtcaacagagtcagtgcgatccgatttgtggaggatgagaaagatgaagaagacaatgagacgagaacacttctaaggcgagccactccacacccaggggagttaaagcacatgaaaaagacagtggagaatttacggaatgacatgaatgctgctaaaggactggactcaaacaaaaacgaggtcaatcatgccattgaccgagtgaccacttctgtgtagagtttcacctccaagttttacctcctgtgtcttcctctgctgtcgagacgttcctgtctgcttcccgggagcctcacgtgctccttgtcctaaccagcccccgcgcgccatcttcccgtggagtgtggggaagctgctgtctcccaggaagtgccttactcatcccgcaaccagtcagcgcaccagtggtctcccggtgtgattttttttttttttaatttcagttgtttgtaataagtagaatacactactgtaaacatacgacctttgtttttgtcttatgttggggtaaaggaaagcaggaaggggaatttttatcctcctcccttccgtaaagtgctgggatattttgaatcccccaagttcccttggacctactgatgagagatagttttatgtatggggaaaaatggatactttttaaaccttttttggcagctcagatggtgtaaattttaaaattttgtataggtatttcataacaaaaatatgtatttcttttttgttattttatcttgaaaacggtacatattttagtatttgtgcagaaaaacaagtcctaaagtatttgtttttatttgtaccatccacttgtgccttactgtatcctgtgtcatgtccaatcagttgtaaacaatggcatctttgaacagtgtgatgagaataggaatgtggtgttttaaagcagtgttgcattttaatcagtaatctacctggtggatttgtttttaaccaaaaagatgaattatcaatgatttgtaattatatcagttgattttttttgaaaagatgaaccaaaggatttgactgctaatattttattccttacactttttttctgaataagtctctcataatgagtgcagtgtcagactgtgcctactctgatggtatgtgccatttgtaaaataaaatagagcagaaaaacacaaaaagagaacactggttcagacattcagtgggcaagtaaattatggactgcaaaataatgatttttattcaagaaagctttaaaagttttatatccagatatacaaccacaataaagcaaaataacctactatcaaaatagaaatgttgctatctttataagtgcaatttaatttgtaaatagagtttgaatcaaagtatcacaaaatactgcttcaagatttaattttaaatctgctaatttaagggatattgggaaaagttttggtgtgtttctgttgatttcttttttgtatgctgtgataaaagagaaatgaaaagtgccagtcactgtgtggtgtctaggaaaatcatatatatttttttctccaagaaataaattcatcctggacattggc

SEQ ID NO: 11677 - DNA, 808 bp, Homo sapiens
  source 1..808: mol_type = unassigned DNA
ccttgaagcacttccgaccgcgaagcccggcgcgagaagcgagctaacccaagagccaacaacgagcgcggagagggcagcggactgagcggagccgccggccagagcgggctcggagcccgggtctccgccgctcgggacccggctaggcggcggcgggggcggcgatgttccactgcatccccctgtggcggtgcaaccgtcatgtggagagcatcgacaagcgccactgctcgctggtctacgtccccgaggagatctaccgctatgcccggagcctggaggagctgctgctggacgccaaccagctccgcgagctgcccgagcaatttttccagctagtcaaattacgaaagcttggacttagtgataatgaaattcagcggctccctccagaaatagcaaacttcatgcagctggtggaactagatgtgtctcgaaatgagattcctgaaattccagaaagcatttcattctgtaaagcactgcaggtagctgacttcagcggaaacccactgactaggttgccagaaagctttcctgaattacagaatttaacatgtctttctgtaaatgacatctcactacagtctctacctgaaaatattggcaagcagaagacaactagctgacacctgttcagccagcaagttggtgtttttctgaaatgtacactgatgttttatctttatgccattagacttgctaattaaaaattctgcccttaaactctcaggaggagaagaagacaggaagccctcaatacactctaggtgtatggtatcagttgcagagaaaacagtggtat

SEQ ID NO: 11678 - DNA, 555 bp, Homo sapiens
  source 1..555: mol_type = unassigned DNA
ttttttttttttttttgctctgtaatctggaggttctaatgggagaagtgagagcagaaaagggaagcacaggaacctactgaggaatccacttgcaaagagtatgttgcgtcttaaaaacataacaccgtttttacattttgaaaccaatctcaggaagctccttttaatttttcctcattttgttgatagggattgatttgattacaaaatttgaggttgtgatgtctctttttttaaaaaaaaaaaaaaaaacaggttgctgcatctacctttatccctgactgccttgaagttgaaggctctgtggctatctgacaaccagtcccagcccctgcttacattccagacagacacagactacaccacaggagagaagattttaacctgtgtcttacttcctcagctgccttctgaacctacttgtcaagagaatctgcctcgctgtggtgcactggagaacttggtaaatgatgtctctgatgaagcctggaacgagcgtgctgtcaacagagtcagtgcgatccgatttgtggaggatgagaaagatgaaga

SEQ ID NO: 11679 - DNA, 5100 bp, Homo sapiens
  source 1..5100: mol_type = unassigned DNA
cattccacaccctccgggatctccagtgtgaaaatgtctggccctgggtaggaggctgcagatagtccctgggccggggctcgcgctggccggctgcagcgcgcagggtgccaagccctcccctacgaagtctgttttgtctcaggctgggctgagtcacatagaatagatagatagttgatttagcacatgtcctccagatcatattatccgcctacaaatatagcctgttagcgcacaggcacgggaggcttcttccggctcggccgtgctgctcagcgggtgtaaacagcctctgcggtgtaaacagcctctgcggtgtaaacagccgcggcgggcaggccaggactgtcagtgcccgcccctcggggcaggtaatttcatgctcccaaaatgggacataaagtggttgtcttcgacatttctgtcatcagagccttgtgggaaactcgtgtcaagaagcacaaagcttggcagaagaaggaggtggaaaggcttgagaagagcgccttggagaagataaaggaggagtggaactttgtggccgaatgcaggaggaagggcatcccccaggctgtatactgcaagaatggcttcatagacaccagcgtgcggcttctggacaagattgaaaggaacactctcacaaggcagagttcacttcccaaggacagaggcaaacggagcagtgcgtttgtgtttgaactttctggggagcactggacggagctcccagattcattgaaggagcagacacacctgagagaatggtacataagcaataccttgattcaaatcattcctacatatattcagttatttcaagcgatgagaattctggatctgccaaaaaaccaaatctcacatcttccagcagaaatcggttgtttgaagaacctgaaagaactcaatgtgggtttcaactatctgaagagcattcctccagaattgggagattgtgaaaatctagagagactggattgttctggaaatctagaattaatggagctgccctttgaattaagtaatttgaagcaagttacatttgtagatatctcagcaaacaagttttccagtgtcccaatctgtgtcctgcggatgtcgaatttgcagtggttggatatcagcagcaataacctgaccgacctgccgcaagatatagacaggctagaggagctgcagagctttctcttgtataaaaacaagttgacctaccttccctattccatgctgaacctgaagaagctcactctgttagtcgtcagtggggaccatttggtggagctcccaactgccctttgtgactcatccacacctttaaaatttgtaagccttatggacaatcctattgataatgcccaatgtgaagatggcaatgaaataatggaaagtgaacgggatcgccaacattttgataaagaagttatgaaagcctatattgaagaccttaaagaaagagaatctgttcccagctataccaccaaagtgtcttttagccttcaactttgatatccatcagaagactgcaaatctcactattctctggagctatatataaatctttgttatgatcatgtcatataggaagaatggcttgtgcttaaggacaaagtctagaaaccactatcatagttgctaaaaaaaatggttttcaaatgtcaaatacatgagtatctccctccatggactggagaattgaaaaattggtttgtatattgatatttccaggttcatttgcatatacttttttccaaataatgcacatttaatatgttttaaaatgtcttatttttaagaattataactaaaagaccaaatactgaagttaagtgcattgttttcaggaatcaaaagataaaggggccgggtgtggtggctcacacctgtaatcccagcactttgggaggccgaagtgggtggatcacctgaggtccggagttcgaggctggtttggccagcatggcgaaaccccatctctactaaaaatacaaaaaattagctgggcatggtggcagttgcctgtaatcctagctactcaggaggctgaggcaggagaatcgcttgaacctgggaggtggagttgcagtgagccgagatcatgcgactgcactccagcctgggtgacagagccagactctgtctcaaaaaaaaaaaaaaagaaaagaaaaagataaagggattgtgaaaagagcatttatattggactaatcagatgagagtgttttgttattttgaaagagtttcttttactgagaataatcttccttgagtttatataaactgctatttccatatgttttaagttatattttggcaagtgtagactcccaggagagacttgtaggtacaatctaggccttgaagaaacaaaggctggaatatctgcccatgctttgggcatgagatgctcagatggtgcgtgggtagatctagttgaggaagtgtgggcctggctgttcatgggaagtcttcagtggccttcatggatggccatccagtcctgagtggtcaccctgggggtcctgggacacacctcagtaaagagcaaaggcaacgccctcagggtcccttcctccaagatggccatgtagggtaatggagatgaccagtccacactgataaggagttcctagcaaggcttccttgtgggtaccacaggacaactctgcccatagcaaagatgcttcagtccagagggagcccatgggctgtttgaatttgggagaggtgggattcattacaagactttgggctcttatgtcacatcacatgatttggagaaattagacacaatctcttatttttataccactgtcttgggctaaaataaacaggttgtggctgatggtgttgaagataaataagcttaaacaaataactttggccgggcacggtggctcacacctataatcccagcactatgggaggctgaggcaagcaggttgtttgagcccaggaatttgagaacaggattttgagaacagcttggacatcatgacgaaaccccatctccacaaaaaaattcaaaaaattagccaggtgtggtggcatgtgcctgtggtcccagctactcaggaggctgaggtgggaaaatcacttgagcccaggaggtcgaggctgcagtgtgctgtgattgtgacactgccctccagcctgggtgacagagtgagaccctgtctcaaaagcaaaacaaacagcaataacaatattattattgttataactaaaaaaaaaaaaacaaaaacaagcagcttttgtgactaagaaggaaaatatgcatatagtggcatatttttatatgaatcatctcctctgtggtcttgcccagtaccatccagtggagctttctgcagtgacggaaatgttctgtatttgcgttgtccaacgtggtaaaccagacacatgtgattcttgagcacttgaacaatgactgatgtgattgaagaacccatctttcaattcaattaaatttaaatagccacatttaactccagccttgggtttgacctgatggaaaattcccatgagagagtgctccaaaccgttccaaggtggggccagttgcgattctaaaggaagaagcactaaatggcagggtgatcagtccaaagcatttatgaggggagcttacatacagcatgggctgcagcgtccttgtgatgggcagtgagacaagggatgttctacctgggcatgtccccagcgagggggttgggggatggagttcacatgaagatgtaaggaatttgggtgggggctgggctggcttctacatgtttagcaacacggctgatctttcagtgtttccagcaacaacctaagcaccgttatcagtgcctaggaatgttcaaggcccaggctggggttcagacctgcagaggaaaacatcagctggctgggtcaaggcaccatgtgttacttggtcaggacagagacaaaaatgaggaaaactaggggaccccacacacatgtggctaccatactcctgaacaggtctagctagttatttgtttttttggaagttaatctggggtagaaatgtatggtgatttttattttctctgtctgaagaaccagccatttttaaaaaggttattattgacatcccaatattttgtcttggtgggcttactcataagtccaaacattttattctcaacaggtgtaaaacaggcagagcattctaaaaccacatggtagtgctttggtggaggactgcttccacttagaaacaaactctgagaagtaggctaagagaagacaagagggccgggcgcggtgactcacgcctataatcccagcactttgggaggccgagatgggtgaatcatgaggtcaggagttcgagaccagcctaaacaacatagtgaaaccctgtctctattaaaaatgcaaaaaattagccgggcgtggtgggcacccgtaatcccagctactcaggaggctgaggcaggagaattgcttgaacccaggaagcagaggttgcagtaagctgagatcccaccattgcactccagcctgggcaacagagtgagactccatctcaaaaaaaaaaaaaaaaaaaaaaaaagagagagagatgaaaagagtaggaaaatgagaaatcaccttcgttgaatcttaaatagttacatttttttctttttaacactaaaaatacaattcaaatttattagctctactacttgaatgattttggaattttatgtcatgctaaggtatgtgttacatatggccaagtggaaaatatatctgaagaggggctttcatacaaatagactgttcataatttatgtaaattttattttaataaaatcagttttttgtttaaaaaccttgtttcactgtcacatatgaaaaaaatactgcattgatatataattatttcatgttacataataacccaaaacaaataattacttgaatatgtttgtagagatactatttaatttattcatataaatgtgcagaaagattccaaaggagaatatatatcttgtgaaaatatggagatttgaaaatttgacatgatgcaaatagactgatacataatttggaaaggttatttacatggcagaatacatgtatgaatattaaagt

SEQ ID NO: 11680 - DNA, 1963 bp, Homo sapiens
  source 1..1963: mol_type = unassigned DNA
acttcaaagggcaaaagaaagaggagaacctccgcttaccacagccgggtagaaatgcctgaggaaagcagcggagctgaccgtgccagcatttacacagggaacacttcttgggcagccaggtgtcatggggcacagacccacagttcctgagaatgaacaggtaatttcatgctcccaaaatgggacataaagtggttgtcttcgacatttctgtcatcagagccttgtgggaaactcgtgtcaagaagcacaaagcttggcagaagaaggaggtggaaaggcttgagaagagcgccttggagaagataaaggaggagtggaactttgtggccgaatgcaggaggaagggcatcccccaggctgtatactgcaagaatggcttcatagacaccagcgtgcggcttctggacaagattgaaaggaacactctcacaaggcagagttcacttcccaaggacagaggcaaacggagcagtgcgtttgtgtttgaactttctggggagcactggacggagctcccagattcattgaaggagcagacacacctgagagaatggtacataagcaataccttgattcaaatcattcctacatatattcagttatttcaagcgatgagaattctggatctgccaaaaaaccaaatctcacatcttccagcagaaatcggttgtttgaagaacctgaaagaactcaatgtgggtttcaactatctgaagagcattcctccagaattgggagattgtgaaaatctagagagactggattgttctggaaatctagaattaatggagctgccctttgaattaagtaatttgaagcaagttacatttgtagatatctcagcaaacaagttttccagtgtcccaatctgtgtcctgcggatgtcgaatttgcagtggttggatatcagcagcaataacctgaccgacctgccgcaagatatagacaggctagaggagctgcagagctttctcttgtataaaaacaagttgacctaccttccctattccatgctgaacctgaagaagctcactctgttagtcgtcagtggggaccatttggtggagctcccaactgccctttgtgactcatccacacctttaaaatttgtaagccttatggacaatcctattgataatgcccaatgtgaagatggcaatgaaataatggaaagtgaacgggatcgccaacattttgataaagaagttatgaaagcctatattgaagaccttaaagaaagagaatctgttcccagctataccaccaaagtgtcttttagccttcaactttgatatccatcagaagactgcaaatctcactattctctggagctatatataaatctttgttatgatcatgtcatataggaagaatggcttgtgcttaaggacaaagtctagaaaccactatcatagttgctaaaaaaaatggttttcaaatgtcaaatacatgagtatctccctccatggactggagaattgaaaaattggtttgtatattgatatttccaggttcatttgcatatacttttttccaaataatgcacatttaatatgttttaaaatgtcttatttttaagaattataactaaaagaccaaatactgaagttaagtgcattgttttcaggaatcaaaagataaaggggccgggtgtggtggctcacacctgtaatcccagcactttgggaggccgaagtgggtggatcacctgaggtccggagttcgaggctggtttggccagcatggcgaaaccccatctctactaaaaatacaaaaaattagctgggcatggtggcagttgcctgtaatcctagctactcaggaggctgaggcaggagaatcgcttgaacctgggaggtggagttgcagtgagccgagatcatgcgactgcactccagcctgggtgacagagccagactctgtctcaaaaaaaaaaaaaaagaaaagaaaaagataa

SEQ ID NO: 11681 - DNA, 451 bp, Homo sapiens
  source 1..451: mol_type = unassigned DNA
tgtgaaaatgtctggccctgggtaggaggctgcagatagtccctgggccggggctcgcgctggccggctgcagcgcgcagggtgccaagccctcccctacgaagtctgttttgtctcaggctgggctgagtcacatagaatagatagatagttgatttagcacatgtcctccagatcatattatccgcctacaaatatagcctgttagcgcacaggcacgggaggcttcttccggctcggccgtgctgctcagcgggtgtaaacagcctctgcggtgtaaacagcctctgcggtgtaaacagccgcggcgggcaggccaggactgtcagtgcccgcccctcggggcaggataaaggaggagtggaactttgtggccgaatgcaggaggaagggcatcccccaggctgtatactgcaagaatggcttcatagacaccagcgtgcggcttctg

SEQ ID NO: 11682 - DNA, 561 bp, Homo sapiens
  source 1..561: mol_type = unassigned DNA
cggtgtaaacagccgcggcgggcaggccaggactgtcagtgcccgcccctcggggcaggtaatttcatgctcccaaaatgggacataaagtggttgtcttcgacatttctgtcatcagagccttgtgggaaactcgtgtcaagaagcacaaagcttggcagaagaaggaggtggaaaggcttgagaagagcgccttggagaagtacgtgttttctcaacctagtcttgtagcttgtttggtgaataaggatttggacaggcaacagttgcgttgtggaggaggatgcttttcttctgggatttctcactgttggtaaaattttcctcattaaacttcagagccttacactgttgctcagtacaaatacgcagttcctatgatagcaacacccatggttataaggacctacccaccacccttgtggtaggcacgaggaagaccgagatgacacgataaatccccccacagtaaatgctgtagcaggctgcctagctagagttcactgagctaactcactaggctgtctggcgctctggacaccatctgactgccatctgggg

SEQ ID NO: 11683 - DNA, 3414 bp, Homo sapiens
  source 1..3414: mol_type = unassigned DNA
ggaggctcagtccgaggatgcctagatgttagcgagggagcacgcgctgagcttcccgaaccccatgccacaaaaacaaggcgccagcaggtcccgctcacgtcccagcgggcttctttccctggggtggggaagtgggtcaacttcgttctgatctgaaggggggtttgggactatttgggtcgctcctcacctccccacccgctccccggcttggcatggtccagagcccgggctggagccagcggtagggccagcttgcacacatggctccggaggctccggttgcccatccgagcccctgccaggctctaacgttcccaactgacaacaccagtaactaaatataggagcagatggtggggacgggctgtcgcagcggctcctttgcagaggtctccggactgcagataaggctcaggcccttttgtgagaagcagaccagcctgggggctggcggcaggacacctgtgtctgcatgctgaagaagatgggtgaggccgtggccagagtagcaaggaaggtcaacgagacggtggagagcggctctgacactctggacctggccgagtgcaagctggtctcctttcccattggcatctacaaggtcctgcggaatgtctctggccagatccacctcatcaccctggctaacaacgagcttaagtccctcaccagcaagttcatgaccacattcagtcagctccgagagctccacctggaggggaacttcctacaccgcctccccagcgaggtcagtgccctgcagcacctcaaggccattgacctgtcccggaaccagttccaggacttccctgagcagcttaccgccctgccggcgctggagaccatcaacctggaggagaacgagatcgtagatgtgcccgtggagaagctggccgccatgccagccttgcgcagcatcaacctccgcttcaacccactcaacgccgaggtgcgcgtgatcgccccgccgctcatcaagtttgacatgctcatgtctccggaaggcgcaagagcccccctaccttaggccaccctcctcatgcccacccagcaaggggcagaggccacaggcctggaaccctggaagggagggaggcccatgggaggccaagcctgggggctgggggcgggtgggccgagcagcacgtggtgggtggggtgcagctggtctggatagatagcttacagcagtagtgggctctggaatgcccaagggaagaggcaaggtggggcctgcagcctggactcggcactcacagctgctgtgcaaactcaggcagatctcctgccctctctgagccttgtcacttgaaaaaaacaggaccctttccctcctttgggctccctggaggtttttaagcagtacgtgcctccaagttacctccagatcagcaggcacaggtgggcattgccaggtattttctgagcccctgcgggtttgaggccttgtttttagtgctgagagccagttgctgccctgagaagagaagacaacctccatctatttattgcttcctgagaactgacctggatgcggccctctgcagggcccagtcttcagtcctgtggtccctggactggtgggaacctgaactaggagtcctgggagagctgtggtgggaatatgggctggcactgctgcagggcaagaacattcatgtaggagcccgaggaccagcaggctgggaatggggagcaagtcacgtcagctctgtcattccccacagttaacaaattggcggggtgggaagtcctgagtgctccgtccctctagcatcactcctgagctgcgggagaggtggcccagagaacagcagagtcagttacacctgcagctcttgtctaaagtgattagatggccaccctcaccactgtccagtccagcagcagcctggctgccttgtcatggcctcctgggggcagaaggcgatgtggaccacgggatttgtagccagccagctcccaggccaacgcccaaagccctgatgacctggttcttctgaggccctcaacctggcatcttagggtatggtcaggcaacagggtgaccagctgtcctggtttcccaggacatggaactttcaatgctaaaactgggacagtacccagcaagtggggatggttggtcccctaccaggagagggcctggggctcttgcttcccgagaacgcctgtggcttgaagaaccttgactgcttggtcctcaggtatctacctcccaccttctcctcatctgtggagcaagccaactcagtgccccagaccccacctgatctgcatctttgtttgcatctccagagacacctgaggccccagagcttgaggcaaagccaggccgtccaaatcctgtgtgccgtggacgagtggccactttactactcctaaggctaagatgttgagagctcagaccactgctcagagcagtaatccctgctcagaatgctcccagttccctcgtccctgcccaggtctcttgtctcttgggaaggaactgataggtcgggccattgttgggccatcactgagcgctcagtatctcaagagactctgttcattctgctcgtatcccaaggcctggttggtcaaactctgggcaaagggttttcaggatgaggaggtcaagacaggatctccagagctaccgagttcatctgtgggtgttgggggcaagtgggggctgaagtcctgtgcaggctgcgctggccccacctgccttgtgccctggagtggggtttctccttgttgaagaagaggcatccttctctgatgtgcacaaacacaatgtatgaccagagccttgcaactcaaagtgtggtctgtggaccagcagcggcagtgacacctgggagcttgttaggaatgcagagtctaggcctcaccctatacctcccgactcagaccctgcattttagcaagacccccagctgattcctataagcactttagagtttgagaagcaaggacctaggctggggatgtcctccgagcagagggtgaagtttctctcagttctctccctgccacttccagggatctgagcctgtgctcagcctcctccctaacccaccctgggagacacttggcctgttagattgttccagagtctgcatggcactcctgaagaagggagtgtgacctgcagtcaccaggagatgagggttaggtgtgcccagccctccagacccggcctttctggttaacccctgcatgccaagctgcctgctgccccaggtcctcacctcaggcctttgaaggggcagcttctggaagttgttttctcctctgcttggagagtttgcccttgtctgtcttggaaagtgtgggcagccacagatgcccccaaatcagagctcacagtgagtgagcccctaagcttcagtctgcaataaagaatgcattggtttcatc

SEQ ID NO: 11684 - DNA, 3095 bp, Homo sapiens
  source 1..3095: mol_type = unassigned DNA
gcgtgactgcgctgcgcagggcgctaggaggcattgtcgccgtaagtggagccaaaagcggcccggagcgggaccacacgcttcttgccccgcaaagctcaggcccttttgtgagaagcagaccagcctgggggctggcggcaggacacctgtgtctgcatgctgaagaagatgggtgaggccgtggccagagtagcaaggaaggtcaacgagacggtggagagcggctctgacactctggacctggccgagtgcaagctggtctcctttcccattggcatctacaaggtcctgcggaatgtctctggccagatccacctcatcaccctggctaacaacgagcttaagtccctcaccagcaagttcatgaccacattcagtcagctccgagagctccacctggaggggaacttcctacaccgcctccccagcgaggtcagtgccctgcagcacctcaaggccattgacctgtcccggaaccagttccaggacttccctgagcagcttaccgccctgccggcgctggagaccatcaacctggaggagaacgagatcgtagatgtgcccgtggagaagctggccgccatgccagccttgcgcagcatcaacctccgcttcaacccactcaacgccgaggtgcgcgtgatcgccccgccgctcatcaagtttgacatgctcatgtctccggaaggcgcaagagcccccctaccttaggccaccctcctcatgcccacccagcaaggggcagaggccacaggcctggaaccctggaagggagggaggcccatgggaggccaagcctgggggctgggggcgggtgggccgagcagcacgtggtgggtggggtgcagctggtctggatagatagcttacagcagtagtgggctctggaatgcccaagggaagaggcaaggtggggcctgcagcctggactcggcactcacagctgctgtgcaaactcaggcagatctcctgccctctctgagccttgtcacttgaaaaaaacaggaccctttccctcctttgggctccctggaggtttttaagcagtacgtgcctccaagttacctccagatcagcaggcacaggtgggcattgccaggtattttctgagcccctgcgggtttgaggccttgtttttagtgctgagagccagttgctgccctgagaagagaagacaacctccatctatttattgcttcctgagaactgacctggatgcggccctctgcagggcccagtcttcagtcctgtggtccctggactggtgggaacctgaactaggagtcctgggagagctgtggtgggaatatgggctggcactgctgcagggcaagaacattcatgtaggagcccgaggaccagcaggctgggaatggggagcaagtcacgtcagctctgtcattccccacagttaacaaattggcggggtgggaagtcctgagtgctccgtccctctagcatcactcctgagctgcgggagaggtggcccagagaacagcagagtcagttacacctgcagctcttgtctaaagtgattagatggccaccctcaccactgtccagtccagcagcagcctggctgccttgtcatggcctcctgggggcagaaggcgatgtggaccacgggatttgtagccagccagctcccaggccaacgcccaaagccctgatgacctggttcttctgaggccctcaacctggcatcttagggtatggtcaggcaacagggtgaccagctgtcctggtttcccaggacatggaactttcaatgctaaaactgggacagtacccagcaagtggggatggttggtcccctaccaggagagggcctggggctcttgcttcccgagaacgcctgtggcttgaagaaccttgactgcttggtcctcaggtatctacctcccaccttctcctcatctgtggagcaagccaactcagtgccccagaccccacctgatctgcatctttgtttgcatctccagagacacctgaggccccagagcttgaggcaaagccaggccgtccaaatcctgtgtgccgtggacgagtggccactttactactcctaaggctaagatgttgagagctcagaccactgctcagagcagtaatccctgctcagaatgctcccagttccctcgtccctgcccaggtctcttgtctcttgggaaggaactgataggtcgggccattgttgggccatcactgagcgctcagtatctcaagagactctgttcattctgctcgtatcccaaggcctggttggtcaaactctgggcaaagggttttcaggatgaggaggtcaagacaggatctccagagctaccgagttcatctgtgggtgttgggggcaagtgggggctgaagtcctgtgcaggctgcgctggccccacctgccttgtgccctggagtggggtttctccttgttgaagaagaggcatccttctctgatgtgcacaaacacaatgtatgaccagagccttgcaactcaaagtgtggtctgtggaccagcagcggcagtgacacctgggagcttgttaggaatgcagagtctaggcctcaccctatacctcccgactcagaccctgcattttagcaagacccccagctgattcctataagcactttagagtttgagaagcaaggacctaggctggggatgtcctccgagcagagggtgaagtttctctcagttctctccctgccacttccagggatctgagcctgtgctcagcctcctccctaacccaccctgggagacacttggcctgttagattgttccagagtctgcatggcactcctgaagaagggagtgtgacctgcagtcaccaggagatgagggttaggtgtgcccagccctccagacccggcctttctggttaacccctgcatgccaagctgcctgctgccccaggtcctcacctcaggcctttgaaggggcagcttctggaagttgttttctcctctgcttggagagtttgcccttgtctgtcttggaaagtgtgggcagccacagatgcccccaaatcagagctcacagtgagtgagcccctaagcttcagtctgcaataaagaatgcattggtttcatc

SEQ ID NO: 11685 - DNA, 2924 bp, Homo sapiens
  source 1..2924: mol_type = unassigned DNA
tcggaactcgcctggggcgccgccggcggcggagggagcgtgactgcgctgcgcagggcgctaggaggcattgtcgccgctcaggcccttttgtgagaagcagaccagcctgggggctggcggcaggacacctgtgtctgcatgctgaagaagatgggtgaggccgtggccagagtagcaaggaaggtcaacgagacggtggagagcggctctgacactctggagctccacctggaggggaacttcctacaccgcctccccagcgaggtcagtgccctgcagcacctcaaggccattgacctgtcccggaaccagttccaggacttccctgagcagcttaccgccctgccggcgctggagaccatcaacctggaggagaacgagatcgtagatgtgcccgtggagaagctggccgccatgccagccttgcgcagcatcaacctccgcttcaacccactcaacgccgaggtgcgcgtgatcgccccgccgctcatcaagtttgacatgctcatgtctccggaaggcgcaagagcccccctaccttaggccaccctcctcatgcccacccagcaaggggcagaggccacaggcctggaaccctggaagggagggaggcccatgggaggccaagcctgggggctgggggcgggtgggccgagcagcacgtggtgggtggggtgcagctggtctggatagatagcttacagcagtagtgggctctggaatgcccaagggaagaggcaaggtggggcctgcagcctggactcggcactcacagctgctgtgcaaactcaggcagatctcctgccctctctgagccttgtcacttgaaaaaaacaggaccctttccctcctttgggctccctggaggtttttaagcagtacgtgcctccaagttacctccagatcagcaggcacaggtgggcattgccaggtattttctgagcccctgcgggtttgaggccttgtttttagtgctgagagccagttgctgccctgagaagagaagacaacctccatctatttattgcttcctgagaactgacctggatgcggccctctgcagggcccagtcttcagtcctgtggtccctggactggtgggaacctgaactaggagtcctgggagagctgtggtgggaatatgggctggcactgctgcagggcaagaacattcatgtaggagcccgaggaccagcaggctgggaatggggagcaagtcacgtcagctctgtcattccccacagttaacaaattggcggggtgggaagtcctgagtgctccgtccctctagcatcactcctgagctgcgggagaggtggcccagagaacagcagagtcagttacacctgcagctcttgtctaaagtgattagatggccaccctcaccactgtccagtccagcagcagcctggctgccttgtcatggcctcctgggggcagaaggcgatgtggaccacgggatttgtagccagccagctcccaggccaacgcccaaagccctgatgacctggttcttctgaggccctcaacctggcatcttagggtatggtcaggcaacagggtgaccagctgtcctggtttcccaggacatggaactttcaatgctaaaactgggacagtacccagcaagtggggatggttggtcccctaccaggagagggcctggggctcttgcttcccgagaacgcctgtggcttgaagaaccttgactgcttggtcctcaggtatctacctcccaccttctcctcatctgtggagcaagccaactcagtgccccagaccccacctgatctgcatctttgtttgcatctccagagacacctgaggccccagagcttgaggcaaagccaggccgtccaaatcctgtgtgccgtggacgagtggccactttactactcctaaggctaagatgttgagagctcagaccactgctcagagcagtaatccctgctcagaatgctcccagttccctcgtccctgcccaggtctcttgtctcttgggaaggaactgataggtcgggccattgttgggccatcactgagcgctcagtatctcaagagactctgttcattctgctcgtatcccaaggcctggttggtcaaactctgggcaaagggttttcaggatgaggaggtcaagacaggatctccagagctaccgagttcatctgtgggtgttgggggcaagtgggggctgaagtcctgtgcaggctgcgctggccccacctgccttgtgccctggagtggggtttctccttgttgaagaagaggcatccttctctgatgtgcacaaacacaatgtatgaccagagccttgcaactcaaagtgtggtctgtggaccagcagcggcagtgacacctgggagcttgttaggaatgcagagtctaggcctcaccctatacctcccgactcagaccctgcattttagcaagacccccagctgattcctataagcactttagagtttgagaagcaaggacctaggctggggatgtcctccgagcagagggtgaagtttctctcagttctctccctgccacttccagggatctgagcctgtgctcagcctcctccctaacccaccctgggagacacttggcctgttagattgttccagagtctgcatggcactcctgaagaagggagtgtgacctgcagtcaccaggagatgagggttaggtgtgcccagccctccagacccggcctttctggttaacccctgcatgccaagctgcctgctgccccaggtcctcacctcaggcctttgaaggggcagcttctggaagttgttttctcctctgcttggagagtttgcccttgtctgtcttggaaagtgtgggcagccacagatgcccccaaatcagagctcacagtgagtgagcccctaagcttcagtctgcaataaagaatgcattggtttc

SEQ ID NO: 11686 - DNA, 2906 bp, Homo sapiens
  source 1..2906: mol_type = unassigned DNA
tcggaactcgcctggggcgccgccggcggcggagggagcgtgactgcgctgcgcagggcgctaggaggcattgtcgccgctcaggcccttttgtgagaagcagaccagcctgggggctggcggcaggacacctgtgtctgcatgctgaagaagatgggtgaggccgtggccagagtagcaaggaaggtcaacgagacggtggagagcggctctgacactctggacctggccgagtgcaagctggtctcctttcccattggcatctacaaggtcctgcggaatgtctctggccagatccacctcatcaccctggctaacaacgagcttaagtccctcaccagcaagttcatgaccacattcagtcagctccgagatgtgcccgtggagaagctggccgccatgccagccttgcgcagcatcaacctccgcttcaacccactcaacgccgaggtgcgcgtgatcgccccgccgctcatcaagtttgacatgctcatgtctccggaaggcgcaagagcccccctaccttaggccaccctcctcatgcccacccagcaaggggcagaggccacaggcctggaaccctggaagggagggaggcccatgggaggccaagcctgggggctgggggcgggtgggccgagcagcacgtggtgggtggggtgcagctggtctggatagatagcttacagcagtagtgggctctggaatgcccaagggaagaggcaaggtggggcctgcagcctggactcggcactcacagctgctgtgcaaactcaggcagatctcctgccctctctgagccttgtcacttgaaaaaaacaggaccctttccctcctttgggctccctggaggtttttaagcagtacgtgcctccaagttacctccagatcagcaggcacaggtgggcattgccaggtattttctgagcccctgcgggtttgaggccttgtttttagtgctgagagccagttgctgccctgagaagagaagacaacctccatctatttattgcttcctgagaactgacctggatgcggccctctgcagggcccagtcttcagtcctgtggtccctggactggtgggaacctgaactaggagtcctgggagagctgtggtgggaatatgggctggcactgctgcagggcaagaacattcatgtaggagcccgaggaccagcaggctgggaatggggagcaagtcacgtcagctctgtcattccccacagttaacaaattggcggggtgggaagtcctgagtgctccgtccctctagcatcactcctgagctgcgggagaggtggcccagagaacagcagagtcagttacacctgcagctcttgtctaaagtgattagatggccaccctcaccactgtccagtccagcagcagcctggctgccttgtcatggcctcctgggggcagaaggcgatgtggaccacgggatttgtagccagccagctcccaggccaacgcccaaagccctgatgacctggttcttctgaggccctcaacctggcatcttagggtatggtcaggcaacagggtgaccagctgtcctggtttcccaggacatggaactttcaatgctaaaactgggacagtacccagcaagtggggatggttggtcccctaccaggagagggcctggggctcttgcttcccgagaacgcctgtggcttgaagaaccttgactgcttggtcctcaggtatctacctcccaccttctcctcatctgtggagcaagccaactcagtgccccagaccccacctgatctgcatctttgtttgcatctccagagacacctgaggccccagagcttgaggcaaagccaggccgtccaaatcctgtgtgccgtggacgagtggccactttactactcctaaggctaagatgttgagagctcagaccactgctcagagcagtaatccctgctcagaatgctcccagttccctcgtccctgcccaggtctcttgtctcttgggaaggaactgataggtcgggccattgttgggccatcactgagcgctcagtatctcaagagactctgttcattctgctcgtatcccaaggcctggttggtcaaactctgggcaaagggttttcaggatgaggaggtcaagacaggatctccagagctaccgagttcatctgtgggtgttgggggcaagtgggggctgaagtcctgtgcaggctgcgctggccccacctgccttgtgccctggagtggggtttctccttgttgaagaagaggcatccttctctgatgtgcacaaacacaatgtatgaccagagccttgcaactcaaagtgtggtctgtggaccagcagcggcagtgacacctgggagcttgttaggaatgcagagtctaggcctcaccctatacctcccgactcagaccctgcattttagcaagacccccagctgattcctataagcactttagagtttgagaagcaaggacctaggctggggatgtcctccgagcagagggtgaagtttctctcagttctctccctgccacttccagggatctgagcctgtgctcagcctcctccctaacccaccctgggagacacttggcctgttagattgttccagagtctgcatggcactcctgaagaagggagtgtgacctgcagtcaccaggagatgagggttaggtgtgcccagccctccagacccggcctttctggttaacccctgcatgccaagctgcctgctgccccaggtcctcacctcaggcctttgaaggggcagcttctggaagttgttttctcctctgcttggagagtttgcccttgtctgtcttggaaagtgtgggcagccacagatgcccccaaatcagagctcacagtgagtgagcccctaagcttcagtctgcaataaagaatgcattggtttc

SEQ ID NO: 11687 - DNA, 663 bp, Homo sapiens
  source 1..663: mol_type = unassigned DNA
ggaactcgcctggggcgccgccggcggcggagggagcgtgactgcgctgcgcagggcgctaggaggcattgtcgccgctcaggcccttttgtgagaagcagaccagcctgggggctggcggcaggacacctgtgtctgcatgctgaagaagatgggtgaggccgtggccagagtagcaaggaaggtcaacgagacggtggagagcggctctgacactctggacctggccgagtgcaagctggtctcctttcccattggcatctacaaggtcctgcggaatgtctctggccagatccacctcatcaccctggctaacaacgagcttaagtccctcaccagcaagttcatgaccacattcagtcagctccgagagctccacctggaggggaacttcctacaccgcctccccagcgaggtcagtgccctgcagcacctcaaggccattgacctgtcccggaaccagttccaggacttccctgagcagcttaccgccctgccggcgctggagaccatcaacctggaggagaacgagatcgtagatgtgcccgtggagaagctggccgccatgccagccttgcgcagcatcaacctccgcttcaacccactcaacgccgaggtgcgcgtgatcgccccgccgctcatcaagtttgacatgctcatgtc

SEQ ID NO: 11688 - DNA, 2903 bp, Homo sapiens
  source 1..2903: mol_type = unassigned DNA
gtgcaaaggccaagctggatgtggcctgagctctcggccctgcaagaggaggctcaggcccttttgtgagaagcagaccagcctgggggctggcggcaggacacctgtgtctgcatgctgaagaagatgggtgaggccgtggccagagtagcaaggaaggtcaacgagacggtggagagcggctctgacactctggagctccacctggaggggaacttcctacaccgcctccccagcgaggtcagtgccctgcagcacctcaaggccattgacctgtcccggaaccagttccaggacttccctgagcagcttaccgccctgccggcgctggagaccatcaacctggaggagaacgagatcgtagatgtgcccgtggagaagctggccgccatgccagccttgcgcagcatcaacctccgcttcaacccactcaacgccgaggtgcgcgtgatcgccccgccgctcatcaagtttgacatgctcatgtctccggaaggcgcaagagcccccctaccttaggccaccctcctcatgcccacccagcaaggggcagaggccacaggcctggaaccctggaagggagggaggcccatgggaggccaagcctgggggctgggggcgggtgggccgagcagcacgtggtgggtggggtgcagctggtctggatagatagcttacagcagtagtgggctctggaatgcccaagggaagaggcaaggtggggcctgcagcctggactcggcactcacagctgctgtgcaaactcaggcagatctcctgccctctctgagccttgtcacttgaaaaaaacaggaccctttccctcctttgggctccctggaggtttttaagcagtacgtgcctccaagttacctccagatcagcaggcacaggtgggcattgccaggtattttctgagcccctgcgggtttgaggccttgtttttagtgctgagagccagttgctgccctgagaagagaagacaacctccatctatttattgcttcctgagaactgacctggatgcggccctctgcagggcccagtcttcagtcctgtggtccctggactggtgggaacctgaactaggagtcctgggagagctgtggtgggaatatgggctggcactgctgcagggcaagaacattcatgtaggagcccgaggaccagcaggctgggaatggggagcaagtcacgtcagctctgtcattccccacagttaacaaattggcggggtgggaagtcctgagtgctccgtccctctagcatcactcctgagctgcgggagaggtggcccagagaacagcagagtcagttacacctgcagctcttgtctaaagtgattagatggccaccctcaccactgtccagtccagcagcagcctggctgccttgtcatggcctcctgggggcagaaggcgatgtggaccacgggatttgtagccagccagctcccaggccaacgcccaaagccctgatgacctggttcttctgaggccctcaacctggcatcttagggtatggtcaggcaacagggtgaccagctgtcctggtttcccaggacatggaactttcaatgctaaaactgggacagtacccagcaagtggggatggttggtcccctaccaggagagggcctggggctcttgcttcccgagaacgcctgtggcttgaagaaccttgactgcttggtcctcaggtatctacctcccaccttctcctcatctgtggagcaagccaactcagtgccccagaccccacctgatctgcatctttgtttgcatctccagagacacctgaggccccagagcttgaggcaaagccaggccgtccaaatcctgtgtgccgtggacgagtggccactttactactcctaaggctaagatgttgagagctcagaccactgctcagagcagtaatccctgctcagaatgctcccagttccctcgtccctgcccaggtctcttgtctcttgggaaggaactgataggtcgggccattgttgggccatcactgagcgctcagtatctcaagagactctgttcattctgctcgtatcccaaggcctggttggtcaaactctgggcaaagggttttcaggatgaggaggtcaagacaggatctccagagctaccgagttcatctgtgggtgttgggggcaagtgggggctgaagtcctgtgcaggctgcgctggccccacctgccttgtgccctggagtggggtttctccttgttgaagaagaggcatccttctctgatgtgcacaaacacaatgtatgaccagagccttgcaactcaaagtgtggtctgtggaccagcagcggcagtgacacctgggagcttgttaggaatgcagagtctaggcctcaccctatacctcccgactcagaccctgcattttagcaagacccccagctgattcctataagcactttagagtttgagaagcaaggacctaggctggggatgtcctccgagcagagggtgaagtttctctcagttctctccctgccacttccagggatctgagcctgtgctcagcctcctccctaacccaccctgggagacacttggcctgttagattgttccagagtctgcatggcactcctgaagaagggagtgtgacctgcagtcaccaggagatgagggttaggtgtgcccagccctccagacccggcctttctggttaacccctgcatgccaagctgcctgctgccccaggtcctcacctcaggcctttgaaggggcagcttctggaagttgttttctcctctgcttggagagtttgcccttgtctgtcttggaaagtgtgggcagccacagatgcccccaaatcagagctcacagtgagtgagcccctaagcttcagtctgcaataaagaatgcattggtttcatctgc

SEQ ID NO: 11689 - DNA, 2959 bp, Homo sapiens
  source 1..2959: mol_type = unassigned DNA
ccccgcgcgccccgccccgccggctcggaactcgcctggggcgccgccggcggcggagggagcgtgactgcgctgcgcagggcgctaggaggcattgtcgccacctggccgagtgcaagctggtctcctttcccattggcatctacaaggtcctgcggaatgtctctggccagatccacctcatcaccctggctaacaacgagcttaagtccctcaccagcaagttcatgaccacattcagtcagctccgagagctccacctggaggggaacttcctacaccgcctccccagcgaggtcagtgccctgcagcacctcaaggccattgacctgtcccggaaccagttccaggacttccctgagcagcttaccgccctgccggcgctggagaccatcaacctggaggagaacgagatcgtagatgtgcccgtggagaagctggccgccatgccagccttgcgcagcatcaacctccgcttcaacccactcaacgccgaggtgcgcgtgatcgccccgccgctcatcaagtttgacatgctcatgtctccggaaggcgcaagagcccccctaccttaggccaccctcctcatgcccacccagcaaggggcagaggccacaggcctggaaccctggaagggagggaggcccatgggaggccaagcctgggggctgggggcgggtgggccgagcagcacgtggtgggtggggtgcagctggtctggatagatagcttacagcagtagtgggctctggaatgcccaagggaagaggcaaggtggggcctgcagcctggactcggcactcacagctgctgtgcaaactcaggcagatctcctgccctctctgagccttgtcacttgaaaaaaacaggaccctttccctcctttgggctccctggaggtttttaagcagtacgtgcctccaagttacctccagatcagcaggcacaggtgggcattgccaggtattttctgagcccctgcgggtttgaggccttgtttttagtgctgagagccagttgctgccctgagaagagaagacaacctccatctatttattgcttcctgagaactgacctggatgcggccctctgcagggcccagtcttcagtcctgtggtccctggactggtgggaacctgaactaggagtcctgggagagctgtggtgggaatatgggctggcactgctgcagggcaagaacattcatgtaggagcccgaggaccagcaggctgggaatggggagcaagtcacgtcagctctgtcattccccacagttaacaaattggcggggtgggaagtcctgagtgctccgtccctctagcatcactcctgagctgcgggagaggtggcccagagaacagcagagtcagttacacctgcagctcttgtctaaagtgattagatggccaccctcaccactgtccagtccagcagcagcctggctgccttgtcatggcctcctgggggcagaaggcgatgtggaccacgggatttgtagccagccagctcccaggccaacgcccaaagccctgatgacctggttcttctgaggccctcaacctggcatcttagggtatggtcaggcaacagggtgaccagctgtcctggtttcccaggacatggaactttcaatgctaaaactgggacagtacccagcaagtggggatggttggtcccctaccaggagagggcctggggctcttgcttcccgagaacgcctgtggcttgaagaaccttgactgcttggtcctcaggtatctacctcccaccttctcctcatctgtggagcaagccaactcagtgccccagaccccacctgatctgcatctttgtttgcatctccagagacacctgaggccccagagcttgaggcaaagccaggccgtccaaatcctgtgtgccgtggacgagtggccactttactactcctaaggctaagatgttgagagctcagaccactgctcagagcagtaatccctgctcagaatgctcccagttccctcgtccctgcccaggtctcttgtctcttgggaaggaactgataggtcgggccattgttgggccatcactgagcgctcagtatctcaagagactctgttcattctgctcgtatcccaaggcctggttggtcaaactctgggcaaagggttttcaggatgaggaggtcaagacaggatctccagagctaccgagttcatctgtgggtgttgggggcaagtgggggctgaagtcctgtgcaggctgcgctggccccacctgccttgtgccctggagtggggtttctccttgttgaagaagaggcatccttctctgatgtgcacaaacacaatgtatgaccagagccttgcaactcaaagtgtggtctgtggaccagcagcggcagtgacacctgggagcttgttaggaatgcagagtctaggcctcaccctatacctcccgactcagaccctgcattttagcaagacccccagctgattcctataagcactttagagtttgagaagcaaggacctaggctggggatgtcctccgagcagagggtgaagtttctctcagttctctccctgccacttccagggatctgagcctgtgctcagcctcctccctaacccaccctgggagacacttggcctgttagattgttccagagtctgcatggcactcctgaagaagggagtgtgacctgcagtcaccaggagatgagggttaggtgtgcccagccctccagacccggcctttctggttaacccctgcatgccaagctgcctgctgccccaggtcctcacctcaggcctttgaaggggcagcttctggaagttgttttctcctctgcttggagagtttgcccttgtctgtcttggaaagtgtgggcagccacagatgcccccaaatcagagctcacagtgagtgagcccctaagcttcagtctgcaataaagaatgcattggtttcatctgc

SEQ ID NO: 11690 - DNA, 2209 bp, Homo sapiens
  source 1..2209: mol_type = unassigned DNA
ggacacgccttagggaaaccgctcctgggcttggtagctgaacttagacgtcgagtgcagcccgcccggtgcgcgcggcgtcttactgccagatctcggaaatcagctgccagggtggggccgcgttttggcgacggccactcggccacccctgccgctcccgcctctcccaagagatttttctagcgggttaatttcctgtccgggtaaaccctttggtgagtccctcgcccctccctccccgcccctcccctctccatccctgctgtcccggctccccagtccgtccgcgccgcgctccatcgcccccgcacgcccgggcgcacgccctccccgcccgggccgccctctggctccccgcgcccggcagccagtgcctcaccgcgccgtcccgcgccagggctcgctccgagagccgcttccttctcgccgcggccggcgcgggccccccggccatgcgcccccgagccccagcctgcgccgccgcggcgctcgggctctgcagccttctgctgctgctcgcgcccgggcacgcgtgccccgcgggctgcgcctgcaccgacccgcacaccgtggactgccgcgaccgcgggctgcccagcgtgccagaccctttccccctggacgtgcgcaagctgctggtggccggcaaccgcatccagcggatccccgaggacttcttcatcttctacggcgacctggtctacctggacttcaggaacaactcgctgcgctcgctggaggagggcacgttcagcggctcggccaagctcgtgttcctcgacctcagctacaacaacttgacccagctgggcgccggcgccttccgctcggccgggaggctggtgaagcttagcctggctaacaacaacctggtgggcgtgcacgaggacgccttcgagaccctggagtcgctgcaggtgctggagctcaacgacaacaacctgcgcagcctcagcgtggccgccctggccgcgctgcccgcgctgcgctccctgcgtctggacgggaacccctggctgtgcgactgtgacttcgcccacctcttctcctggatccaggagaacgcatccaaactgcccaaaggccttgatgaaatccagtgctccctgcccatggagagcaggaggatatccctgcgtgagctgtcggaggccagcttcagcgagtgtaggttcagcctgtcactcacagacctctgcatcatcattttctccggtgtggccgtgtccattgcggccatcatctccagcttcttcctggccactgtggtgcagtgcctccagaggtgcgcacccaacaaagatgcggaggatgaagacgaggacaaggatgactgagccacctcctccctcctgcctcttactctccagcaccgaaccagaagctctctccaagacgagagggaaatgctgaaaatggaaaagcactggccaccatctgtgaactgaacagagcctgttccgtgtcttggcccctgggtacacctgctgggaccactgatctcagagtttagaatcagcagagcacagaagcccaggaaggatggagggaattattcctggagcataacctgcctctcagatcgaggtgtgtgttgggggagaagatgaccgagtcaggcttcatagctgatgactaaaagcctcccccaggaaatgtgaagactggcagctttcaatggcaaagatgattttacgccattctttttctgacctgtactgggagatcatgaaacatctgccttcctcccaagaaacagcagctcaaacagtggagattcaaattcggatcattcaccacaagaacgagaactttgatccttatataataggcctcagcaaccttgggatgttatactgggaactaataaactcgtgtgcaatagactcaatgtttatgttcccccagattttatatgttgaaacctaatccccaatgtgatggtatttggaggtggggcttttgggaggtgattaggtttagatcatatcatgaggatggggcccaaatgatgggattagtgccctcatgaaaggtggccccagagagctccttcaccccttcaatgcttgaggatgcagcaagaaatcagctgcccatgaaccgagaagcaggccctcaccagaacccagccatgctggcacccagatctcagacttccagcctccagaactgggagaaataaataaatgtctgttgtttgtaa

SEQ ID NO: 11691 - DNA, 1696 bp, Homo sapiens
  source 1..1696: mol_type = unassigned DNA
attgactgagccgactgcatctctgggcaagcggcgctttgcctctctcctgtctttgtctgctcttcctgcaaggctacggcgcctggagcagggtctgcagcggccgccgcagcaacgcgagccaagtcgtgccccgcacggccgcccggggccgcaccctcgctcggtggcggcgcccgaagacgccagccgcgccacgcactgcctgcgtcccgcgccccagccgccgcgcaccaacgccgccgccttcgccgggagccaagcccgccgggccggcccggtcccaggtgggcagctcggcttgcagctggttggaggtggcggccgctgcagccctggcagcgggcacacccctaagcatacgcacccaacgcctcctccctgagccacgaggatggagcagccaccccggcccgggactggcgcaaggtgcccaagcaaggaaagaaataatgaagagacacatgtgttagctgcagccttttgaaacacgcaagaaggaaatcaatagtgtggacagggctggaacctttaccacgcttgttggagtagatgaggaatgggctcgtgattatgctgacattccagcatgaatctggtagacctgtggttaacccgttccctctccatgtgtctcctcctacaaagttttgttcttatgatactgtgctttcattctgccagtatgtgtcccaagggctgtctttgttcttcctctgggggtttaaatgtcacctgtagcaatgcaaatctcaaggaaatacctagagatcttcctcctgaaacagtcttactgtatctggactccaatcagatcacatctattcccaatgaaatttttaaggacctccatcaactgagagttctcaacctgtccaaaaatggcattgagtttatcgatgagcatgccttcaaaggagtagctgaaaccttgcagactctggacttgtccgacaatcggattcaaagtgtgcacaaaaatgccttcaataacctgaaggccagggccagaattgccaacaacccctggcactgcgactgtactctacagcaagttctgaggagcatggcgtccaatcatgagacagcccacaacgtgatctgtaaaacgtccgtgttggatgaacatgctggcagaccattcctcaatgctgccaacgacgctgacctttgtaacctccctaaaaaaactaccgattatgccatgctggtcaccatgtttggctggttcactatggtgatctcatatgtggtatattatgtgaggcaaaatcaggaggatgcccggagacacctcgaatacttgaaatccctgccaagcaggcagaagaaagcagatgaacctgatgatattagcactgtggtatagtgtccaaactgactgtcattgagaaagaaagaaagtagtttgcgattgcagtagaaataagtggtttacttctcccatccattgtaaacatttgaaactttgtatttcagtttcttttgaattatgccactgctgaacttttaacaaacactacaacataaataatttgagtttaggtgatccaccccttaattgtacccccgatggtatatttctgagtaagctactatctgaacattagttagatccatctcactatttaataatgaaatttatttttttaatttaaaagcaaataaaagcttaactttgaaccatggaaaa

SEQ ID NO: 11692 - DNA, 489 bp, Homo sapiens
  source 1..489: mol_type = unassigned DNA
gaaataagagaggtgggacatggaggatggctgcggccacccctgaagcttcgtccagcgcgatgggagtcagtccatccttgcacacgccacccccaactcggcaatgaaacctttggagtggcttgcggctgtgcgccgtgggaactgcaagtgcagatatgggtgcccaagcaaggaaagaaataatgaagagacacatgtgttagctgcagccttttgaaacacgcaagaaggaaatcaatagtgtggacagggctggaacctttaccacgcttgttggagtagatgaggaatgggctcgtgattatgctgacattccagcatgaatctggtagacctgtggttaacccgttccctctccatgtgtctcctcctacaaagttttgttcttatgatactgtgctttcattctgccagtatgtgtcccaagggctgtctttgttcttcctctgggggtttaaatgtcacctgtagcaatgcaaatct

SEQ ID NO: 11693 - DNA, 927 bp, Homo sapiens
  source 1..927: mol_type = unassigned DNA
gggtacctgggggcgcgtggagacaaggaatggagccccggaatgccgggcccttgggtacttgggaaggcaggctgctgagtgcctgggatggggcgatcttcctccccagaagcaaacaaacctccccgcgagaatctgaatgcgttggcatcttgggtggtgactgaatggtcagatcgtggactagggatgcttctccaagctctaagaggaccatagtctgctctcttctctggcacccgcttgcttctacgctccttcacctctgcagccaggtgcccaagcaaggaaagaaataatgaagagacacatgtgttagctgcagccttttgaaacacgcaagaaggaaatcaatagtgtggacagggctggaacctttaccacgcttgttggagtagatgaggaatgggctcgtgattatgctgacattccagcatgaatctggtagacctgtggttaacccgttccctctccatgtgtctcctcctacaaagttttgttcttatgatactgtgctttcattctgccagtatgtgtcccaagggctgtctttgttcttcctctgggggtttaaatgtcacctgtagcaatgcaaatctcaaggaaatacctagagatcttcctcctgaaacagtcttactgtatctggactccaatcagatcacatctattcccaatgaaatttttaaggacctccatcaactgagagttctcaacctgtccaaaaatggcattgagtttatcgatgagcatgccttcaaaggagtagctgaaaccttgcagactctggacttgtccgacaatcggattcaaagtgtgcacaaaaatgccttcaataacctgaaggccagggccagaattgccaacaacccctggcactgcgactgtactctacagcaagttctgaggagcatggcgtccaat

SEQ ID NO: 11694 - DNA, 1695 bp, Homo sapiens
  source 1..1695: mol_type = unassigned DNA
ggaaacgcagagctaggaggtgtgggcctcgggtgaggggagacccagctcttagacctgggagcccagacagaggtggatctgcccaccttgcagctcccagaggactcctgctgccttgtaccagttgggaaaaagcaaaattcagagcagttcctttttctgggtccctcgccttggccacatcggaggaaacgtcgactcgccagggctcccgggagaaatcccgaggtcagtccctcccattctggggcacccctggagcagctagctccctgcctagcggtggcaaactccagagccccaaggagcagaacggggattccctgtgcgcaggctcctggtgcagctcctgagcacaaaggccacaccctcacagaccaggcctggtgagagagccgggcttcttcagaagtacctggatacctgaggtgcccaagcaaggaaagaaataatgaagagacacatgtgttagctgcagccttttgaaacacgcaagaaggaaatcaatagtgtggacagggctggaacctttaccacgcttgttggagtagatgaggaatgggctcgtgattatgctgacattccagcatgaatctggtagacctgtggttaacccgttccctctccatgtgtctcctcctacaaagttttgttcttatgatactgtgctttcattctgccagtatgtgtcccaagggctgtctttgttcttcctctgggggtttaaatgtcacctgtagcaatgcaaatctcaaggaaatacctagagatcttcctcctgaaacagtcttactgtatctggactccaatcagatcacatctattcccaatgaaatttttaaggacctccatcaactgagagttctcaacctgtccaaaaatggcattgagtttatcgatgagcatgccttcaaaggagtagctgaaaccttgcagactctggacttgtccgacaatcggattcaaagtgtgcacaaaaatgccttcaataacctgaaggccagggccagaattgccaacaacccctggcactgcgactgtactctacagcaagttctgaggagcatggcgtccaatcatgagacagcccacaacgtgatctgtaaaacgtccgtgttggatgaacatgctggcagaccattcctcaatgctgccaacgacgctgacctttgtaacctccctaaaaaaactaccgattatgccatgctggtcaccatgtttggctggttcactatggtgatctcatatgtggtatattatgtgaggcaaaatcaggaggatgcccggagacacctcgaatacttgaaatccctgccaagcaggcagaagaaagcagatgaacctgatgatattagcactgtggtatagtgtccaaactgactgtcattgagaaagaaagaaagtagtttgcgattgcagtagaaataagtggtttacttctcccatccattgtaaacatttgaaactttgtatttcagtttcttttgaattatgccactgctgaacttttaacaaacactacaacataaataatttgagtttaggtgatccaccccttaattgtacccccgatggtatatttctgagtaagctactatctgaacattagttagatccatctcactatttaataatgaaatttatttttttaatttaaaagcaaataaaagcttaactttgaaccatggaaaa

SEQ ID NO: 11695 - DNA, 905 bp, Homo sapiens
  source 1..905: mol_type = unassigned DNA
gctaggaggtgtgggcctcgggtgaggggagacccagctcttagacctgggagcccagacagaggtggatctgcccaccttgcagctcccaggtagattcttcttgtggctccagatgctctggcgaatgcaggagggggaggctcttttctcctttgcaccccagcaatctggagtgcaagaccgtttgcgggagggggcttagtcggctgtttcgaagaggcagcctcccctcccttttatccatcaagccccctatttcctggtgggggcacagtgactgccaaggccagtaagcacctcacttaacccttctctccctgaggaggtgcatgctcctctcccagaggtgcctttggctgagagtggatccctggttcctagtagccctatagggaaacatttggaggttgggtgggtttggaaccctgtacaacctttaggtcctccctgttcagaccttccacgtgcaggcttttcttactttctccgcgggtgccctacagaggactcctgctgccttgtaccagttgggaaaaagcaaaattcagagcagttcctttttctgggtccctcgccttggccacatcggaggaaacgtcgactcgccagggctcccgggagaaatcccgaggtcagtccctcccattctggggcacccctggagcagctagctccctgcctagcggtggcaaactccagagccccaaggagcagaacggggattccctgtgcgcaggctcctggtgcagctcctgagcacaaaggccacaccctcacagaccaggcctggtgagagagccgggcttcttcagaagtacctggatacctgaggtgcccaagcaaggaaagaaataatgaagagacacatgtgttagctgcagccttttgaaacacgcaagaag

SEQ ID NO: 11696 - DNA, 1551 bp, Homo sapiens
  source 1..1551: mol_type = unassigned DNA
atcagaaccacatcggaaatcaatgaaataagcattattcttagttctagttgaggaaactgacatgcggaacaattagttggcctgtccaagacctcctagctggtatcagaaatgaaagttgaacttgattttatctagcttcaggttctggatgatttctgtacattttgttgagaccaagaaagtttaaacggtccagggtggctccactggctcaaagggaaagaggatttagtaagtggcttgatttctcttctctgccttccattccactccacccccaggtgcccaagcaaggaaagaaataatgaagagacacatgtgttagctgcagccttttgaaacacgcaagaaggaaatcaatagtgtggacagggctggaacctttaccacgcttgttggagtagatgaggaatgggctcgtgattatgctgacattccagcatgaatctggtagacctgtggttaacccgttccctctccatgtgtctcctcctacaaagttttgttcttatgatactgtgctttcattctgccagtatgtgtcccaagggctgtctttgttcttcctctgggggtttaaatgtcacctgtagcaatgcaaatctcaaggaaatacctagagatcttcctcctgaaacagtcttactgtatctggactccaatcagatcacatctattcccaatgaaatttttaaggacctccatcaactgagagttctcaacctgtccaaaaatggcattgagtttatcgatgagcatgccttcaaaggagtagctgaaaccttgcagactctggacttgtccgacaatcggattcaaagtgtgcacaaaaatgccttcaataacctgaaggccagggccagaattgccaacaacccctggcactgcgactgtactctacagcaagttctgaggagcatggcgtccaatcatgagacagcccacaacgtgatctgtaaaacgtccgtgttggatgaacatgctggcagaccattcctcaatgctgccaacgacgctgacctttgtaacctccctaaaaaaactaccgattatgccatgctggtcaccatgtttggctggttcactatggtgatctcatatgtggtatattatgtgaggcaaaatcaggaggatgcccggagacacctcgaatacttgaaatccctgccaagcaggcagaagaaagcagatgaacctgatgatattagcactgtggtatagtgtccaaactgactgtcattgagaaagaaagaaagtagtttgcgattgcagtagaaataagtggtttacttctcccatccattgtaaacatttgaaactttgtatttcagtttcttttgaattatgccactgctgaacttttaacaaacactacaacataaataatttgagtttaggtgatccaccccttaattgtacccccgatggtatatttctgagtaagctactatctgaacattagttagatccatctcactatttaataatgaaatttatttttttaatttaaaagcaaataaaagcttaactttgaaccatggaaaa

SEQ ID NO: 11697 - DNA, 4054 bp, Homo sapiens
  source 1..4054: mol_type = unassigned DNA
aagaaagaggggcagaggagggaaggcgactgcagtccgaaaggagcttttggaagctaggaccctaagcgtcaggacgtggcattggtcgagagaaagcctgggctggcaagagctgccgccggtgctgggagagcatttatttgggagaaaaagaggggagagagcagagggagggggaggaagagagttcaaaccgaagtggatggaaggggactggggtttctgccgcgcagggagccgtgagccagggcgatggcgctaagggcggcgcggagcagctgcgctcccgagaacgcgtctcctcgcagaggactagcagacatcgggaaggtctgcgccaacgggaaccaacttgtggctccaaaatgtacccaacgcagctggaaatgagatcaaagctgcagttgcatttgagaaggatgagaagagccagcgattagggaattttttttttacccgttttcttcctttttctttttttcttctttttctttttttctttcttttttcgtgtgtgttttttttaatttgcctaccaccctgtctgtcccctcacttcgccctccccatttgaaataaaagccccagtctcaacttccatcacctcggcgctcccggagccactaccggctgatggaggagaaggggacccgggggctggcaggggccaccggcgagggaccgcatcctgcgtctcccccgtgatcccggccccgaccgcggagttctgcaacacctggaggatctggaccgggtgctgggggtgggggcggggacagaggaaggaaaggcaccccgagccttaaaaagaaaaaaaaaaagtagcggggggaggaatgggtttcttcttgacagctgacggagccttgaaattttcctccactacctccgcccccgcccccgcccccgccccccgcactccatttaacgtgagattatgaaattgcagaggcggtggagggaaggagacaggatataaccggagtttggaggggagaggggaaggtggctggccgggtggctgaaatcaaaaattcaattgcgcactgggttgtgatgagaaatctaatcagatctttggcgaaggggccggccggaaggatggagagtgggggggaagttgctccccaaattcttcgaaggggaggctggggagaggaattgaccatgtaaaaggagacttttttttttggtggtggtggctgttgggtgccttgcaaaaatgaaggatgcaggacgcagctttctcctggaaccgaacgcaatggataaactgattgtgcaagagagaaggaagaacgaagctttttcttgtgagccctggatcttaacacaaatgtgtatatgtgcacacagggagcattcaagaatgaaataaaccagagttagacccgcgggggttggtgtgttctgacataaataaataatcttaaagcagctgttcccctccccccccccaaaaaaaaggatgattggaaatgaagaaccgaggattcacaaagaaaaaagtatgttcatttttctctataaaggagaaagtgagccaaggagatatttttggaatgaaaagtttggggcttttttagtaaagtaaagaactggtgtggtggtgttttcttttctttttgaatttcccacaagaggagaggaaattaataatacatctgcaaagaaatttcagagaagaaaagttgaccgcggcagattgaggcattgattgggggagagaaaccagcagagcacagttggatttgtgcctatgttgactaaaattgacggataattgcagttggatttttcttcatcaacctcctttttttttaatttttattccttttggtatcaagatcatgcgttttctcttgttcttaaccacctggatttccatctggatgttgctgtgatcagtctgaaatacaactgtttgaattccagaaggaccaacaccagataaattatgaatgttgaacaagatgaccttacatccacagcagataatgataggtcctaggtttaacagggccctatttgaccccctgcttgtggtgctgctggctcttcaacttcttgtggtggctggtctggtgcgggctcagacctgcccttctgtgtgctcctgcagcaaccagttcagcaaggtgatttgtgttcggaaaaacctgcgtgaggttccggatggcatctccaccaacacacggctgctgaacctccatgagaaccaaatccagatcatcaaagtgaacagcttcaagcacttgagacacttggaaatcctacagttgagtaggaaccatatcagaaccattgaaattggggctttcaatggtctggcgaacctcaacactctggaactctttgacaatcgtcttactaccatcccgaatggagcttttgtatacttgtctaaactgaaggagctctggttgcgaaacaaccccattgaaagcatcccttcttatgcttttaacagaattccttctttgcgccgactagacttaggggaattgaaaagactttcatacatctcagaaggtgcctttgaaggtctgtccaacttgaggtatttgaaccttgccatgtgcaaccttcgggaaatccctaacctcacaccgctcataaaactagatgagctggatctttctgggaatcatttatctgccatcaggcctggctctttccagggtttgatgcaccttcaaaaactgtggatgatacagtcccagattcaagtgattgaacggaatgcctttgacaaccttcagtcactagtggagatcaacctggcacacaataatctaacattactgcctcatgacctcttcactcccttgcatcatctagagcggatacatttacatcacaacccttggaactgtaactgtgacatactgtggctcagctggtggataaaagacatggccccctcgaacacagcttgttgtgcccggtgtaacactcctcccaatctaaaggggaggtacattggagagctcgaccagaattacttcacatgctatgctccggtgattgtggagccccctgcagacctcaatgtcactgaaggcatggcagctgagctgaaatgtcgggcctccacatccctgacatctgtatcttggattactccaaatggaacagtcatgacacatggggcgtacaaagtgcggatagctgtgctcagtgatggtacgttaaatttcacaaatgtaactgtgcaagatacaggcatgtacacatgtatggtgagtaattccgttgggaatactactgcttcagccaccctgaatgttactgcagcaaccactactcctttctcttacttttcaaccgtcacagtagagactatggaaccgtctcaggatgaggcacggaccacagataacaatgtgggtcccactccagtggtcgactgggagaccaccaatgtgaccacctctctcacaccacagagcacaaggtcgacagagaaaaccttcaccatcccagtgactgatataaacagtgggatcccaggaattgatgaggtcatgaagactaccaaaatcatcattgggtgttttgtggccatcacactcatggctgcagtgatgctggtcattttctacaagatgaggaagcagcaccatcggcaaaaccatcacgccccaacaaggactgttgaaattattaatgtggatgatgagattacgggagacacacccatggaaagccacctgcccatgcctgctatcgagcatgagcacctaaatcactataactcatacaaatctcccttcaaccacacaacaacagttaacacaataaattcaatacacagttcagtgcatgaaccgttattgatccgaatgaactctaaagacaatgtacaagagactcaaatctaaaacatttacagagttacaaaaaacaaacaatcaaaaaaaaagacagtttattaaaaatgacacaaatgactgggctaaatctactgtttcaaaaaagtgtctttacaaaaaaacaaaaaagaaaagaaatttatttattaaaaattctattgtgatctaaagcagac

SEQ ID NO: 11698 - DNA, 3085 bp, Homo sapiens
  source 1..3085: mol_type = unassigned DNA
ggagtttggaggggagaggggaaggtggctggccgggtggctgaaatcaaaaattcaattgcgcactgggttgtgatgagaaatctaatcagatctttggcgaaggggccggccggaaggatggagagtgggggggaagttgctccccaaattcttcgaaggggaggctggggagaggaattgaccatgtaaaaggagacttttttttttggtggtggtggctgttgggtgccttgcaaaaatgaaggatgcaggacgcagctttctcctggaaccgaacgcaatggataaactgattgtgcaagagagaaggaagaacgaagctttttcttgtgagccctggatcttaacacaaatgtgtatatgtgcacacagggagcattcaagaatgaaataaaccagagttagacccgcgggggttggtgtgttctgacataaataaataatcttaaagcagctgttcccctccccccccccaaaaaaaaggatgattggaaatgaagaaccgaggattcacaaagaaaaaagtatgttcatttttctctataaaggagaaagtgagccaaggagatatttttggaatgaaaagtttggggcttttttagtaaagtaaagaactggtgtggtggtgttttcttttctttttgaatttcccacaagaggagaggaaattaataatacatctgcaaagaaatttcagagaagaaaagttgaccgcggcagattgaggcattgattgggggagagaaaccagcagagcacagttggatttgtgcctatgttgactaaaattgacggataattgcagttggatttttcttcatcaacctcctttttttttaatttttattccttttggtatcaagatcatgcgttttctcttgttcttaaccacctggatttccatctggatgttgctgtgatcagtctgaaatacaattggcaaacgcactgcctacttacagcatagagacccccagtggagagctagactgtttgaattccagaaggaccaacaccagataaattatgaatgttgaacaagatgaccttacatccacagcagataatgataggtcctaggtttaacagggccctatttgaccccctgcttgtggtgctgctggctcttcaacttcttgtggtggctggtctggtgcgggctcagacctgcccttctgtgtgctcctgcagcaaccagttcagcaaggtgatttgtgttcggaaaaacctgcgtgaggttccggatggcatctccaccaacacacggctgctgaacctccatgagaaccaaatccagatcatcaaagtgaacagcttcaagcacttgagacacttggaaatcctacagttgagtaggaaccatatcagaaccattgaaattggggctttcaatggtctggcgaacctcaacactctggaactctttgacaatcgtcttactaccatcccgaatggagcttttgtatacttgtctaaactgaaggagctctggttgcgaaacaaccccattgaaagcatcccttcttatgcttttaacagaattccttctttgcgccgactagacttaggggaattgaaaagactttcatacatctcagaaggtgcctttgaaggtctgtccaacttgaggtatttgaaccttgccatgtgcaaccttcgggaaatccctaacctcacaccgctcataaaactagatgagctggatctttctgggaatcatttatctgccatcaggcctggctctttccagggtttgatgcaccttcaaaaactgtggatgatacagtcccagattcaagtgattgaacggaatgcctttgacaaccttcagtcactagtggagatcaacctggcacacaataatctaacattactgcctcatgacctcttcactcccttgcatcatctagagcggatacatttacatcacaacccttggaactgtaactgtgacatactgtggctcagctggtggataaaagacatggccccctcgaacacagcttgttgtgcccggtgtaacactcctcccaatctaaaggggaggtacattggagagctcgaccagaattacttcacatgctatgctccggtgattgtggagccccctgcagacctcaatgtcactgaaggcatggcagctgagctgaaatgtcgggcctccacatccctgacatctgtatcttggattactccaaatggaacagtcatgacacatggggcgtacaaagtgcggatagctgtgctcagtgatggtacgttaaatttcacaaatgtaactgtgcaagatacaggcatgtacacatgtatggtgagtaattccgttgggaatactactgcttcagccaccctgaatgttactgcagcaaccactactcctttctcttacttttcaaccgtcacagtagagactatggaaccgtctcaggatgaggcacggaccacagataacaatgtgggtcccactccagtggtcgactgggagaccaccaatgtgaccacctctctcacaccacagagcacaaggtcgacagagaaaaccttcaccatcccagtgactgatataaacagtgggatcccaggaattgatgaggtcatgaagactaccaaaatcatcattgggtgttttgtggccatcacactcatggctgcagtgatgctggtcattttctacaagatgaggaagcagcaccatcggcaaaaccatcacgccccaacaaggactgttgaaattattaatgtggatgatgagattacgggagacacacccatggaaagccacctgcccatgcctgctatcgagcatgagcacctaaatcactataactcatacaaatctcccttcaaccacacaacaacagttaacacaataaattcaatacacagttcagtgcatgaaccgttattgatccgaatgaactctaaagacaatgtacaagagactcaaatctaaaacatttacagagttacaaaaaacaaacaatcaaaaaaaaagacagtttattaaaaatgacacaaatgactgggctaaatctactgtttcaaaaaagtgtctttacaaaaaaacaaaaaagaaaagaaa

SEQ ID NO: 11699 - DNA, 2650 bp, Homo sapiens
  source 1..2650: mol_type = unassigned DNA
ctggaagatcagatacatggaacctttgaaaactgattatttttctccgatatgacttaaaaaaaaataaaaagaagaaaagaaaatagagtagtgcacggcaagctagaggattgtaaattttccttggtgaactttgaggatccataaagaagaaatggttctctttactgcgaggctgcaaggtcacccaatgagagaggggccaaataagctggaacatcatctaatacactgaatgtaggagttactggaaaagcaagaataacttatgcggattaacaatatggaaacatcctgagactactttggaatcgccataaattaagtgggttccagttttgcaaacagagaaacgggtccatgaacaatttgctacaggtataaagaagtatctgcagaaatccagagcacttattaaacttctttgagttttctcaggaagatcaatacctgttggagaaattttactaagagcaagaaactgagagtgagaaagaagggactggccagagttactcagctagacagtgacagacaacagtggaacttctgattggcaaacgcactgcctacttacagcatagagacccccagtggagagctagactgtttgaattccagaaggaccaacaccagataaattatgaatgttgaacaagatgaccttacatccacagcagataatgataggtcctaggtttaacagggccctatttgaccccctgcttgtggtgctgctggctcttcaacttcttgtggtggctggtctggtgcgggctcagacctgcccttctgtgtgctcctgcagcaaccagttcagcaaggtgatttgtgttcggaaaaacctgcgtgaggttccggatggcatctccaccaacacacggctgctgaacctccatgagaaccaaatccagatcatcaaagtgaacagcttcaagcacttgagacacttggaaatcctacagttgagtaggaaccatatcagaaccattgaaattggggctttcaatggtctggcgaacctcaacactctggaactctttgacaatcgtcttactaccatcccgaatggagcttttgtatacttgtctaaactgaaggagctctggttgcgaaacaaccccattgaaagcatcccttcttatgcttttaacagaattccttctttgcgccgactagacttaggggaattgaaaagactttcatacatctcagaaggtgcctttgaaggtctgtccaacttgaggtatttgaaccttgccatgtgcaaccttcgggaaatccctaacctcacaccgctcataaaactagatgagctggatctttctgggaatcatttatctgccatcaggcctggctctttccagggtttgatgcaccttcaaaaactgtggatgatacagtcccagattcaagtgattgaacggaatgcctttgacaaccttcagtcactagtggagatcaacctggcacacaataatctaacattactgcctcatgacctcttcactcccttgcatcatctagagcggatacatttacatcacaacccttggaactgtaactgtgacatactgtggctcagctggtggataaaagacatggccccctcgaacacagcttgttgtgcccggtgtaacactcctcccaatctaaaggggaggtacattggagagctcgaccagaattacttcacatgctatgctccggtgattgtggagccccctgcagacctcaatgtcactgaaggcatggcagctgagctgaaatgtcgggcctccacatccctgacatctgtatcttggattactccaaatggaacagtcatgacacatggggcgtacaaagtgcggatagctgtgctcagtgatggtacgttaaatttcacaaatgtaactgtgcaagatacaggcatgtacacatgtatggtgagtaattccgttgggaatactactgcttcagccaccctgaatgttactgcagcaaccactactcctttctcttacttttcaaccgtcacagtagagactatggaaccgtctcaggatgaggcacggaccacagataacaatgtgggtcccactccagtggtcgactgggagaccaccaatgtgaccacctctctcacaccacagagcacaaggtcgacagagaaaaccttcaccatcccagtgactgatataaacagtgggatcccaggaattgatgaggtcatgaagactaccaaaatcatcattgggtgttttgtggccatcacactcatggctgcagtgatgctggtcattttctacaagatgaggaagcagcaccatcggcaaaaccatcacgccccaacaaggactgttgaaattattaatgtggatgatgagattacgggagacacacccatggaaagccacctgcccatgcctgctatcgagcatgagcacctaaatcactataactcatacaaatctcccttcaaccacacaacaacagttaacacaataaattcaatacacagttcagtgcatgaaccgttattgatccgaatgaactctaaagacaatgtacaagagactcaaatctaaaacatttacagagttacaaaaaacaaacaatcaaaaaaaaagacagtttattaaaaatgacacaaatgactgggcta

SEQ ID NO: 11700 - DNA, 2669 bp, Homo sapiens
  source 1..2669: mol_type = unassigned DNA
ggtatttcgtacagtaggagatttcaacaacgtgacaatattctctaggcacttgggctcactgtctgtagcccccaccccccgcctttcgccacctccttgcttccctactcccccttctgcttttgcctttgatgagtttttggcttactttttggcggagtctcttggacacgtttttgctggtgctggaagatcagatacatggaacctttgaaaactgattatttttctccgatatgacttaaaaaaaaataaaaagaagaaaagaaaatagagtagtgcacggcaagctagaggattgtaaattttccttggtgaactttgaggatccataaagaaggagttactggaaaagcaagaataacttatgcggattaacaatatggaaacatcctgagactactttggaatcgccataaattaagtgggttccagttttgcaaacagagaaacgggtccatgaacaatttgctacaggtataaagaagtatctgcagaaatccagagcacttattaaacttctttgagttttctcaggaagatcaatacctgttggagaaattttactaagattggcaaacgcactgcctacttacagcatagagacccccagtggagagctagactgtttgaattccagaaggaccaacaccagataaattatgaatgttgaacaagatgaccttacatccacagcagataatgataggtcctaggtttaacagggccctatttgaccccctgcttgtggtgctgctggctcttcaacttcttgtggtggctggtctggtgcgggctcagacctgcccttctgtgtgctcctgcagcaaccagttcagcaaggtgatttgtgttcggaaaaacctgcgtgaggttccggatggcatctccaccaacacacggctgctgaacctccatgagaaccaaatccagatcatcaaagtgaacagcttcaagcacttgagacacttggaaatcctacagttgagtaggaaccatatcagaaccattgaaattggggctttcaatggtctggcgaacctcaacactctggaactctttgacaatcgtcttactaccatcccgaatggagcttttgtatacttgtctaaactgaaggagctctggttgcgaaacaaccccattgaaagcatcccttcttatgcttttaacagaattccttctttgcgccgactagacttaggggaattgaaaagactttcatacatctcagaaggtgcctttgaaggtctgtccaacttgaggtatttgaaccttgccatgtgcaaccttcgggaaatccctaacctcacaccgctcataaaactagatgagctggatctttctgggaatcatttatctgccatcaggcctggctctttccagggtttgatgcaccttcaaaaactgtggatgatacagtcccagattcaagtgattgaacggaatgcctttgacaaccttcagtcactagtggagatcaacctggcacacaataatctaacattactgcctcatgacctcttcactcccttgcatcatctagagcggatacatttacatcacaacccttggaactgtaactgtgacatactgtggctcagctggtggataaaagacatggccccctcgaacacagcttgttgtgcccggtgtaacactcctcccaatctaaaggggaggtacattggagagctcgaccagaattacttcacatgctatgctccggtgattgtggagccccctgcagacctcaatgtcactgaaggcatggcagctgagctgaaatgtcgggcctccacatccctgacatctgtatcttggattactccaaatggaacagtcatgacacatggggcgtacaaagtgcggatagctgtgctcagtgatggtacgttaaatttcacaaatgtaactgtgcaagatacaggcatgtacacatgtatggtgagtaattccgttgggaatactactgcttcagccaccctgaatgttactgcagcaaccactactcctttctcttacttttcaaccgtcacagtagagactatggaaccgtctcaggatgaggcacggaccacagataacaatgtgggtcccactccagtggtcgactgggagaccaccaatgtgaccacctctctcacaccacagagcacaaggtcgacagagaaaaccttcaccatcccagtgactgatataaacagtgggatcccaggaattgatgaggtcatgaagactaccaaaatcatcattgggtgttttgtggccatcacactcatggctgcagtgatgctggtcattttctacaagatgaggaagcagcaccatcggcaaaaccatcacgccccaacaaggactgttgaaattattaatgtggatgatgagattacgggagacacacccatggaaagccacctgcccatgcctgctatcgagcatgagcacctaaatcactataactcatacaaatctcccttcaaccacacaacaacagttaacacaataaattcaatacacagttcagtgcatgaaccgttattgatccgaatgaactctaaagacaatgtacaagagactcaaatctaaaacatttacagagttacaaaaaacaaacaatcaaaaaaaaagacagtttattaaaaatgacacaaatgactgggcta

SEQ ID NO: 11701 - DNA, 583 bp, Homo sapiens
  source 1..583: mol_type = unassigned DNA
acttctcaggcaaagagcatgccaacagcctttctcttctgctttgcttgtctgtggtggatactagcaacctatgtggttctaaagtatcaagctgagattatagtatcaatgagttggaacatcaatagtgccaagtgccatttaaaaatcttttcatcttcttgtgtgttgcttttggagaggaaatgttttcagatgtggtttctagccttgcagaaaaatggcattttcaggctgtatgggactcttacatcatctagtttcaatcacctcattttgcagagcaagaaactgagagtgagaaagaagggactggccagagttactcagctagacagtgacagacaacagtggaacttctgattggcaaacgcactgcctacttacagcatagagacccccagtggagagctagactgtttgaattccagaaggaccaacaccagataaattatgaatgttgaacaagatgaccttacatccacagcagataatgataggtcctaggtttaacagggccctatttgaccccctgcttgtggtgctgctggctcttcaacttcttgtggtggctggtctg

SEQ ID NO: 11702 - DNA, 562 bp, Homo sapiens
  source 1..562: mol_type = unassigned DNA
agtttttggcttactttttggcggagtctcttggacacgtttttgctggtgctggaagatcagatacatggaacctttgaaaactgattatttttctccgatatgacttaaaaaaaaataaaaagaagaaaagaaaatagagtagtgcacggcaagctagaggattgtaaattttccttggtgaactttgaggatccataaagaagaaaccaaatgaagtgtttactgtcattatccgtatttgatgaagaggatactgaggctcaaagagaattaataatttgttcaagaccgtctaatgtggagtaatcaagagtgaatgccctgaaagtacacaccccagcctggaccagcattcttttttttttttttttttttttttttgagaggaaaaactacagagacagagtagcagcagaaatggttctctttactgcgaggctgcaaggtcacccaatgagagaggggccaaataagctggaacatcatctaatacactgaatgtaggagttactggaaaagcaagaataacttatgcggattaacaatatggaaacatcct

SEQ ID NO: 11703 - DNA, 2286 bp, Homo sapiens
  source 1..2286: mol_type = unassigned DNA
ttcctgcaggtataaagaagtatctgcagaaatccagagcacttattaaacttctttgagttttctcaggaagatcaatacctgttggagaaattttactaagattggcaaacgcactgcctacttacagcatagagacccccagtggagagctagactgtttgaattccagaaggaccaacaccagataaattatgaatgttgaacaagatgaccttacatccacagcagataatgataggtcctaggtttaacagggccctatttgaccccctgcttgtggtgctgctggctcttcaacttcttgtggtggctggtctggtgcgggctcagacctgcccttctgtgtgctcctgcagcaaccagttcagcaaggtgatttgtgttcggaaaaacctgcgtgaggttccggatggcatctccaccaacacacggctgctgaacctccatgagaaccaaatccagatcatcaaagtgaacagcttcaagcacttgagacacttggaaatcctacagttgagtaggaaccatatcagaaccattgaaattggggctttcaatggtctggcgaacctcaacactctggaactctttgacaatcgtcttactaccatcccgaatggagcttttgtatacttgtctaaactgaaggagctctggttgcgaaacaaccccattgaaagcatcccttcttatgcttttaacagaattccttctttgcgccgactagacttaggggaattgaaaagactttcatacatctcagaaggtgcctttgaaggtctgtccaacttgaggtatttgaaccttgccatgtgcaaccttcgggaaatccctaacctcacaccgctcataaaactagatgagctggatctttctgggaatcatttatctgccatcaggcctggctctttccagggtttgatgcaccttcaaaaactgtggatgatacagtcccagattcaagtgattgaacggaatgcctttgacaaccttcagtcactagtggagatcaacctggcacacaataatctaacattactgcctcatgacctcttcactcccttgcatcatctagagcggatacatttacatcacaacccttggaactgtaactgtgacatactgtggctcagctggtggataaaagacatggccccctcgaacacagcttgttgtgcccggtgtaacactcctcccaatctaaaggggaggtacattggagagctcgaccagaattacttcacatgctatgctccggtgattgtggagccccctgcagacctcaatgtcactgaaggcatggcagctgagctgaaatgtcgggcctccacatccctgacatctgtatcttggattactccaaatggaacagtcatgacacatggggcgtacaaagtgcggatagctgtgctcagtgatggtacgttaaatttcacaaatgtaactgtgcaagatacaggcatgtacacatgtatggtgagtaattccgttgggaatactactgcttcagccaccctgaatgttactgcagcaaccactactcctttctcttacttttcaaccgtcacagtagagactatggaaccgtctcaggatgaggcacggaccacagataacaatgtgggtcccactccagtggtcgactgggagaccaccaatgtgaccacctctctcacaccacagagcacaaggtcgacagagaaaaccttcaccatcccagtgactgatataaacagtgggatcccaggaattgatgaggtcatgaagactaccaaaatcatcattgggtgttttgtggccatcacactcatggctgcagtgatgctggtcattttctacaagatgaggaagcagcaccatcggcaaaaccatcacgccccaacaaggactgttgaaattattaatgtggatgatgagattacgggagacacacccatggaaagccacctgcccatgcctgctatcgagcatgagcacctaaatcactataactcatacaaatctcccttcaaccacacaacaacagttaacacaataaattcaatacacagttcagtgcatgaaccgttattgatccgaatgaactctaaagacaatgtacaagagactcaaatctaaaacatttacagagttacaaaaaacaaacaatcaaaaaaaaagacagtttattaaaaatgacacaaatgactgggctaaatctactgtttcaaaaaagtgtctttacaaaaaaacaaaaaagaaaagaaatttatttattaaaaattctattgtgatctaaagcag

SEQ ID NO: 11704 - DNA, 571 bp, Homo sapiens
  source 1..571: mol_type = unassigned DNA
tcagatttaatttttggacaggaacatttcataggtggtgctgctgtgtactttttaattcattacttcataaggcttataatgtgattgtctcaattttattgatgctaaaatgattagtgggttattaacctgatcacttgattataaagttcctcatcaacctttcatctaatactttcagtctccaattatgatttttgcatagctccattattttattagaatttgcaaaaattgtgattattctagttattttgtctttctcatttattagtttcaattcttgtgaataagaactttattaactattaagttatatttaagtgcagtttgtactggaaaagcagaataaatgcttatattttttcctttatcaattttcagactgagttggtgcgctagtaattcccaggatcatgactgagagattgttaataaaagcattgagtggtggtaaaaatacgaagatcattactttgaatgggaagaagatgacaaagatgccctcagcattaggaaaactgcctggcctgaagactctagtccttcagaataacctaatccccaa

SEQ ID NO: 11705 - DNA, 1861 bp, Homo sapiens
  source 1..1861: mol_type = unassigned DNA
gaactctaatggttaccttgttttctacttcttttccaagatcatgactgagagattgttaataaaagcattgagtggtggtaaaaatacgaagatcattactttgaatgggaagaagatgacaaagatgccctcagcattaggaaaactgcctggcctgaagactctagtccttcagaataacctaatccccaaagtgtgtccagagttatgcaacttgacccaggccgggtgcggtggctcatgcctgtaatcccagcactttgggaggctgaggcaggcggatcacttgaaaccaggagttcgagaccagcctggccaacatggcaaaaatcccatctctactaaaaatgcaaaaaaaaaaaaaaaaaaaaaaaaaaaaaaaaaaaaaaaaaaagccaggcgtggtggcacatacctactacttgggaagctgaatgagaatcacttcaacccaggaggcagaggttgcagtgagccgagatcatgccaatgcacgccagcctgggtgacagagtgagactgtctcaaaaggaaaaaaaaattcttctaattatggcttacaaaatttaatcctgcttaatctgaacaacaatcatcttacgcagcttcctcaagaagtcagcagagtctggccctactcacccaggctggagtgcaatggcatgatctcggctcactgcaacctccgccttccaggttcaaatgattctcctgcctcagcctcccgagtagctggtattacaggagtaaaacagaaatttatttctcatagttctggaagttgggaagtgaagaccaaggtgctggcagatgtgatgtctgattaaaaagtcttacttatatgagtataaattataaccaactagccagcattcctagagaactttgttttcttgagaatcttgttgaacttcaacttaactacaatcagctgatatgcatacctgaagagattaaattcttgaagaagcttcagaagcttttgctagccagaaacaacattggagttttgccggaggaactttgtgatcttaaaaaactaagaatcctagacatagctggaaatattattcagatatttccatcaggatttcaggatctgaagctgagggaattctactgtgagggaaacccactgttcctgcagcagccagtgatttctacacagcaggagaacgtctggagtctacaggaaataacatcaagatttgtaatgaatcagctagcagaaaataaccctttcctaatggatgacatagaacggtacccacaagtcaggagcatgatctctcagggaaaaacatgtgcaatatgtggacagtactttataaccgtatggctggaatgtgttcgatttgttcctccaccaaagaaactacaacctaatacaagcaacaacagccagaatttatttggtactgagtgtgcatctggtgctctgctaaatatgtcacctggaatacctcaattaatgtccaaaataaccccatgacaccagtaagaaatccaaggactggaagataagcaagaatctgaagctggtgcctctccaagtattaatttgttcttacaaatgttttactcaacgtgaccctaacctctttggaattgctcaggtgtagaacaggtgaggtgctcattcatagcctcactccacttgccctgtcagctctgcatacacagattatgccctacttaagataccatgcctgttctctttgtcaacacattaaataaaggaagaaaaataattccattataacgttcccaatctaagcactacaatctgccttcagcttgcttagattctaggtgtgctttttttggcttaaaaaagtacaaaaaaaaattgaaaaat

SEQ ID NO: 11706 - DNA, 720 bp, Homo sapiens
  source 1..720: mol_type = unassigned DNA
acttcttttccaagatcatgactgagagattgttaataaaagcattgagtggtggtaaaaatacgaagatcattactttgaatgggaagaagatgacaaagatgccctcagcattaggaaaactgcctggcctgaagactctagtccttcagaataacctaatccccaaagtgtgtccagagttatgcaacttgacccagtttcaggatctgaagctgagggaattctactgtgagggaaacccactgttcctgcagcagccagtgatttctacacagcaggagaacgtctggagtctacaggaaataacatcaagatttgtaatgaatcagctagcagaaaataaccctttcctaatggatgacatagaacggtacccacaagtcaggagcatgatctctcagggaaaaacatgtgcaatatgtggacagtactttataaccgtatggctggaatgtgttcgatttgttcctccaccaaaggactggaagataagcaagaatctgaagctggtgcctctccaagtattaatttgttcttacaaatgttttactcaacgtgaccctaacctctttggaattgctcaggtgtagaacaggtgaggtgctcattcatagcctcactccacttgccctgtcagctctgcatacacagattatgccctacttaagataccatgcctgttctctttgtcaacacattaaataaaggaagaaaaat

SEQ ID NO: 11707 - DNA, 1044 bp, Homo sapiens
  source 1..1044: mol_type = unassigned DNA
atgactgagagattgttaataaaagcattgagtggtggtaaaaatacgaagatcattactttgaatgggaagaagatgacaaagatgccctcagcattaggaaaactgcctggcctgaagactctagtccttcagaataacctaatccccaaagtgtgtccagagttatgcaacttgacccagttgacaacactaaatctgggaaacaaccttttagaagaagttccggaagagatgaaatatcttacatctctgaagaatctccatttatctggaaataggatctgtagatttgcacctggagcctgtgatggcttacaaaatttaatcctgcttaatctgaacaacaatcatcttacgcagcttcctcaagaagtcagcagattaaaaagtcttacttatatgagtataaattataaccaactagccagcattcctagagaactttgttttcttgagaatcttgttgaacttcaacttaactacaatcagctgatatgcatacctgaagagattaaattcttgaagaagcttcagaagcttttgctagccagaaacaacattggagttttgccggaggaactttgtgatcttaaaaaactaagaatcctagacatagctggaaatattattcagatatttccatcaggatttcaggatctgaagctgagggaattctactgtgagggaaacccactgttcctgcagcagccagtgatttctacacagcaggagaacgtctggagtctacaggaaataacatcaagatttgtaatgaatcagctagcagaaaataaccctttcctaatggatgacatagaacggtacccacaagtcaggagcatgatctctcagggaaaaacatgtgcaatatgtggacagtactttataaccgtatggctggaatgtgttcgatttgttcctccaccaaaggactggaagataagcaagaatctgaagctggtgcctctccaagtattaatttgttcttacaaatgttttactcaacgtgaccctaacctctttggaattgctcaggtgtag

SEQ ID NO: 11708 - DNA, 415 bp, Homo sapiens
  source 1..415: mol_type = unassigned DNA
tttgaatgggaagaagatgacaaagatgccctcagcattaggaaaactgcctggcctgaagactctagtccttcagaataacctaatccccaaagtgtgtccagagttatgcaacttgacccagttgacaacactaaatctgggaaacaaccttttagaagaagttccggaagagatgaaatatcttacatctctgaagaatctccatttatctggaaataggatctgtagatttgcacctggagcctgtggtaatttaatcaacaaggaacaacattatagcatcaaatttaatctctcatatttaataatatgagactgaaatgaaaaagaattttgcatgtttaatctttttttgttggagatatttacatactactcttgaaatataggaggagacaacacttttaaaaaa

SEQ ID NO: 11709 - DNA, 397 bp, Homo sapiens
  source 1..397: mol_type = unassigned DNA
aacctccgccttccaggttcaaatgattctcctgcctcagcctcccgagtagctggtattacaggagtaaaacagaaatttatttctcatagttctggaagttgggaagtgaagaccaaggtgctggcagatgtgatgtctgattaaaaagtcttacttatatgagtataaattataaccaactagccagcattcctagagaactttgttttcttgagaatcttgttgaacttcaacttaactacaatcagctgatatgcatacctgaagagattaaattcttgaagaagcttcagaagcttttgctagccagaaacaacattggagttttgccggaggtaagcaaaacatggaaccacagtagtttgctgttggagaagaactcaacatgatggga

SEQ ID NO: 11710 - DNA, 488 bp, Homo sapiens
  source 1..488: mol_type = unassigned DNA
ttaaaaaactaagaatcctagacatagctggaaatattattcagatatttccatcaggaaaatggccagatatggtggctcacggctgcaatcccagcatttcgggaggctgtggcgggaggattgcttttgattccatgagttcaagatcagcctggacaacatggtgaaacccctatctctacaaaacaaacaaaccaccaaaaaaattagctgggtttagtggtacaccctgtggtcccagttacttgaggtgaaagtatcactcaagcctgggaggtagaggttgcagtaagctgagatcatactccagcctgggcaacacagtgagaccctgtcttgaaaaaaaaaaaaagaaatatcttggttcttttatgaacatgtagtcagatctgctacagagagactttagtttctttccttacctcttttttcctttcttttattttaacttaaaaaaataaaacttaaaaattttgtaagttgta

SEQ ID NO: 11711 - DNA, 6507 bp, Homo sapiens
  source 1..6507: mol_type = unassigned DNA
gcttcccgcgggaacctctccagccgtccacctgaagggcactggcatcatggtctaacgtggcaccttcctggattcccctctatctcctgttcttcctaccttctactccttccctcctcttctcctccgaagaccctggcgcccactccactgcggacccctgaacacttaaggaataacccttggcagctgcacgactacgctctccgaaacctcatgggcagtttctcccgccggcgatgatggagaacctaataaggggaaggaatcccccgcaataccagagaagtccttgtaaagaggttcgtgcagcacttcggaagaggcctgaagaggagtgagcccgctacatgaaaaaaaatgcaagtcaaagtggtcacaacctagaagtctgcagagacaggaataactagcaatgcagtgcctggagatgaccaccaaacggaaaatcatcggccgtctggtgccatgccgatgtttccgaggtgaagaagaaatcatctcagttttagattactcccactgcagtcttcagcaggtgccaaaggaggtctttaacttcgaacgaacattagaggagctttatctagatgccaatcaaattgaagaactacccaagcaattgttcaactgtcaagctctacgaaaactaagtattcctgataacgacctttcaaatctgccaaccactattgctagtttagttaatcttaaagaactcgacatcagtaaaaatggtgtacaagaatttccagaaaacataaagtgctgtaagtgtttaacaattattgaagccagtgtcaatcccatttctaaactacctgatggcttcacacagctcctaaacctgacccagctctacctgaatgacgcctttcttgaatttcttccagccaattttggaagacttgtcaaattgcggatcttggagttaagagaaaatcacttgaaaactctaccaaagtcaatgcacaaactggcccagttggaaagacttgacctaggcaataatgaattcggtgagctgcctgaagttctggatcaaatacaaaatttgagggagttatggatggataataatgcattacaagtgttacctgggtctatagggaagttaaagatgttggtatacctggatatgtcaaaaaacagaatagaaacagttgacatggacatttctggatgtgaagcccttgaggacctcttattgtcatccaatatgttgcaacaattgcctgattctataggacttttgaaaaaactaacaactctaaaagtagatgacaatcaacttacaatgctacccaatacaattggaaatttatctttattagaagaatttgactgtagctgtaatgaactggagtcactaccttctactattggctaccttcatagtcttcggacattagcagttgatgagaatttccttccagaattacccagagaaattggaagttgtaagaatgtaacagtcatgtctctacgctccaacaaattagaatttcttcctgaagagattggacagatgcagaaactaagagtcctaaatttgagtgacaacagattgaagaatttaccattctcatttaccaaacttaaagagcttgcagctttgtggctttctgacaatcagtccaaagcccttatccctttacaaacagaagcccatccagaaacaaagcaaagagtattgactaactacatgtttccccagcagcctcgtggtgatgaagatttccagtcagacagtgacagctttaaccctacactgtgggaagagcagagacaacaacgcatgactgttgcctttgaatttgaagacaaaaaagaagatgacgaaaatgctgggaaagttaaggatctctcctgccaagccccctgggaaaggggccagcgtgggattactctccaacctgccagactgtctggcgattgctgcacaccatgggccaggtgtgatcagcagatccaagatatgcccgtcccccagaatgacccacagctggcatggggttgtataagtggcctccagcaggaaaggagcatgtgtactccattgccagttgcagcacaatccaccactcttccctctctaagtggcagacaggttgaaataaacctaaaacgatatccaactccttacccagaggatttaaagaatatggtaaaatctgttcaaaatttggtgggtaagccaagccatggagtgcgtgttgagaattcaaatccaactgctaacacggagcaaactgtgaaagaaaaatatgaacacaagtggccggtagccccaaaggagattacagtggaggattcttttgttcatccagctaatgaaatgaggattggggaacttcacccttcattagctgagacccctctgtacccacccaaacttgttctgctagggaaggacaaaaaagaatcaactgatgagtctgaagttgacaaaactcactgtctgaataacagtgtttcctcaggcacttactcagactactcgccttcccaggcttcctcaggatcctctaatacccgggttaaagtggggtccttgcagacaacagctaaagatgcagtacataattctttgtggggtaacaggattgcaccatctttcccacagcctcttgattcaaagccattactcagccagcgggaggctgttcccccaggcaatataccacagcgtcctgaccggctgcccatgagtgatactttcactgacaactggactgatggctcgcattatgacaacacagggtttgttgctgaggaaaccacagccgagaatgccaacagtaatcctctcttaagttcgaaatctagaagcacatcttcgcatggacgcaggcctttgatcaggcaagacaggattgttggtgttcccctggaactcgagcagtctacacacagacacacaccagaaacagaagtgcctccttccaatccttggcagaattggaccagaacccctagtccgtttgaagacaggaccgcttttccttccaaattagagacaacccccactaccagcccattgcctgaaaggaaagaacatataaaggaatctactgaaatacctagtcctttttctccaggcgtaccatgggagtatcatgattccaatcccaacaggagtcttagtaatgtcttttctcaaatccactgccgcccggaatcttctaaaggtgttatttcaattagcaaaagcacagagaggctttcccccctaatgaaagatatcaagtctaataaattcaaaaagtcacagagtatcgatgagattgacattggtacatataaggtgtataacataccattagaaaactatgcttctgggagtgatcacttaggaagccacgaacgaccggataagatgctgggaccagagcatggtatgtccagtatgtctcgaagccagtcagtcccaatgctggatgatgagatgctcacctacggaagtagtaaggggccacaacaacaaaaagcttctatgacaaaaaaagtctatcagtttgaccaaagcttcaatcctcaaggatcagtggaagtgaaagccgaaaagaggataccacccccttttcaacacaatcccgagtacgtgcaacaggccagcaaaaacatcgccaaggatttgattagtcctagagcttacagaggatacccaccgatggagcaaatgttttcattttctcagccatctgtgaatgaggatgctgtggtgaatgcccagttcgcaagccaaggggccagggcgggcttcctgagaagggccgactccctggtgagcgccacagaaatggccatgtttagaagggtcaatgagcctcatgagctgcccccaactgataggtacggcagacccccatataggggagggctggatcgccaaagcagcgttacagtgactgagtcccagttcctgaaaaggaatggcaggtatgaagatgaacacccttcatatcaagaagtgaaagctcaggcgggaagttttccggttaaaaaccttacccaaaggaggccattgtctgcgagaagctacagtacagagagttacggtgcctcccaaaccaggccagtttcagctaggcctactatggcagctcttttggaaaaaataccatctgactataacttgggtaactatggtgacaagccatcagataacagtgatttaaagacgaggcctactcctgtgaagggagaggagagctgtggtaaaatgcctgcagactggagacaacagctgcttagacatatagaagctagacggttagacaggaccccgtcccagcaaagcaacattttagacaatggacaagaagatgtatctcctagtggccaatggaatccttatccacttgggaggcgggatgtacctccggacaccattactaagaaggcaggcagccacatccagacgttgatggggtcccaaagccttcagcatcgcagccgggagcagcagccgtatgaaggaaatataaacaaagtgaccatccagcaatttcagtcaccattgcctattcagatcccctcttcacaggccacccggggacctcagcctggacggtgcttaattcaaactaaagggcaaaggagtatggatggatatccagagcagttttgtgtgagaatagaaaagaatcctggccttggatttagtatcagtggtggaattagtggacaaggaaatccattcaaaccttctgacaagggtatctttgttactagggttcagcctgatgggccagcatcaaacctactgcagcctggtgataagatccttcaggcaaatggacacagttttgtacatatggaacatgaaaaagctgtattactactgaagagtttccagaacacagtagacctagttattcaacgtgagcttactgtctaaatattttttataaatagtgaagatacgtctagccagacctaatgttcaaaaataaatttatacatagaaacaaattttgccaattgctggaccaatggcaaacattagtgccaaatgtataatactatatgttagcactgaccatccttaaaaaatgttaactctataaatatgatgttcatgtggttatgtattagttttaattgtcagcctctggctgtgcattggtgcagttttgtttctgtttttgtttttgtttttaatcaaataagtttcttctcaaaatggatttcatataatttcggagcacggaagcacacacaagctctttatgaattctgctctccatcagaaacactgcctcaaagttgtatatgcctttatatagaaaatacaaatataaagaattgtaattcccataaaatatttctagcacaaggtatatgttggcatatatacaaaaagaatatagagaaaaacaatattttcataaactaaacatctcagatagagaaaaaatatatcttaaaataagactttactatattgaatctttttcaataaaaattacatgataatgccttatgaaagtaactgtacatatggtataaagtgtttatatttggttccatattcatttgctaaattctcatgacacagagtgaaatatttcataaattagccatttatctctgggacccaaataaaaataggatgaactaatttgttcaatgcctttagctaattacaatacatgcagagtttagaaacagactaaaggtcattgtagttaagtctttttcaccacaaatttaagcagtggatgatgggtggcaggaaaggtattgctttatttctttcaagttcatgttgattataaactgtagcccctgtgatttctttacttgtaaatgtggaatttatttgtgtgttgcttaatctaatttgctgctttttaaattatttaaaacgaattttggaaattgataaaatttatcattacgaaagactgctgttagaaagttatggtaggtgattttaaatccttggtatttaaatatgaaacttcaaatataatttctcagagctgtggtctacctgtatcattaatttcaatggctgtttttctgggcagaaatagataaaatactttttttccaaaaacagtttcaaggtatgtaaaatcctgaatgctttttcactgaagagaaagacaagcatggttaatgtagaattatttacttttccattgaaactattttcctgcataaatgatcaaaatttattttataatcctttaaaatacttatctttcatattagtcattaatttaattacaatattaatttgaatttccaggataatttcccggagttggttgcatgcattatctttcataattttacatagttcttttgttatataatgaatttactttacatgctagtgtttcaagtattgtatgaggattttcacaatagtatcactgaatgatgtcaccagagctctgagaataatatttgtaagttaactgttttatggggacattgaaaatattgtatttttgtagggtctattaaaatgagtgtcacttattagaa

SEQ ID NO: 11712 - DNA, 2375 bp, Homo sapiens
  source 1..2375: mol_type = unassigned DNA
gtctaacgtggcaccttcctggattcccctctatctcctgttcttcctaccttctactccttccctcctcttctcctccgaagaccctggcgcccactccactgcggacccctgaacacttaaggaataacccttggcagctgcacgactacgctctccgaaacctcatgggcagtttctcccgccggcgatgatggagaacctaataaggggaaggaatcccccgcaataccagagaagtccttgtaaagaggttcgtgcagcacttcggaagaggcctgaagaggagttgcagtgcctggagatgaccaccaaacggaaaatcatcggccgtctggtgccatgccgatgtttccgaggtgaagaagaaatcatctcagttttagattactcccactgcagtcttcagcaggtgccaaaggaggtctttaacttcgaacgaacattagaggagctttatctagatgccaatcaaattgaagaactacccaagcaattgttcaactgtcaagctctacgaaaactaagtattcctgataacgacctttcaaatctgccaaccactattgctagtttagttaatcttaaagaactcgacatcagtaaaaatggtgtacaagaatttccagaaaacataaagtgctgtaagtgtttaacaattattgaagccagtgtcaatcccatttctaaactacctgatggcttcacacagctcctaaacctgacccagctctacctgaatgacgcctttcttgaatttcttccagccaattttggaagacttgtcaaattgcggatcttggagttaagagaaaatcacttgaaaactctaccaaacatctgaagatccagagtgtgccccttgcccaatcgcctgagactatacagtgacacctacaacagaggatgtggagggagcagcttttcgggcaccagaaatggcagcatcaggagcatcagcacgaatagactttgtagaggtagttctcccaaactatattatgaaaccaaacatttttggtgcgctacctgctgatgggggctgccttcttactgcctagtatctacaaaatgtttggtctttgttaaagtttaacgatgacatttctgactaatatagagagacctgatttttttccaaatgtgttcagttgccataactttcaatgaatatgaaattttatcagtctcagaaaaacattaatacccatatttttatctaattgatttcactatttgttatgttaaggtgcttttgtgtataatttttgtatatatttttaaatgggatcaaactaagccataatttaaaagtcatcctaatgcagtaaataagataatttctctagtttgttaaattcttcagagaccgaatataattgctcgtttttctgtcatactccctgatgatgttccattgtggacttattttgcaaagttcccagatggcacaagtcaaaatatgaaatgctgatgattgattgattttatgtatcctttcatcttatgtaatttaatgtggaacagttattttgtagctctaaaatacatttgttaattaaccatattggcttttcatgcagttcaatggcttatagcatttcaatttgcatagaaaatgaatctctgtaatgatacttttgctaaataaataacaatcgacataatgggttcatttgcttttaacattttatacatacaatttagaagtaggatatatttcatattgaaattttgaaaagcttgaaattcaacatacaaggtcaccatcttgctgatgcctaatgcagtacagcaaattcattcttcatcccatgttaactcctttttggaacaagtcaaaatacaaataatttacaatgattgtgttggagctattgcttgattaaatacaattcaaaggttctttttataaaacaggtgtgagcaggacacattgcacttacgggcttttcctatttttttggttctatttcattttactgcctaggaaagaaacatttttttgtaaaacctatgctatggaactgaaatgtactttattgaatatttctattctgttttatgaatatcaattatgtgaaatatataaatataaaattgccttagaatgcctaactctttgtataaaacagatatctgaaagtagatgttggttttttgttcaaattgtgtaaatgctgatttttccatgagtacttatgaagatctatatgtaaaaattttaagtctgcttactgtgtttgtaccaccttgttcttagctgtgtatactctatgctaattgacttctgtcattgtcacatatattgcatatgtctctcaaaaattaaaaggtatattgctattctaaaaataaaaaatgtaaattcctga

SEQ ID NO: 11713 - DNA, 5000 bp, Homo sapiens
  source 1..5000: mol_type = unassigned DNA
ttctgcgtttctctagtgcagtgcctggagatgaccaccaaacggaaaatcatcggccgtctggtgccatgccgatgtttccgaggtgaagaagaaatcatctcagttttagattactcccactgcagtcttcagcaggtgccaaaggaggtctttaacttcgaacgaacattagaggagctttatctagatgccaatcaaattgaagaactacccaagcaattgttcaactgtcaagctctacgaaaactaagtattcctgataacgacctttcaaatctgccaaccactattgctagtttagttaatcttaaagaactcgacatcagtaaaaatggtgtacaagaatttccagaaaacataaagtgctgtaagtgtttaacaattattgaagccagtgtcaatcccatttctaaactacctgatggcttcacacagctcctaaacctgacccagctctacctgaatgacgcctttcttgaatttcttccagccaattttggaagacttgtcaaattgcggatcttggagttaagagaaaatcacttgaaaactctaccaaagtcaatgcacaaactggcccagttggaaagacttgacctaggcaataatgaattcggtgagctgcctgaagttctggatcaaatacaaaatttgagggagttatggatggataataatgcattacaagtgttacctgggtctatagggaagttaaagatgttggtatacctggatatgtcaaaaaacagaatagaaacagttgacatggacatttctggatgtgaagcccttgaggacctcttattgtcatccaatatgttgcaacaattgcctgattctataggacttttgaaaaaactaacaactctaaaagtagatgacaatcaacttacaatgctacccaatacaattggaaatttatctttattagaagaatttgactgtagctgtaatgaactggagtcactaccttctactattggctaccttcatagtcttcggacattagcagttgatgagaatttccttccagaattacccagagaaattggaagttgtaagaatgtaacagtcatgtctctacgctccaacaaattagaatttcttcctgaagagattggacagatgcagaaactaagagtcctaaatttgagtgacaacagattgaagaatttaccattctcatttaccaaacttaaagagcttgcagctttgtggctttctgacaatcagtccaaagcccttatccctttacaaacagaagcccatccagaaacaaagcaaagagtattgactaactacatgtttccccagcagcctcgtggtgatgaagatttccagtcagacagtgacagctttaaccctacactgtgggaagagcagagacaacaacgcatgactgttgcctttgaatttgaagacaaaaaagaagatgacgaaaatgctgggaaagttaaggatctctcctgccaagccccctgggaaaggggccagcgtgggattactctccaacctgccagactgtctggcgattgctgcacaccatgggccaggtgtgatcagcagatccaagatatgcccgtcccccagaatgacccacagctggcatggggttgtataagtggcctccagcaggaaaggagcatgtgtactccattgccagttgcagcacaatccaccactcttccctctctaagtggcagacaggttgaaataaacctaaaacgatatccaactccttacccagaggatttaaagaatatggtaaaatctgttcaaaatttggtgggtaagccaagccatggagtgcgtgttgagaattcaaatccaactgctaacacggagcaaactgtgaaagaaaaatatgaacacaagtggccggtagccccaaaggagattacagtggaggattcttttgttcatccagctaatgaaatgaggattggggaacttcacccttcattagctgagacccctctgtacccacccaaacttgttctgctagggaaggacaaaaaagaatcaactgatgagtctgaagttgacaaaactcactgtctgaataacagtgtttcctcaggcacttactcagactactcgccttcccaggcttcctcaggatcctctaatacccgggttaaagtggggtccttgcagacaacagctaaagatgcagtacataattctttgtggggtaacaggattgcaccatctttcccacagcctcttgattcaaagccattactcagccagcgggaggctgttcccccaggcaatataccacagcgtcctgaccggctgcccatgagtgatactttcactgacaactggactgatggctcgcattatgacaacacagggtttgttgctgaggaaaccacagccgagaatgccaacagtaatcctctcttaagttcgaaatctagaagcacatcttcgcatggacgcaggcctttgatcaggcaagacaggattgttggtgttcccctggaactcgagcagtctacacacagacacacaccagaaacagaagtgcctccttccaatccttggcagaattggaccagaacccctagtccgtttgaagacaggaccgcttttccttccaaattagagacaacccccactaccagcccattgcctgaaaggaaagaacatataaaggaatctactgaaatacctagtcctttttctccaggcgtaccatgggagtatcatgattccaatcccaacaggagtcttagtaatgtcttttctcaaatccactgccgcccggaatcttctaaaggtgttatttcaattagcaaaagcacagagaggctttcccccctaatgaaagatatcaagtctaataaattcaaaaagtcacagagtatcgatgagattgacattggtacatataaggtgtataacataccattagaaaactatgcttctgggagtgatcacttaggaagccacgaacgaccggataagatgctgggaccagagcatggtatgtccagtatgtctcgaagccagtcagtcccaatgctggatgatgagatgctcacctacggaagtagtaaggggccacaacaacaaaaagcttctatgacaaaaaaagtctatcagtttgaccaaagcttcaatcctcaaggatcagtggaagtgaaagccgaaaagaggataccacccccttttcaacacaatcccgagtacgtgcaacaggccagcaaaaacatcgccaaggatttgattagtcctagagcttacagaggatacccaccgatggagcaaatgttttcattttctcagccatctgtgaatgaggatgctgtggtgaatgcccagttcgcaagccaaggggccagggcgggcttcctgagaagggccgactccctggtgagcgccacagaaatggccatgtttagaagggtcaatgagcctcatgagctgcccccaactgataggtacggcagacccccatataggggagggctggatcgccaaagcagcgttacagtgactgagtcccagttcctgaaaaggaatggcaggtatgaagatgaacacccttcatatcaagaagtgaaagctcaggcgggaagttttccggttaaaaaccttacccaaaggaggccattgtctgcgagaagctacagtacagagagttacggtgcctcccaaaccaggccagtttcagctaggcctactatggcagctcttttggaaaaaataccatctgactataacttgggtaactatggtgacaagccatcagataacagtgatttaaagacgaggcctactcctgtgaagggagaggagagctgtggtaaaatgcctgcagactggagacaacagctgcttagacatatagaagctagacggttagacaggaatgctgcttacaaacacaatacagttaaccttggcatgctgccctatggaggtatttcagcaatgcatgcaggcagaagcatgactttaaacttgcagactaagtctaaatttgatcatcaagaactacctcttcagaaaaccccgtcccagcaaagcaacattttagacaatggacaagaagatgtatctcctagtggccaatggaatccttatccacttgggaggcgggatgtacctccggacaccattactaagaaggcaggcagccacatccagacgttgatggggtcccaaagccttcagcatcgcagccgggagcagcagccgtatgaaggaaatataaacaaagtgaccatccagcaatttcagtcaccattgcctattcagatcccctcttcacaggccacccggggacctcagcctggacggtgcttaattcaaactaaagggcaaaggagtatggatggatatccagagcagttttgtgtgagaatagaaaagaatcctggccttggatttagtatcagtggtggaattagtggacaaggaaatccattcaaaccttctgacaagggtatctttgttactagggttcagcctgatgggccagcatcaaacctactgcagcctggtgataagatccttcaggcaaatggacacagttttgtacatatggaacatgaaaaagctgtattactactgaagagtttccagaacacagtagacctagttattcaacgtgagcttactgtctaaatattttttataaatagtgaagatacgtctagccagacctaatgttcaaaaataaatttatacatagaaacaaattttgccaattgctggaccaatggcaaacattagtgccaaatgtataatactatatgttagcactgaccatccttaaaaaatgttaactctataaatatgatgttcatgtggttatgtattagttttaattgtcagcctctggctgtgcattggtgcagttttgtttctgtttttgtttttgtttttaatcaaataagtttcttctcaaaatggatttcatataatttcggagcacggaagcacacacaagctctttatgaattctgctctccatcagaaac

SEQ ID NO: 11714 - DNA, 775 bp, Homo sapiens
  source 1..775: mol_type = unassigned DNA
agggtatctttgttactagggttcagcctgatgggccagcatcaaacctactgcagcctggtgataagatccttcaggcaaatggacacagttttgtacatatggaacatgaaaaagctgtattactactgaagagtttccagaacacagtagacctagttattcaacgaaaacatttactgtagctgaatctctgaggcctaaagtatattattcataaactgaaaacatttggagacatttcattgaagaatataacaaaaacattaaatattatgattataaatattaaaataaatatttgttgggcatcaactacatatcaggtactatgagggatgtaatgtggtcccctcagcacagaatctcacagtccagaggaaagatgagagaagttccacatcaaagacagtacaaggcaatgtgaaacttagtgtcattgcgcatcaacttagaaaatgtgaattgattaaaaatatgtgatggattgtgcagcatgcttacatttgaaaatggagattgtgcctttaaatacttaatcaaaggactcctgaccttcaagtaccagtttgggcatattactggagatccaggttgaaagtctttccactcagaggactcttatttggcttgaatgtggaaaaggcatctggttcaggcactgggacaactcttttccaaagaaagacccaaaaatcgtacaaataagtccaaatgaagcatgatgggaaatcagggactaattctgcttggaggacagggaaggctttcaaag

SEQ ID NO: 11715 - DNA, 712 bp, Homo sapiens
  source 1..712: mol_type = unassigned DNA
aggcaaatggacacagttttgtacatatggaacatgaaaaagctgtattactactgaagagtttccagaacacagtagacctagttattcaacgaaaacatttactgtagctgaatctctgaggcctaaagtatattattcataaactgaaaacatttggagacatttcattgaagaatataacaaaaacattaaatattatgattataaatattaaaataaatatttgttgggcatcaactacatatcaggtactatgagggatgtaatgtggtcccctcagcacagaatctcacagtccagaggaaagatgagagaagttccacatcaaagacagtacaaggcaatgtgtatctttcccattctgcctgagatcatagctatttggtgtttgtttttcctatgaactttaagctttttgagagagaggatcagacaatacttaacaaaggacttctagacagaagagcctcaggagagaaacttagtgtcattgcgcatcaacttagaaaatgtgaattgattaaaaatatgtgatggattgtgcagcatgcttacatttgaaaatggagattgtgcctttaaatacttaatcaaaggactcctgaccttcaagtaccagtttgggcatattactggagatccaggttgaaagtctttccactcagaggactcttatttggcttgaatgtggaaaaggcatctggttcag

SEQ ID NO: 11716 - DNA, 786 bp, Homo sapiens
  source 1..786: mol_type = unassigned DNA
acagttttgtacatatggaacatgaaaaagctgtattactactgaagagtttccagaacacagtagacctagttattcaacgaaaacatttactgtagctgaatctctgaggcctaaagtatattattcataaactgaaaacatttggagacatttcattgaagaatataacaaaaacattaaatattatgattataaatattaaaataaatatttgttgggcatcaactacatatcaggtactatgagggatgtaatgtggtcccctcagcacagaatctcacagtccagaggaaagatgagagaagttccacatcaaagacagtacaaggcaatgtgtatctttcccattctgcctgagatcatagctatttggtgtttgtttttcctatgaactttaagctttttgagagagaggatcagacaatacttaacaaaggacttctagacagaagagcctcaggagagaggagtaatcgttcagctcttcttggtttctgccttccctcctgctcttccagatgtcaaaagaagaatttacagtgaaaaataagaaacttagtgtcattgcgcatcaacttagaaaatgtgaattgattaaaaatatgtgatggattgtgcagcatgcttacatttgaaaatggagattgtgcctttaaatacttaatcaaaggactcctgaccttcaagtaccagtttgggcatattactggagatccaggttgaaagtctttccactcagaggactcttatttggcttgaatgtggaaaaggcatctggttcag

SEQ ID NO: 11717 - DNA, 792 bp, Homo sapiens
  source 1..792: mol_type = unassigned DNA
atgaaaaagctgtattactactgaagagtttccagaacacagtagacctagttattcaacgaaaacatttactgtagctgaatctctgaggcctaaagtatattattcataaactgaaaacatttggagacatttcattgaagaatataacaaaaacattaaatattatgattataaatattaaaataaatatttgttgggcatcaactacatatcaggtactatgagggatgtaatgtggtcccctcagcacagaatctcacagtccagaggaaagatgagagaagttccacatcaaagacagtacaaggcaatgtgaaacttagtgtcattgcgcatcaacttagaaaatgtgaattgattaaaaatatgtgatggattgtgcagcatgcttacatttgaaaatggagattgtgcctttaaatacttaatcaaaggactcctgaccttcaagtaccagtttgggcatattactggagatccaggttgaaagtctgttggcagagaaagtatgactctgcttttagccttctgcacaagacaaaatccttctggtgatcctcagtctttccactcagaggactcttatttggcttgaatgtggaaaaggcatctggttcagaaaaaaagttgattacagttgatcctcattattcatgggtgctatatttgcaaacttgcctactcactaaagtttatacccccaaatcaatgtgtggcacttccgaggtcattcataaacaggcacagaggagcaaaaaattggagtcaccccacgggcatgttcccagg

SEQ ID NO: 11718 - DNA, 888 bp, Homo sapiens
  source 1..888: mol_type = unassigned DNA
acatttggagacatttcattgaagaatataacaaaaacattaaatattatgattataaatattaaaataaatatttgttgggcatcaactacatatcaggtactatgagggatgtaatgtggtcccctcagcacagaatctcacagtccagaggaaagatgagagaagttccacatcaaagacagtacaaggcaatgtgtatctttcccattctgcctgagatcatagctatttggtgtttgtttttcctatgaactttaagctttttgagagagaggatcagacaatacttaacaaaggacttctagacagaagagcctcaggagagaggagtaatcgttcagctcttcttggtttctgccttccctcctgctcttccagatgtcaaaagaagaatttacagtgaaaaataagaaacttagtgtcattgcgcatcaacttagaaaatgtgaattgattaaaaatatgtgatggattgtgcagcatgcttacatttgaaaatggagattgtgcctttaaatacttaatcaaaggactcctgaccttcaagtaccagtttgggcatattactggagatccaggttgaaagtctgttggcagagaaagtatgactctgcttttagccttctgcacaagacaaaatccttctggtgatcctcagtctttccactcagaggactcttatttggcttgaatgtggaaaaggcatctggttcagaaaaaaagttgattacagttgatcctcattattcatgggtgctatatttgcaaacttgcctactcactaaagtttatacccccaaatcaatgtgtggcacttccgaggtcattcataaacaggcacagaggagcaaaaaattggagtcaccccacgggcatgttcccagg

SEQ ID NO: 11719 - DNA, 476 bp, Homo sapiens
  source 1..476: mol_type = unassigned DNA
aacttagaaaatgtgaattgattaaaaatatgtgatggattgtgcagcatgcttacatttgaaaatggagattgtgcctttaaatacttaatcaaaggactcctgaccttcaagtaccagtttgggcatattactggagatccaggttgaaagccccctaggaccagctactggtaagtcattttgtccattttcattgatctggccacataaggaacatcctgtttctttaaatcctcaatgcttaaattgccatgtagaaatcaactccctatcaattttctacatttaatccttggcttcttgtcatattttcatttttctgcactggttcccatggcaacaagtctgttggcagagaaagtatgactctgcttttagccttctgcacaagacaaaatccttctggtgatcctcagtctttccactcagaggactcttatttggcttgaatgtggaaaaggcatctggttcag

SEQ ID NO: 11720 - DNA, 2556 bp, Homo sapiens
  source 1..2556: mol_type = unassigned DNA
ggtattgaaaaaaaagctctgtatctttgtatattcagttgtcaacatggagaagccaccttttaaaaaagatcagttctgtaaagcataatgcctactacacagacatcattattctacttaaaagtctttttttaaaattccaaatacttgtggtagtagaaagcaataaatattctaaaatgagggatattggtccttttgtgactgagctatatgataaactaaggaaaactacagaagttatgtctattaactctttaaggtacatgatatagcaaataatcatttgtacaacctcatagaaagttgagaggattaatcaaattgtttcaaaatttttaaggagccaaatttaaattctcaataccctatgagattttttaaactattttagattcttaccagaagaatgcatagatgtagtaaaaccattaaatacagtagtatctggtggcctttctgtgtggaggagctcgtttgtccaaggtatgatctaccagtgagaagatcagtgccaggtcacagaaaaagctaatcatttttagtttaatcctgaccagctagtcttcctccaggcatcagctacctgattttaaagagaccatattagaaatgaaaagcagcagtctctatcatatgttaaattcaaaggcatagctgctcgtgaagaccctattatgttttatttgcctatcggagaaagagatctgcctacctgcctttaggaaaaagcaatgctttatgtagcttcaattagtcctgcatcaggttattctaatgcttcctactgcaaaaaccaagcccacaagtctccaatcctaaaagtcactagaatattgatataaggaattctgtgtcagcagtatctcagtattcaaacctctgtttagggtcctgcatgtactatcaaacagcaagtgatagaacattcaggcgttttattggatttcagaattcagattcagaattaagtactcttgggataaaggaaattaacgagcttttgacatttcaagaactcattgagattgtcaaaggcttcagtaatgaactctaacaaatagatccagaagtcataagtgagaaagaaaacaagcatgtctagtgaaatctgtccagtgtacgtaacactgcacaaagagcatattttattcagaccatttggattcagatgtaccctaaagacaactatgctataatggcttgtctcctacttcctggcctctagccctacccattgcccaggtggacgttatgtttttagtttttcctttgtgggtgagggaagaagaggacatcaggtgaagtgtgccattactatttgaaaactagctctgcaggaagggttaaatcaaatcctttacagggtgaccttcctacatctccttagagcaactgcatttcaaaataggccaaagctgaagtcataggaatgagacattaattgtaggttttcaggaaagcttcggagacacggcaggtacagtctccttagagcctttgaaaatacaacatgtaggtccttctcagattatgctgaaactccaaatccttgttaaaggttttcctggactcctacagtctggtttgatcagtttattattaagtactgaatgacagagaagggtacacagggaggacttgtatcacatgaagtaaaataattatttccttaatgagaaacttaattctagggtacttacaatagctgccttattgggggaagggaggcatagatttgcaaatggtgggttttttcgtttttttgtgtgttggagtaattgaaaagatacatcaagcaataataaactagatgtgcaataatcttgtcgagtagtatgtgctggttttggaaaggtgaaaagaaaattgttacatcaggctgcttttatcaagctaagcatgggcatgcctttccaaagggtatatttgatcctacagttaattttaacattgggctgcaagcttaacctcatcaggagtggaattagattttacaaagttccccttatccaaactacagcacgcttactactttctccttccattttccacacctcagccccctaggaccagctactggtaagtcattttgtccattttcattgatctggccacataaggaacatcctgtttctttaaatcctcaatgcttaaattgccatgtagaaatcaactccctatcaattttctacatttaatccttggcttcttgtcatattttcatttttctgcactggttcccatggcaacaagtctgttggcagagaaagtatgactctgcttttagccttctgcacaagacaaaatccttctggtgatcctcagtctttccactcagaggactcttatttggcttgaatgtggaaaaggcatctggttcagaaaaaaagttgattacagttgatcctcattattcatgggtgctatatttgcgcactgggacaactcttttccaaagaaagacccaaaaatcgtacaaataagtccaaatgaagcatgatgggaaatcagggactaattctgcttggaggacagggaaggctttcaaag

SEQ ID NO: 11721 - DNA, 2983 bp, Homo sapiens
  source 1..2983: mol_type = unassigned DNA
tttctcttaataaaatgatatattttgttttgaactttggaattccattgtggcttggcactaaattataggcctagcaatcctaaatctcctatgtcctcaatatctagaaacaagcaggaactgtttgtcagaaattaaacaggacttatttgaatgtgctttaaaaaaaaaatcaatgaattcaggggaatgaaaatacatgttagaaattaaaatgtggttatctcagctatagttaagaaaattatcaaatgtaaatgatcccttttttgctggatcttataaaatatgtgatacttaagtacactgaagttttaaagttagctgcttatattgtacaaagatatttttggctctttaaaggttattttcctatattaagaaaaggtttcttatattgaaaacttttatggtgactcaggttttgtgtctatgtataggcacacataaataggaggtgtttttctttgcacatttgttttgcacagctaaaataatgaggttaaataatgcccaggtatgcaggtcaattgacctttttaatagcttaacgaaagcatttgacaaatggacaaaagaaatcacattgtatttctttgtatctctccattcctcttacccttccccaaccctctactaaagaatatttcttatttagtcaggaaatcttatgtaatatttttggacggtccataggaaaagcaagatgaaactctcaggcagacaacataaagcagctcccatatctgctagaaaggtcattaattttcagaatatattgttgaaataatttttattttcaatacttgtagtctttccactcagaggactcttatttggcttgaatgtggaaaaggcatctggttcaggtcagtaaggactgttgtatgtaagttttactctagaaaatttggttttagctttgatgacacctagcgtcagtggaatgcaatgaatgcttaatacttcggctttataatgtttgggcatttctctttaacatcctcaaatacactttcatccttgaaaacacaagcctattttctgtttgaaatgaagagaaaggtaattgacagataaacagatagtttttgtttgaagagccaatcaagtttctctttgtactcagtagggactaaaggaagcttaaggataatgacattgtcttcatatgaagaagaaattttttactagtggaaaattagaagtaaatctaccaaattctgtttgtaaattttaaagaccaccacaaaagaccttgaaaaaagtgaaactactgcaagattactgttgcttattgaaagtaataatacagttttattttttccactttataactgcccaagggctcccccaaccagctatatataagaaaaccataacatgaactagggtctttctattcaaaaaagaaatattaaactaacataagcaattctgaaggaagacagtggtaggttttcagatggtttgttaagaattatatgtaaaaggatactagatattatgttttggatgttttctaagtatctatgaaaattattttttcctaaacgatttcataattgattacttttgacctcagttattttggggcataatccttttactactctataaagaagttctacttctacctatatgaatttgtattttcccatatgccaaacacacacacataaattttctttttctcatttcagctcatataattcagttagtgaaatatttcactcttctgtaagtttaagaaaaattcctaagcagtgatacaactttgggtcgctattttagtaaaatgaagagtctctagactttttttttttttttaatgatctctgacttcactaccatatgtgcagcacaacagtgacatcttaaggccaagtaaccagagctcctttagccagagaaagaacttgaattgggatctgatttcaaagaaatcccattatattatcaagtcgttttcaaatttacaatattcgactggtaaagaaagtgcttctttatgacttcttttgcagtctttgtgaaccttttaatgtgcaatagtaaacattgacattttacatagacatattgtatattaatgcatgcatttcactgcatagtttattgacactacccttgtaaagcttttatggaagaaccaacaagccacagcagtatagcaaaagaggcttaatctttataaattggggccttttctgtctctttgctagcctaggtggctgtatacaaattcgggtgggagggggcaggaaacacctcttcacatttaaggttttctacttgggtgtactctagccaattcaaaacaaattgcttactttaataatacaattttaccattttataaaaaaaatcaaatcacaacatgtttaactgaaatggctgtattgtaattaatattttgagataattgtgattttgagcttaaattatatataaaaaattgtcatttttgtatgtgttaaaaagactactatatcacaattaaaagtactttttagttgaactacatattgatgtaaataaaactgaatgaagacatatttactactttattaacatagatcgtgaatgtacttactggtttttttgcagtatgagaccataacaaccttgaaagctgcttcattttatgtgcaaagaagtcctatgaatctatattttaaatttactgaaccagtgaaattaattactgtcagttaatttgcaaatgcaagctgtattctccagttttattttatgtactgacactaattggtaaaggtgtacaatgtgattagaatgcattttgaagatgctttctgtacagatacaaaatacagggactaaaataatgctgtgcagtgtatagcagagccatttttcggctttggtgtactcaactttttcagtatttaaaaaagtgttttgaataacataaaagtctccttattgtataaataataaaatgtcaccttattgtaaa

SEQ ID NO: 11722 - DNA, 390 bp, Homo sapiens
  source 1..390: mol_type = unassigned DNA
tggcacttccgaggtcattcataaacaggcacagaggagcaaaaaattggagtcaccccacgggcatgttcccaggcactgggacaactcttttccaaagaaagacccaaaaatcgtacaaataagtccaaatgaagcatgatgggaaatcagggactaattctgcttggaggacagggaaggctttcaaagctcttacaatgaaacatggcaataaacaaaatctcatttactgttggaaagatctgggagcaatgttagaagaaaagttaacaaaaaggtaaaaggattttaggagccaatataactactaataatgaaaatacctgtgagaaaattattcccaactagatgactacctattacaaataaatatttttctctaaccta

SEQ ID NO: 11723 - DNA, 3996 bp, Homo sapiens
  source 1..3996: mol_type = unassigned DNA
ctagtgcagtgcctggagatgaccaccaaacggaaaatcatcggccgtctggtgccatgccgatgtttccgaggtgaagaagaaatcatctcagttttagattactcccactgcagtcttcagcaggtgccaaaggaggtctttaacttcgaacgaacattagaggagctttatctagatgccaatcaaattgaagaactacccaagcaattgttcaactgtcaagctctacgaaaactaagtattcctgataacgacctttcaaatctgccaaccactattgctagtttagttaatcttaaagaactcgacatcagtaaaaatggtgtacaagaatttccagaaaacataaagtgctgtaagtgtttaacaattattgaagccagtgtcaatcccatttctaaactacctgatggcttcacacagctcctaaacctgacccagctctacctgaatgacgcctttcttgaatttcttccagccaattttggaagacttgtcaaattgcggatcttggagttaagagaaaatcacttgaaaactctaccaaagtcaatgcacaaactggcccagttggaaagacttgacctaggcaataatgaattcggtgagctgcctgaagttctggatcaaatacaaaatttgagggagttatggatggataataatgcattacaagtgttacctgggtctatagggaagttaaagatgttggtatacctggatatgtcaaaaaacagaatagaaacagttgacatggacatttctggatgtgaagcccttgaggacctcttattgtcatccaatatgttgcaacaattgcctgattctataggacttttgaaaaaactaacaactctaaaagtagatgacaatcaacttacaatgctacccaatacaattggaaatttatctttattagaagaatttgactgtagctgtaatgaactggagtcactaccttctactattggctaccttcatagtcttcggacattagcagttgatgagaatttccttccagaattacccagagaaattggaagttgtaagaatgtaacagtcatgtctctacgctccaacaaattagaatttcttcctgaagagattggacagatgcagaaactaagagtcctaaatttgagtgacaacagattgaagaatttaccattctcatttaccaaacttaaagagcttgcagctttgtggctttctgacaatcagtccaaagcccttatccctttacaaacagaagcccatccagaaacaaagcaaagagtattgactaactacatgtttccccagcagcctcgtggtgatgaagatttccagtcagacagtgacagctttaaccctacactgtgggaagagcagagacaacaacgcatgactgttgcctttgaatttgaagacaaaaaagaagatgacgaaaatgctgggaaagttaaggattgcaccatctttcccacagcctcttgattcaaagccattactcagccagcgggaggctgttcccccaggcaatataccacagcgtcctgaccggctgcccatgagtgatactttcactgacaactggactgatggctcgcattatgacaacacagggtttgttgctgaggaaaccacagccgagaatgccaacagtaatcctctcttaagttcgaaatctagaagcacatcttcgcatggacgcaggcctttgatcaggcaagacaggattgttggtgttcccctggaactcgagcagtctacacacagacacacaccagaaacagaagtgcctccttccaatccttggcagaattggaccagaacccctagtccgtttgaagacaggaccgcttttccttccaaattagagacaacccccactaccagcccattgcctgaaaggaaagaacatataaaggaatctactgaaatacctagtcctttttctccaggcgtaccatgggagtatcatgattccaatcccaacaggagtcttagtaatgtcttttctcaaatccactgccgcccggaatcttctaaaggtgttatttcaattagcaaaagcacagagaggctttcccccctaatgaaagatatcaagtctaataaattcaaaaagtcacagagtatcgatgagattgacattggtacatataaggtgtataacataccattagaaaactatgcttctgggagtgatcacttaggaagccacgaacgaccggataagatgctgggaccagagcatggtatgtccagtatgtctcgaagccagtcagtcccaatgctggatgatgagatgctcacctacggaagtagtaaggggccacaacaacaaaaagcttctatgacaaaaaaagtctatcagtttgaccaaagcttcaatcctcaaggatcagtggaagtgaaagccgaaaagaggataccacccccttttcaacacaatcccgagtacgtgcaacaggccagcaaaaacatcgccaaggatttgattagtcctagagcttacagaggatacccaccgatggagcaaatgttttcattttctcagccatctgtgaatgaggatgctgtggtgaatgcccagttcgcaagccaaggggccagggcgggcttcctgagaagggccgactccctggtgagcgccacagaaatggccatgtttagaagggtcaatgagcctcatgagctgcccccaactgataggtacggcagacccccatataggggagggctggatcgccaaagcagcgttacagtgactgagtcccagttcctgaaaaggaatggcaggtatgaagatgaacacccttcatatcaagaagtgaaagctcaggcgggaagttttccggttaaaaaccttacccaaaggaggccattgtctgcgagaagctacagtacagagagttacggtgcctcccaaaccaggccagtttcagctaggcctactatggcagctcttttggaaaaaataccatctgactataacttgggtaactatggtgacaagccatcagataacagtgatttaaagacgaggcctactcctgtgaagggagaggagagctgtggtaaaatgcctgcagactggagacaacagctgcttagacatatagaagctagacggttagacaggaatgctgcttacaaacacaatacagttaaccttggcatgctgccctatggaggtatttcagcaatgcatgcaggcagaagcatgactttaaacttgcagactaagtctaaatttgatcatcaagaactacctcttcagaaaaccccgtcccagcaaagcaacattttagacaatggacaagaagatgtatctcctagtggccaatggaatccttatccacttgggaggcgggatgtacctccggacaccattactaagaaggcaggcagccacatccagacgttgatggggtcccaaagccttcagcatcgcagccgggagcagcagccgtatgaaggaaatataaacaaagtgaccatccagcaatttcagtcaccattgcctattcagatcccctcttcacaggccacccggggacctcagcctggacggtgcttaattcaaactaaagggcaaaggagtatggatggatatccagagcagttttgtgtgagaatagaaaagaatcctggccttggatttagtatcagtggtggaattagtggacaaggaaatccattcaaaccttctgacaagggtatctttgttactagggttcagcctgatgggccagcatcaaacctactgcagcctggtgataagatccttcaggcaaatggacacagttttgtacatatggaacatgaaaaagctgtattactactgaagagtttccagaacacagtagacctagttattcaacgtgagcttactgtctaaatattttttataaatagtgaagatacgtctagccagacctaatgttcaaaaataaatttatacatagaaacaaattttgccaattgctggaccaatggcaaacatta

SEQ ID NO: 11724 - DNA, 1655 bp, Homo sapiens
  source 1..1655: mol_type = unassigned DNA
tggcagcgttttccccagaacatccccaagcctccaagttatttcaaggcaaaaatatccatgtgcctctgttgatcgtcttggactcctatatgagagtcgcgagtgtgcagcaggtgggttggtcacttctgtgcaaattaatagaagtctgtccaggtacaatgcaaagcttaatgggaccccaggatgttggaaatgattgggaagtccttggtgttcaccaattgattcttaaaatgctaacagttcataatgccagtgtaaacttgtcagtgattggactgaagaccttagatctcctcctaacttcaggtaaaatcaccttgctgatattggatgaagaaagtgatattttcatgttaatttttgatgccatgcactcatttccagccaatgatgaagtccagaaacttggatgcaaagctttacatgtgctgtttgagagaggcaataatgtggaagtcctcatgagtggcaatgtcaggtgttataatattgtggtggaagctatgaaagcattccctatgagtgaaagaattcaagaagtgagttgctgtttgctccataggcttacattaggtaattttttcaatatcctggtattaaacgaagtccatgagtttgtggtgaaagctgtgcagcagtacccagagaatgcagcattgcagatctcagcgctcagctgtttggccctcctcagaagttttccaggcatctgcgaatgcattgtcaactctcttagaacaaaatgcaacacttccctggatataatggcagcagtggtccccaaaatactaacagttatgaaacgtcatgagacatcattaccagtgcagctggaggcgcttcgagctattttacattttatagtgcctggcatgccagaagaatccagggaggatacagaatttcatcataagctaaatatggttaaaaaacagtgtttcaagaatgatattcacaaactggtcctagcagctttgaacaggttcattggaaatcctgggattcagaaatgtggattaaaagtaatttcttctattgtacattttcctgatgcattagagatgttatccctggaaggtgctatggattcagtgcttcacacactgcagatgtatccagatgaccaagaaattcagtgtctgggtttaagtcttataggatacttgattacaaagaagaatgtgttcataggaactggacatctgctggcaaaaattctggtttccagcttataccgatttaaggatgttgctgaaatacagactaaaggatttcagacaatcttagcaatcctcaaattgtcagcatctttttctaagctgctggtgcatcattcatttgacttagtaatattccatcaaatgtcttccaatatcatggaacaaaaggatcaacagtttctaaacctctgttgcaagtgttttgcaaaagtagctatggatgattacttaaaaaatgtgatgctagagagagcgtgtgatcagaataacagcatcatggttgaatgcttgcttctattgggagcagatgccaatcaagcaaaggagggatcttctttaatttgtcaggtatgtgagaaagagagcagtcccaaattggtggaactcttactgaatagtggatctcgtgaacaagatgtacgaaaa

SEQ ID NO: 11725 - DNA, 4740 bp, Homo sapiens
  source 1..4740: mol_type = unassigned DNA
gcgctggctgcgggcggtgagctgagctcgcccccggggagctgtggccggcgcccctgccggttccctgagcagcggacgttcatgctgggagggcggcgggttggaagcaggtgccaccatggctagtggcagctgtcaggggtgcgaagaggacgaggaaactctgaagaagttgatagtcaggctgaacaatgtccaggaaggaaaacagatagaaacgctggtccaaatcctggaggatctgctggtgttcacgtactccgagcgcgcctccaagttatttcaaggcaaaaatatccatgtgcctctgttgatcgtcttggactcctatatgagagtcgcgagtgtgcagcaggtgggttggtcacttctgtgcaaattaatagaagtctgtccaggtacaatgcaaagcttaatgggaccccaggatgttggaaatgattgggaagtccttggtgttcaccaattgattcttaaaatgctaacagttcataatgccagtgtaaacttgtcagtgattggactgaagaccttagatctcctcctaacttcaggtaaaatcaccttgctgatattggatgaagaaagtgatattttcatgttaatttttgatgccatgcactcatttccagccaatgatgaagtccagaaacttggatgcaaagctttacatgtgctgtttgagagagtctcagaggagcaactgactgaatttgttgagaacaaagattatatgatattgttaagtgcgttaacaaattttaaagatgaagaggaaattgtgcttcatgtgctgcattgtttacattccctagcgattccttgcaataatgtggaagtcctcatgagtggcaatgtcaggtgttataatattgtggtggaagctatgaaagcattccctatgagtgaaagaattcaagaagtgagttgctgtttgctccataggcttacattaggtaattttttcaatatcctggtattaaacgaagtccatgagtttgtggtgaaagctgtgcagcagtacccagagaatgcagcattgcagatctcagcgctcagctgtttggccctcctcactgagactattttcttaaatcaagatttagaggaaaagaatgagaatcaagagaatgatgatgagggggaagaagataaattgttttggctggaagcctgttacaaagcattaacgtggcatagaaagaacaagcacgtgcaggaggccgcatgctgggcactaaataatctccttatgtaccaaaacagtttacatgagaagattggagatgaagatggccatttcccagctcatagggaagtgatgctctccatgctgatgcattcttcatcaaaggaagttttccaggcatctgcgaatgcattgtcaactctcttagaacaaaatgttaatttcagaaaaatactgttatcaaaaggaatacacctgaatgttttggagttaatgcagaagcatatacattctcctgaagtggctgaaagtggctgtaaaatgctaaatcatctttttgaaggaagcaacacttccctggatataatggcagcagtggtccccaaaatactaacagttatgaaacgtcatgagacatcattaccagtgcagctggaggcgcttcgagctattttacattttatagtgcctggcatgccagaagaatccagggaggatacagaatttcatcataagctaaatatggttaaaaaacagtgtttcaagaatgatattcacaaactggtcctagcagctttgaacaggttcattggaaatcctgggattcagaaatgtggattaaaagtaatttcttctattgtacattttcctgatgcattagagatgttatccctggaaggtgctatggattcagtgcttcacacactgcagatgtatccagatgaccaagaaattcagtgtctgggtttaagtcttataggatacttgattacaaagaagaatgtgttcataggaactggacatctgctggcaaaaattctggtttccagcttataccgatttaaggatgttgctgaaatacagactaaaggatttcagacaatcttagcaatcctcaaattgtcagcatctttttctaagctgctggtgcatcattcatttgacttagtaatattccatcaaatgtcttccaatatcatggaacaaaaggatcaacagtttctaaacctctgttgcaagtgttttgcaaaagtagctatggatgattacttaaaaaatgtgatgctagagagagcgtgtgatcagaataacagcatcatggttgaatgcttgcttctattgggagcagatgccaatcaagcaaaggagggatcttctttaatttgtcaggtatgtgagaaagagagcagtcccaaattggtggaactcttactgaatagtggatctcgtgaacaagatgtacgaaaagcgttgacgataagcattgggaaaggtgacagccagatcatcagcttgctcttaaggaggctggccctggatgtggccaacaatagcatttgccttggaggattttgtataggaaaagttgaaccttcttggcttggtcctttatttccagataagacttctaatttaaggaaacaaacaaatatagcatctacactagcaagaatggtgatcagatatcagatgaaaagtgctgtggaagaaggaacagcctcaggcagcgatggaaatttttctgaagatgtgctgtctaaatttgatgaatggacctttattcctgactcttctatggacagtgtgtttgctcaaagtgatgacctggatagtgaaggaagtgaaggctcatttcttgtgaaaaagaaatctaattcaattagtgtaggagaattttaccgagatgccgtattacagcgttgctcaccaaatttgcaaagacattccaattccttggggcccatttttgatcatgaagatttactgaagcgaaaaagaaaaatattatcttcagatgattcactcaggtcatcaaaacttcaatcccatatgaggcattcagacagcatttcttctctggcttctgagagagaatatattacatcactagacctttcagcaaatgaactaagagatattgatgccctaagccagaaatgctgtataagtgttcatttggagcatcttgaaaagctggagcttcaccagaatgcactcacgagctttccacaacagctatgtgaaactctgaagagtttgacacatttggacttgcacagtaataaatttacatcatttccttcttatttgttgaaaatgagttgtattgctaatcttgatgtctctcgaaatgacattggaccctcagtggttttagatcctacagtgaaatgtccaactctgaaacagtttaacctgtcatataaccagctgtcttttgtacctgagaacctcactgatgtggtagagaaactggagcagctcattttagaaggaaataaaatatcagggatatgctcccccttgagactgaaggaactgaagattttaaaccttagtaagaaccacatttcatccctatcagagaactttcttgaggcttgtcctaaagtggagagtttcagtgccagaatgaattttcttgctgctatgcctttcttgcctccttctatgacaatcctaaaattatctcagaacaaattttcctgtattccagaagcaattttaaatcttccacacttgcggtctttagatatgagcagcaatgatattcagtacctaccaggtcccgcacactggaaatctttgaacttaagggaactcttatttagccataatcagatcagcatcttggacttgagtgaaaaagcatatttatggtctagagtagagaaactgcatctttctcacaataaactgaaagaggtaagacgattattgccacttaaaaaatatactttatgatttgcatcattacaaattatcattttaagtgatatttagcttctaaataccaatttcatgaaactagaagcttcctgttaactataaattcctgtcaactataaatccagatttccattaaatttaaaaataagaacagctactaatgatgtgtcacttaatttaatttccattctcacaccgacaatttaaaaaaatctacttttaaaaataaggtagtagccttaatacttccactaaacaataaaacaatatgctatacttatcagaaccttttaatctgaaagctaaacagctagatataaatttgtctacccaacatttgtacaaagtaaaaattattagaatattcatttcaaattatgtgtgatgttatcatataacatattatagattaactcaaattattcttaactgttacttaactatgacaaaacaacttagaacgctttgctaatacacaagatagtataaggataaaaattctttatagtactagctcataaagagtgttctatggaatagtagtggatgtcatttaataactataaattcaaaataagcattgtaaatatcaataccattcaatttttttttgttttttaaacaagttgtaagcctaccctatggtaaatggatatggtaacacagcataatttcctcaaaaaattacttttgtgatatacttttaaaggattatatgaatatatacataattatagatgaatgtgatgctgtgtgtcattgtatcaccaaatctctgtccaatctgttaacagactcttaaataaaccatttttctc

SEQ ID NO: 11726 - DNA, 9158 bp, Homo sapiens
  source 1..9158: mol_type = unassigned DNA
ttccctgagcagcggacgttcatgctgggagggcggcgggttggaagcaggtgccaccatggctagtggcagctgtcaggggtgcgaagaggacgaggaaactctgaagaagttgatagtcaggctgaacaatgtccaggaaggaaaacagatagaaacgctggtccaaatcctggaggatctgctggtgttcacgtactccgagcgcgcctccaagttatttcaaggcaaaaatatccatgtgcctctgttgatcgtcttggactcctatatgagagtcgcgagtgtgcagcaggtgggttggtcacttctgtgcaaattaatagaagtctgtccaggtacaatgcaaagcttaatgggaccccaggatgttggaaatgattgggaagtccttggtgttcaccaattgattcttaaaatgctaacagttcataatgccagtgtaaacttgtcagtgattggactgaagaccttagatctcctcctaacttcaggtaaaatcaccttgctgatattggatgaagaaagtgatattttcatgttaatttttgatgccatgcactcatttccagccaatgatgaagtccagaaacttggatgcaaagctttacatgtgctgtttgagagagtctcagaggagcaactgactgaatttgttgagaacaaagattatatgatattgttaagtgcgttaacaaattttaaagatgaagaggaaattgtgcttcatgtgctgcattgtttacattccctagcgattccttgcaataatgtggaagtcctcatgagtggcaatgtcaggtgttataatattgtggtggaagctatgaaagcattccctatgagtgaaagaattcaagaagtgagttgctgtttgctccataggcttacattaggtaattttttcaatatcctggtattaaacgaagtccatgagtttgtggtgaaagctgtgcagcagtacccagagaatgcagcattgcagatctcagcgctcagctgtttggccctcctcactgagactattttcttaaatcaagatttagaggaaaagaatgagaatcaagagaatgatgatgagggggaagaagataaattgttttggctggaagcctgttacaaagcattaacgtggcatagaaagaacaagcacgtgcaggaggccgcatgctgggcactaaataatctccttatgtaccaaaacagtttacatgagaagattggagatgaagatggccatttcccagctcatagggaagtgatgctctccatgctgatgcattcttcatcaaaggaagttttccaggcatctgcgaatgcattgtcaactctcttagaacaaaatgttaatttcagaaaaatactgttatcaaaaggaatacacctgaatgttttggagttaatgcagaagcatatacattctcctgaagtggctgaaagtggctgtaaaatgctaaatcatctttttgaaggaagcaacacttccctggatataatggcagcagtggtccccaaaatactaacagttatgaaacgtcatgagacatcattaccagtgcagctggaggcgcttcgagctattttacattttatagtgcctggcatgccagaagaatccagggaggatacagaatttcatcataagctaaatatggttaaaaaacagtgtttcaagaatgatattcacaaactggtcctagcagctttgaacaggttcattggaaatcctgggattcagaaatgtggattaaaagtaatttcttctattgtacattttcctgatgcattagagatgttatccctggaaggtgctatggattcagtgcttcacacactgcagatgtatccagatgaccaagaaattcagtgtctgggtttaagtcttataggatacttgattacaaagaagaatgtgttcataggaactggacatctgctggcaaaaattctggtttccagcttataccgatttaaggatgttgctgaaatacagactaaaggatttcagacaatcttagcaatcctcaaattgtcagcatctttttctaagctgctggtgcatcattcatttgacttagtaatattccatcaaatgtcttccaatatcatggaacaaaaggatcaacagtttctaaacctctgttgcaagtgttttgcaaaagtagctatggatgattacttaaaaaatgtgatgctagagagagcgtgtgatcagaataacagcatcatggttgaatgcttgcttctattgggagcagatgccaatcaagcaaaggagggatcttctttaatttgtcaggtatgtgagaaagagagcagtcccaaattggtggaactcttactgaatagtggatctcgtgaacaagatgtacgaaaagcgttgacgataagcattgggaaaggtgacagccagatcatcagcttgctcttaaggaggctggccctggatgtggccaacaatagcatttgccttggaggattttgtataggaaaagttgaaccttcttggcttggtcctttatttccagataagacttctaatttaaggaaacaaacaaatatagcatctacactagcaagaatggtgatcagatatcagatgaaaagtgctgtggaagaaggaacagcctcaggcagcgatggaaatttttctgaagatgtgctgtctaaatttgatgaatggacctttattcctgactcttctatggacagtgtgtttgctcaaagtgatgacctggatagtgaaggaagtgaaggctcatttcttgtgaaaaagaaatctaattcaattagtgtaggagaattttaccgagatgccgtattacagcgttgctcaccaaatttgcaaagacattccaattccttggggcccatttttgatcatgaagatttactgaagcgaaaaagaaaaatattatcttcagatgattcactcaggtcatcaaaacttcaatcccatatgaggcattcagacagcatttcttctctggcttctgagagagaatatattacatcactagacctttcagcaaatgaactaagagatattgatgccctaagccagaaatgctgtataagtgttcatttggagcatcttgaaaagctggagcttcaccagaatgcactcacgagctttccacaacagctatgtgaaactctgaagagtttgacacatttggacttgcacagtaataaatttacatcatttccttcttatttgttgaaaatgagttgtattgctaatcttgatgtctctcgaaatgacattggaccctcagtggttttagatcctacagtgaaatgtccaactctgaaacagtttaacctgtcatataaccagctgtcttttgtacctgagaacctcactgatgtggtagagaaactggagcagctcattttagaaggaaataaaatatcagggatatgctcccccttgagactgaaggaactgaagattttaaaccttagtaagaaccacatttcatccctatcagagaactttcttgaggcttgtcctaaagtggagagtttcagtgccagaatgaattttcttgctgctatgcctttcttgcctccttctatgacaatcctaaaattatctcagaacaaattttcctgtattccagaagcaattttaaatcttccacacttgcggtctttagatatgagcagcaatgatattcagtacctaccaggtcccgcacactggaaatctttgaacttaagggaactcttatttagccataatcagatcagcatcttggacttgagtgaaaaagcatatttatggtctagagtagagaaactgcatctttctcacaataaactgaaagagattcctcctgagattggctgtcttgaaaatctgacatctctggatgtcagttacaacttggaactaagatcctttcccaatgaaatggggaaattaagcaaaatatgggatcttcctttggatgaactgcatcttaactttgattttaaacatataggatgtaaagccaaagacatcataaggtttcttcaacagcgattaaaaaaggctgtgccttataaccgaatgaaacttatgattgtgggaaatactgggagtggtaaaaccaccttattgcagcaattaatgaaaaccaagaaatcagatcttggaatgcaaagtgccacagttggcatagatgtgaaagactggcctatccaaataagagacaaaagaaagagagatctcgtcctaaatgtgtgggattttgcaggtcgtgaggaattctatagtactcatccccattttatgacgcagcgagcattgtaccttgctgtctatgacctcagcaagggacaggctgaagttgatgccatgaagccttggctcttcaatataaaggctcgcgcttcttcttcccctgtgattctcgttggcacacatttggatgtttctgatgagaagcaacgcaaagcctgcatgagtaaaatcaccaaggaactcctgaataagcgagggttccctgccatacgagattaccactttgtgaatgccaccgaggaatctgatgctttggcaaaacttcggaaaaccatcataaacgagagccttaatttcaagatccgagatcagcttgttgttggacagctgattccagactgctatgtagaacttgaaaaaatcattttatcggagcgtaaaaatgtgccaattgaatttcccgtaattgaccggaaacgattattacaactagtgagagaaaatcagctgcagttagatgaaaatgagcttcctcacgcagttcactttctaaatgaatcaggagtccttcttcattttcaagacccagcactgcagttaagtgacttgtactttgtggaacccaagtggctttgtaaaatcatggcacagattttgacagtgaaagtggaaggttgtccaaaacaccctaagggcattatttcgcgtagagatgtggaaaaatttctttcaaaaaaaaggaaatttccaaagaactacatgtcacagtattttaagctcctagaaaaattccagattgctttgccaataggagaagaatatttgctggttccaagcagtttgtctgaccacaggcctgtgatagagcttccccattgtgagaactctgaaattatcatccgactatatgaaatgccttattttccaatgggattttggtcaagattaatcaatcgattacttgagatttcaccttacatgctttcagggagagaacgagcacttcgcccaaacagaatgtattggcgacaaggcatttacttaaattggtctcctgaagcttattgtctggtaggatctgaagtcttagacaatcatccagagagtttcttaaaaattacagttccttcttgtagaaaaggctgtattcttttgggccaagttgtggaccacattgattctctcatggaagaatggtttcctgggttgctggagattgatatttgtggtgaaggagaaactctgttgaagaaatgggcattatatagttttaatgatggtgaagaacatcaaaaaatcttacttgatgacttgatgaagaaagcagaggaaggagatctcttagtaaatccagatcaaccaaggctcaccattccaatatctcagattgcccctgacttgattttggctgacctgcctagaaatattatgttgaataatgatgagttggaatttgaacaagctccagagtttctcctaggtgatggcagttttggatcagtttaccgagcagcctatgaaggagaagaagtggctgtgaagatttttaataaacatacatcactcaggctgttaagacaagagcttgtggtgctttgccacctccaccaccccagtttgatatctttgctggcagctgggattcgtccccggatgttggtgatggagttagcctccaagggttccttggatcgcctgcttcagcaggacaaagccagcctcactagaaccctacagcacaggattgcactccacgtagctgatggtttgagatacctccactcagccatgattatataccgagacctgaaaccccacaatgtgctgcttttcacactgtatcccaatgctgccatcattgcaaagattgctgactacggcattgctcagtactgctgtagaatggggataaaaacatcagagggcacaccagggtttcgtgcacctgaagttgccagaggaaatgtcatttataaccaacaggctgatgtttattcatttggtttactactctatgacattttgacaactggaggtagaatagtagagggtttgaagtttccaaatgagtttgatgaattagaaatacaaggaaaattacctgatccagttaaagaatatggttgtgccccatggcctatggttgagaaattaattaaacagtgtttgaaagaaaatcctcaagaaaggcctacttctgcccaggtctttgacattttgaattcagctgaattagtctgtctgacgagacgcattttattacctaaaaacgtaattgttgaatgcatggttgctacacatcacaacagcaggaatgcaagcatttggctgggctgtgggcacaccgacagaggacagctctcatttcttgacttaaatactgaaggatacacttctgaggaagttgctgatagtagaatattgtgcttagccttggtgcatcttcctgttgaaaaggaaagctggattgtgtctgggacacagtctggtactctcctggtcatcaataccgaagatgggaaaaagagacataccctagaaaagatgactgattctgtcacttgtttgtattgcaattccttttccaagcaaagcaaacaaaaaaattttcttttggttggaaccgctgatggcaagttagcaatttttgaagataagactgttaagcttaaaggagctgctcctttgaagatactaaatataggaaatgtcagtactccattgatgtgtttgagtgaatccacaaattcaacggaaagaaatgtaatgtggggaggatgtggcacaaagattttctccttttctaatgatttcaccattcagaaactcattgagacaagaacaagccaactgttttcttatgcagctttcagtgattccaacatcataacagtggtggtagacactgctctctatattgctaagcaaaatagccctgttgtggaagtgtgggataagaaaactgaaaaactctgtggactaatagactgcgtgcactttttaagggaggtaatggtaaaagaaaacaaggaatcaaaacacaaaatgtcttattctgggagagtgaaaaccctctgccttcagaagaacactgctctttggataggaactggaggaggccatattttactcctggatctttcaactcgtcgacttatacgtgtaatttacaacttttgtaattcggtcagagtcatgatgacagcacagctaggaagccttaaaaatgtcatgctggtattgggctacaaccggaaaaatactgaaggtacacaaaagcagaaagagatacaatcttgcttgaccgtttgggacatcaatcttccacatgaagtgcaaaatttagaaaaacacattgaagtgagaaaagaattagctgaaaaaatgagacgaacatctgttgagtaagagagaaataggaattgtctttggataggaaaattattctctcctcttgtaaatatttattttaaaaatgttcacatggaaagggtactcacattttttgaaatagctcgtgtgtatgaaggaatgttattatttttaatttaaatatatgtaaaaatacttaccagtaaatgtgtattttaaagaactatttaaaacacaatgttatatttcttataaataccagttactttcgttcattaattaatgaaaataaatctgtgaagtacctaatttaagtactcatactaaaatttataaggccgataattttttgttttcttgtctgtaatggaggtaaactttattttaaattctgtgcttaagacaggactattgcttgtcgatttttctagaaatctgcacggtataatgaaaatattaagacagtttcccatgtaatgtattccttcttagattgcatcgaaatgcactatcatatatgcttgtaaatattcaaatgaatttgcactaataaagtcctttgttggtatgtgaattctctttgttgctgttgcaaacagtgcatcttacacaacttcactcaattcaaaagaaaactccattaaaagtactaatgaaaaaacatgacatactgtcaaagtcctcatatctaggaaagacacagaaactctctttgtcacagaaactctctgtgtctttcctagacataatagagttgtttttcaactctatgtttgaatgtggataccctgaattttgtataattagtgtaaatacagtgttcagtccttcaagtgatatttttatttttttattcataccactagctacttgttttctaatctgcttcattctaatgcttatattcatcttttccctaaatttgtgatgctgcagatcctacatcattcagatagaaacctttttttttttcagaattatagaattccacagctcctaccaagaccatgaggataaatatctaacacttttcagttgctgaaggagaaaggagctttagttatgatggataaaaatatctgccaccctaggcttccaaattatacttaaattgtttacatagcttaccacaataggagtatcagggccaaatacctatgtaataatttgaggtcatttctgctttaggaaaagtactttcggtaaattctttggccctgaccagtattcattatttcagataattccctgtgataggacaactagtacatttaatattctcagaacttatggcattttactatgtgaaaactttaaatttatttatattaagggtaatcaaattcttaaagatgaaagattttctgtattttaaaggaagctatgctttaacttgttatgtaattaacaaaaaaatcatatataatagagctctttgttccagtgttatctctttcattgttactttgtatttgcaattttttttaccaaagacaaattaaaaaaatgaataccatatttaaatggaataataaaggttttttaaaaactt

SEQ ID NO: 11727 - DNA, 556 bp, Homo sapiens
  source 1..556: mol_type = unassigned DNA
gttgatcgtcttggactcctatatgagagtcgcgagtgtgcagcaggtgggttggtcacttctgtgcaaattaatagaagtctgtccaggtacaatgcaaagcttaatgggaccccaggatgttggaaatgattgggaagtccttggtgttcaccagtaagtatgatagatatgtaaaacaaatggccttgagtatttatttgtacacatgacaaccttcccttgatacactgtgtttgcaatccaaggctactcctgtggaattctttaaaatacagatatttttccttgagtcaatgatttacatttatagagagctttaaactcagaagtttgatttagaaagcaaacatttaaggtaacatgtcagaagttattattttaataatataatcatataattataaaactggttaagttgtagatttttgatgagtacttttgaattcaaaccatgaagagattttggcttttaataatagaatcgatacaaaccactagttcttaaaaaaatgggaactgagaaaagttagttctgtaagtagtaatttgaaag

SEQ ID NO: 11728 - DNA, 6400 bp, Homo sapiens
  source 1..6400: mol_type = unassigned DNA
cactagacctttcagcaaatgaactaagagatattgatgccctaagccagaaatgctgtataagtgttcatttggagcatcttgaaaagctggagcttcaccagaatgcactcacgagctttccacaacagctatgtgaaactctgaagagtttgacacatttggacttgcacagtaataaatttacatcatttccttcttatttgttgaaaatgagttgtattgctaatcttgatgtctctcgaaatgacattggaccctcagtggttttagatcctacagtgaaatgtccaactctgaaacagtttaacctgtcatataaccagctgtcttttgtacctgagaacctcactgatgtggtagagaaactggagcagctcattttagaaggaaataaaatatcagggatatgctcccccttgagactgaaggaactgaagattttaaaccttagtaagaaccacatttcatccctatcagagaactttcttgaggcttgtcctaaagtggagagtttcagtgccagaatgaattttcttgtttcaggatgctctgtggtacctcaggggaatctgattcagactgtggagtcaggaaagcatttctgtgcctgtgacatttaagttgggtctggaaagaggagcatccaaaaggaccttgaagcttgtgtatggtcagtgtgtcatctcagctgaatctcacaatgatcctaatggtcatacctaggacaggtatgacctctgcccaattgaggaaattgaagccgtgagattttttgtgtgatgcttacagctgctatgcctttcttgcctccttctatgacaatcctaaaattatctcagaacaaattttcctgtattccagaagcaattttaaatcttccacacttgcggtctttagatatgagcagcaatgatattcagtacctaccaggtcccgcacactggaaatctttgaacttaagggaactcttatttagccataatcagatcagcatcttggacttgagtgaaaaagcatatttatggtctagagtagagaaactgcatctttctcacaataaactgaaagagattcctcctgagattggctgtcttgaaaatctgacatctctggatgtcagttacaacttggaactaagatcctttcccaatgaaatggggaaattaagcaaaatatgggatcttcctttggatgaactgcatcttaactttgattttaaacatataggatgtaaagccaaagacatcataaggtttcttcaacagcgattaaaaaaggctgtgccttataaccgaatgaaacttatgattgtgggaaatactgggagtggtaaaaccaccttattgcagcaattaatgaaaaccaagaaatcagatcttggaatgcaaagtgccacagttggcatagatgtgaaagactggcctatccaaataagagacaaaagaaagagagatctcgtcctaaatgtgtgggattttgcaggtcgtgaggaattctatagtactcatccccattttatgacgcagcgagcattgtaccttgctgtctatgacctcagcaagggacaggctgaagttgatgccatgaagccttggctcttcaatataaaggctcgcgcttcttcttcccctgtgattctcgttggcacacatttggatgtttctgatgagaagcaacgcaaagcctgcatgagtaaaatcaccaaggaactcctgaataagcgagggttccctgccatacgagattaccactttgtgaatgccaccgaggaatctgatgctttggcaaaacttcggaaaaccatcataaacgagagccttaatttcaagatccgagatcagcttgttgttggacagctgattccagactgctatgtagaacttgaaaaaatcattttatcggagcgtaaaaatgtgccaattgaatttcccgtaattgaccggaaacgattattacaactagtgagagaaaatcagctgcagttagatgaaaatgagcttcctcacgcagttcactttctaaatgaatcaggagtccttcttcattttcaagacccagcactgcagttaagtgacttgtactttgtggaacccaagtggctttgtaaaatcatggcacagattttgacagtgaaagtggaaggttgtccaaaacaccctaagggcattatttcgcgtagagatgtggaaaaatttctttcaaaaaaaaggaaatttccaaagaactacatgtcacagtattttaagctcctagaaaaattccagattgctttgccaataggagaagaatatttgctggttccaagcagtttgtctgaccacaggcctgtgatagagcttccccattgtgagaactctgaaattatcatccgactatatgaaatgccttattttccaatgggattttggtcaagattaatcaatcgattacttgagatttcaccttacatgctttcagggagagaacgagcacttcgcccaaacagaatgtattggcgacaaggcatttacttaaattggtctcctgaagcttattgtctggtaggatctgaagtcttagacaatcatccagagagtttcttaaaaattacagttccttcttgtagaaaaggctgtattcttttgggccaagttgtggaccacattgattctctcatggaagaatggtttcctgggttgctggagattgatatttgtggtgaaggagaaactctgttgaagaaatgggcattatatagttttaatgatggtgaagaacatcaaaaaatcttacttgatgacttgatgaagaaagcagaggaaggagatctcttagtaaatccagatcaaccaaggctcaccattccaatatctcagattgcccctgacttgattttggctgacctgcctagaaatattatgttgaataatgatgagttggaatttgaacaagctccagagtttctcctaggtgatggcagttttggatcagtttaccgagcagcctatgaaggagaagaagtggctgtgaagatttttaataaacatacatcactcaggctgttaagacaagagcttgtggtgctttgccacctccaccaccccagtttgatatctttgctggcagctgggattcgtccccggatgttggtgatggagttagcctccaagggttccttggatcgcctgcttcagcaggacaaagccagcctcactagaaccctacagcacaggattgcactccacgtagctgatggtttgagatacctccactcagccatgattatataccgagacctgaaaccccacaatgtgctgcttttcacactgtatcccaatgctgccatcattgcaaagattgctgactacggcattgctcagtactgctgtagaatggggataaaaacatcagagggcacaccagggtttcgtgcacctgaagttgccagaggaaatgtcatttataaccaacaggctgatgtttattcatttggtttactactctatgacattttgacaactggaggtagaatagtagagggtttgaagtttccaaatgagtttgatgaattagaaatacaaggaaaattacctgatccagttaaagaatatggttgtgccccatggcctatggttgagaaattaattaaacagtgtttgaaagaaaatcctcaagaaaggcctacttctgcccaggtctttgacattttgaattcagctgaattagtctgtctgacgagacgcattttattacctaaaaacgtaattgttgaatgcatggttgctacacatcacaacagcaggaatgcaagcatttggctgggctgtgggcacaccgacagaggacagctctcatttcttgacttaaatactgaaggatacacttctgaggaagttgctgatagtagaatattgtgcttagccttggtgcatcttcctgttgaaaaggaaagctggattgtgtctgggacacagtctggtactctcctggtcatcaataccgaagatgggaaaaagagacataccctagaaaagatgactgattctgtcacttgtttgtattgcaattccttttccaagcaaagcaaacaaaaaaattttcttttggttggaaccgctgatggcaagttagcaatttttgaagataagactgttaagcttaaaggagctgctcctttgaagatactaaatataggaaatgtcagtactccattgatgtgtttgagtgaatccacaaattcaacggaaagaaatgtaatgtggggaggatgtggcacaaagattttctccttttctaatgatttcaccattcagaaactcattgagacaagaacaagccaactgttttcttatgcagctttcagtgattccaacatcataacagtggtggtagacactgctctctatattgctaagcaaaatagccctgttgtggaagtgtgggataagaaaactgaaaaactctgtggactaatagactgcgtgcactttttaagggaggtaatggtaaaagaaaacaaggaatcaaaacacaaaatgtcttattctgggagagtgaaaaccctctgccttcagaagaacactgctctttggataggaactggaggaggccatattttactcctggatctttcaactcgtcgacttatacgtgtaatttacaacttttgtaattcggtcagagtcatgatgacagcacagctaggaagccttaaaaatgtcatgctggtattgggctacaaccggaaaaatactgaaggtacacaaaagcagaaagagatacaatcttgcttgaccgtttgggacatcaatcttccacatgaagtgcaaaatttagaaaaacacattgaagtgagaaaagaattagctgaaaaaatgagacgaacatctgttgagtaagagagaaataggaattgtctttggataggaaaattattctctcctcttgtaaatatttattttaaaaatgttcacatggaaagggtactcacattttttgaaatagctcgtgtgtatgaaggaatgttattatttttaatttaaatatatgtaaaaatacttaccagtaaatgtgtattttaaagaactatttaaaacacaatgttatatttcttataaataccagttactttcgttcattaattaatgaaaataaatctgtgaagtacctaatttaagtactcatactaaaatttataaggccgataattttttgttttcttgtctgtaatggaggtaaactttattttaaattctgtgcttaagacaggactattgcttgtcgatttttctagaaatctgcacggtataatgaaaatattaagacagtttcccatgtaatgtattccttcttagattgcatcgaaatgcactatcatatatgcttgtaaatattcaaatgaatttgcactaataaagtcctttgttggtatgtgaattctctttgttgctgttgcaaacagtgcatcttacacaacttcactcaattcaaaagaaaactccattaaaagtactaatgaaaaaacatgacatactgtcaaagtcctcatatctaggaaagacacagaaactctctttgtcacagaaactctctgtgtctttcctagacataatagagttgtttttcaactctatgtttgaatgtggataccctgaattttgtataattagtgtaaatacagtgttcagtccttcaagtgatatttttatttttttattcataccactagctacttgttttctaatctgcttcattctaatgcttatattcatcttttccctaaatttgtgatgctgcagatcctacatcattcagatagaaacctttttttttttcagaattatagaattccacagctcctaccaagaccatgaggataaatatctaacacttttcagttgctgaaggagaaaggagctttagttatgatggataaaaatatctgccaccctaggcttccaaattatacttaaattgtttacatagcttaccacaataggagtatcagggccaaatacctatgtaataatttgaggtcatttctgctttaggaaaagtactttcggtaaattctttggccctgaccagtattcattatttcagataattccctgtgataggacaactagtacatttaatattctcagaacttatggcattttactatgtgaaaactttaaatttatttatattaagggtaatcaaattcttaaagatgaaagattttctgtattttaaaggaagctatgctttaacttgttatgtaattaacaaaaaaatcatatataatagagctctttgttccagtgttatctctttcattgttactttgtatttgcaattttttttaccaaagacaaattaaaaaaatgaataccatatttaaatggaataataaaggttttttaaaaactttaaa

SEQ ID NO: 11729 - DNA, 8306 bp, Homo sapiens
  source 1..8306: mol_type = unassigned DNA
agaaactggagcagctcattttagaaggaaataaaatatcagggatatgctcccccttgagactgaaggaactgaagattttaaaccttagtaagaaccacatttcatccctatcagagaactttcttgaggcttgtcctaaagtggagagtttcagtgccagaatgaattttcttgctgctatgcctttcttgcctccttctatgacaatcctaaaattatctcagaacaaattttcctgtattccagaagcaattttaaatcttccacacttgcggtctttagatatgagcagcaatgatattcagtacctaccaggtcccgcacactggaaatctttgaacttaagggaactcttatttagccataatcagatcagcatcttggacttgagtgaaaaagcatatttatggtctagagtagagaaactgcatctttctcacaataaactgaaagagattcctcctgagattggctgtcttgaaaatctgacatctctggatgtcagttacaacttggaactaagatcctttcccaatgaaatggggaaattaagcaaaatatgggatcttcctttggatgaactgcatcttaactttgattttaaacatataggatgtaaagccaaagacatcataaggtttcttcaacagcgattaaaaaaggctgtgccttataaccgaatgaaacttatgattgtgggaaatactgggagtggtaaaaccaccttattgcagcaattaatgaaaaccaagaaatcagatcttggaatgcaaagtgccacagttggcatagatgtgaaagactggcctatccaaataagagacaaaagaaagagagatctcgtcctaaatgtgtgggattttgcaggtcgtgaggaattctatagtactcatccccattttatgacgcagcgagcattgtaccttgctgtctatgacctcagcaagggacaggctgaagttgatgccatgaagccttggctcttcaatataaaggctcgcgcttcttcttcccctgtgattctcgttggcacacatttggatgtttctgatgagaagcaacgcaaagcctgcatgagtaaaatcaccaaggaactcctgaataagcgagggttccctgccatacgagattaccactttgtgaatgccaccgaggaatctgatgctttggcaaaacttcggaaaaccatcataaacgagagccttaatttcaagatccgagatcagcttgttgttggacagctgattccagactgctatgtagaacttgaaaaaatcattttatcggagcgtaaaaatgtgccaattgaatttcccgtaattgaccggaaacgattattacaactagtgagagaaaatcagctgcagttagatgaaaatgagcttcctcacgcagttcactttctaaatgaatcaggagtccttcttcattttcaagacccagcactgcagttaagtgacttgtactttgtggaacccaagtggctttgtaaaatcatggcacagattttgacagtgaaagtggaaggttgtccaaaacaccctaagggcattatttcgcgtagagatgtggaaaaatttctttcaaaaaaaaggaaatttccaaagaactacatgtcacagtattttaagctcctagaaaaattccagattgctttgccaataggagaagaatatttgctggttccaagcagtttgtctgaccacaggcctgtgatagagcttccccattgtgagaactctgaaattatcatccgactatatgaaatgccttattttccaatgggattttggtcaagattaatcaatcgattacttgagatttcaccttacatgctttcagggagagaacgagcacttcgcccaaacagaatgtattggcgacaaggcatttacttaaattggtctcctgaagcttattgtctggtaggatctgaagtcttagacaatcatccagagagtttcttaaaaattacagttccttcttgtagaaaaggctgtattcttttgggccaagttgtggaccacattgattctctcatggaagaatggtttcctgggttgctggagattgatatttgtggtgaaggagaaactctgttgaagaaatgggcattatatagttttaatgatggtgaagaacatcaaaaaatcttacttgatgacttgatgaagaaagcagaggaaggagatctcttagtaaatccagatcaaccaaggctcaccattccaatatctcagattgcccctgacttgattttggctgacctgcctagaaatattatgttgaataatgatgagttggaatttgaacaagctccagagtttctcctaggtgatggcagttttggatcagtttaccgagcagcctatgaaggagaagaagtggctgtgaagatttttaataaacatacatcactcaggctgttaagacaagagcttgtggtgctttgccacctccaccaccccagtttgatatctttgctggcagctgggattcgtccccggatgttggtgatggagttagcctccaagggttccttggatcgcctgcttcagcaggacaaagccagcctcactagaaccctacagcacaggattgcactccacgtagctgatggtttgagatacctccactcagccatgattatataccgagacctgaaaccccacaatgtgctgcttttcacactgtatcccaatgctgccatcattgcaaagattgctgactacggcattgctcagtactgctgtagaatggggataaaaacatcagagggcacaccagggtttcgtgcacctgaagttgccagaggaaatgtcatttataaccaacaggctgatgtttattcatttggtttactactctatgacattttgacaactggaggtagaatagtagagggtttgaagtttccaaatgagtttgatgaattagaaatacaaggaaaattacctgatccagttaaagaatatggttgtgccccatggcctatggttgagaaattaattaaacagtgtttgaaagaaaatcctcaagaaaggcctacttctgcccaggtctttgacattttgaattcagctgaattagtctgtctgacgagacgcattttattacctaaaaacgtaattgttgaatgcatggttgctacacatcacaacagcaggaatgcaagcatttggctgggctgtgggcacaccgacagaggacagctctcatttcttgacttaaatactgaaggatacacttctgaggaagttgctgatagtagaatattgtgcttagccttggtgcatcttcctgttgaaaaggaaagctggattgtgtctgggacacagtctggtactctcctggtcatcaataccgaagatgggaaaaagagacataccctagaaaagatgactgattctgtcacttgtttgtattgcaattccttttccaagcaaagcaaacaaaaaaattttcttttggttggaaccgctgatggcaagttagcaatttttgaagataagactgttaagcttaaaggagctgctcctttgaagatactaaatataggaaatgtcagtactccattgatgtgtttgagtgaatccacaaattcaacggaaagaaatgtaatgtggggaggatgtggcacaaagattttctccttttctaatgatttcaccattcagaaactcattgagacaagaacaagccaactgttttcttatgcagctttcagtgattccaacatcataacagtggtggtagacactgctctctatattgctaagcaaaatagccctgttgtggaagtgtgggataagaaaactgaaaaactctgtggactaatagactgcgtgcactttttaagggaggtaatggtaaaagaaaacaaggaatcaaaacacaaaatgtcttattctgggagagtgaaaaccctctgccttcagaagaacactgctctttggataggaactggaggaggccatattttactcctggatctttcaactcgtcgacttatacgtgtaatttacaacttttgtaattcggtcagagtcatgatgacagcacagctaggcaagtttctttcctttagatatttttcatattctctaagtcttataaaatatgcctttattttacgtttacattttctctgaactttccagtgtcatatggatggtcttggagggtcacacagtgaaacataagactggtataaattgtgaatagggtcattacagaagtggagggagtaaatgctctcagtcccacaagagaagcagattactgcagctgaacactcagtttgggtcttacttgcttttttcctttttacctaaggcaaaaatgggaaatacatggtattgaatatattttactttttgagcaaagaaaataaagaaaatgtttgttttaatcatagtctagcctcccagcttgttaaagaatctcatttggtttttcattctataacaaatcttttttcttgcagcaatacatgctgaactgcacaacctacaaatattgacaaatcatattttactcaaactttgtctttttttgcttctatttttatatttaaatatgataaaattgtgatagcacataaaatatattttctgcataaatatatttgcgtcttcctttgataataatttgttttagaaaataacaataatagcatatatacaaaagtttacaaaaacgacactatggggtttaattctgaaaaaaactagaatttatgtaactttagcaaataatgaatgttttgaacatggtgaagaaaatatattcattgcaagtatatgtgaaagaggaacatgtgtttttctagcaccttcacctatttttcatttatagactttagagttgcacaggagttacaattagatgctcttaatgactgtaaactattaagatacatgtccacacaagcagagcagtaggtctctcaataggttgtctcagtagtcttattctaccaaagttgttgcattctctagttgaattgtatgtactttgggacccaaatagcttgcttataactgaagttatagtggaatgtctatgggttatagtttgattttaaaataaagatcaattggaggatagcctacaaggtgctgcatgagctggcttcactgtacctctcctgcctccatcatctaccacattcctaccagatcttgcttgtctagatgaacatccagttcttctcaattactatgctatattttgcctcagggatttgcacatgctgtttatttctttgcttagttaacatagctttttttcatgcttatttaactcatatgctttgaaatgttagctcctgtgtcaaaacctctgagaagccaacactgattaggtcaaagttcccgctttgggttcccataacagctttcttgcatagttttgatcatggtcatatttttttttcattaatgctagtctcttcactagaatataaactccaagacggttgggttagtgtgtttttgtttaccccttttttcccaggatctagcctagggcctacatagaagacttttgatgcaaatttgttgaataaattagtgaatgatttgaaaagaaaatatgatattttgacatagtatcagtatatccatccatctaagtgtccatctaaatactcatatttgtactaaatactcatatttgtaccttaccatatccaaagaacttttcacacacattacctcgtttaacattgtaactttgggaagggtaatgtataaatactgagcctattttatagaaaggttaagctgttttctcagactcacataattaagaattgcagcaaggagtggatcacagattttgttattttttaaaaaaatgctggtctttattcaatataattgaagggtcacctagaaaatagaattgtgaattcagttccaaggtatttgtgtcttaaactatgaacaactttacttttttttcaggccagtttaatatatagttttaacagaaaacttacatattttgtttttgtaaaggaagccttaaaaatgtcatgctggtattgggctacaaccggaaaaatactgaaggtacacaaaagcagaaaggtaacatttagaaggatactgttttccaaacagggcaatgatgtgaatgatggtaacatattatgtgtttcataaatttgtagaaaatattacatatggtataatcaggaattttaattggtagtttatagtgtaaagaacttagacataaattttcaaaattacaagtgatatgaagtgttaaatatttatattttcagctgaagtagaggtgtcaatcactagctcaaccttaaacgaaatgtgaatattttttacaacttatctatatctacataatgtctaattttgaacagtgtttgaaaaagcttttatttcttttagaatatgaaatgttaatttattaaatgttgatactctatttgaaatttaatagtttctataatgtattataaaacttttccaagtatagttttttataaataataatttagtacattagttatagctgtgtttatatttacatttatctaagtcaactaaaaatacatgagccaaactgaaataaaataagaatgttttatgatggatctttgaaacatgatttcatttttttctttttctagagatacaatcttgcttgaccgtttgggacatcaatcttccacatgaagtgcaaaatttagaaaaacacattgaagtgagaaaagaattagctgaaaaaatgagacgaacatctgttgagtaagagagaaataggaattgtctttggataggaaaattattctctcctcttgtaaatatttattttaaaaatgttcacatggaaagggtactcacattttttgaaatagctcgtgtgtatgaaggaatgttattatttttaatttaaatatatgtaaaaatacttaccagtaaatgtgtattttaaagaactatttaaaacacaatgttatatttcttataaataccagttactttcgttcattaattaatgaaaataaatctgtgaagtacctaatttaagtactcatactaaaatttataaggccgataattttttgttttcttgtctgtaatggaggtaaactttattttaaattctgtgcttaagacaggactattgcttgtcgatttttctagaaatctgcacggtataatgaaaatattaagacagtttcccatgtaatgtattccttcttagattgcatcgaaatgcactatcatatatgcttgtaaatattcaaatgaatttgcactaataaagtcctttgttggtatgtgaattctctttgttgctgttgcaaacagtgcatcttacacaacttcactcaattcaaaagaaaactccattaaaagtactaatgaaaaaacatgacatactgtcaaagtcctcatatctaggaaagacacagaaactctctttgtcacagaaactctctgtgtctttcctagacataatagagttgtttttcaactctatgtttgaatgtggataccctgaattttgtataattagtgtaaatacagtgttcagtccttcaagtgatatttttatttttttattcataccactagctacttgttttctaatctgcttcattctaatgcttatattcatcttttccctaaatttgtgatgctgcagatcctacatcattcagatagaaacctttttttttttcagaattatagaattccacagctcctaccaagaccatgaggataaatatctaacacttttcagttgctgaaggagaaaggagctttagttatgatggataaaaatatctgccaccctaggcttccaaattatacttaaattgtttacatagcttaccacaataggagtatcagggccaaatacctatgtaataatttgaggtcatttctgctttaggaaaagtactttcggtaaattctttggccctgaccagtattcattatttcagataattccctgtgataggacaactagtacatttaatattctcagaacttatggcattttactatgtgaaaactttaaatttatttatattaagggtaatcaaattcttaaagatgaaagattttctgtattttaaaggaagctatgctttaacttgttatgtaattaacaaaaaaatcatatataatagagctctttgttccagtgttatctctttcattgttactttgtatttgcaattttttttaccaaagacaaattaaaaaaatgaataccatatttaaatggaataataaaggttttttaaaaactttaaa

SEQ ID NO: 11730 - DNA, 561 bp, Homo sapiens
  source 1..561: mol_type = unassigned DNA
agcaggcatctctgtgggccttgagacgtagtcccgtaaaactcatcccgtttctacttgatttgctttctttgagaactcttgtttatttttatatggaggtttcctgccttggattaaaacataaacctcaatctgaagttcaatttcatcttaatttatgaacgactaagagagggaacatgaaaagtggagatccgagatcagcttgttgttggacagctgattccagactgctatgtagaacttgaaaaaatcattttatcggagcgtaaaaatgtgccaattgaatttcccgtaattgaccggaaacgattattacaactagtgagagaaaatcagctgcagttagatgaaaatgagcttcctcacgcagttcactttctaaatgaatcaggagtccttcttcattttcaagacccagcactgcagttaagtgacttgtactttgtggaacccaagtggctttgtaaaatcatggcacagattttgacagtgaaagtggaaggttgtccaaaacaccctaagggcattatttcgcgtagagatgtggaaaaattt

SEQ ID NO: 11731 - DNA, 2477 bp, Homo sapiens
  source 1..2477: mol_type = unassigned DNA
aactggaggtagaatagtagagggtttgaagtttccaaatgagtttgatgaattagaaatacaaggaaaattacctgatccagttaaagaatatggttgtgccccatggcctatggttgagaaattaattaaacagtgtttgaaagaaaatcctcaagaaaggcctacttctgcccaggtctttgacattttgaattcagctgaattagtctgtctgacgagacgcattttattacctaaaaacgtaattgttgaatgcatggttgctacacatcacaacagcaggaatgcaagcatttggctgggctgtgggcacaccgacagaggacagctctcatttcttgacttaaatactgaaggatacacttctgaggaagttgctgatagtagaatattgtgcttagccttggtgcatcttcctgttgaaaaggaaagctggattgtgtctgggacacagtctggtactctcctggtcatcaataccgaagatgggaaaaagagacataccctagaaaagatgactgattctgtcacttgtttgtattgcaattccttttccaagcaaagcaaacaaaaaaattttcttttggttggaaccgctgatggcaagttagcaatttttgaagataagactgttaagcttaaaggagctgctcctttgaagatactaaatataggaaatgtcagtactccattgatgtgtttgagtgaatccacaaattcaacggaaagaaatgtaatgtggggaggatgtggcacaaagattttctccttttctaatgatttcaccattcagaaactcattgagacaagaacaagccaactgttttcttatgcagctttcagtgattccaacatcataacagtggtggtagacactgctctctatattgctaagcaaaatagccctgttgtggaagtgtgggataagaaaactgaaaaactctgtggactaatagactgcgtgcactttttaagggaggtaatggtaaaagaaaacaaggaatcaaaacacaaaatgtcttattctgggagagtgaaaaccctctgccttcagaagaacactgctctttggataggaactggaggaggccatattttactcctggatctttcaactcgtcgacttatacgtgtaatttacaacttttgtaattcggtcagagtcatgatgacagcacagctaggaagccttaaaaatgtcatgctggtattgggctacaaccggaaaaatactgaagagatacaatcttgcttgaccgtttgggacatcaatcttccacatgaagtgcaaaatttagaaaaacacattgaagtgagaaaagaattagctgaaaaaatgagacgaacatctgttgagtaagagagaaataggaattgtctttggataggaaaattattctctcctcttgtaaatatttattttaaaaatgttcacatggaaagggtactcacattttttgaaatagctcgtgtgtatgaaggaatgttattatttttaatttaaatatatgtaaaaatacttaccagtaaatgtgtattttaaagaactatttaaaacacaatgttatatttcttataaataccagttactttcgttcattaattaatgaaaataaatctgtgaagtacctaatttaagtactcatactaaaatttataaggccgataattttttgttttcttgtctgtaatggaggtaaactttattttaaattctgtgcttaagacaggactattgcttgtcgatttttctagaaatctgcacggtataatgaaaatattaagacagtttcccatgtaatgtattccttcttagattgcatcgaaatgcactatcatatatgcttgtaaatattcaaatgaatttgcactaataaagtcctttgttggtatgtgaattctctttgttgctgttgcaaacagtgcatcttacacaacttcactcaattcaaaagaaaactccattaaaagtactaatgaaaaaacatgacatactgtcaaagtcctcatatctaggaaagacacagaaactctctttgtcacagaaactctctgtgtctttcctagacataatagagttgtttttcaactctatgtttgaatgtggataccctgaattttgtataattagtgtaaatacagtgttcagtccttcaagtgatatttttatttttttattcataccactagctacttgttttctaatctgcttcattctaatgcttatattcatcttttccctaaatttgtgatgctgcagatcctacatcattcagatagaaacctttttttttttcagaattatagaattccacagctcctaccaagaccatgaggataaatatctaacacttttcagttgctgaaggagaaaggagctttagttatgatggataaaaatatctgccaccctaggcttccaaattatacttaaattgtttacatagcttaccacaataggagtatcagggcca

SEQ ID NO: 11732 - DNA, 2976 bp, Homo sapiens
  source 1..2976: mol_type = unassigned DNA
ctgagcatcatcagtctctggaaagccttctgaattagacaagggctgcctcccagcacagctacaaaacactttaaacctgaccagctaaatggataaacctagcctgcatagcttttaaactggggtctcatacagcacaggaggcctacttgcttcaagaactgaaaatccagaggatgaattgctttatctgggaatggcaaaagccagcacaataaggaatgccaggtttccatttaattacgcagctgaaaggcatgagtgtggtgctggtgctacttcctacactgctgcttgttatgctcacgggtgctcagagagcttgcccaaagaactgcagatgtgatggcaaaattgtgtactgtgagtctcatgctttcgcagatatccctgagaacatttctggagggtcacaaggcttatcattaaggttcaacagcattcagaagctcaaatccaatcagtttgccggccttaaccagcttatatggctttatcttgaccataattacattagctcagtggatgaagatgcatttcaagggatccgtagactgaaagaattaattctaagctccaacaaaattacttatctgcacaataaaacatttcacccagttcccaatctccgcaatctggacctctcctacaataagcttcagacattgcaatctgaacaatttaaaggccttcggaaactcatcattttgcacttgagatctaactcactaaagactgtgcccataagagtttttcaagactgtcggaatcttgattttttggatttgggttacaatcgtcttcgaagcttgtcccgaaatgcatttgctggcctcttgaagttaaaggagctccacctggagcacaaccagttttccaagatcaactttgctcattttccacgtctcttcaacctccgctcaatttacttacaatggaacaggattcgctccattagccaaggtttgacatggacttggagttccttacacaacttggatttatcagggaatgacatccaaggaattgagccgggcacatttaaatgcctccccaatttacaaaaattgaatttggattccaacaagctcaccaatatctcacaggaaactgtcaatgcgtggatatcattaatatccatcacattgtctggaaatatgtgggaatgcagtcggagcatttgtcctttattttattggcttaagaatttcaaaggaaataaggaaagcaccatgatatgtgcgggacctaagcacatccagggtgaaaaggttagtgatgcagtggaaacatataatatctgttctgaagtccaggtggtcaacacagaaagatcacacctggtgccccaaactccccagaaacctctgattatccctagacctaccatcttcaaacctgacgtcacccaatccacctttgaaacaccaagcccttccccagggtttcagattcctggcgcagagcaagagtatgagcatgtttcatttcacaaaattattgccgggagtgtggctctctttctctcagtggccatgatcctcttggtgatctatgtgtcttggaaacgctacccagccagcatgaaacaactccagcaacactctcttatgaagaggcggcggaaaaaggccagagagtctgaaagacaaatgaattcccctttacaggagtattatgtggactacaagcctacaaactctgagaccatggatatatcggttaatggatctgggccctgcacatataccatctctggctccagggaatgtgagatgccacaccacatgaagcccttgccatattacagctatgaccagcctgtgatcgggtactgccaggcccaccagccactccatgtcaccaagggctatgagacagtgtctccagagcaggacgaaagccccggcctggagctgggccgagaccacagcttcatcgccaccatcgccaggtcggcagcaccggccatctacctagagagaattgcaaactaacgctgaagccaactcctcactggggagctccatgggggggagggagggccttcatcttaaaggagaatgggtgtccacaatcgcgcaatcgagcaagctcatcgttcctgttaaaacatttatggcatagagaaaagaaaaagagaaaaaaaaactgcttgaagagggcagcgaatgcacctgcagcattaccgggaggactgcagaactttctttgctttaaaacataaaacaaacaaaaatgctcccggatgtaaatagtaagagtgtcaagttcttataaaaatagatttcaccctagctacatataggtttgtttgtatatttgatttttctacactgcatggttcctgggctggagaaccacaggggagcaaataaacaggggtgggtgggaagctagggaaacaaccgttttcctctttaggtgtgtgtaattctcacagattttatttaaattgctttcatttattttttctttaaaaatgctgtttgttcttgttttgtttgttttaatttttttctttcctggtcaagtttctaatacaaaacatgagcattaaagcttatgttgtaccaaaagaaaatgtgctttaccacggaccacggagaaagttgaccacaaagtttgacaaaactactggaaaacccaataagtctgggtgaatgacccttcatgacaaatgccatatatggtacatgatagaaggaattttgttttgtcccattggcagccctcactgtgtaggatgcctgagagagccatgaagatctccgaatgagaagaccagcagaatcattctcatgtggactaaggctataagagagatatgaccatgggctcaatgaatgaaactgccaagctgacaaatttctaaacacaagataatgtgtaacattgctttttaaattaattatcaattagcttttgtgtagtttttatcaataaaagaaaaaatattgaaaaataaatata

SEQ ID NO: 11733 - DNA, 2227 bp, Homo sapiens
  source 1..2227: mol_type = unassigned DNA
aaacactttaaacctgaccagctaaatggataaacctagcctgcatagcttttaaactggggtctcatacagcacaggaggcctacttgcttcaagaactgaaaatccagaggatgaattgctttatctgggaatggcaaaagccagcacaataaggaatgccagtttgtatggggctactagctcacatgcgggatcagaatggtgtgaatgacagccgcactgtgtcatgaaggtggtggtggtttccgcacaagagaccaaataagaagaaagctgagagaggggggaaacgtttttggatgacaaaggatgggtttccatttaattacgcagctgaaaggcatgagtgtggtgctggtgctacttcctacactgctgcttgttatgctcacgggtgctcagagagcttgcccaaagaactgcagatgtgatggcaaaattgtgtactgtgagtctcatgctttcgcagatatccctgagaacatttctggagggtcacaaggcttatcattaaggttcaacagcattcagaagctcaaatccaatcagtttgccggccttaaccagcttatatggctttatcttgaccataattacattagctcagtggatgaagatgcatttcaagggatccgtagactgaaagaattaattctaagctccaacaaaattacttatctgcacaataaaacatttcacccagttcccaatctccgcaatctggacctctcctacaataagcttcagacattgcaatctgaacaatttaaaggccttcggaaactcatcattttgcacttgagatctaactcactaaagactgtgcccataagagtttttcaagactgtcggaatcttgattttttggatttgggttacaatcgtcttcgaagcttgtcccgaaatgcatttgctggcctcttgaagttaaaggagctccacctggagcacaaccagttttccaagatcaactttgctcattttccacgtctcttcaacctccgctcaatttacttacaatggaacaggattcgctccattagccaaggtttgacatggacttggagttccttacacaacttggatttatcagggaatgacatccaaggaattgagccgggcacatttaaatgcctccccaatttacaaaaattgaatttggattccaacaagctcaccaatatctcacaggaaactgtcaatgcgtggatatcattaatatccatcacattgtctggaaatatgtgggaatgcagtcggagcatttgtcctttattttattggcttaagaatttcaaaggaaataaggaaagcaccatgatatgtgcgggacctaagcacatccagggtgaaaaggttagtgatgcagtggaaacatataatatctgttctgaagtccaggtggtcaacacagaaagatcacacctggtgccccaaactccccagaaacctctgattatccctagacctaccatcttcaaacctgacgtcacccaatccacctttgaaacaccaagcccttccccagggtttcagattcctggcgcagagcaagagtatgagcatgtttcatttcacaaaattattgccgggagtgtggctctctttctctcagtggccatgatcctcttggtgatctatgtgtcttggaaacgctacccagccagcatgaaacaactccagcaacactctcttatgaagaggcggcggaaaaaggccagagagtctgaaagacaaatgaattcccctttacaggagtattatgtggactacaagcctacaaactctgagaccatggatatatcggttaatggatctgggccctgcacatataccatctctggctccagggaatgtgagatgccacaccacatgaagcccttgccatattacagctatgaccagcctgtgatcgggtactgccaggcccaccagccactccatgtcaccaagggctatgagacagtgtctccagagcaggacgaaagccccggcctggagctgggccgagaccacagcttcatcgccaccatcgccaggtcggcagcaccggccatctacctagagagaattgcaaactaacgctgaagccaactcctcactggggagctccatgggggggagggagggccttcatcttaaaggagaatgggtgtccacaatcgcgcaatcgagcaagctcatcgttcctgttaaaacatttatggcatagagaaaagaaaaa

SEQ ID NO: 11734 - DNA, 2247 bp, Homo sapiens
  source 1..2247: mol_type = unassigned DNA
acaaactcaagcattagcaccaacaagctctgagcatcatcagtctctggaaagccttctgaattagacaagggctgcctcccagcacagctacaaaacactttaaacctgaccagctaaatggataaacctagcctgcatagcttttaaactggggtctcatacagcacaggaggcctacttgcttcaagaactgaaaatccagaggatgaattgctttatctgggaatggcaaaagccagcacaataaggaatgccaggtggtggtggtttccgcacaagagaccaaataagaagaaagctgagagaggggggaaacgtttttggatgacaaaggatgggtttccatttaattacgcagctgaaaggcatgagtgtggtgctggtgctacttcctacactgctgcttgttatgctcacgggtgctcagagagcttgcccaaagaactgcagatgtgatggcaaaattgtgtactgtgagtctcatgctttcgcagatatccctgagaacatttctggagggtcacaaggcttatcattaaggttcaacagcattcagaagctcaaatccaatcagtttgccggccttaaccagcttatatggctttatcttgaccataattacattagctcagtggatgaagatgcatttcaagggatccgtagactgaaagaattaattctaagctccaacaaaattacttatctgcacaataaaacatttcacccagttcccaatctccgcaatctggacctctcctacaataagcttcagacattgcaatctgaacaatttaaaggccttcggaaactcatcattttgcacttgagatctaactcactaaagactgtgcccataagagtttttcaagactgtcggaatcttgattttttggatttgggttacaatcgtcttcgaagcttgtcccgaaatgcatttgctggcctcttgaagttaaaggagctccacctggagcacaaccagttttccaagatcaactttgctcattttccacgtctcttcaacctccgctcaatttacttacaatggaacaggattcgctccattagccaaggtttgacatggacttggagttccttacacaacttggatttatcagggaatgacatccaaggaattgagccgggcacatttaaatgcctccccaatttacaaaaattgaatttggattccaacaagctcaccaatatctcacaggaaactgtcaatgcgtggatatcattaatatccatcacattgtctggaaatatgtgggaatgcagtcggagcatttgtcctttattttattggcttaagaatttcaaaggaaataaggaaagcaccatgatatgtgcgggacctaagcacatccagggtgaaaaggttagtgatgcagtggaaacatataatatctgttctgaagtccaggtggtcaacacagaaagatcacacctggtgccccaaactccccagaaacctctgattatccctagacctaccatcttcaaacctgacgtcacccaatccacctttgaaacaccaagcccttccccagggtttcagattcctggcgcagagcaagagtatgagcatgtttcatttcacaaaattattgccgggagtgtggctctctttctctcagtggccatgatcctcttggtgatctatgtgtcttggaaacgctacccagccagcatgaaacaactccagcaacactctcttatgaagaggcggcggaaaaaggccagagagtctgaaagacaaatgaattcccctttacaggagtattatgtggactacaagcctacaaactctgagaccatggatatatcggttaatggatctgggccctgcacatataccatctctggctccagggaatgtgagatgccacaccacatgaagcccttgccatattacagctatgaccagcctgtgatcgggtactgccaggcccaccagccactccatgtcaccaagggctatgagacagtgtctccagagcaggacgaaagccccggcctggagctgggccgagaccacagcttcatcgccaccatcgccaggtcggcagcaccggccatctacctagagagaattgcaaactaacgctgaagccaactcctcactggggagctccatgggggggagggagggccttcatcttaaaggagaatgggtgtccacaatcgcgcaatcgagcaagctcatcgttcctgttaaaacatttatggcatagagaaaag

SEQ ID NO: 11735 - DNA, 3616 bp, Homo sapiens
  source 1..3616: mol_type = unassigned DNA
agtgtatcacaaactcaagcattagcaccaacaagctctgagcatcatcagtctctggaaagccttctgaattagacaagggctgcctcccagcacagctacaaaacactttaaacctgaccagctaaatggataaacctagcctgcatagcttttaaactggggtctcatacagcacaggaggcctacttgcttcaagaactgaaaatccagaggatgaattgctttatctgggaatggcaaaagccagcacaataaggaatgccagtttgtatggggctactagctcacatgcgggatcagaatggtgtgaatgacagccgcactgtgtcatgaaggtggtggtggtttccgcacaagagaccaaataagaagaaagctgagagaggggggaaacgtttttggatgacaaaggatgggtttccatttaattacgcagctgaaaggcatgagtgtggtgctggtgctacttcctacactgctgcttgttatgctcacgggtgctcagagagcttgcccaaagaactgcagatgtgatggcaaaattgtgtactgtgagtctcatgctttcgcagatatccctgagaacatttctggagggtcacaaggcttatcattaaggttcaacagcattcagaagctcaaatccaatcagtttgccggccttaaccagcttatatggctttatcttgaccataattacattagctcagtggatgaagatgcatttcaagggatccgtagactgaaagaattaattctaagctccaacaaaattacttatctgcacaataaaacatttcacccagttcccaatctccgcaatctggacctctcctacaataagcttcagacattgcaatctgaacaatttaaaggccttcggaaactcatcattttgcacttgagatctaactcactaaagactgtgcccataagagtttttcaagactgtcggaatcttgattttttggatttgggttacaatcgtcttcgaagcttgtcccgaaatgcatttgctggcctcttgaagttaaaggagctccacctggagcacaaccagttttccaagatcaactttgctcattttccacgtctcttcaacctccgctcaatttacttacaatggaacaggattcgctccattagccaaggtttgacatggacttggagttccttacacaacttggatttatcagggaatgacatccaaggaattgagccgggcacatttaaatgcctccccaatttacaaaaattgaatttggattccaacaagctcaccaatatctcacaggaaactgtcaatgcgtggatatcattaatatccatcacattgtctggaaatatgtgggaatgcagtcggagcatttgtcctttattttattggcttaagaatttcaaaggaaataaggaaagcaccatgatatgtgcgggacctaagcacatccagggtgaaaaggttagtgatgcagtggaaacatataatatctgttctgaagtccaggtggtcaacacagaaagatcacacctggtgccccaaactccccagaaacctctgattatccctagacctaccatcttcaaacctgacgtcacccaatccacctttgaaacaccaagcccttccccagggtttcagattcctggcgcagagcaagagtatgagcatgtttcatttcacaaaattattgccgggagtgtggctctctttctctcagtggccatgatcctcttggtgatctatgtgtcttggaaacgctacccagccagcatgaaacaactccagcaacactctcttatgaagaggcggcggaaaaaggccagagagtctgaaagacaaatgaattcccctttacaggagtattatgtggactacaagcctacaaactctgagaccatggatatatcggttaatggatctgggccctgcacatataccatctctggctccagggaatgtgaggtatgaaccatgatcctcctaaaagcatttctactgcggggaaggagaggtaaatgtttgaagccctagaggtgtctctaatcactagaaagattaatgacccttttgcttttgggttttgctcagtgtgaaaggttacttaattaaattacaaccaccaggaaattgactgctttttttttttttttaaatggttgaaacttgaaggaagttcattcaaggataagttggaataaagcactatgttaaaacatctgctttttaacaatttgtatacaggggttggacttaaaaacacacatacaaacaaaactcttttcattctgaaatttctgtctggttcttggtgtttgactgttgtaatggagtaaagaagagggccagcttaatttaaaaataaagtgagtttaccaaaattccagaaggtaatgaagatttaaaccaaagagcaattttcccaagggttgattttgttgtaaatttttagttttaatgaaagcatgcaacagggatctcacacccatgttacttgccatttagttattataccagcatagagaatgtcagaggcctactgtgtaattgtatcaggctcctaaggcttctttctttttttttttttgtttccttctttcctactttctttcactccttcctttccttcctttctcttccttctttttttgtttgtttgtttgttttttaattactgggatatagatccgatttcaaaggtttttatgcactggctatttgtgtttaatcagaatgaaacttcaattccatgctttggctttgtccctggtaactaaaatcaggtcacaattttgtggatgatttagcaataataaaatggcagtcataacagggactgtttgtcagtattgctgtcatccccaaaagaaatgatatgtattcttgttaaacttattaaaaaataagtgatacaaatatttataaataaaaggagagaggtttgagttctgggtatcctccctttctgtaacagcctcaaataaaggtgtaccttccatgttatattatttttgtttttataagaataaatttggacccggtttctgattatttaatttaaaagatcacttacaggatcatgttagtgagcagacaaatagtcacaaatttcaaacttgtcaataagtaatgctggatgtaaattgttcttttcttggtaatgttgatcattatgtgcaaagactgactactaaggccttgttgctggaagaaactagtgaagagaggttaaattctggcaatataatgttttagtatctgattttagatgatcactctttcaaaagacagttttaatgagtaattaaagatgttgccctttctaatgctagttaacagttggaaaatataattgctctttgatagcatatactccaatttttccatagtcctaactacaaatgctaatgaaaatgttttcagacaaagcactgaatttgaaataatctctaactcagtacaatttggactattgaactgttcttcaaagaattcattttcttcttttttgtgtatcattgaaaataagagaagtaatcccagataataaattcctaaaaggaaactgtataagcaattgcccttaaaaattaaaaagaataaaagattttctat

SEQ ID NO: 11736 - DNA, 2451 bp, Homo sapiens
  source 1..2451: mol_type = unassigned DNA
ctcatacagcacaggaggcctacttgcttcaagaactgaaaatccagaggatgaattgctttatctgggaatggcaaaagccagcacaataaggaatgccaggtttccatttaattacgcagctgaaaggcatgagtgtggtgctggtgctacttcctacactgctgcttgttatgctcacgggtgctcagagagcttgcccaaagaactgcagatgtgatggcaaaattgtgtactgtgagtctcatgctttcgcagatatccctgagaacatttctggagggtcacaaggcttatcattaaggttcaacagcattcagaagctcaaatccaatcagtttgccggccttaaccagcttatatggctttatcttgaccataattacattagctcagtggatgaagatgcatttcaagggatccgtagactgaaagaattaattctaagctccaacaaaattacttatctgcacaataaaacatttcacccagttcccaatctccgcaatctggacctctcctacaataagcttcagacattgcaatctgaacaatttaaaggccttcggaaactcatcattttgcacttgagatctaactcactaaagactgtgcccataagagtttttcaagactgtcggaatcttgattttttggatttgggttacaatcgtcttcgaagcttgtcccgaaatgcatttgctggcctcttgaagttaaaggagctccacctggagcacaaccagttttccaagatcaactttgctcattttccacgtctcttcaacctccgctcaatttacttacaatggaacaggattcgctccattagccaaggtttgacatggacttggagttccttacacaacttggatttatcagggaatgacatccaaggaattgagccgggcacatttaaatgcctccccaatttacaaaaattgaatttggattccaacaagctcaccaatatctcacaggaaactgtcaatgcgtggatatcattaatatccatcacattgtctggaaatatgtgggaatgcagtcggagcatttgtcctttattttattggcttaagaatttcaaaggaaataaggaaagcaccatgatatgtgcgggacctaagcacatccagggtgaaaaggttagtgatgcagtggaaacatataatatctgttctgaagtccaggtggtcaacacagaaagatcacacctggtgccccaaactccccagaaacctctgattatccctagacctaccatcttcaaacctgacgtcacccaatccacctttgaaacaccaagcccttccccagggtttcagattcctggcgcagagcaagagtatgagcatgtttcatttcacaaaattattgccgggagtgtggctctctttctctcagtggccatgatcctcttggtgatctatgtgtcttggaaacgctacccagccagcatgaaacaactccagcaacactctcttatgaagaggcggcggaaaaaggccagagagtctgaaagacaaatgaattcccctttacaggagtattatgtggactacaagcctacaaactctgagaccatggatatatcggttaatggatctgggccctgcacatataccatctctggctccagggaatgtgaggtatgaaccatgatcctcctaaaagcatttctactgcggggaaggagaggtaaatgtttgaagccctagaggtgtctctaatcactagaaagattaatgacccttttgcttttgggttttgctcagtgtgaaaggttacttaattaaattacaaccaccaggaaattgactgctttttttttttttttaaatggttgaaacttgaaggaagttcattcaaggataagttggaataaagcactatgttaaaacatctgctttttaacaatttgtatacaggggttggacttaaaaacacacatacaaacaaaactcttttcattctgaaatttctgtctggttcttggtgtttgactgttgtaatggagtaaagaagagggccagcttaatttaaaaataaagtgagtttaccaaaattccagaaggtaatgaagatttaaaccaaagagcaattttcccaagggttgattttgttgtaaatttttagttttaatgaaagcatgcaacagggatctcacacccatgttacttgccatttagttattataccagcatagagaatgtcagaggcctactgtgtaattgtatcaggctcctaaggcttctttctttttttttttttgtttccttctttcctactttctttcactccttcctttccttcctttctcttccttctttttttgtttgtttgtttgttttttaattactgggatatagatccgatttcaaaggtttttatgcactggctatttgtgtttaatcagaatgaaacttcaattccatgctttggctttgtccc

SEQ ID NO: 11737 - DNA, 485 bp, Homo sapiens
  source 1..485: mol_type = unassigned DNA
aagactccgtgggcgtaggaccctccgagccaggtgagggatataatctcgtggtgccgttttttaagcccgtcgaaaatcgcagtattcgggtgggagtgacccgattttccagatgctgtctgtcacccctttctttgactaggaaagggaactccctgaccccttgcgcttcccgagtgaggcaatgcctcaccctgcttcggctcacgcacggtgcgcgcacccactgacctgcgcccactgtctggcactccctagtgagatgaacccagtacctcagatggaaatgcagaaatcacctgtcttctgtgtcgctcacactgagagctgtagaccggagcttttcctatttggccatcttgcgacaaagtgatcccaggtttccatttaattacgcagctgaaaggcatgagtgtggtgctggtgctacttcctacactgctgcttgttatgctcacgggtgctcagagagcttgcccaaa

SEQ ID NO: 11738 - DNA, 596 bp, Homo sapiens
  source 1..596: mol_type = unassigned DNA
cacccagttcgagcttcccggctgctttgtttacctaagcaagcccgggcaatggtgggcgcccatcccccagcctcgcgcctccttgcagtttgatctcagactgctgtgctagcaatcagcaagactccgtgggcgtaggaccctccgagccaggtgagggatataatctcgtggtgccgttttttaagcccgtcgaaaatcgcagtattcgggtgggagtgacccgattttccagatgctgtctgtcacccctttctttgactaggaaagggaactccctgaccccttgcgcttcccgagtgaggcaatgcctcaccctgcttcggctcacgcacggtgcgcgcacccactgacctgcgcccactgtctggcactccctagtgagatgaacccagtacctcagatggaaatgcagaaatcacctgtcttctgtgtcgctcacactgagagctgtagaccggagcttttcctatttggccatcttgcgacaaagtgatcccagcttacaggtcatacagaaaacaagcagcctgtccctgatgtacattaaaaacccacctttgggtaaggaaagaacaagggtctatcattct

SEQ ID NO: 11739 - DNA, 1423 bp, Homo sapiens
  source 1..1423: mol_type = unassigned DNA
ttgaaagcaacaactgttttctgcattgaagaaaagcaagggcagggttcagaaagactgaatgtaaagctgggctctgagtctgccatgcccttcgtgtgttgctctgcacattaattaaagggtctacgaggtcagcaaggacgcccaaggagactcagtcatgaaaggtgaactgctcctgttttccagtgtgattgtcctgctccaggtggtatgcagctgcccggacaagtgttactgtcagtcatctacaaattttgtagactgcagccagcagggtctggccgaaatcccttcccatttacctcctcagactcgaacgctgcatttacaagataatcagatacaccatcttcctgcttttgcatttaggtcagtgccatggctcatgaccttaaacttgtccaacaattccctttcaaatctggcccctggagctttccatgggcttcagcacttgcaggttttaaatctaacccagaattcactcctttccctggaaagcagacttttccattccctccctcagctgagggagcttgatttgtcatcaaacaacataagccaccttcccacatccttgggagagacttgggagaacctaactatacttgcggttcaacaaaaccagcttcagcagcttgatcgagcgctcctggaatccatgcccagtgtgaggcttttacttctcaaggacaacctctggaaatgcaattgccacttgctcggtcttaaactctggctggagaaatttgtctataaagggggactaacagacggcatcatctgtgaatcaccagacacctggaagggaaaggacctccttaggatccctcatgagctgtaccagccctgccctcttcctgctcctgatccagtgtcctcgcaggctcagtggcccggctctgcccacggtgtggtcctgaggcctcctgagaaccacaacgcgggggagcgagaactcttggagtgcgagctcaaacccaagccaaggccggccaacctgcgtcatgccattgccactgtcatcatcactggcgttgtgtgtgggattgtgtgtctcatgatgttggcagctgccatctatggctgcacctatgcggcaatcacagcccagtaccatgggggacccttggctcaaaccaatgatcctgggaaggtggaagaaaaagagcgatttgacagctcaccagcctgagagcttttgtctcaaataggattggtcattgcaggccagaagatagtgtctgagtagggctgatgtgtttcctgttagtctgattttgcttttgccaaaagacaaaaaaaaaaaaaaaaaaaaaaagaaaaaaaaaagatgtgtctgtaaaaaatatttctggggaggaatttatgttgcgatttttaaaatactataggtaaaataaagatgatacttgtg

SEQ ID NO: 11740 - DNA, 1318 bp, Homo sapiens
  source 1..1318: mol_type = unassigned DNA
aagcctctgaaatgcaccatgtcggtgcccaggctcattctgctctgccttaagtgtccttcgttctctggaccacagccttcccaagaatgaggacctgttcttgctccctgctggacccctgcctccagcaagatgctgagtacacagacgacccataggtgaactgctcctgttttccagtgtgattgtcctgctccaggtggtatgcagctgcccggacaagtgttactgtcagtcatctacaaattttgtagactgcagccagcagggtctggccgaaatcccttcccatttacctcctcagactcgaacgctgcatttacaagataatcagatacaccatcttcctgcttttgcatttaggtcagtgccatggctcatgaccttaaacttgtccaacaattccctttcaaatctggcccctggagctttccatgggcttcagcacttgcaggttttaaatctaacccagaattcactcctttccctggaaagcagacttttccattccctccctcagctgagggagcttgatttgtcatcaaacaacataagccaccttcccacatccttgggagagacttgggagaacctaactatacttgcggttcaacaaaaccagcttcagcagcttgatcgagcgctcctggaatccatgcccagtgtgaggcttttacttctcaaggacaacctctggaaatgcaattgccacttgctcggtcttaaactctggctggagaaatttgtctataaagggggactaacagacggcatcatctgtgaatcaccagacacctggaagggaaaggacctccttaggatccctcatgagctgtaccagccctgccctcttcctgctcctgatccagtgtcctcgcaggctcagtggcccggctctgcccacggtgtggtcctgaggcctcctgagaaccacaacgcgggggagcgagaactcttggagtgcgagctcaaacccaagccaaggccggccaacctgcgtcatgccattgccactgtcatcatcactggcgttgtgtgtgggattgtgtgtctcatgatgttggcagctgccatctatggctgcacctatgcggcaatcacagcccagtaccatgggggacccttggctcaaaccaatgatcctgggaaggtggaagaaaaagagcgatttgacagctcaccagcctgagagcttttgtctcaaataggattggtcattgcaggccagaagatagtgtctgagtagggctgatgtgtttcctgttagtctgattttgcttttgccaaaagacaaaaaaaaaaaaaaaaaaaaaaa

SEQ ID NO: 11741 - DNA, 2258 bp, Homo sapiens
  source 1..2258: mol_type = unassigned DNA
gcttttcaaagtcgtcccaccatcaatgaaggcaggccacttccggcgtagccatggcggctaacgctactaccaacccgtcgcagctgctgcccttagagcttgtggacaaatgtataggatcaagaattcacatcgtgatgaagagtgataaggaaattgttggtactcttctaggatttgatgactttgtcaatatggtactggaagatgtcactgagtttgaaatcacaccagaaggaagaaggattactaaattagatcagattttgctaaatggaaataatataacaatgctggttcctggaggagaaggacctgaagtgtgaatgagtttccttgacttacactagattttgttttggcttataatgacaagaaaatggaattttttttcccactttctaatgtttaaatcccataaagctaagtttcccgttaaagggaagtgctttgaagatgtgtacccatttttgtaagttaatcatgattatcctggaaaaagaagaaaagagcttcttctttgcagatgaaaataaaggtgtttttggttaactgtcattttgtttattctactgcagtagccagtggaacaaagtttgtagttattttgccacttacttttctgtcattatatgcttatttgttttgtcatttacgtgaccatttgattctcaaacaaaagttgttccaaacaaaatgatgaactttgatttgaacaggtgcatttaaacaaccggaaatgatcacttagaaaattcaattaaaatgctgttgttttgtaatgaggatttttcttctgatttcaaattccatgaactcctattgaaaacaaacaatgtacaggtaatatatgcacattgtagaaatgcaggaattatctattggaattaccctaaagatagaaattttatctatttgcttataaaattgattcagaaggttattaccttaatgtagttattactgaattgccaggaaatgagtggagacagagctttaagataaaggatactaaaagcagctaagaactccaggactcaggtcaaatcaaggaactgataataagatcattgaactgtataaattaagtcaaagaactcctattaaaaacaaacaggtaatatatgcacatcgtagaattgtaggtaagcaaaaaggagaaggttgatcatgctttgctgtatgtcttcgtagactttctcagtccactctcagtacacgttttattttacttgctcatcctgattatactgtttttaccctccacttaagtcattttttgaatttaaatggtgaatatctttctgtgtcaaatatttcaacattaatatgtacatagtattaaatggatttactataaattatttagcctattcttactggccacagtagtctaactagatctttatacatttgtatttttctagaataaactcaaaaatgtgtaagatcaaagggtatatattgtgttgccaagaaaaagtttgtgccaatgtatatttttgccaggagtctttcatagtaccatttatatccttcccagcattagctgtgttctaccttctctcctctttgccatttttacaagaaaaccgggcatgtctaaagttttcttttcctttttttttttttttttttttttttggagagtctcactggaatgcagtggcatgatcttggctccctgcaacctccagtcaggctggtgtgccttgtcgcgatatcaacgcgacctccgcctcccaggttcaagtgattgtcctgcctcaccctcctgagtagctgggattacaggtgggcgccaccactcccatctaatttttatatttttagagagatggggttttaccttgttggccaggctggtcttgaactcctgacctctagtgatccacctgcctcagcctcccaaagtgccggtattaaaggcatgagccaccaggcctggcctaaaattttcttgattaattttgatctcatttgtattttgtaaatgacttatctgttgaggcttttgccattgagatgtttgtctttttcttactaatttgtaagaattcttgatgggtttctgttagtcatgtattttgctaataatttccctagtttgtagtttgccacttagtgctatttttgacataaatgatgtattttaatgtagttgcatgttgacctagtccattatggtttttgtatttggtccacgtggattggaaaacctttgctttgattatacttttctttgggcactttat

SEQ ID NO: 11742 - DNA, 740 bp, Homo sapiens
  source 1..740: mol_type = unassigned DNA
acgtgacccgggcggctgggcttgcagagcctgtggtgtccgcgggacctggagagcttgtggacaaatgtataggatcaagaattcacatcgtgatgaagagtgataaggaaattgttggtactcttctaggatttgatgactttgtcaatatggtactggaagatgtcactgagtttgaaatcacaccagaaggaagaaggattactaaattagatcagattttgctaaatggaaataatataacaatgctggttcctggaggagaaggacctgaagtgtgaatgagtttccttgacttacactagattttgttttggcttataatgacaagaaaatggaattttttttcccactttctaatgtttaaatcccataaagctaagtttcccgttaaagggaagtgctttgaagatgtgtacccatttttgtaagttaatcatgattatcctggaaaaagaagaaaagagcttcttctttgcagatgaaaataaaggtgtttttggttaactgtcattttgtttattctactgcagtagccagtggaacaaagtttgtagttattttgccacttacttttctgtcattatatgcttatttgttttgtcatttacgtgaccatttgattctcaaacaaaagttgttccaaacaaaatgatgaactttgatttgaacaggtgcatttaaacaaccggaaatgatcacttagaaaattcaattaaaatgctgttgttttgtaa

SEQ ID NO: 11743 - DNA, 538 bp, Homo sapiens
  source 1..538: mol_type = unassigned DNA
tcactggaaaaggtccacatttagtgaacgcgtcgtcggcctactttgttgtgagcccgcctctgcagtgttatagagcttgtggacaaatgtataggatcaagaattcacatcgtgatgaagagtgataaggaaattgttggtactcttctaggatttgatgactttgtcaatatggtactggaagatgtcactgagtttgaaatcacaccagaaggaagaaggattactaaattagatcagattttgctaaatggaaataatataacaatgctggttcctggaggagaaggacctgaagtgtgaatgagtttccttgacttacactagattttgttttggcttataatgacaagaaaatggaattttttttcccactttctaatgtttaaatcccataaagctaagtttcccgttaaagggaagtgctttgaagatgtgtacccatttttgtaagttaatcatgattatcctggaaaaagaagaaaagagcttcttctttgcagatgaaaataaaggtgtttttggttaactgtca

SEQ ID NO: 11744 - DNA, 636 bp, Homo sapiens
  source 1..636: mol_type = unassigned DNA
aaaaaaaaaaaaacccaaaaaacatttcatttcatatttgatttcctgggcaagctttcacttctttttatgaagctctgtctgatagacgtgggtcttagtgtcagtgagttcattctgctgcttttaatgaaggttacattacctagtggataacctttgtatctgaaaattgtggatataattgctcaacctcagtgtaatttgtatacaaggataacctttttagggagggtaagtatttccaaaatgttggctttgattttcactgtttgtcctgactgtattttatctattcatttagtgaaatcacaccagaaggaagaaggattactaaattagatcagattttgctaaatggaaataatataacaatgctggttcctggaggagaaggacctgaagtgtgaatgagtttccttgacttacactagattttgttttggcttataatgacaagaaaatggaattttttttcccactttctaatgtttaaatcccataaagctaagtttcccgttaaagggaagtgctttgaagatgtgtacccatttttgtaagttaatcatgattatcctggaaaaagaagaaaagagcttcttctttgcagatgaaaataaaggtgtttttggttaa

SEQ ID NO: 11745 - DNA, 687 bp, Homo sapiens
  source 1..687: mol_type = unassigned DNA
cggctaacgctactaccaacccgtcgcagctgctgcccttaggtaatcgccgtcctttggggagcaggaacagggagctgacattcaggattgggggccgaggggctgttccgaggcaggccctggccgagtgtggggaaatgtataagaccaaatgcggttcgactctgagctccaagtcttcgcgacagcaggccgcacctgctctttaacgtggtcgggctcctccagagcttgtggacaaatgtataggatcaagaattcacatcgtgatgaagagtgataaggaaattgttggtactcttctaggatttgatgactttgtcaatatggtactggaagatgtcactgagtttgaaatcacaccagaaggaagaaggattactaaattagatcagattttgctaaatggaaataatataacaatgctggttcctggaggagaaggacctgaagtgtgaatgagtttccttgacttacactagattttgttttggcttataatgacaagaaaatggaattttttttcccactttctaatgtttaaatcccataaagctaagtttcccgttaaagggaagtgctttgaagatgtgtacccatttttgtaagttaatcatgattatcctggaaaaagaagaaaagagcttcttctttgcagatgaaaataaaggtgtttttggttaa

SEQ ID NO: 11746 - DNA, 504 bp, Homo sapiens
  source 1..504: mol_type = unassigned DNA
acttccggcgtagccatggcggctaacgctactaccaacccgtcgcagctgctgcccttagagcttgtggacaaatgtataggatcaagaattcacatcgtgatgaagagtgataaggaaattgttggtactcttctaggatttgatgactttgtcagtatccttttaaaagtgaaatcacaccagaaggaagaaggattactaaattagatcagattttgctaaatggaaataatataacaatgctggttcctggaggagaaggacctgaagtgtgaatgagtttccttgacttacactagattttgttttggcttataatgacaagaaaatggaattttttttcccactttctaatgtttaaatcccataaagctaagtttcccgttaaagggaagtgctttgaagatgtgtacccatttttgtaagttaatcatgattatcctggaaaaagaagaaaagagcttcttctttgcagatgaaaataaaggtgtttttggttaa

SEQ ID NO: 11747 - DNA, 1295 bp, Homo sapiens
  source 1..1295: mol_type = unassigned DNA
cttaaatcctcactaaagaaaaattttaaaaaatgctagttgcagattttcaatccactggactttaaaaagaaacaatagattccttaatgagtagttgtaacgaaaattgtaacagttaattgatggcaggaaatacgaattgatttatactggtttgaagattctggcttgagaggaaatgcaactttacgggggaagaagactcaaacgttacaggaacaatttattcacaaggcaaaatatcttcaacgtctctccaaaacttcaagggcattatgggtatctgccgagatggtaaaatgtccagtgggcaggaaatatttcaccggatctcacttgccggggaaaaaagccagtgaacgcgacccacgcagctgactagatcgtgcgctcggcctcagattggtcgagcctgtttgggctgcggaaaaagcggaagcgcgcttttcaaagtcgtcccaccatcaatgaaggcaggccacttccggcgtagccatggcggctaacgctactaccaacccgtcgcagctgctgcccttaggtaatcgccgtcctttggggagcaggaacagggagctgacattcaggattgggggccgaggggctgttccgaggcaggccctggccgagtgtggggaaatgtataagaccaaatgcggttcgactctgagctccaagtcttcgcgacagcaggccgcacctgctctttaacgtggtcgggctcctccaggcaaggactttgacttctcaaaccagaccttcactggaaaaggtccacatttagtgaacgcgtcgtcggcctactttgttgtgagcccgcctctgcagtgttatagagcttgtggacaaatgtataggatcaagaattcacatcgtgatgaagagtgataaggaaattgttggtactcttctaggatttgatgactttgtcaatatggtactggaagatgtcactgagtttgaaatcacaccagaaggaagaaggattactaaattagatcagattttgctaaatggaaataatataacaatgctggttcctggaggagaaggacctgaagtgtgaatgagtttccttgacttacactagattttgttttggcttataatgacaagaaaatggaattttttttcccactttctaatgtttaaatcccataaagctaagtttcccgttaaagggaagtgctttgaagatgtgtacccatttttgtaagttaatcatgattatcctggaaaaagaagaaaagagcttcttctttgcagatgaaaataaaggtgtttttggttaa

SEQ ID NO: 11748 - DNA, 649 bp, Homo sapiens
  source 1..649: mol_type = unassigned DNA
acttccggcgtagccatggcggctaacgctactaccaacccgtcgcagctgctgcccttagttggtgaagagtgattgaactagtggtcgtggccgtgattgaaaagttttcattccttcatgccacagactcttttggaaggctcattatgtgccagatgctgtgcttgaactgagatttgtattataagacctaaaagcttgtggacaaatgtataggatcaagaattcacatcgtgatgaagagtgataaggaaattgttggtactcttctaggatttgatgactttgtcaatatggtactggaagatgtcactgagtttgaaatcacaccagaaggaagaaggattactaaattagatcagattttgctaaatggaaataatataacaatgctggttcctggaggagaaggacctgaagtgtgaatgagtttccttgacttacactagattttgttttggcttataatgacaagaaaatggaattttttttcccactttctaatgtttaaatcccataaagctaagtttcccgttaaagggaagtgctttgaagatgtgtacccatttttgtaagttaatcatgattatcctggaaaaagaagaaaagagcttcttctttgcagatgaaaataaaggtgtttttg

SEQ ID NO: 11749 - DNA, 687 bp, Homo sapiens
  source 1..687: mol_type = unassigned DNA
ggtgtccgcgggacctggaggtgcggcgtggcacacctgctttttcctccctggattcaatctcaaagcacttccttctcttttgccttctctttttcctcaaagttttcccacttccctcttctcttctgttttccttgctttttcacatcttttcggttcactctccgagtgtccgattccttcacctccttgcctttgcctctgtggcccccgtccttattcttaaatatgtagtaacatggagcatactggtgagagcttgtggacaaatgtataggatcaagaattcacatcgtgatgaagagtgataaggaaattgttggtactcttctaggatttgatgactttgtcaatatggtactggaagatgtcactgagtttgaaatcacaccagaaggaagaaggattactaaattagatcagattttgctaaatggaaataatataacaatgctggttcctggaggagaaggacctgaagtgtgaatgagtttccttgacttacactagattttgttttggcttataatgacaagaaaatggaattttttttcccactttctaatgtttaaatcccataaagctaagtttcccgttaaagggaagtgctttgaagatgtgtacccatttttgtaagttaatcatgattatcctggaaaaagaagaaaagagcttcttctttgc

SEQ ID NO: 11750 - DNA, 1736 bp, Homo sapiens
  source 1..1736: mol_type = unassigned DNA
gtagccatggcggctaacgctactaccaacccgtcgcagctgctgcccttagagcttgtggacaaatgtataggatcaagaattcacatcgtgatgaagagtgataaggaaattgttggtactcttctaggatttgatgactttgtcaatatggtactggaagatgtcactgagttgtgagtagtgttaaagaattggggggaatctcttcttaattaaagacagttttactacttttgagtaaaattatttatgagaaaacattacctcttggtggaataacgttaaagatagacgttttatctgtttgcttgtaaaattggatcagagtgttattaccttaatgtaattattagtaaacgcctagaatattagtggagacacagttttaaggtagaagataacaaaaagagccaggaattttagggttcaggtcaaataaaggaactgatagtaagagcatttaggctggacatggtggctcattcctgtaatcctagcactttggaaggccaaaggaggaggattaagcctgggagtttgagaccagcctgggcaacaaagggagacccctgtctctataaaaaatttaaaaattagctggttatagtagggggcagctgtagtcctagctgctctggagggtgaggatcccttgagcccaggagttctaggctgcagtgaactatgattgtaccactgtactcagcctgggcaacagagcaagaccctgtctcttaaaaaaaaaaaaacccaaaaaacatttcatttcatatttgatttcctgggcaagctttcacttctttttatgaagctctgtctgatagacgtgggtcttagtgtcagtgagttcattctgctgcttttaatgaaggttacattacctagtggataacctttgtatctgaaaattgtggatataattgctcaacctcagtgtaatttgtatacaaggataacctttttagggagggtaagtatttccaaaatgttggctttgattttcactgtttgtcctgactgtattttatctattcatttagtgaaatcacaccagaaggaagaaggattactaaattagatcagattttgctaaatggaaataatataacaatggtaagacacattgaaactgttttattttgatgggagcccatttttggggagcagtgattacagaactaaccttaatgttgcttgcttgactaaatgatcatggcccagtggtgcataagatgggaaaggggttctctgtggtcagggtcctaaagctcagctattgaagaggcattgggtctaaaggttagtttgcttggaacttttaatcgctgttgagatagtaagtattaattgatgacgttgggaattgtaaatagatactgacaatctggagaaaatgggaacgtggagtgcaggggacaggcaaaggtggcttaatgaagagcaaggggtttttagatgacatggtggtagtgttattaataaactctttttcctctttatgcagctggttcctggaggagaaggacctgaagtgtgaatgagtttccttgacttacactagattttgttttggcttataatgacaagaaaatggaattttttttcccactttctaatgtttaaatcccataaagctaagtttcccgttaaagggaagtgctttgaagatgtgtacccatttttgtaagttaatcatgattatcctggaaaaagaagaaaagagcttcttcttt

SEQ ID NO: 11751 - DNA, 8567 bp, Homo sapiens
  source 1..8567: mol_type = unassigned DNA
cctcgctccctctccggtaatgagggggctgagctgtccctccgaggagggggcctggtgtggataaaagagacgaaaaagccgggggaggtttccaaaaataaaaccgtccgggtccccttcagacggctgcaggcacagggaggaggcgcgaaggtgcagcagccgtgcgagcccagctggagtaggagcgcggactcgaggctcggggcgcgcagccctcgttccgccgagagccgggcccccagtcggccgcttcagggccccctagactcagagaagctggccgccgggcggggccgggagaacagcccgcgggcgtccagcgtgccgaccacaaagctcttcgcggtgcccgcgcgcaccactctccagccgccccgcgccatgaggccgcggaccaaagcccgcagcccggggcgcgccctgcggaacccctggagaggcttcctgccgctcaccctggctctcttcgtgggcgcgggtcatgcccaaagggaccccgtagggagatacgagccggctggtggagacgcgaatcgactgcggcgccctgggggcagctacccggcagcggctgcagccaaggtgtacagtctgttccgggagcaggacgcgcctgtcgcgggcttgcagcccgtggagcgggcccagccgggctgggggagccccaggaggcccaccgaggcggaggccaggaggccgtcccgcgcgcagcagtcgcggcgtgtccagccacctgcgcagacccggagaagcactcccctgggccagcagcaaccagcaccccggacccgggccgcgccggctctcccacgcctggggaccccacagcggtctggggctgcgcccccaaccccgccgcgagggcggctcacggggaggaacgtctgcgggggacagtgctgcccaggatggacaacagcaaacagcaccaaccactgtatcaaacccgtttgcgagccgccgtgccagaaccggggctcctgcagccgcccgcagctctgtgtctgccgctctggtttccgtggagcccgctgcgaggaggtcattcccgatgaggaatttgacccccagaactccaggctggcacctcgacgctgggccgagcgttcacccaacctgcgcaggagcagtgcggctggagagggcaccttggccagagcacagccgccagcaccacagtcgccgcccgcaccacagtcgccaccagctgggaccctgagtggcctcagccagacccacccttcccagcagcacgtggggttgtcccgcactgtccgacttcacccgactgccacggccagtagccagctctcttccaacgccctgcccccgggaccaggccttgagcagagagatggcacccaacaggcggtacctctggagcacccctcatccccctgggggctgaacctcacggagaaaatcaagaagatcaagatcgtcttcactcccaccatctgcaagcagacctgtgcccgtggacactgtgccaacagctgtgagaggggcgacaccaccaccctgtacagccagggcggccatgggcacgatcccaagtctggcttccgcatctatttctgccagatcccctgcctgaacggaggccgctgcatcggcagggacgaatgctggtgccccgccaactccaccgggaagttctgccacctgcctatcccgcagccggacagggagcctccagggagggggtcccgccccagggccttgctggaagccccactgaagcagtccactttcacactgccgctctccaaccagctggcctccgtgaacccctccctggtgaaggtgcacattcaccacccacccgaggcctcagtgcagatccaccaggtggcccaggtgcggggcggggtggaggaggccctagtggagaacagcgtggagaccagacccccgccctggctgcctgccagccctggccacagcctctgggacagcaacaacatccctgctcggtctggagagccccctcggccactgcccccagcagcacccaggcctcgaggactgctgggccggtgttacctgaacactgtgaacggacagtgtgccaaccctctgctggagctgactacccaggaggactgctgtggcagtgtgggagccttctggggggtgactttgtgtgccccatgcccacccagaccagcctccccggtgattgagaatggccagctggagtgtcctcaggggtacaagagactgaacctcactcactgccaagatatcaacgagtgcttgaccctgggcctgtgcaaggacgcggagtgtgtgaataccaggggcagctacctgtgcacatgcagacctggcctcatgctggatccatcgcggagccgctgtgtgtcggacaaggcaatctccatgctgcagggactgtgctaccggtcgctggggcccggcacctgcaccctgcctttggcccagcggatcaccaagcagatatgctgctgcagccgcgtgggcaaagcatggggcagcgagtgtgagaaatgccctctgcctggcacagaggccttcagagagatctgccctgccggccacggctacacctacgcgagctccgacatccgcctgtccatgaggaaagccgaggaggaggaactggcaaggcccccaagggagcaagggcagaggagcagcggggcactgcccgggccagcagagaggcagcccctccgggtcgtcacggacacctggcttgaggccgggaccatccctgacaagggtgactctcaggctggccaggtcacgaccagtgtcactcatgcacctgcctgggtcacagggaatgccacaaccccaccaatgcctgaacaggggattgcagagatacaggaagaacaagtgaccccctccactgatgtgctggtgaccctgagcaccccaggcattgacagatgcgctgctggagccaccaacgtctgtggccctggaacctgcgtgaacctccccgatggatacagatgtgtctgcagccctggctaccagctgcaccccagccaggcctactgcacagatgacaacgagtgtctgagggacccctgcaagggaaaagggcgctgcatcaaccgcgtggggtcctactcctgcttctgctaccctggctacactctggccacctcaggggcgacacaggagtgtcaagatatcaatgagtgtgagcagccaggggtgtgcagcggggggcagtgcaccaacaccgagggctcgtaccactgcgagtgtgatcagggctacatcatggtcaggaaaggacactgccaagatatcaacgaatgccgtcaccccggtacctgccctgatgggagatgcgtcaattcccctggctcctacacttgtctggcctgtgaggagggctaccggggccagagtgggagctgtgtagatgtgaatgagtgtctgactcccggggtctgtgcccatggaaagtgcaccaacctagaaggctccttcagatgctcttgtgagcagggctatgaggtcacctcagatgagaagggctgccaagatgtggatgagtgtgccagccgggcctcatgccccacaggcctctgcctcaacacggagggctccttcgcctgctctgcctgtgagaacgggtactgggtgaatgaagacggcactgcctgtgaagacctagatgagtgtgccttcccgggagtctgcccctccggagtctgcaccaacacggctggctccttctcctgcaaggactgcgatgggggctaccggcccagccccctgggtgactcctgtgaagatgtggatgaatgtgaagacccccagagcagctgcctgggaggcgagtgcaagaacactgtgggctcctaccagtgcctctgtccccagggcttccagctggccaatggcaccgtgtgtgaggatgtgaatgagtgcatgggggaggagcactgcgcaccccacggcgagtgcctcaacagccacgggtctttcttctgtctgtgcgcgcctggcttcgtcagcgcagaggggggcaccagctgccaggatgtggacgagtgtgccaccacagacccgtgtgtgggagggcactgtgtcaacaccgagggctccttcaactgtctatgtgagactggcttccagccctccccagagagtggagagtgtgtggatattgacgagtgtgaggactatggagacccggtgtgtggcacctggaagtgtgaaaacagccctggctcctaccgctgtgttctgggctgccagcctggcttccacatggccccgaacggagactgcattgacatagacgagtgcgccaacgacaccatgtgtggcagccacggcttctgtgacaacactgatggctccttccgctgcctctgtgaccagggcttcgagatctctccctcaggctgggactgtgtggatgtgaacgagtgtgagcttatgctggcggtatgtggggccgcgctctgtgagaacgtggagggctccttcctgtgcctctgtgccagtgacctggaggagtacgatgcccaggaggggcactgccgcccacggggggctggaggtcagagtatgtctgaggccccaacgggggaccatgccccggcccccacccgcatggactgctactccgggcagaagggccatgcgccctgctccagtgtcctgggccggaacaccacacaggctgaatgctgctgcacccagggcgctagctggggagatgcctgtgacctctgcccgtctgaggactcagctgaattcagcgagatctgccctagtggaaaaggctacattcctgtggaaggagcctggacgtttggacagaccatgtacacagatgcggatgagtgtgtgatattcgggcctggtctctgcccgaacggccggtgcctcaacaccgtgcctggttatgtctgcctgtgcaatcccggcttccactacgatgcttcccacaagaagtgtgaggatcacgatgagtgccaggacctggcctgtgagaatggcgagtgcgtcaacacggagggctccttccactgcttctgcagccccccgctcaccctggacctcagccagcagcgctgcatgaacagcaccagcagcacggaggacctccctgaccacgacatccacatggacatctgctggaaaaaagtcaccaatgatgtgtgcagcgaacccctgcgtgggcaccgcaccacctacacggaatgctgctgccaggacggcgaggcctggagccagcagtgtgctctgtgtcccccgaggagctctgaggtctatgctcagctgtgcaacgtggctcgcattgaggcagagcgggaggccggggtccacttccggccaggctatgagtatggccccgggcccgatgacctgcactacagcatctatggcccagatggggcccccttctacaactacctgggccccgaggacaccgtccctgagcctgccttccccaacacagccggtcactcagcggaccgcacacccatccttgagtctcctttgcagccctcagaactccagccccactacgtggccagccatccagagcccccagccggcttcgaagggcttcaggcggaggagtgcggcatcctgaacggctgtgagaatggccgctgtgtgcgcgtgcgggagggctacacctgtgactgttttgagggcttccagctggatgcggcccacatggcctgcgtagatgtgaatgagtgtgatgacttgaacgggcctgctgtgctctgtgtccatggttactgcgagaacacagagggctcctaccgctgccactgctccccgggatatgtggctgaggcagggcccccccactgcactgccaaggagtagcagtcaggggtcagtgtggcaactacctggaaatggcctccagtcacaggcaggggccttgaggatgatttcctagctgggaagacaccgtgacatcaggccagaggtttccaatcagccttgcctgctttcatctctcccagcttagcctctggctgtaagcttcggtcattgcctccatgcccttgcttggctcaagcaccaccaatcgctttaatgcttcagccaccgcatgaggccctgtccaccacctttcctggccttgctatgggatgcttaccaaaggatggccctcatccaccctcccaagctgtgcgagcatgcaaggccccatggcctcacactgcagacacccctttccagccacaatccaccatcatcctgacgatcccacaactgggacagaggctacatctgccctagggaggtccttcagaatctgtggagcaagaaaggatttggggaagcttggggactgactccagagccccctcctaagaaccatcaccaccactcagccaatctgttctgggccctgattttgccacacctccatcctgtagcccattctctgaccccaaggagtggcagaagatcccttcactcagagaagcaaggctgatattagcttgttgaatgtaagagacacaaatgaagaagaacaaagagcctgagaaagcagcaagaggacatgatgaaaaatacgtggagttgatgagaaaggggagccaaggctttatacgtctaaagaaaatattcagtagctgaatccgcccagtgatagcctgtgggcaccagcagcaagggctgccatgggatacagcacccatctacaaagacctctattacataaacactgcttcttacaggaaacaaacctcttctgggatctccttttgtgaaaaccagtttgatgtgctaaaagtaaaaagtctattttccagtgtggtcttgttcagaagcagccagatttccaatgttgtttttcccctccactcagaaacccctgccctttcccttcagaaaacgatggcaggcattcctctgagtttacaagcagagactcactccaacccaaactagctgggagttcagaaccatggtggaataaagaaatgtgcatctggtctcttctgttgtttttatttcatatcagattaaatttctttaccatgttggctaagtctaaatattagagatgaggctgtgcctactccctggccagctctgctgatagcctatgatgggttccaatgggaaatgactctttactattaaaagacaaggaaagctctgacttcgtacttctctgatgaatggcaatgtaaatgaacaaggctccatgtgactggagcatggaagtgaatgctactttcttaatttaatctgccctgtcctacctgctcctctgattgttagccatcacataacttattgaatgcttgccatgtgccaggcactgtgctgagtgccatacatacatttcatttaattatccaataatcctacttactattgtttattctcaatttacaggtgaggaaactgagacatagaaagcttaaataatttgctctaggtccctatactaattgagatgttttcagcagacaaaaataagtcactcttacgcatgtaaaaatattctttcactcataataaaagaaatgcaacttaaaaccatactgagatcctttttaaaactgtcagattggcaaagatcaaaaagcttgttaagactcctagctggcaagcatgtgggaaataggtactctcataacagctgacagaagtacatattgaagaggacaatatggcaatgtccttcaaaattataaaagcactaactctttgatccagtagtttccacttctaggaacttaaccttcagatatattttcaccagatataaaatgacatacgtaagaagttattactgcatcatttgtaatagctaaagattagaaacaattaattgctatggaacccttaaaaaaggtggctctaaattccttaagaaagatatccaaaacaaattaaggggaaaagggagggttgcataacagcatgtaacataacactatttgtctaaagaatggggaaagagaagcggttgtctgttcacctcatccttgccactccgccttatacctcaccatcggagaacttaccatcccccaaatatatcctgctggcactacaccttcgtaactgctgttcccactgcccccacaacactccaatctccaccttcctgccaaccttgagatattgtatgcatatatacatatttcctttgtttaaaatacaaatagcatactatgcatgctgttctgcactttgctttttttttatacttgcaattagagctgcctcatttcattttacagctgtatactattccattgaatggataaaccataatttatttaatcagtccctcactgacagacgtttccattgtttcctgtcttttgctataaataatgctgtaatgaatattcttgtgcatatttcacattaatttatgggattacatctgcaggataaattcttagaaccaatggtggtttgtggggagggtgacagggtggataggtacaggattgggagacttttcactgtatctccttttgtatttttttgaattttgtaccatatgtatcacctattcaaaaaaaataaaatatttttaaatacagttgctggccaaa

SEQ ID NO: 11752 - DNA, 6462 bp, Homo sapiens
  source 1..6462: mol_type = unassigned DNA
tcgccgcccgctggcttcccggtgccaaagtgggtgttgctggaattcctcgctccctctccggtaatgagggggctgagctgtccctccgaggagggggcctggtgtggataaaagagacgaaaaagccgggggaggtttccaaaaataaaaccgtccgggtccccttcagacggctgcaggcacagggaggaggcgcgaaggtgcagcagccgtgcgagcccagctggagtaggagcgcggactcgaggctcggggcgcgcagccctcgttccgccgagagccgggcccccagtcggccgcttcagggccccctagactcagagaagctggccgccgggcggggccgggagaacagcccgcgggcgtccagcgtgccgaccacaaagctcttcgcggtgcccgcgcgcaccactctccagccgccccgcgccatgaggccgcggaccaaagcccgcagcccggggcgcgccctgcggaacccctggagaggcttcctgccgctcaccctggctctcttcgtgggcgcgggtcatgcccaaagggaccccgtagggagatacgagccggctggtggagacgcgaatcgactgcggcgccctgggggcagctacccggcagcggctgcagccaaggtgtacagtctgttccgggagcaggacgcgcctgtcgcgggcttgcagcccgtggagcgggcccagccgggctgggggagccccaggaggcccaccgaggcggaggccaggaggccgtcccgcgcgcagcagtcgcggcgtgtccagccacctgcgcagacccggagaagcactcccctgggccagcagcaaccagcaccccggacccgggccgcgccggctctcccacgcctggggaccccacagcggtctggggctgcgcccccaaccccgccgcgagggcggctcacggggaggaacgtctgcgggggacagtgctgcccaggatggacaacagcaaacagcaccaaccactgtatcaaacccgtttgcgagccgccgtgccagaaccggggctcctgcagccgcccgcagctctgtgtctgccgctctggtttccgtggagcccgctgcgaggaggtcattcccgatgaggaatttgacccccagaactccaggctggcacctcgacgctgggccgagcgttcacccaacctgcgcaggagcagtgcggctggagagggcaccttggccagagcacagccgccagcaccacagtcgccgcccgcaccacagtcgccaccagctgggaccctgagtggcctcagccagacccacccttcccagcagcacgtggggttgtcccgcactgtccgacttcacccgactgccacggccagtagccagctctcttccaacgccctgcccccgggaccaggccttgagcagagagatggcacccaacaggcggtacctctggagcacccctcatccccctgggggctgaacctcacggagaaaatcaagaagatcaagatcgtcttcactcccaccatctgcaagcagacctgtgcccgtggacactgtgccaacagctgtgagaggggcgacaccaccaccctgtacagccagggcggccatgggcacgatcccaagtctggcttccgcatctatttctgccagatcccctgcctgaacggaggccgctgcatcggcagggacgaatgctggtgccccgccaactccaccgggaagttctgccacctgcctatcccgcagccggacagggagcctccagggagggggtcccgccccagggccttgctggaagccccactgaagcagtccactttcacactgccgctctccaaccagctggcctccgtgaacccctccctggtgaaggtgcacattcaccacccacccgaggcctcagtgcagatccaccaggtggcccaggtgcggggcggggtggaggaggccctagtggagaacagcgtggagaccagacccccgccctggctgcctgccagccctggccacagcctctgggacagcaacaacatccctgctcggtctggagagccccctcggccactgcccccagcagcacccaggcctcgaggactgctgggccggtgttacctgaacactgtgaacggacagtgtgccaaccctctgctggagctgactacccaggaggactgctgtggcagtgtgggagccttctggggggtgactttgtgtgccccatgcccacccagaccagcctccccggtgattgagaatggccagctggagtgtcctcaggggtacaagagactgaacctcactcactgccaagatatcaacgagtgcttgaccctgggcctgtgcaaggacgcggagtgtgtgaataccaggggcagctacctgtgcacatgcagacctggcctcatgctggatccatcgcggagccgctgtgtgtcggacaaggcaatctccatgctgcagggactgtgctaccggtcgctggggcccggcacctgcaccctgcctttggcccagcggatcaccaagcagatatgctgctgcagccgcgtgggcaaagcatggggcagcgagtgtgagaaatgccctctgcctggcacagaggccttcagagagatctgccctgccggccacggctacacctacgcgagctccgacatccgcctgtccatgaggaaagccgaggaggaggaactggcaaggcccccaagggagcaagggcagaggagcagcggggcactgcccgggccagcagagaggcagcccctccgggtcgtcacggacacctggcttgaggccgggaccatccctgacaagggtgactctcaggctggccaggtcacgaccagtgtcactcatgcacctgcctgggtcacagggaatgccacaaccccaccaatgcctgaacaggggattgcagagatacaggaagaacaagtgaccccctccactgatgtgctggtgaccctgagcaccccaggcattgacagatgcgctgctggagccaccaacgtctgtggccctggaacctgcgtgaacctccccgatggatacagatgtgtctgcagccctggctaccagctgcaccccagccaggcctactgcacagatgacaacgagtgtctgagggacccctgcaagggaaaagggcgctgcatcaaccgcgtggggtcctactcctgcttctgctaccctggctacactctggccacctcaggggcgacacaggagtgtcaagatatcaatgagtgtgagcagccaggggtgtgcagcggggggcagtgcaccaacaccgagggctcgtaccactgcgagtgtgatcagggctacatcatggtcaggaaaggacactgccaagatatcaacgaatgccgtcaccccggtacctgccctgatgggagatgcgtcaattcccctggctcctacacttgtctggcctgtgaggagggctaccggggccagagtgggagctgtgtagatgtgaatgagtgtctgactcccggggtctgtgcccatggaaagtgcaccaacctagaaggctccttcagatgctcttgtgagcagggctatgaggtcacctcagatgagaagggctgccaagatgtggatgagtgtgccagccgggcctcatgccccacaggcctctgcctcaacacggagggctccttcgcctgctctgcctgtgagaacgggtactgggtgaatgaagacggcactgcctgtgaagacctagatgagtgtgccttcccgggagtctgcccctccggagtctgcaccaacacggctggctccttctcctgcaaggactgcgatgggggctaccggcccagccccctgggtgactcctgtgaagatgtggatgaatgtgaagacccccagagcagctgcctgggaggcgagtgcaagaacactgtgggctcctaccagtgcctctgtccccagggcttccagctggccaatggcaccgtgtgtgaggatgtgaatgagtgcatgggggaggagcactgcgcaccccacggcgagtgcctcaacagccacgggtctttcttctgtctgtgcgcgcctggcttcgtcagcgcagaggggggcaccagctgccaggatgtggacgagtgtgccaccacagacccgtgtgtgggagggcactgtgtcaacaccgagggctccttcaactgtctatgtgagactggcttccagccctccccagagagtggagagtgtgtggatattgacgagtgtgaggactatggagacccggtgtgtggcacctggaagtgtgaaaacagccctggctcctaccgctgtgttctgggctgccagcctggcttccacatggccccgaacggagactgcattgacatagacgagtgcgccaacgacaccatgtgtggcagccacggcttctgtgacaacactgatggctccttccgctgcctctgtgaccagggcttcgagatctctccctcaggctgggactgtgtggatgtgaacgagtgtgagcttatgctggcggtatgtggggccgcgctctgtgagaacgtggagggctccttcctgtgcctctgtgccagtgacctggaggagtacgatgcccaggaggggcactgccgcccacggggggctggaggtcagagtatgtctgaggccccaacgggggaccatgccccggcccccacccgcatggactgctactccgggcagaagggccatgcgccctgctccagtgtcctgggccggaacaccacacaggctgaatgctgctgcacccagggcgctagctggggagatgcctgtgacctctgcccgtctgaggactcagctgaattcagcgagatctgccctagtggaaaaggctacattcctgtggaaggagcctggacgtttggacagaccatgtacacagatgcggatgagtgtgtgatattcgggcctggtctctgcccgaacggccggtgcctcaacaccgtgcctggttatgtctgcctgtgcaatcccggcttccactacgatgcttcccacaagaagtgtgaggatcacgatgagtgccaggacctggcctgtgagaatggcgagtgcgtcaacacggagggctccttccactgcttctgcagccccccgctcaccctggacctcagccagcagcgctgcatgaacagcaccagcagcacggaggacctccctgaccacgacatccacatggacatctgctggaaaaaagtcaccaatgatgtgtgcagcgaacccctgcgtgggcaccgcaccacctacacggaatgctgctgccaggacggcgaggcctggagccagcagtgtgctctgtgtcccccgaggagctctgaggtctatgctcagctgtgcaacgtggctcgcattgaggcagagcgggaggccggggtccacttccggccaggctatgagtatggccccgggcccgatgacctgcactacagcatctatggcccagatggggcccccttctacaactacctgggccccgaggacaccgtccctgagcctgccttccccaacacagccggtcactcagcggaccgcacacccatccttgagtctcctttgcagccctcagaactccagccccactacgtggccagccatccaggtctgtgttgctgcaaaactggggaagaggtgggcaccaaagctgtttcacttccatctcctccacctgctagtcatattgccagcaggagcccccagccggcttcgaagggcttcaggcggaggagtgcggcatcctgaacggctgtgagaatggccgctgtgtgcgcgtgcgggagggctacacctgtgactgttttgagggcttccagctggatgcggcccacatggcctgcgtagatgtgaatgagtgtgatgacttgaacgggcctgctgtgctctgtgtccatggttactgcgagaacacagagggctcctaccgctgccactgctccccgggatatgtggctgaggcagggcccccccactgcactgccaaggagtagcagtcaggggtcagtgtggcaactacctggaaatggcctccagtcacaggcaggggccttgaggatgatttcctagctgggaagacaccgtgacatcaggccagaggtttccaatcagccttgcctgctttcatctctcccagcttagcctctggctgtaagcttcggtcattgcctccatgcccttgcttggctcaagcaccaccaatcgctttaatgcttcagccaccgcatgaggccctgtccaccacctttcctggccttgctatgggatgcttaccaaaggatggccctcatccaccctcccaagctgtgcgagcatgcaaggccccatggcctcacactgcagacacccctttccagccacaatccaccatcatcctgacgatcccacaactgggacagaggctacatctgccctagggaggtccttcagaatctgtggagcaagaaaggatttggggaagcttggg

SEQ ID NO: 11753 - DNA, 863 bp, Homo sapiens
  source 1..863: mol_type = unassigned DNA
cacttcccaaaaacacgatgtgaaggtttaaacaaaacacctcaccccttccccacgcccaaacccaaaaactatgtagcaacacactcctcgaccacccaaaccccagcaggagccgggcattgtggaagcagcgagtctcagcctccctggagccctcatttgaagcccagagcacctctccccatctaaaatgacacatactttttttttcaagagtactgccttttgttctagcatctttccacaagaattttatgatcctctctgcccccacccccacagttccacaggggcaccctttgtccagaagggcgagggtcccagcattagggagagtctggacacagccctcagcctcctcctctctccgatttcctcctcccagagcccccagccggcttcgaagggcttcaggcggaggagtgcggcatcctgaacggctgtgagaatggccgctgtgtgcgcgtgcgggagggctacacctgtgactgttttgagggcttccagctggatgcggcccacatggcctgcgtagatgtgaatgagtgtgatgacttgaacgggcctgctgtgctctgtgtccatggttactgcgagaacacagagggctcctaccgctgccactgctccccgggatatgtggctgaggcagggcccccccactgcactgccaaggagtagcagtcaggggtcagtgtggcaactacctggaaatggcctccagtcacaggcaggggccttgaggatgatttcctagctgggaagacaccgtgacatcaggccagaggtttccaatcagccttgcctgctttcatctctcccagcttagcctctggctgtaagcttcggtcattgcctcc

SEQ ID NO: 11754 - DNA, 5614 bp, Homo sapiens
  source 1..5614: mol_type = unassigned DNA
agggccccctagactcagagaagctggccgccgggcggggccgggagaacagcccgcgggcgtccagcgtgccgaccacaaagctcttcgcggtgcccgcgcgcaccactctccagccgccccgcgccatgaggccgcggaccaaagcccgcagcccggggcgcgccctgcggaacccctggagaggcttcctgccgctcaccctggctctcttcgtgggcgcgggtcatgcccaaagggaccccgtagggagatacgagccggctggtggagacgcgaatcgactgcggcgccctgggggcagctacccggcagcggctgcagccaaggtgtacagtctgttccgggagcaggacgcgcctgtcgcgggcttgcagcccgtggagcgggcccagccgggctgggggagccccaggaggcccaccgaggcggaggccaggaggccgtcccgcgcgcagcagtcgcggcgtgtccagccacctgcgcagacccggagaagcactcccctgggccagcagcaaccagcaccccggacccgggccgcgccggctctcccacgcctggggaccccacagcggtctggggctgcgcccccaaccccgccgcgagggcggctcacggggaggaacgtctgcgggggacagtgctgcccaggatggacaacagcaaacagcaccaaccactgtatcaaacccgtttgcgagccgccgtgccagaaccggggctcctgcagccgcccgcagctctgtgtctgccgctctggtttccgtggagcccgctgcgaggaggtcattcccgatgaggaatttgacccccagaactccaggctggcacctcgacgctgggccgagcgttcacccaacctgcgcaggagcagtgcggctggagagggcaccttggccagagcacagccgccagcaccacagtcgccgcccgcaccacagtcgccaccagctgggaccctgagtggcctcagccagacccacccttcccagcagcacgtggggttgtcccgcactgtccgacttcacccgactgccacggccagtagccagctctcttccaacgccctgcccccgggaccaggccttgagcagagagatggcacccaacaggcggtacctctggagcacccctcatccccctgggggctgaacctcacggagaaaatcaagaagatcaagatcgtcttcactcccaccatctgcaagcagacctgtgcccgtggacactgtgccaacagctgtgagaggggcgacaccaccaccctgtacagccagggcggccatgggcacgatcccaagtctggcttccgcatctatttctgccagatcccctgcctgaacggaggccgctgcatcggcagggacgaatgctggtgccccgccaactccaccgggaagttctgccacctgcctatcccgcagccggacagggagcctccagggagggggtcccgccccagggccttgctggaagccccactgaagcagtccactttcacactgccgctctccaaccagctggcctccgtgaacccctccctggtgaaggtgcacattcaccacccacccgaggcctcagtgcagatccaccaggtggcccaggtgcggggcggggtggaggaggccctagtggagaacagcgtggagaccagacccccgccctggctgcctgccagccctggccacagcctctgggacagcaacaacatccctgctcggtctggagagccccctcggccactgcccccagcagcacccaggcctcgaggactgctgggccggtgttacctgaacactgtgaacggacagtgtgccaaccctctgctggagctgactacccaggaggactgctgtggcagtgtgggagccttctggggggtgactttgtgtgccccatgcccacccagaccagcctccccggtgattgagaatggccagctggagtgtcctcaggggtacaagagactgaacctcactcactgccaagatatcaacgagtgcttgaccctgggcctgtgcaaggacgcggagtgtgtgaataccaggggcagctacctgtgcacatgcagacctggcctcatgctggatccatcgcggagccgctgtgtgtcggacaaggcaatctccatgctgcagggactgtgctaccggtcgctggggcccggcacctgcaccctgcctttggcccagcggatcaccaagcagatatgctgctgcagccgcgtgggcaaagcatggggcagcgagtgtgagaaatgccctctgcctggcacagaggccttcagagagatctgccctgccggccacggctacacctacgcgagctccgacatccgcctgtccatgaggaaagccgaggaggaggaactggcaaggcccccaagggagcaagggcagaggagcagcggggcactgcccgggccagcagagaggcagcccctccgggtcgtcacggacacctggcttgaggccgggaccatccctgacaagggtgactctcaggctggccaggtcacgaccagtgtcactcatgcacctgcctgggtcacagggaatgccacaaccccaccaatgcctgaacaggggattgcagagatacaggaagaacaagtgaccccctccactgatgtgctggtgaccctgagcaccccaggcattgacagatgcgctgctggagccaccaacgtctgtggccctggaacctgcgtgaacctccccgatggatacagatgtgtctgcagccctggctaccagctgcaccccagccaggcctactgcacagatgacaacgagtgtctgagggacccctgcaagggaaaagggcgctgcatcaaccgcgtggggtcctactcctgcttctgctaccctggctacactctggccacctcaggggcgacacaggagtgtcaagatatcaatgagtgtgagcagccaggggtgtgcagcggggggcagtgcaccaacaccgagggctcgtaccactgcgagtgtgatcagggctacatcatggtcaggaaaggacactgccaagatatcaacgaatgccgtcaccccggtacctgccctgatgggagatgcgtcaattcccctggctcctacacttgtctggcctgtgaggagggctaccggggccagagtgggagctgtgtagatgtgaatgagtgtctgactcccggggtctgtgcccatggaaagtgcaccaacctagaaggctccttcagatgctcttgtgagcagggctatgaggtcacctcagatgagaagggctgccaagatgtggatgagtgtgccagccgggcctcatgccccacaggcctctgcctcaacacggagggctccttcgcctgctctgcctgtgagaacgggtactgggtgaatgaagacggcactgcctgtgaagacctagatgagtgtgccttcccgggagtctgcccctccggagtctgcaccaacacggctggctccttctcctgcaaggactgcgatgggggctaccggcccagccccctgggtgactcctgtgaagatgtggatgaatgtgaagacccccagagcagctgcctgggaggcgagtgcaagaacactgtgggctcctaccagtgcctctgtccccagggcttccagctggccaatggcaccgtgtgtgaggatgtgaatgagtgcatgggggaggagcactgcgcaccccacggcgagtgcctcaacagccacgggtctttcttctgtctgtgcgcgcctggcttcgtcagcgcagaggggggcaccagctgccaggatgtggacgagtgtgccaccacagacccgtgtgtgggagggcactgtgtcaacaccgagggctccttcaactgtctatgtgagactggcttccagccctccccagagagtggagagtgtgtggacatagacgagtgcgccaacgacaccatgtgtggcagccacggcttctgtgacaacactgatggctccttccgctgcctctgtgaccagggcttcgagatctctccctcaggctgggactgtgtggatgtgaacgagtgtgagcttatgctggcggtatgtggggccgcgctctgtgagaacgtggagggctccttcctgtgcctctgtgccagtgacctggaggagtacgatgcccaggaggggcactgccgcccacggggggctggaggtcagagtatgtctgaggccccaacgggggaccatgccccggcccccacccgcatggactgctactccgggcagaagggccatgcgccctgctccagtgtcctgggccggaacaccacacaggctgaatgctgctgcacccagggcgctagctggggagatgcctgtgacctctgcccgtctgaggactcagctgaattcagcgagatctgccctagtggaaaaggctacattcctgtggaaggagcctggacgtttggacagaccatgtacacagatgcggatgagtgtgtgatattcgggcctggtctctgcccgaacggccggtgcctcaacaccgtgcctggttatgtctgcctgtgcaatcccggcttccactacgatgcttcccacaagaagtgtgaggatcacgatgagtgccaggacctggcctgtgagaatggcgagtgcgtcaacacggagggctccttccactgcttctgcagccccccgctcaccctggacctcagccagcagcgctgcatgaacagcaccagcagcacggaggacctccctgaccacgacatccacatggacatctgctggaaaaaagtcaccaatgatgtgtgcagcgaacccctgcgtgggcaccgcaccacctacacggaatgctgctgccaggacggcgaggcctggagccagcagtgtgctctgtgtcccccgaggagctctgaggtctatgctcagctgtgcaacgtggctcgcattgaggcagagcgggaggccggggtccacttccggccaggctatgagtatggccccgggcccgatgacctgcactacagcatctatggcccagatggggcccccttctacaactacctgggccccgaggacaccgtccctgagcctgccttccccaacacagccggtcactcagcggaccgcacacccatccttgagtctcctttgcagccctcagaactccagccccactacgtggccagccatccagagcccccagccggcttcgaagggcttcaggcggaggagtgcggcatcctgaacggctgtgagaatggccgctgtgtgcgcgtgcgggagggctacacctgtgactgttttgagggcttccagctggatgcggcccacatggcctgcgtagatgtgaatgagtgtgatgacttgaacgggcctgctgtgctctgtgtccatggttactgcgagaacacagagggctcctaccgctgccactgctccccgggatatgtggctgaggcagggcccccccactgcactgccaaggagtagcagtcaggggtcagtgtggcaactacctggaaatggcctccagtcacaggcaggggccttgaggatgatttcctagctgggaagacaccgtgacatcaggccagaggtttccaatcagccttgcctgctttcatctctcccagcttagcctc

SEQ ID NO: 11755 - DNA, 699 bp, Homo sapiens
  source 1..699: mol_type = unassigned DNA
cacggagggctccttcgcctgctctgcctgtgagaacgggtactgggtgaatgaagacggcactgcctgtgaagacctagatgagtgtgccttcccgggagtctgcccctccggagtctgcaccaacacggctggctccttctcctgcaaggactgcgatgggggctaccggcccagccccctgggtgactcctgtgaagatgtggatgaatgtgaagacccccagagcagctgcctgggaggcgagtgcaagaacactgtgggctcctaccagtgcctctgtccccagggcttccagctggccaatggcaccgtgtgtgaggatgtgaatgagtgcatgggggaggagcactgcgcaccccacggcgagtgcctcaacagccacgggtctttcttctgtctgtgcgcgcctggcttcgtcagcgcagaggggggcaccagctgccaggatattgacgagtgtgaggactatggagacccggtgtgtggcacctggaagtgtgaaaacagccctggctcctaccgctgtgttctgggctgccagcctggcttccacatggccccgaacggagactgcattgacatagacgagtgcgccaacgacaccatgtgtggcagccacggcttctgtgacaacactgatggctccttccgctgcctctgtgaccagggcttcgagatctctccctcaggctggga

SEQ ID NO: 11756 - DNA, 582 bp, Homo sapiens
  source 1..582: mol_type = unassigned DNA
agccgtgcgagcccagctggagtaggagcgcggactcgaggctcggggcgcgcagccctcgttccgccgagagccgggcccccagtcggccgcttcagggccccctagactcagagaagctggcctccgtgaacccctccctggtgaaggtgcacattcaccacccacccgaggcctcagtgcagatccaccaggtggcccaggtgcggggcggggtggaggaggccctagtggagaacagcgtggagaccagacccccgccctggctgcctgccagccctggccacagcctctgggacagcaacaacatccctgctcggtctggagagccccctcggccactgcccccagcagcacccaggcctcgaggactgctgggccggtgttacctgaacactgtgaacggacagtgtgccaaccctctgctggagctgactacccaggaggactgctgtggcagtgtgggagccttctggggggtgactttgtgtgccccatgcccacccagaccagcctccccggtgattgagaatggccagctggagtgtcctcaggggtacaagagactgaacctcactcact

SEQ ID NO: 11757 - DNA, 2940 bp, Homo sapiens
  source 1..2940: mol_type = unassigned DNA
aggtgggcgtggccagaccagctttaggtccggggagtgtctcgccagcggcagcacacccctgtaagtggtggccagggctgccgtggcaaaatgagctgtcaactttaggttgacaggggtgtggccgcgaccgcaagggcttttgttgccgggtggacccaacagggatgggctgctggggacagctgctggtgtggttcggagccgcgggcgccattctctgctctagcccggggtcccaggagacttttctgcggtcctcgcccctgccgctggcaagtcccagcccccgggacccgaaagtcagcgccccgcctagtatcttggagccagcctccccgctgaattctccgggcaccgaggggtcttggctgttttctacctgcggggccagcggccggcatgggcccacacagacacaatgtgacggggcgtacgcggggaccagcgtggtggtgaccgtgggggccgccgggcagctgagaggcgtgcagctgtggcgcgtgccgggccctggccagtatctgatctcagcctacggagccgcgggcggcaaaggcgccaagaaccacctgtcgcgggcgcatggcgtcttcgtctcagcaatcttctccctcggtctcggggagtcgctgtacatcctggtggggcagcagggagaggacgcctgtcccggaggtagcccggagagccagctcgtctgcctcggggagtctcgagccgttgaagagcacgcggcgatggatgggagcgaaggggtcccggggtcgcggcgctgggcgggaggtggcgggggtggcgggggcgccacctacgttttccgggtgcgcgctggcgagctggaaccgttgctggtggcggccggaggcggcggtcgggcctacctgaggccgcgggaccgaggccggactcaggcctcccccgagaaactggagaaccgctcggaggcgcccgggagcggcgggagaggcggggcggcagggggcgacgcttcagagactgacaacctctgggctgatggggaagatggagtatccttcatacaccccagcagcgagctcttcctgcagcctctggcagtcaccgagaaccacggagaggtagagatccgaaggcacctcaactgcagtcactgccctttgagagactgccaatggcaggcagagctccagctggctgaatgcctgtgcccagaaggcatggagctagctgtggataacgtcacctgcatggacctgcacaagcccccaggccctctggttctgatggtggctgtggtggcaacctcaacactgagcctccttatggtgtgtggggtcctgattctggtgaagcagaagaagtggcagggcctgcaggagatgaggctgccgagccctgagcttgagctgagcaagcttcgaacctctgccatcaggacagcccccaatccctattattgccaggtggggcttggcccggcccagtcctggcctctgccaccaggtgtcaccgaggtttccccagccaatgttactctgctcagagccctgggccatggtgcctttggggaggtgtatgagggactggtaattggccttcctggggactccagtcccctgcaggtagctatcaagaccctgccagaactctgctcgcctcaggatgagctggatttcctcatggaggccctcatcatcagcaagtttcgccatcagaacattgtgcggtgtgtggggctcagcctcagggccacccctcgcctcattctgctggaactgatgtctggaggggacatgaagagtttcctgaggcacagtcggccacacctgggccagccatcacctctggtcatgcgggacctgctgcaactggcccaggacatagcccagggctgccactacctggaggaaaatcacttcatccacagggatattgccgcccggaactgcctgctgagctgcgctggacccagccgagtggccaagattggggactttgggatggcacgagatatctaccgggccagttattaccgcaggggggaccgggccttgctcccagtcaagtggatgcccccagaggccttcctggagggcatcttcacatccaagacagattcctggtcttttggggtgctgctctgggagatcttctcactgggctacatgccctatcctgggcgcaccaaccaggaggtgctggacttcgtcgttggaggaggccggatggaccctcctaggggctgcccagggcctgtgtaccgcatcatgacccagtgttggcagcacgagcctgagctccgccctagctttgccagcatcttggagcgtctgcagtactgcactcaggacccggatgtgctgaattcactcctgccaatggagctggggcccaccccagaggaggaagggacttctgggctggggaacagatctttggagtgcctaagacccccacagccccaggaactgagtccagagaagttgaaaagctggggaggtagccctcttggcccctggctgtcctctggcctcaagcccctcaaatccaggggcctccaacctcagaacctttggaatcccacttatcgctcctgagccccaaggggccctgagggtaaggactgaggcactgagggtccctccctatactcctcaggctcctgggtggcctgttatgccagcggcctctgttccctgcagtctgtgctgtgtgtctgggcctgtctcggggctggcctggcagcgctgcacttgccatgctggaaaccagcccaggcctcccagggaagggcccagccacttccagcttttgatcttggggccagaggccgccttacacacaccccaggtgtccatggggagcactggattgctctcccattatgagcatccttcatctgggcagaccccccaccctgcagatgcttctaataaaaagctcttctcatcctcc

SEQ ID NO: 11758 - DNA, 3046 bp, Homo sapiens
  source 1..3046: mol_type = unassigned DNA
gccagggctgccgtggcaaaatgagctgtcaactttaggttgacaggggtgtggccgcgaccgcaagggcttttgttgccgggtggacccaacagggatgggctgctggggacagctgctggtgtggttcggagccgcgggcgccattctctgctctagcccggggtcccaggagacttttctgcggtcctcgcccctgccgctggcaagtcccagcccccgggacccgaaagtcagcgccccgcctagtatcttggagccagcctccccgctgaattctccgggcaccgaggggtcttggctgttttctacctgcggggccagcggccggcatgggcccacacagacacaatgtgacggggcgtacgcggggaccagcgtggtggtgaccgtgggggccgccgggcagctgagaggcgtgcagctgtggcgcgtgccgggccctggccagtatctgatctcagcctacggagccgcgggcggcaaaggcgccaagaaccacctgtcgcgggcgcatggcgtcttcgtctcagcaatcttctccctcggtctcggggagtcgctgtacatcctggtggggcagcagggagaggacgcctgtcccggaggtagcccggagagccagctcgtctgcctcggggagtctcgagccgttgaagagcacgcggcgatggatgggagcgaaggggtcccggggtcgcggcgctgggcgggaggtggcgggggtggcgggggcgccacctacgttttccgggtgcgcgctggcgagctggaaccgttgctggtggcggccggaggcggcggtcgggcctacctgaggccgcgggaccgaggccggactcaggcctcccccgagaaactggagaaccgctcggaggcgcccgggagcggcgggagaggcggggcggcaggtggtgggggcggctggacgtcgcgggctccctctccgcaggccggccgctcactgcaggagggggcggagggcggccagggctgctccgaggcttgggcgacccttggctgggccgcggccggcggcttcgggggcggcggcggggcctgcactgcgggcggaggcggcggcggctacagggggggcgacgcttcagagactgacaacctctgggctgatggggaagatggagtatccttcatacaccccagcagcgagctcttcctgcagcctctggcagtcaccgagaaccacggagaggtagagatccgaaggcacctcaactgcagtcactgccctttgagagactgccaatggcaggcagagctccagctggctgaatgcctgtgcccagaaggcatggagctagctgtggataacgtcacctgcatggacctgcacaagcccccaggccctctggttctgatggtggctgtggtggcaacctcaacactgagcctccttatggtgtgtggggtcctgattctggtgaagcagaagaagtggcagggcctgcaggagatgaggctgccgagccctgagcttgagctgagcaagcttcgaacctctgccatcaggacagcccccaatccctattattgccaggtggggcttggcccggcccagtcctggcctctgccaccaggtgtcaccgaggtttccccagccaatgttactctgctcagagccctgggccatggtgcctttggggaggtgtatgagggactggtaattggccttcctggggactccagtcccctgcaggtagctatcaagaccctgccagaactctgctcgcctcaggatgagctggatttcctcatggaggccctcatcatcagcaagtttcgccatcagaacattgtgcggtgtgtggggctcagcctcagggccacccctcgcctcattctgctggaactgatgtctggaggggacatgaagagtttcctgaggcacagtcggccacacctgggccagccatcacctctggtcatgcgggacctgctgcaactggcccaggacatagcccagggctgccactacctggaggaaaatcacttcatccacagggatattgccgcccggaactgcctgctgagctgcgctggacccagccgagtggccaagattggggactttgggatggcacgagatatctaccgggccagttattaccgcaggggggaccgggccttgctcccagtcaagtggatgcccccagaggccttcctggagggcatcttcacatccaagacagattcctggtcttttggggtgctgctctgggagatcttctcactgggctacatgccctatcctgggcgcaccaaccaggaggtgctggacttcgtcgttggaggaggccggatggaccctcctaggggctgcccagggcctgtgtaccgcatcatgacccagtgttggcagcacgagcctgagctccgccctagctttgccagcatcttggagcgtctgcagtactgcactcaggacccggatgtgctgaattcactcctgccaatggagctggggcccaccccagaggaggaagggacttctgggctggggaacagatctttggagtgcctaagacccccacagccccaggaactgagtccagagaagttgaaaagctggggaggtagccctcttggcccctggctgtcctctggcctcaagcccctcaaatccaggggcctccaacctcagaacctttggaatcccacttatcgctcctgagccccaaggggccctgagggtaaggactgaggcactgagggtccctccctatactcctcaggctcctgggtggcctgttatgccagcggcctctgttccctgcagtctgtgctgtgtgtctgggcctgtctcggggctggcctggcagcgctgcacttgccatgctggaaaccagcccaggcctcccagggaagggcccagccacttccagcttttgatcttggggccagaggccgccttacacacaccccaggtgtccatggggagcactggattgctctcccattatgagcatccttcatctgggcagaccccccaccctgcagatgcttctaataaaaagctcttctcatc

SEQ ID NO: 11759 - DNA, 3444 bp, Homo sapiens
  source 1..3444: mol_type = unassigned DNA
agctttaggtccggggagtgtctcgccagcggcagcacacccctgtaagtggtggccagggctgccgtggcaaaatgagctgtcaactttaggttgacaggggtgtggccgcgaccgcaagggcttttgttgccgggtggacccaacagggatgggctgctggggacagctgctggtgtggttcggagccgcgggcgccattctctgctctagcccggggtcccaggagacttttctgcggtcctcgcccctgccgctggcaagtcccagcccccgggacccgaaagtcagcgccccgcctagtatcttggagccagcctccccgctgaattctccgggcaccgaggggtcttggctgttttctacctgcggggccagcggccggcatgggcccacacagacacaatgtgacggggcgtacgcggggaccagcgtggtggtgaccgtgggggccgccgggcagctgagaggcgtgcagctgtggcgcgtgccgggccctggccagtatctgatctcagcctacggagccgcgggcggcaaaggcgccaagaaccacctgtcgcgggcgcatggcgtcttcgtctcagcaatcttctccctcggtctcggggagtcgctgtacatcctggtggggcagcagggagaggacgcctgtcccggaggtagcccggagagccagctcgtctgcctcggggagtctcgagccgttgaagagcacgcggcgatggatgggagcgaaggggtcccggggtcgcggcgctgggcgggaggtggcgggggtggcgggggcgccacctacgttttccgggtgcgcgctggcgagctggaaccgttgctggtggcggccggaggcggcggtcgggcctacctgaggccgcgggaccgaggccggactcaggcctcccccgagaaactggagaaccgctcggaggcgcccgggagcggcgggagaggcggggcggcaggtggtgggggcggctggacgtcgcgggctccctctccgcaggccggccgctcactgcaggagggggcggagggcggccagggctgctccgaggcttgggcgacccttggctgggccgcggccggcggcttcgggggcggcggcggggcctgcactgcgggcggaggcggcggcggctacagggggggcgacgcttcagagactgacaacctctgggctgatggggaagatggagtatccttcatacaccccagcagcgagctcttcctgcagcctctggcagtcaccgagaaccacggagaggtagagatccgaaggcacctcaactgcagtcactgccctttgagagactgccaatggcaggcagagctccagctggctgaatgcctgtgcccagaaggcatggagctagctgtggataacgtcacctgcatggacctgcacaagcccccaggccctctggttctgatggtggctgtggtggcaacctcaacactgagcctccttatggtgtgtggggtcctgattctgggtacgaagcgtctagcaggcacagttgattcaaggctgctcctctccagtgagctgggatgggtttctgcggggtcccggggctgacttcaagaccactcaccgcagcagagccgtggtagactcctctgggattctaagataggaaggagctggggaggcctggggaaaacgtttaccttaatgagcatctggaggggtgtcctgggcaggtgggggagggagagttgatgggcaggtggagggtgtgccgttattcttcccacccccagtgaagcagaagaagtggcagggcctgcaggagatgaggctgccgagccctgagcttgagctgagcaagcttcgaacctctgccatcaggacagcccccaatccctattattgccaggtggggcttggcccggcccagtcctggcctctgccaccaggtgtcaccgaggtttccccagccaatgttactctgctcagagccctgggccatggtgcctttggggaggtgtatgagggactggtaattggccttcctggggactccagtcccctgcaggtagctatcaagaccctgccagaactctgctcgcctcaggatgagctggatttcctcatggaggccctcatcatcagcaagtttcgccatcagaacattgtgcggtgtgtggggctcagcctcagggccacccctcgcctcattctgctggaactgatgtctggaggggacatgaagagtttcctgaggcacagtcggccacacctgggccagccatcacctctggtcatgcgggacctgctgcaactggcccaggacatagcccagggctgccactacctggaggaaaatcacttcatccacagggatattgccgcccggaactgcctgctgagctgcgctggacccagccgagtggccaagattggggactttgggatggcacgagatatctaccgggccagttattaccgcaggggggaccgggccttgctcccagtcaagtggatgcccccagaggccttcctggagggcatcttcacatccaagacagattcctggtcttttggggtgctgctctgggagatcttctcactgggctacatgccctatcctgggcgcaccaaccaggaggtgctggacttcgtcgttggaggaggccggatggaccctcctaggggctgcccagggcctgtgtgagttgagtgctgcccgggaagggaggtccttcacaaccatgggtgggcatgaactcctgcctctccccaggtaccgcatcatgacccagtgttggcagcacgagcctgagctccgccctagctttgccagcatcttggagcgtctgcagtactgcactcaggacccggatgtgctgaattcactcctgccaatggagctggggcccaccccagaggaggaagggacttctgggctggggaacagatctttggagtgcctaagacccccacagccccaggaactgagtccagagaagttgaaaagctggggaggtagccctcttggcccctggctgtcctctggcctcaagcccctcaaatccaggggcctccaacctcagaacctttggaatcccacttatcgctcctgagccccaaggggccctgagggtaaggactgaggcactgagggtccctccctatactcctcaggctcctgggtggcctgttatgccagcggcctctgttccctgcagtctgtgctgtgtgtctgggcctgtctcggggctggcctggcagcgctgcacttgccatgctggaaaccagcccaggcctcccagggaagggcccagccacttccagcttttgatcttggggccagaggccgccttacacacaccccaggtgtccatggggagcactggattgctctcccattatgagcatccttcatctgggcagaccccccaccctgcagatgcttctaataaaaagctcttctcatc

SEQ ID NO: 11760 - DNA, 1821 bp, Homo sapiens
  source 1..1821: mol_type = unassigned DNA
ccgtggcaaaatgagctgtcaactttaggttgacaggggtgtggccgcgaccgcaagggcttttgttgccgggtggacccaacagggatgggctgctggggacagctgctggtgtggttcggagccgcggggggcgacgcttcagagactgacaacctctgggctgatggggaagatggagtatccttcatacaccccagcagcgagctcttcctgcagcctctggcagtcaccgagaaccacggagaggtagagatccgaaggcacctcaactgcagtcactgccctttgagagactgccaatggcaggcagagctccagctggctgaatgcctgtgcccagaaggcatggagctagctgtggataacgtcacctgcatggacctgcacaagcccccaggccctctggttctgatggtggctgtggtggcaacctcaacactgagcctccttatggtgtgtggggtcctgattctgggtacgaagcgtctagcaggcacagttgattcaaggctgctcctctccatgaagcagaagaagtggcagggcctgcaggagatgaggctgccgagccctgagcttgagctgagcaagcttcgaacctctgccatcaggacagcccccaatccctattattgccaggtggggcttggcccggcccagtcctggcctctgccaccaggtgtcaccgaggtttccccagccaatgttactctgctcagagccctgggccatggtgcctttggggaggtgtatgagggactggtaattggccttcctggggactccagtcccctgcaggtagctatcaagaccctgccagaactctgctcgcctcaggatgagctggatttcctcatggaggccctcatcatcagcaagtttcgccatcagaacattgtgcggtgtgtggggctcagcctcagggccacccctcgcctcattctgctggaactgatgtctggaggggacatgaagagtttcctgaggcacagtcggccacacctgggccagccatcacctctggtcatgcgggacctgctgcaactggcccaggacatagcccagggctgccactacctggaggaaaatcacttcatccacagggatattgccgcccggaactgcctgctgagctgcgctggacccagccgagtggccaagattggggactttgggatggcacgagatatctaccgggccagttattaccgcaggggggaccgggccttgctcccagtcaagtggatgcccccagaggccttcctggagggcatcttcacatccaagacagattcctggtcttttggggtgctgctctgggagatcttctcactgggctacatgccctatcctgggcgcaccaaccaggaggtgctggacttcgtcgttggaggaggccggatggaccctcctaggggctgcccagggcctgtgtaccgcatcatgacccagtgttggcagcacgagcctgagctccgccctagctttgccagcatcttggagcgtctgcagtactgcactcaggacccggatgtgctgaattcactcctgccaatggagctggggcccaccccagaggaggaagggacttctgggctggggaacagatctttggagtgcctaagacccccacagccccaggaactgagtccagagaagttgaaaagctggggaggtagccctcttggcccctggctgtcctctggcctcaagcccctcaaatccaggggcctccaacctcagaacctttggaatcccacttatcgctcctgagccccaaggggccctgagggtaaggactgaggcactgagggtccc

SEQ ID NO: 11761 - DNA, 2412 bp, Homo sapiens
  source 1..2412: mol_type = unassigned DNA
ggggtctgaggtgggcgtggccagaccagctttaggtccggggagtgtctcgccagcggcagcacacccctgtaagtggtggccagggctgccgtggcaaaatgagctgtcaactttaggttgacaggggtgtggccgcgaccgcaagggcttttgttgccgggtggacccaacagggatgggctgctggggacagctgctggtgtggttcggagccgcgggcgccattctctgctctagcccggggtcccaggagacttttctgcggtcctcgcccctgccgctggcaagtcccagcccccgggacccgaaagtcagcgccccgcctagtatcttggagccagcctccccgctgaattctccgggcaccgaggggtcttggctgttttctacctgcggggccagcggccggcatgggcccacacagacacaatgtgacggggcgtacgcggggaccagcgtggtggtgaccgtgggggccgccgggcagctgagaggcgtgcagctgtggcgcgtgccgggccctggccagtatctgatctcagcctacggagccgcgggcggcaaaggcgccaagaaccacctgtcgcgggcgcatggcgtcttcgtctcagcaatcttctccctcggtctcggggagtcgctgtacatcctggtggggcagcagggagaggacgcctgtcccggaggtagcccggagagccagctcgtctgcctcggggagtctcgagccgttgaagagcacgcggcgatggatgggagcgaaggggtcccggggtcgcggcgctgggcgggaggtggcgggggtggcgggggcgccacctacgttttccgggtgcgcgctggcgagctggaaccgttgctggtggcggccggaggcggcggtcgggcctacctgaggccgcgggaccgaggccggactcaggcctcccccgagaaactggagaaccgctcggaggcgcccgggagcggcgggagaggcggggcggcagggggcgacgcttcagagactgacaacctctgggctgatggggaagatggagtatccttcatacaccccagcagcgagctcttcctgcagcctctggcagtcaccgagaaccacggagaggtagagatccgaaggcacctcaactgcagtcactgccctttgagagactgccaatggcaggcagagctccagctggctgaatgcctgtgcccagaaggcatggagctagctgtggataacgtcacctgcatggacctgcacaagcccccaggccctctggttctgatggtggctgtggtggcaacctcaacactgagcctccttatggtgtgtggggtcctgattctgggtggggcttggcccggcccagtcctggcctctgccaccaggtgtcaccgaggtttccccagccaatgttactctgctcagaccctgccagaactctgctcgcctcaggatgagctggatttcctcatggaggccctcatcatcagcaagtttcgccatcagaacattgtgcggtgtgtggggctcagcctcagggccacccctcgcctcattctgctggaactgatgtctggaggggacatgaagagtttcctgaggcacagtcggccacacctgggccagccatcacctctggtcatgcgggacctgctgcaactggcccaggacatagcccagggctgccactacctggaggaaaatcacttcatccacagggatattgccgcccggaactgcctgctgagctgcgctggacccagccgagtggccaagattggggactttgggatggcacgagatatctaccgggccagttattaccgcaggggggaccgggccttgctcccagtcaagtggatgcccccagaggccttcctggagggcatcttcacatccaagacagattcctggtcttttggggtgctgctctgggagatcttctcactgggctacatgccctatcctgggcgcaccaaccaggaggtgctggacttcgtcgttggaggaggccggatggaccctcctaggggctgcccagggcctgtgtaccgcatcatgacccagtgttggcagcacgagcctgagctccgccctagctttgccagcatcttggagcgtctgcagtactgcactcaggacccggatgtgctgaattcactcctgccaatggagctggggcccaccccagaggaggaagggacttctgggctggggaacagatctttggagtgcctaagacccccacagccccaggaactgagtccagagaagttgaaaagctggggaggtagccctcttggcccctggctgtcctctggcctcaagcccctcaaatccaggggcctccaacctcagaacctttggaatcccacttatcgctcctgagccccaaggggccctgagggtaaggactg

SEQ ID NO: 11762 - DNA, 582 bp, Homo sapiens
  source 1..582: mol_type = unassigned DNA
ttcttttactcacagtcaccgagaaccacggagaggtagagatccgaaggcacctcaactgcagtcactgccctttgagagactgccaatggcaggcagagctccagctggctgaatgcctgtgcccagaaggcatggagctagctgtggataacgtcacctgcatgggtggggcttggcccggcccagtcctggcctctgccaccaggtgtcaccgaggtttccccagccaatgttactctgctcagagccctgggccatggtgcctttggggaggtgtatgagggactggtaattggccttcctggggactccagtcccctgcaggtagctatcaagaccctgccagaactctgctcgcctcaggatgagctggatttcctcatggaggccctcatcatcagcaagtttcgccatcagaacattgtgcggtgtgtggggctcagcctcagggccacccctcgcctcattctgctggaactgatgtctggaggggacatgaagagtttcctgaggcacagtcggccacacctgggccagccatcacctctggtcatgcgggacctgctgcaactggcccag

SEQ ID NO: 11763 - DNA, 1854 bp, Homo sapiens
  source 1..1854: mol_type = unassigned DNA
ggttttgctccgctttagcagcggcgaagggaggacccccgggagccggtccccggcgtccggtcgcccagcccttttcaggcttgggcccgcatggaggggaccgtggagtcccagacgcctgacctgcgggatgtggagggtaaggtgggcaggaagacccctgaagggctgctccgcgggctgcgaggcgagtgtgagctgggaacctctggcgccctgctgctcccaggggcgtctagcaccggccacgacttgggggacaagatcatggcgctgaagatggagctggcttacctgcgagccatcgatgtgaagatcctgcagcagctggtgaccttgaatgagggcatcgaggcagtgcgctggctgttggaggagcgggggacgttgaccagtcattgcagcagcctcaccagcagtcaatatagcctgacaggcgggagcccaggccgctcaaggcgaggcagctgggacagcctgccagacaccagcaccaccgaccggctggacagtgtctctattggcagcttcctggacacagtggcccccagcgagctggatgaacagggcccacctggggctccacgttccgagatggactgggcaaaagttatagctggtggagagagggccaggactgaggtggatgtggcagccaccaggctagggagcttgagagctgtgtggaagcccccaggggagaggcttcaaggtggaccacctgagtcaccagaggatgagagtgccaagctgggcttcgaggcccactggttctgggagcagtgccaggatgatgtgaccttcttgtaacaactattccacccttttgtaatcctgtggctcttttatccattagatgtggtctcccccaaaattgattctccctcagtctgagactaggaagaggctgcactgaaatcagttaccatggaaacctggctcatcatttctctagtccctagggagtctctgcctttatccctcaattattgggtccctagagctagcttgctctttctttctttctttctttttttgagacagggtcttatgctgttacccaagatagagagcagtggcatgatcacagctcactgcagccttgacctcctgggctcaagcgatcctcctatttcagcctcccccatagttaggaccacaggcatgcaccaccatgcccagctaattgtttatttatttattttttttttgtagagatagggtttccctgtgttgcccaggctggtctcaaactcctgggctcaagggatcctcccgcctcagcctcccaaagtgctgggattatgcccagcccctagagatacttctatagagatattgactctaaaggattgacctatggcttttggtatttagtatctctcactactccccccagctaagtaaggatttaaggaatttaggactccctggagttaacagatgaagagatgggggcataattacttcacccaaagtctagaagccttggcctctctcttggccaagatggaggattgaggagggacatggaccttcaggactaaccctctatggattggccctcccagaagcgtttgggctggtagacccaccccttcctacctgctgagtgatgtcatttcctgccaggatgggtagccctttgtacgggtccttggatggtagtaggtcatataggggcatctgagcccctgctgctaagtgagatcacattatttatcgtccataccattacttcttgtgaacagtaacatgtcactcctcctggcaggaaagtttctcattgtcagatgtttgtgcttcttttcaggtcttactttttaaatagagtgttctcattttatccta

SEQ ID NO: 11764 - DNA, 1753 bp, Homo sapiens
  source 1..1753: mol_type = unassigned DNA
atgacttggatcaaacagcctaaatgggaagaaggacatttttgctgcatcaaggaagccgttaaactcctgctaagctaactagctcttttttatgggtccatgcacacgaccgaactcctctttcactgaccagagattatttctgacaacccaggatatcccgaaagcttggaggcatatggctggaaaatgaaacgacccaggacatcgtttctggctgcatcattattttgtgtcgcgtagtaccagatgggcagtcagtgagcggcgcagggatgtgaacggacggttttataatgtgaaaattttcccttggtaaagctaaaacagatttaatttccctctcttttctttcactacttccccctctttattccccctctgtctgcaatatcagtgaactcaactttgcagtgaggtggccaaaaagagagagaatgaggagatcttgatcatcttagtgtcggaggagtcgcagcggactgggaactgcagctgcgaccccccgcgtcctgtgcggatttcagggctgataccgcataggcggttatggaaaggacggtacaccggagcggcggaggatagagaccctggcccccggagaggtctgctgatttcgcagcagccttcgaagccgtggctgcctttcatctgctgcgttttattactattatcgccgttccggaaaagtcatggaagacagcccgctgccagacctcagagacatcgagctgaagctggggcgcaaagtacccgagagtctagtgcgctctctccgtggggaggagccggttcccagggaaagggacagggacccctgcggggggagcggtggtggtggcggcggcggcggcggctgcagtagcagcagcagctactgcagcttccctccctccttgtcgtcctcctcttcgtcctccccaacctctggctccccacgaggtagccactctagcgccctggagaggctagaaaccaagcttcacctcctcaggcaagagatggttaacctcagagccacagacgtcaggctcatgcgccagttgcttgtaatcaatgagagcatcgagtccatcaagtggatgatcgaagaaaaagccaccattaccagcagaggcagcagcctcagtggcagcctgtgcagtttgttggagagtcagagcacctccttacgtggcagctacaacagcctacacgatggcagtgatgggctggatggcatttccgtgggaagttatctggacacgttggcggatgatgtcccaggccatcagaccccttcagacttggaccaattcagtgacagctccctcatagaggactcacaggcactacacaagcgtcctaaattggattctgaatactactgctttggctagtgacagttttttgcatgggactggtgtgcaatgaacttgtatttatccttcttctccgctgctatatttttggtgtgatttttattttaataagatgacctttttaaaagaagctgattttgaaactgcttaatggtattgctgttgctcctaatacttctcatctgagctgatttatttttctctgttacatctctattttttatttattacaatgattttctcccttcttttacagtagcacaaacaaagtagggggaaaagaataagcaataattatgtttttgcttttgttttcagagcaatgggtcagggattacaagaaaaactttgctaaattttacaataaaccaaagtctgataacagttaa

SEQ ID NO: 11765 - DNA, 739 bp, Homo sapiens
  source 1..739: mol_type = unassigned DNA
ctttcatctgctgcgttttattactattatcgccgttccggaaaagtcatggaagacagcccgctgccagacctcagagacatcgagctgaagctggggcgcaaagtacccgagagtctagtgcgctctctccgtggggaggagccggttcccagggaaagggacagggacccctgcggggggagcggtggtggtggcggcggcggcggcggctgcagtagcagcagcagctactgcagcttccctccctccttgtcgtcctcctcttcgtcctccccaacctctggctccccacgaggtagccactctagcgccctggagaggctagaaaccaagcttcacctcctcaggcaagagatggttggacaaaaatttaaggacaacccttaggtacataatggagaagctggaaagtggaagtcatcttgatgagtttgcaaaatagatgaaaagataaaatggaaaagatgacaaaccaacaggtcaggggatgcctgataccgtatcacaaagatcagacatacgtgtggagactaacaggtaaaactattttccacaagaaaatttcttgtacaaggaattaagaatgttgctaactctgcaaattaaggacttaatatgagggacgaagacatcaaggagatgaggaaattttattcctaaccatgtcttctgtaattttacccatggaatgttaatatattcacttaatctaataaataaatcttgttgaaacata

SEQ ID NO: 11766 - DNA, 1335 bp, Homo sapiens
  source 1..1335: mol_type = unassigned DNA
gaacagcccagcctggagcgggaagcagggacaagatgacctcaggaatcccaggctgcgggggtgcctgcgtcctcccctcccgagctccactccgcaggcgagacccccaacactgctccccgacactctccgaggcacccctcctccgtgctcacacccaaacacgtctgctcacccgtgggcttcccaccccgaacacaacgaggactgtccaggtgtcagtgacggtcaccccgacctggtcccctgtccggcctcgccaggacaggctgctttggtttgtgacctccaggcaggacggccatcctctccagaatgaagatcttcttgccagtgctgctggctgcccttctgggtgtggagcgagccagctcgctgatgtgcttctcctgcttgaaccagaagagcaatctgtactgcctgaagccgaccatctgctccgaccaggacaactactgcgtgactgtgtctgctagtgccggcattgggaatctcgtgacatttggccacagcctgagcaagacctgttccccggcctgccccatcccagaaggcgtcaatgttggtgtggcttccatgggcatcagctgctgccagagctttctgtgcaatttcagtgcggccgatggcgggctgcgggcaagcgtcaccctgctgggtgccgggctgctgctgagcctgctgccggccctgctgcggtttggcccctgaccgcccagaccctgtcccccgatcccccagctcaggaaggaaagcccagccctttctggatcccacagtgtatgggagcccctgactcctcacgtgcctgatctgtgcccttggtcccaggtcaggcccaccccctgcacctccacctgccccagcccctgcctctgccccaagtggggccagctgccctcacttctggggtggatgatgtgaccttccttgggggaccgcggaagggacgagggttccctggagtcttacggtccaacatcaggaccaagtcccatggacatgctgacagggtccccagggagaccgtgtcagtagggatgtgtgcctggctgtgtacgtgggtgtgcagtgcacgtgagagcacgtggcggcttctgggggccatgtttggggagggaggtgtgccagcagcctggagagcctcagtccctgtagccccctgccctggcacagctgcatgcacttcaagggcagcctttgggggttggggtttctgccacttccgggtctaggccctgccccaaatccagccagtcctgccccagcccacccccacattggagccctcctgctgctttggtgcctcaaataaatacagatgtcccccag

SEQ ID NO: 11767 - DNA, 1181 bp, Homo sapiens
  source 1..1181: mol_type = unassigned DNA
cccggggccgcgcggctgcctgggaggctccgggccagccgcggtccagagcgcgcgaggttcggggagctcggccaggctgctggtacctgcgtccgcccggcgagcaggacaggctgctttggtttgtgacctccaggcaggacggccatcctctccagaatgaagatcttcttgccagtgctgctggctgcccttctgggtgtggagcgagccagctcgctgatgtgcttctcctgcttgaaccagaagagcaatctgtactgcctgaagccgaccatctgctccgaccaggacaactactgcgtgactgtgtctgctagtgccggcattgggaatctcgtgacatttggccacagcctgagcaagacctgttccccggcctgccccatcccagaaggcgtcaatgttggtgtggcttccatgggcatcagctgctgccagagctttctgtgcaatttcagtgcggccgatggcgggctgcgggcaagcgtcaccctgctgggtgccgggctgctgctgagcctgctgccggccctgctgcggtttggcccctgaccgcccagaccctgtcccccgatcccccagctcaggaaggaaagcccagccctttctggatcccacagtgtatgggagcccctgactcctcacgtgcctgatctgtgcccttggtcccaggtcaggcccaccccctgcacctccacctgccccagcccctgcctctgccccaagtggggccagctgccctcacttctggggtggatgatgtgaccttccttgggggaccgcggaagggacgagggttccctggagtcttacggtccaacatcaggaccaagtcccatggacatgctgacagggtccccagggagaccgtgtcagtagggatgtgtgcctggctgtgtacgtgggtgtgcagtgcacgtgagagcacgtggcggcttctgggggccatgtttggggagggaggtgtgccagcagcctggagagcctcagtccctgtagccccctgccctggcacagctgcatgcacttcaagggcagcctttgggggttggggtttctgccacttccgggtctaggccctgccccaaatccagccagtcctgccccagcccacccccacattggagccctcctgctgctttggtgcctcaaataaatacagatgtcccccagct

SEQ ID NO: 11768 - DNA, 1173 bp, Homo sapiens
  source 1..1173: mol_type = unassigned DNA
ccggggccgcgcggctgcctgggaggctccgggccagccgcggtccagagcgcgcgaggttcggggagctcggccaggctgctggtacctgcgtccgcccggcggacaggctgctttggtttgtgacctccaggcaggacggccatcctctccagaatgaagatcttcttgccagtgctgctggctgcccttctgggtgtggagcgagccagctcgctgatgtgcttctcctgcttgaaccagaagagcaatctgtactgcctgaagccgaccatctgctccgaccaggacaactactgcgtgactgtgtctgctagtgccggcattgggaatctcgtgacatttggccacagcctgagcaagacctgttccccggcctgccccatcccagaaggcgtcaatgttggtgtggcttccatgggcatcagctgctgccagagctttctgtgcaatttcagtgcggccgatggcgggctgcgggcaagcgtcaccctgctgggtgccgggctgctgctgagcctgctgccggccctgctgcggtttggcccctgaccgcccagaccctgtcccccgatcccccagctcaggaaggaaagcccagccctttctggatcccacagtgtatgggagcccctgactcctcacgtgcctgatctgtgcccttggtcccaggtcaggcccaccccctgcacctccacctgccccagcccctgcctctgccccaagtggggccagctgccctcacttctggggtggatgatgtgaccttccttgggggaccgcggaagggacgagggttccctggagtcttacggtccaacatcaggaccaagtcccatggacatgctgacagggtccccagggagaccgtgtcagtagggatgtgtgcctggctgtgtacgtgggtgtgcagtgcacgtgagagcacgtggcggcttctgggggccatgtttggggagggaggtgtgccagcagcctggagagcctcagtccctgtagccccctgccctggcacagctgcatgcacttcaagggcagcctttgggggttggggtttctgccacttccgggtctaggccctgccccaaatccagccagtcctgccccagcccacccccacattggagccctcctgctgctttggtgcctcaaataaatacagatgtcccccag

SEQ ID NO: 11769 - DNA, 1256 bp, Homo sapiens
  source 1..1256: mol_type = unassigned DNA
cagccgcggtccagagcgcgcgaggttcggggagctcggccaggctgctggtacctgcgtccgcccggcgggtctcactctgttgcccaggctgcagtgcagtggcatgatcatagttcacttcagtcttgaactccctggctcaagagatcctcccacctcagcctcccaagtagctgaccacaggacaggctgctttggtttgtgacctccaggcaggacggccatcctctccagaatgaagatcttcttgccagtgctgctggctgcccttctgggtgtggagcgagccagctcgctgatgtgcttctcctgcttgaaccagaagagcaatctgtactgcctgaagccgaccatctgctccgaccaggacaactactgcgtgactgtgtctgctagtgccggcattgggaatctcgtgacatttggccacagcctgagcaagacctgttccccggcctgccccatcccagaaggcgtcaatgttggtgtggcttccatgggcatcagctgctgccagagctttctgtgcaatttcagtgcggccgatggcgggctgcgggcaagcgtcaccctgctgggtgccgggctgctgctgagcctgctgccggccctgctgcggtttggcccctgaccgcccagaccctgtcccccgatcccccagctcaggaaggaaagcccagccctttctggatcccacagtgtatgggagcccctgactcctcacgtgcctgatctgtgcccttggtcccaggtcaggcccaccccctgcacctccacctgccccagcccctgcctctgccccaagtggggccagctgccctcacttctggggtggatgatgtgaccttccttgggggaccgcggaagggacgagggttccctggagtcttacggtccaacatcaggaccaagtcccatggacatgctgacagggtccccagggagaccgtgtcagtagggatgtgtgcctggctgtgtacgtgggtgtgcagtgcacgtgagagcacgtggcggcttctgggggccatgtttggggagggaggtgtgccagcagcctggagagcctcagtccctgtagccccctgccctggcacagctgcatgcacttcaagggcagcctttgggggttggggtttctgccacttccgggtctaggccctgccccaaatccagccagtcctgccccagcccacccccacattggagccctcctgctgctttggtgcctcaaataaatacagatgtcccccagc

SEQ ID NO: 11770 - DNA, 490 bp, Homo sapiens
  source 1..490: mol_type = unassigned DNA
cagagcgcgcgaggttcggggagctcggccaggctgctggtacctgcgtccgcccggcggacaggctgctttggtttgtgacctccaggcaggacggccatcctctccagaatgaagatcttcttgccagtgctgctggctgcccttctgggtgtggagcgagccagctcgctgatgtgcttctcctgcttgaaccagaagagcaatctgtactgcctgaagccgaccatctgctccgaccaggacaactactgcgtgactgtgtctgctagtgccggcattggtgagtgccaggcctcagaccgtgccttcctcccctggccatctccctagcccgggccggggctcagcagaggccattgctgtctgtctgcagccgtctgtctctcccctgacagcctcatttcccatgcagggaatctcgtgacatttggccacagcctgagcaagacctgttccccggcctgccccatcccagaaggcgtcaatg

SEQ ID NO: 11771 - DNA, 1419 bp, Homo sapiens
  source 1..1419: mol_type = unassigned DNA
cagagcgcgcgaggttcggggagctcggccaggctgctggtacctgcgtccgcccggcggcctccccgaatgtttccaaagatctggggcgggagcgggcggagactgccgccaggagcctcccggccgccccagggctgcgcagccactggagcccatcacccaactccagacgctcctggctcctctacgtgggccgggagggacagccttgaggactaggggagggggcacgggaccttgcagagctcctggccggaaagggaggattgaccgcccccggcatatcaccccggagcactggaacccgcccccgcttcttgttttggcactggtggtgcttgcgagcaggacaggctgctttggtttgtgacctccaggcaggacggccatcctctccagaatgaagatcttcttgccagtgctgctggctgcccttctgggtgtggagcgagccagctcgctgatgtgcttctcctgcttgaaccagaagagcaatctgtactgcctgaagccgaccatctgctccgaccaggacaactactgcgtgactgtgtctgctagtgccggcattgggaatctcgtgacatttggccacagcctgagcaagacctgttccccggcctgccccatcccagaaggcgtcaatgttggtgtggcttccatgggcatcagctgctgccagagctttctgtgcaatttcagtgcggccgatggcgggctgcgggcaagcgtcaccctgctgggtgccgggctgctgctgagcctgctgccggccctgctgcggtttggcccctgaccgcccagaccctgtcccccgatcccccagctcaggaaggaaagcccagccctttctggatcccacagtgtatgggagcccctgactcctcacgtgcctgatctgtgcccttggtcccaggtcaggcccaccccctgcacctccacctgccccagcccctgcctctgccccaagtggggccagctgccctcacttctggggtggatgatgtgaccttccttgggggaccgcggaagggacgagggttccctggagtcttacggtccaacatcaggaccaagtcccatggacatgctgacagggtccccagggagaccgtgtcagtagggatgtgtgcctggctgtgtacgtgggtgtgcagtgcacgtgagagcacgtggcggcttctgggggccatgtttggggagggaggtgtgccagcagcctggagagcctcagtccctgtagccccctgccctggcacagctgcatgcacttcaagggcagcctttgggggttggggtttctgccacttccgggtctaggccctgccccaaatccagccagtcctgccccagcccacccccacattggagccctcctgctgctttggtgcctcaaataaatacagatgtccccca

SEQ ID NO: 11772 - DNA, 740 bp, Homo sapiens
  source 1..740: mol_type = unassigned DNA
agagcgcgcgaggttcggggagctcggccaggctgctggtacctgcgtccgcccggcgggtctcactctgttgcccaggctgcagtgcagtggcatgatcatagttcacttcagtcttgaactccctggctcaagagatcctcccacctcagcctcccaagtagctgaccacagagcaggacaggctgctttggtttgtgacctccaggcaggacggccatcctctccagaatgaagatcttcttgccagtgctgctggctgcccttctgggtgtggagcgagccagctcgctgatgtgcttctcctgcttgaaccagaagagcaatctgtactgcctgaagccgaccatctgctccgaccaggacaactactgcgtgactgtgtctgctagtgccggcattgggaatctcgtgacatttggccacagcctgagcaagacctgttccccggcctgccccatcccagaaggcgtcaatgttggtgtggcttccatgggcatcagctgctgccagagctttctgtgcaatttcagtgcggccgatggcgggctgcgggcaagcgtcaccctgctgggtgccgggctgctgctgagcctgctgccggccctgctgcggtttggcccctgaccgcccagaccctgtcccccgatcccccagctcaggaaggaaagcccagccctttctggatcccacagtgtatgggagcccctgactcctcacgtgcctgatctgtgcccttg

SEQ ID NO: 11773 - DNA, 606 bp, Homo sapiens
  source 1..606: mol_type = unassigned DNA
agagcgcgcgaggttcggggagctcggccaggctgctggtacctgcgtccgcccggcggacaggctgctttggtttgtgacctccaggcaggacggccatcctctccagaatgaagatcttcttgccagtgctgctggctgcccttctgggtgtggagcgagaagagcaatctgtactgcctgaagccgaccatctgctccgaccaggacaactactgcgtgactgtgtctgctagtgccggcattgggaatctcgtgacatttggccacagcctgagcaagacctgttccccggcctgccccatcccagaaggcgtcaatgttggtgtggcttccatgggcatcagctgctgccagagctttctgtgcaatttcagtgcggccgatggcgggctgcgggcaagcgtcaccctgctgggtgccgggctgctgctgagcctgctgccggccctgctgcggtttggcccctgaccgcccagaccctgtcccccgatcccccagctcaggaaggaaagcccagccctttctggatcccacagtgtatgggagcccctgactcctcacgtgcctgatctgtgcccttggtcccaggtcaggcccaccccc

SEQ ID NO: 11774 - DNA, 857 bp, Homo sapiens
  source 1..857: mol_type = unassigned DNA
ttcggggagctcggccaggctgctggtacctgcgtccgcccggcggcaggacggccatcctctccagaatgaagatcttcttgccagtgctgctggctgcccttctgggtgtggagcgagccagctcgctgatgtgcttctcctgcttgaaccagaagagcaatctgtactgcctgaagccgaccatctgctccgaccaggacaactactgcgtgactgtgtctgctagtgccggcattgggaatctcgtgacatttggccacagcctgagcaagacctgttccccggcctgccccatcccagaaggcgtcaatgttggtgtggcttccatgggcatcagctgctgccagagctttctgtgcaatttcagtgcggccgatggcgggctgcgggcaagcgtcaccctgctgggtgccgggctgctgctgagcctgctgccggccctgctgcggtttggcccctgaccgcccagaccctgtcccccgatcccccagctcaggaaggaaagcccagccctttctggatcccacagtgtatgggagcccctgactcctcacgtgcctgatctgtgcccttggtcccaggtcaggcccaccccctgcacctccacctgccccagcccctgcctctgccccaagtggggccagctgccctcacttctggggtggatgatgtgaccttccttgggggaccgcggaagggacgagggttccctggagtcttacggtccaacatcaggaccaagtcccatggacatgctgacagggtccccagggagaccgtgtcagtagggatgtgtgcctggctgtgtacgtgggtgtgcagtgcacgtgagagcacgtggcggcttctggggg

SEQ ID NO: 11775 - DNA, 635 bp, Homo sapiens
  source 1..635: mol_type = unassigned DNA
cggggagctcggccaggctgctggtacctgcgtccgcccggcgggtctcactctgttgcccaggctgcagtgcagtggcatgatcatagttcacttcagtcttgaactccctggctcaagagatcctcccacctcagcctcccaagtagctgaccacaggacaggctgctttggtttgtgacctccaggcaggacggccatcctctccagaatgaagatcttcttgccagtgctgctggctgcccttctgggtgtggagcgagccagctcgctgatgtgcttctcctgcttgaaccagaagagcaatctgtactgcctgaagccgaccatctgctccgaccaggacaactactgcgtgactgtgtctgctagtgccggcattgcctcatttcccatgcagggaatctcgtgacatttggccacagcctgagcaagacctgttccccggcctgccccatcccagaaggcgtcaatgttggtgtggcttccatgggcatcagctgctgccagagctttctgtgcaatttcagtgcggccgatggcgggctgcgggcaagcgtcaccctgctgggtgccgggctgctgctgagcctgctgccggccctgctgcggtttggcccctgaccgcccagacc

SEQ ID NO: 11776 - DNA, 1079 bp, Homo sapiens
  source 1..1079: mol_type = unassigned DNA
gggagctcggccaggctgctggtacctgcgtccgcccggcgagcaggacaggctgctttggtttgtgacctccaggcaggacggccatcctctccagaatgaagatcttcttgccagtgctgctggctgcccttctgggtgtggagcgagaagagcaatctgtactgcctgaagccgaccatctgctccgaccaggacaactactgcgtgactgtgtctgctagtgccggcattgggaatctcgtgacatttggccacagcctgagcaagacctgttccccggcctgccccatcccagaaggcgtcaatgttggtgtggcttccatgggcatcagctgctgccagagctttctgtgcaatttcagtgcggccgatggcgggctgcgggcaagcgtcaccctgctgggtgccgggctgctgctgagcctgctgccggccctgctgcggtttggcccctgaccgcccagaccctgtcccccgatcccccagctcaggaaggaaagcccagccctttctggatcccacagtgtatgggagcccctgactcctcacgtgcctgatctgtgcccttggtcccaggtcaggcccaccccctgcacctccacctgccccagcccctgcctctgccccaagtggggccagctgccctcacttctggggtggatgatgtgaccttccttgggggaccgcggaagggacgagggttccctggagtcttacggtccaacatcaggaccaagtcccatggacatgctgacagggtccccagggagaccgtgtcagtagggatgtgtgcctggctgtgtacgtgggtgtgcagtgcacgtgagagcacgtggcggcttctgggggccatgtttggggagggaggtgtgccagcagcctggagagcctcagtccctgtagccccctgccctggcacagctgcatgcacttcaagggcagcctttgggggttggggtttctgccacttccgggtctaggccctgccccaaatccagccagtcctgccccagcccacccccacattggagccctcctgctgctttggtgcctcaaataaatacagatgtccccca

SEQ ID NO: 11777 - DNA, 971 bp, Homo sapiens
  source 1..971: mol_type = unassigned DNA
tcggccaggctgctggtacctgcgtccgcccggcgagcaggacaggctgctttggtttgtgacctccaggcaggacggccatcctctccagaatgaagatcttcttgccagtgctgctggctgcccttctgggtgtggagcgagccagctcgctgatgtgcttctcctgcttgaaccagaagagcaatctgtactgcctgaagccgaccatctgctccgaccaggacaactactgcgtgactgtgtctgctagtgccggcattgcctcatttcccatgcagggaatctcgtgacatttggccacagcctgagcaagacctgttccccggcctgccccatcccagaaggcgtcaatgttggtgtggcttccatgggcatcagctgctgccagagctttctgtgcaatttcagtgcggccgatggcgggctgcgggcaagcgtcaccctgctgggtgccgggctgctgctgagcctgctgccggccctgctgcggtttggcccctgaccgcccagaccctgtcccccgatcccccagctcaggaaggaaagcccagccctttctggatcccacagtgtatgggagcccctgactcctcacgtgcctgatctgtgcccttggtcccaggtcaggcccaccccctgcacctccacctgccccagcccctgcctctgccccaagtggggccagctgccctcacttctggggtggatgatgtgaccttccttgggggaccgcggaagggacgagggttccctggagtcttacggtccaacatcaggaccaagtcccatggacatgctgacagggtccccagggagaccgtgtcagtagggatgtgtgcctggctgtgtacgtgggtgtgcagtgcacgtgagagcacgtggcggcttctgggggccatgtttggggagggaggtgtgccagcagcctggagagcctcagtccctgtagccccctgccctggcacagc

SEQ ID NO: 11778 - DNA, 427 bp, Homo sapiens
  source 1..427: mol_type = unassigned DNA
cggccaggctgctggtacctgcgtccgcccggcgagcaggacaggctgctttggtttgtgacctccaggcaggacggccatcctctccagaatgaagatcttcttgccagtgctgctggctgcccttctgggtgtggagcgagccagctcgctgatgtgcttctcctgcttgaaccagaagagcaatctgtactgcctgaagccgaccatctgctccgaccaggacaactactgcgtgactgtgtctgctagtgccggcattggtggctttgctggagggacagacagttgatcatagtggagctggtgagaggaagctgcacccaaaagccatggccgggaacctggatctgactgcagggaaacagaagcgtggtgggcgctgggcgatgatggaatttctaacaaatgctttgtttctgctaaa

SEQ ID NO: 11779 - DNA, 868 bp, Homo sapiens
  source 1..868: mol_type = unassigned DNA
caggctgctggtacctgcgtccgcccggcggcctccccgaatgtttccaaagatctggggcgggagcgggcggagactgccgccaggagcctcccggccgccccagggctgcgcagccactggagcccatcacccaactccagacgctcctggctcctctacgtgggccgggagggacagccttgaggactaggggagggggcacgggaccttgcagagctcctggccggaaagggaggattgaccgcccccggcatatcaccccggagcactggaacccgcccccgcttcttgttttggcactggtggtgcttgcggacaggctgctttggtttgtgacctccaggcaggacggccatcctctccagaatgaagatcttcttgccagtgctgctggctgcccttctgggtgtggagcgagccagctcgctgatgtgcttctcctgcttgaaccagaagagcaatctgtactgcctgaagccgaccatctgctccgaccaggacaactactgcgtgactgtgtctgctagtgccggcattgggaatctcgtgacatttggccacagcctgagcaagacctgttccccggcctgccccatcccagaaggcgtcaatgttggtgtggcttccatgggcatcagctgctgccagagctttctgtgcaatttcagtgcggccgatggcgggctgcgggcaagcgtcaccctgctgggtgccgggctgctgctgagcctgctgccggccctgctgcggtttggcccctgaccgcccagaccctgtcccccgatcccccagctcaggaaggaaagcccagccctttctggatcccacagtgtatgggagcccctgactcctcacgtgcctgatc

SEQ ID NO: 11780 - DNA, 656 bp, Homo sapiens
  source 1..656: mol_type = unassigned DNA
ttgcctgacctcagagggagcccctccccagtgctctgccctttcttctgccccaggttcagcaggtcaagtgagttcctcctcccacagcggaaggaggtgttggggggcatggaggaaagaaagcgggtgcaagaaggagcacgctcaggctggggcagcacccagggccgtaggacttgggaatggagggtgtctgtctggacccgctggtgcagagggtacaaaagctgggctggggcaggacagacgggccggagtgtagtgagtggcctgtgggaggggcagggggctcccacgcagaagctctgggcagcagccctgacccatccgtgcctggactgcagtgctgcccgcttccccctggcaaacaggtggcagcctcctgacagaggaagccggcccaggccgccgtgtctgcagttgggtgctgtgcgctgcccagagggctctttgggctggagagagaaaacaagaacagacacccagtggaggtggctttgctggagggacagacagttgatcatagtggagctggtgagaggaagctgcacccaaaagccatggccgggaacctggatctgactgcagggaaacagaagcgtggtgggcgctgggcgatgatggaatttctaacaaatgctttgtttctgcta

SEQ ID NO: 11781 - DNA, 1335 bp, Homo sapiens; identical to SEQ ID NO: 11766
  source 1..1335: mol_type = unassigned DNA

SEQ ID NO: 11782 - DNA, 1181 bp, Homo sapiens; identical to SEQ ID NO: 11767
  source 1..1181: mol_type = unassigned DNA

SEQ ID NO: 11783 - DNA, 1173 bp, Homo sapiens; identical to SEQ ID NO: 11768
  source 1..1173: mol_type = unassigned DNA

SEQ ID NO: 11784 - DNA, 1256 bp, Homo sapiens; identical to SEQ ID NO: 11769
  source 1..1256: mol_type = unassigned DNA

SEQ ID NO: 11785 - DNA, 490 bp, Homo sapiens; identical to SEQ ID NO: 11770
  source 1..490: mol_type = unassigned DNA

SEQ ID NO: 11786 - DNA, 1419 bp, Homo sapiens; identical to SEQ ID NO: 11771
  source 1..1419: mol_type = unassigned DNA

SEQ ID NO: 11787 - DNA, 740 bp, Homo sapiens; identical to SEQ ID NO: 11772
  source 1..740: mol_type = unassigned DNA

SEQ ID NO: 11788 - DNA, 606 bp, Homo sapiens; identical to SEQ ID NO: 11773
  source 1..606: mol_type = unassigned DNA

SEQ ID NO: 11789 - DNA, 857 bp, Homo sapiens; identical to SEQ ID NO: 11774
  source 1..857: mol_type = unassigned DNA

SEQ ID NO: 11790 - DNA, 635 bp, Homo sapiens; identical to SEQ ID NO: 11775
  source 1..635: mol_type = unassigned DNA

SEQ ID NO: 11791 - DNA, 1079 bp, Homo sapiens; identical to SEQ ID NO: 11776
  source 1..1079: mol_type = unassigned DNA

SEQ ID NO: 11792 - DNA, 971 bp, Homo sapiens; identical to SEQ ID NO: 11777
  source 1..971: mol_type = unassigned DNA

SEQ ID NO: 11793 - DNA, 427 bp, Homo sapiens; identical to SEQ ID NO: 11778
  source 1..427: mol_type = unassigned DNA

SEQ ID NO: 11794 - DNA, 868 bp, Homo sapiens; identical to SEQ ID NO: 11779
  source 1..868: mol_type = unassigned DNA

SEQ ID NO: 11795 - DNA, 656 bp, Homo sapiens; identical to SEQ ID NO: 11780
  source 1..656: mol_type = unassigned DNA

SEQ ID NO: 11796 - DNA, 1891 bp, Homo sapiens
  source 1..1891: mol_type = unassigned DNA
ccttcagtctcagccgccaactccggaggcgcggtgctcggcccgggagcgcgagcgggaggagcagagacccgcagccgggagcccgagcgcgggcgatgcaggctccgcgagcggcacctgcggctcctctaagctacgaccgtcgtctccgcggcagcagcgcgggccccagcagcctcggcagccacagccgctgcagccggggcagcctccgctgctgtcgcctcctctgatgcgcttgccctctcccggccccgggactccgggagaatgtgggtcctaggcatcgcggcaactttttgcggattgttcttgcttccaggctttgcgctgcaaatccagtgctaccagtgtgaagaattccagctgaacaacgactgctcctcccccgagttcattgtgaattgcacggtgaacgttcaagacatgtgtcagaaagaagtgatggagcaaagtgccgggatcatgtaccgcaagtcctgtgcatcatcagcggcctgtctcatcgcctctgccgggtaccagtccttctgctccccagggaaactgaactcagtttgcatcagctgctgcaacacccctctttgtaacgggccaaggcccaagaaaaggggaagttctgcctcggccctcaggccagggctccgcaccaccatcctgttcctcaaattagccctcttctcggcacactgctgaagctgaaggagatgccaccccctcctgcattgttcttccagccctcgcccccaaccccccacctccctgagtgagtttcttctgggtgtccttttattctgggtagggagcgggagtccgtgttctcttttgttcctgtgcaaataatgaaagagctcggtaaagcattctgaataaattcagcctgactgaattttcagtatgtacttgaaggaaggaggtggagtgaaagttcacccccatgtctgtgtaaccggagtcaaggccaggctggcagagtcagtccttagaagtcactgaggtgggcatctgccttttgtaaagcctccagtgtccattccatccctgatgggggcatagtttgagactgcagagtgagagtgacgttttcttagggctggagggccagttcccactcaaggctccctcgcttgacattcaaacttcatgctcctgaaaaccattctctgcagcagaattggctggtttcgcgcctgagttgggctctagtgactcgagactcaatgactgggacttagactggggctcggcctcgctctgaaaagtgcttaagaaaatcttctcagttctccttgcagaggactggcgccgggacgcgaagagcaacgggcgctgcacaaagcgggcgctgtcggtggtggagtgcgcatgtacgcgcaggcgcttctcgtggttggcgtgctgcagcgacaggcggcagcacagcacctgcacgaacacccgccgaaactgctgcgaggacaccgtgtacaggagcgggttgatgaccgagctgaggtagaaaaacgtctccgagaaggggaggaggatcatgtacgcccggaagtaggacctcgtccagtcgtgcttgggtttggccgcagccatgatcctccgaatctggttgggcatccagcatacggccaatgtcacaacaatcagccctgggcagacacgagcaggagggagagacagagaaaagaaaaacacagcatgagaacacagtaaatgaataaaaccataaaatatttagcccctctgttctgtgcttactggccaggaaatggtaccaatttttcagtgttggacttgacagcttcttttgccacaagcaagagagaatttaacactgtttcaaacccgggggagttggctgtgttaaagaaagaccattaaatgctttagacagtgt

SEQ ID NO: 11797 - DNA, 1033 bp, Homo sapiens
  source 1..1033: mol_type = unassigned DNA
gaaatgaaagaagggggagagggagggagggagggagagaaggagcctgaggcagatatggaacgatctctgcagaggaattacaaagaaagtcatttaagcccctttacagaccagctctgctgggaggatgcagaaataaatgatcagcgtcccggcgtgagagagctgcccccagaagtggccgggggagaaaagggtgaagaggagctaaagcttaggaggcgatttccacggaaatggatgctccctaaggatgtgcggaaaggggatgggaatgtgcggattgggggcgggggcaccaacgcactccggcgggcaagcggtctcccgcaccacctgctgcaaggctcgggaaggaaggcgaagatagcaccggggcatccccgggagtccgcaaggctttgcgctgcaaatccagtgctaccagtgtgaagaattccagctgaacaacgactgctcctcccccgagttcattgtgaattgcacggtgaacgttcaagacatgtgtcagaaagaagtgatggagcaaagtgccgggatcatgtaccgcaagtcctgtgcatcatcagcggcctgtctcatcgcctctgccgggtaccagtccttctgctccccagggaaactgaactcagtttgcatcagctgctgcaacacccctctttgtaacgggccaaggcccaagaaaaggggaagttctgcctcggccctcaggccagggctccgcaccaccatcctgttcctcaaattagccctcttctcggcacactgctgaagctgaaggagatgccaccccctcctgcattgttcttccagccctcgcccccaaccccccacctccctgagtgagtttcttctgggtgtccttttattctgggtagggagcgggagtccgtgttctcttttgttcctgtgcaaataatgaaagagctcggtaaagcattctgaataaattcagcctgactgaattttcagtatgtacttgaaggaaggaggtggagtgaaagttcacccccatgtctgtgtaaccgga

SEQ ID NO: 11798 - DNA, 578 bp, Homo sapiens
  source 1..578: mol_type = unassigned DNA
agtctcagccgccaactccggaggcgcggtgctcggcccgggagcgcgagcgggaggagcagagacccgcagccgggagcccgagcgcgggcgatgcaggctccgcgagcggcacctgcggctcctctaagctacgaccgtcgtctccgcggcagcagcgcgggccccagcagcctcggcagccacagccgctgcagccggggcagcctccgctgctgtcgcctcctctgatgcgcttgccctctcccggccccgggactccgggagaatgtgggtcctaggcatcgcggcaactttttgcggattgttcttgcttccaggtgagaatacccagaggccagcagccgaggccaggctttgcgctgcaaatccagtgctaccagtgtgaagaattccagctgaacaacgactgctcctcccccgagttcattgtgaattgcacggtgaacgttcaagacatgtgtcagaaagaagtgatggagcaaagtgccgacactaaaagaacaaacaccttgctcttcgagatgagacattttgccaagcagttgaccacttagttctcaagaagcaactatctc

SEQ ID NO: 11799 - DNA, 4071 bp, Homo sapiens
  source 1..4071: mol_type = unassigned DNA
gagtggcgcgcgcgcccctagccgccccccgcctctccccgctgcgctccctcgctccttccctgagctcccgggctccggcagcgggctggcggggcgccgcattgcacactctgggggcgccgcagtgttcgtgggatggggcagcgggctgcagctggcggccggaatccgcgcgcagcccgggtgcaagttctctcctgttgccctgagtgcccactcccaggccctctgtatgagtgacacttcagtctgccatggaacctggccctgctctggcctggctcctgctcctgagcctgctggcggattgtctgaaagctgctcagtcccgagacttcacagtgaaagacattatctacctccatccttcaaccacaccatatcctggtggatttaaatgtttcacctgtgaaaaggcagcagacaattatgagtgcaaccgatgggctccagacatctactgccctcgagagaccagatactgctacactcagcacacaatggaagtcacaggaaacagtatctcagtcaccaaacgctgtgtcccactggaagagtgcttatccactggctgcagagactccgagcatgaaggccacaaggtctgcacttcttgttgtgaaggaaatatctgtaacttgccactgccccgaaatgaaactgatgccacatttgccacgacgtcacctataaatcagacaaatgggcacccacgctgtatgtcagtgatagtgtcctgcttgtggttgtggttagggctcatgttatagtggctcagtggctccatgtgttaatagcgatccatggggatctcgatggtccacagacctgcatgagtcattggcctgacagtaattacacatgtgagacacaacactcttggaggtcatcacagccaagcattgccacttaccatgaggaataaatgttgcttcattgtagccattttgagtctaaccgagactcatcaaagccttctgtcagtacagcccaagttccataccataaacgtttgttttcattccaagaagtagttctgcatttatcgagatctggggttcttaatttggaagaatacatgcatgagatgcagtaggtcctgagactgtaagatattaggagtatgttataggggcatgtatagatgtgggcttttcaggagaaaagtaaccattggtttaaatataatcatgagttcatttgtagctttagaattttaaaacattgactccaaactgaatggactatttccttggaaattctgactgagtccctggaagagtagtaattccaacaattccagccatttgttcaattaattttcccaacattcttctcccagtgctgggaatcacatttcctctgttctgtgcagaagacaaaaaggcaatcataaaagtttgttatatttgtgggggtgcctggaggaggattttcctcaacttaatggagccactgtccataaagtggctgttatcccttcatataattggtgagatcagccttctccttgacttggcacctaattatgcttcatgagatcctagattccacctgagtcaattgtgtccagagccccaaaccaggatggagttgttttccccagatatggggttctattcagccatagataatctagacagaggatttcagaatgaaaggaaaaatgtgtggagattagtcctagttcattctgagggccgactaagtggctcagccagcttcttactccatctgcagttcatactgccaaagagctcccacttccaaatccccagtgactttatggagaagattctgcattaaattgtctttcgaatgatggggaagcaaggcataatatgcgatgatgaggagaaagtagaccagtgaggtgattgcaagactaacaaggagactcaatgggaagtttttctttcttttagatattgcttttgaagtagatggtaaaatttttgtcatccttcttgtattttttgtaccccaagttacaatttttcttcttccttgtaaataatttaaacagtatttatttttgtaaggcataactagaaactaaaatatattctaaaaaattcattattctgaacaaagtgatcaaattagaatacatatttttcaacagtggtagagcttttaatatatgtttattgaaagttatctataatacttgcaccagtgttgaaaaaagttaacatgtaggcaagagcaatatgtttgtctcaaggatttttccatggtttcctcagtgatggtgtcctggaattattcaggtggtgaccatcactggtctaagtttgtgtgcagggttttcagatgtgtttttgtgaaacttggtagaaccatggctaataaagaggacagtgttgtcagggtccatctgccctccatagaaaaatgtctctggctcataaaatgagactccctcagggactaaatatgaactgacagcagtaactctgatacagaataatctaaattgcatcaaatggccttaattcagagtttgttaggcttatcagtatgttgcttttaattggggtgggaaagtagagggagagaaagcaagacatttattaagcacctcgtatgtgccaggcactatgctaagcactttacataagttaggattaatccctgcaagaatcctataaagaatgttactagcatttacacttcccaaatgaaggtaccaaagctcaaacgcaatgttgtgaagctgtttccttcagatttaggttatgtgggatgatgtgggattgaagaggaaagaaaggtgggattatccccctaggaagactttcaggcctgacttcataggaattcatccatcttatcatgtggagtttatctcaccctgctgttgcaggatgctatttgcatgtgtccccaggtgatgttttttctttggggagtaggggtttggcttcctcattcatccctcttgctaaaagaggagatagttgatgttgcatctaaagatgctataagacaatgaaagtttgatgttgtacatacctacaagtaccatttttgtgcatgattacactccactgacatcttccaagtactgcatgtgattgaataagaaacaagaaagtgaccacaccaaagcctccctggctggtgtagagggatcaggtccacagtggtgcagattcaaccaccacccagggagtgcttgcagactctgcatagatgttgctgcatgtgtcccatgtgcctgtcagaatggcagtgtttaattctcttgaaagaaagttatttgctcactatccccagcctcaaggagccaaggaagagtcattcacatggaaggtccgggactggtcagccactctgacttttctaccacattaaattctccattacatctcaatattggtaatggcttaagtgtaaagagccatgatgtgtatattaagctatgtgccacatatttatttttagactctccacagcattcatgtcaatatgggattaatgcctaaactttgtaaatattgtacagtttgtaaatcaatgaataaaggttttgagtgtatcttaccaggctcctccctgcaaatgcacatgtcaatcaatgattaatgcacccaggttatgtacaaggcactgggcttagcaccacagggaacttccttccagaggcttgctttctagttgtgtagacaagaatacatgcatgagaagatacaagacaattcacccatgccaaatgattcatacaggctgtttaagtactgcagaaaataaaagaaggaaaggctaccagacttttcaataaggtctacagcttcccaagagcatgtctttgttaaatcaggaaatataaaaattatgtgtgtatgtgtatgtatatatatataccaccctattaactattttaaaatcgtattctattttgggggttgtgttaatgatgatgaaccagaaaagattttctcttgatggtttcttcaacaggaaacagatattggaatagtgtacatgtcatttttatctatacaatgaatttattatatttttcttagtaaagtgatagacattgaaagcaagcttgaaaaa

SEQ ID NO: 11800 - DNA, 1204 bp, Homo sapiens
  source 1..1204: mol_type = unassigned DNA
agtgttcgtgggatggggcagcgggctgcagctggcggccggaatccgcgcgcagcccgggtgcaagttctctcctgttgccctgagtgcccactcccaggccctctgtatgagtgacacttcagtctgccatggaacctggccctgctctggcctggctcctgctcctgagcctgctggcggattgtctgaaagctgctcagtcccgagacttcacagtgaaagacattatctacctccatccttcaaccacaccatatcctggtggatttaaatgtttcacctgtgaaaaggcagcagacaattatgagtgcaaccgatgggctccagacatctactgccctcgaggaaccatgatctagaagaaaagccagatatcccaaatgagaaagttaagaaggactaagacaacatggagaagagagaagattagcattgacctggttgggaggaagatcaggaagatttcacagaatttatcacatttggattgagccttgaagaatatcaggtgtccaggagtagaagataggaaaaaatatgcagaccatgctaaggatgcacatttttcatcgtgcatggtcaaaagttgtggtactatgtctcaaggtatatacgaggcaatgaggagacagtttggagcctccatcaaggagaaccagaccagatactgctacactcagcacacaatggaagtcacaggaaacagtatctcagtcaccaaacgctgtgtcccactggaagagtgcttatccactggctgcagagactccgagcatgaaggccacaaggtctgcacttcttgttgtgaaggaaatatctgtaacttgccactgccccgaaatgaaactgatgccacatttgccacgacgtcacctataaatcagacaaatgggcacccacgctgtatgtcagtgatagtgtcctgcttgtggttgtggttagggctcatgttatagtggctcagtggctccatgtgttaatagcgatccatggggatctcgatggtccacagacctgcatgagtcattggcctgacagtaattacacatgtgagacacaacactcttggaggtcatcacagccaagcattgccacttaccatgaggaataaatgttgcttcattgtagccattttgagtctaaccgagactcatcaaagccttctgtcagtacagcccaagttccataccataaacgtttg

SEQ ID NO: 11801 - DNA, 565 bp, Homo sapiens
  source 1..565: mol_type = unassigned DNA
agcactgtgcagggcatgaaagaccaaccactctgtaaatgcacataaagaacaacctccttgagcaatctcaagcaagagaaagaagaggcttccgagctccagcaaaacaatgggaaaaaacatacccttatcttttccttctcattttcaaaggtaccgtgaatataagtagaagaaagacaccgtctcttcctttaaggaacttacagtcttatggaagagacacagatggaagtgcacaattaccgaatatcatcaaaaagcctgagaaaaagttatgcaaaagctactgtgtgagcacagaggctgtaaacctaatcctaagttgcaggtgcaagttctctcctgttgccctgagtgcccactcccaggccctctgtatgagtgacacttcagtctgccatggaacctggccctgctctggcctggctcctgctcctgagcctgctggcggattgtctgaaagctgctcagtcccgagacttcacagtgaaagacattatctacctccatccttcaaccacaccatatcctggtggatttaaatgtttcacctgtgaaa

SEQ ID NO: 11802 - DNA, 1580 bp, Homo sapiens
  source 1..1580: mol_type = unassigned DNA
gggcatgaaagaccaaccactctgtaaatgcacataaagaacaacctccttgagcaatctcaagcaagagaaagaagaggcttccgagctccagcaaaacaatgggaaaaaacatacccttatcttttccttctcattttcaaaggtaccgtgaatataagtagaagaaagacaccgtctcttcctttaaggaacttacagtcttatggaagagacacagatggaagtgcacaattaccgaatatcatcaaaaagcctgagaaaaagttatgcaaaagctactgtgtgagcacagaggctgtaaacctaatcctaagttgcagggtgagcaacaaggcactattttggaagcagagaacagccctcaccagacacggaatctgctggtgccctgatcttggaattcccaccgtctagaactgtgcaagttctctcctgttgccctgagtgcccactcccaggccctctgtatgagtgacacttcagtctgccatggaacctggccctgctctggcctggctcctgctcctgagcctgctggcggattgtctgaaagctgctcagtcccgagacttcacagtgaaagacattatctacctccatccttcaaccacaccatatcctggtggatttaaatgtttcacctgtgaaaaggcagcagacaattatgagtgcaaccgatgggctccagacatctactgccctcgaggaaccatgatctagaagaaaagccagatatcccaaatgagaaagttaagaaggactaagacaacatggagaagagagaagattagcattgacctggttgggaggaagatcaggaagatttcacagaatttatcacatttggattgagccttgaagaatatcaggtgtccaggagtagaagataggaaaaaatatgcagaccatgctaaggatgcacatttttcatcgtgcatggtcaaaagttgtggtactatgtctcaaggtatatacgaggcaatgaggagacagtttggagcctccatcaaggagaaccagaccagatactgctacactcagcacacaatggaagtcacaggaaacagtatctcagtcaccaaacgctgtgtcccactggaagagtgcttatccactggctgcagagactccgagcatgaaggccacaaggtctgcacttcttgttgtgaaggaaatatctgtaacttgccactgccccgaaatgaaactgatgccacatttgccacgacgtcacctataaatcagacaaatgggcacccacgctgtatgtcagtgatagtgtcctgcttgtggttgtggttagggctcatgttatagtggctcagtggctccatgtgttaatagcgatccatggggatctcgatggtccacagacctgcatgagtcattggcctgacagtaattacacatgtgagacacaacactcttggaggtcatcacagccaagcattgccacttaccatgaggaataaatgttgcttcattgtagccattttgagtctaaccgagactcatcaaagccttctgtcagtacagcccaagttccataccataaacgtttgttttcattccaagaa

SEQ ID NO: 11803 - DNA, 3578 bp, Homo sapiens
  source 1..3578: mol_type = unassigned DNA
actgcaaacgtcaagtggtctccgccttccctgggttcggagcttcacttgctcttgagctctgcggtccggcggatttcgcggggcccaggggatggcggggagtgagatttggccagggtcatttcacactgccgggcctgcagccacgcacgcagctgctggcccggctgaggctggcggctagggagaggcgccagggggtcgcgcacaggaaggtgcaagttctctcctgttgccctgagtgcccactcccaggccctctgtatgagtgacacttcagtctgccatggaacctggccctgctctggcctggctcctgctcctgagcctgctggcggattgtctgaaagctgctcagtcccgagacttcacagtgaaagacattatctacctccatccttcaaccacaccatatcctggtggatttaaatgtttcacctgtgaaaaggcagcagacaattatgagtgcaaccgatgggctccagacatctactgccctcgagagaccagatactgctacactcagcacacaatggaagtcacaggaaacagtatctcagtcaccaaacgctgtgtcccactggaagagtgcttatccactggctgcagagactccgagcatgaaggccacaaggtctgcacttcttgttgtgaaggaaatatctgtaacttgccactgccccgaaatgaaactgatgccacatttgccacgacgtcacctataaatcagacaaatgggcacccacgctgtatgtcagtgatagtgtcctgcttgtggttgtggttagggctcatgttatagtggctcagtggctccatgtgttaatagcgatccatggggatctcgatggtccacagacctgcatgagtcattggcctgacagtaattacacatgtgagacacaacactcttggaggtcatcacagccaagcattgccacttaccatgaggaataaatgttgcttcattgtagccattttgagtctaaccgagactcatcaaagccttctgtcagtacagcccaagttccataccataaacgtttgttttcattccaagaagtagttctgcatttatcgagatctggggttcttaatttggaagaatacatgcatgagatgcagtaggtcctgagactgtaagatattaggagtatgttataggggcatgtatagatgtgggcttttcaggagaaaagtaaccattggtttaaatataatcatgagttcatttgtagctttagaattttaaaacattgactccaaactgaatggactatttccttggaaattctgactgagtccctggaagagtagtaattccaacaattccagccatttgttcaattaattttcccaacattcttctcccagtgctgggaatcacatttcctctgttctgtgcagaagacaaaaaggcaatcataaaagtttgttatatttgtgggggtgcctggaggaggattttcctcaacttaatggagccactgtccataaagtggctgttatcccttcatataattggtgagatcagccttctccttgacttggcacctaattatgcttcatgagatcctagattccacctgagtcaattgtgtccagagccccaaaccaggatggagttgttttccccagatatggggttctattcagccatagataatctagacagaggatttcagaatgaaaggaaaaatgtgtggagattagtcctagttcattctgagggccgactaagtggctcagccagcttcttactccatctgcagttcatactgccaaagagctcccacttccaaatccccagtgactttatggagaagattctgcattaaattgtctttcgaatgatggggaagcaaggcataatatgcgatgatgaggagaaagtagaccagtgaggtgattgcaagactaacaaggagactcaatgggaagtttttctttcttttagatattgcttttgaagtagatggtaaaatttttgtcatccttcttgtattttttgtaccccaagttacaatttttcttcttccttgtaaataatttaaacagtatttatttttgtaaggcataactagaaactaaaatatattctaaaaaattcattattctgaacaaagtgatcaaattagaatacatatttttcaacagtggtagagcttttaatatatgtttattgaaagttatctataatacttgcaccagtgttgaaaaaagttaacatgtaggcaagagcaatatgtttgtctcaaggatttttccatggtttcctcagtgatggtgtcctggaattattcaggtggtgaccatcactggtctaagtttgtgtgcagggttttcagatgtgtttttgtgaaacttggtagaaccatggctaataaagaggacagtgttgtcagggtccatctgccctccatagaaaaatgtctctggctcataaaatgagactccctcagggactaaatatgaactgacagcagtaactctgatacagaataatctaaattgcatcaaatggccttaattcagagtttgttaggcttatcagtatgttgcttttaattggggtgggaaagtagagggagagaaagcaagacatttattaagcacctcgtatgtgccaggcactatgctaagcactttacataagttaggattaatccctgcaagaatcctataaagaatgttactagcatttacacttcccaaatgaaggtaccaaagctcaaacgcaatgttgtgaagctgtttccttcagatttaggttatgtgggatgatgtgggattgaagaggaaagaaaggtgggattatccccctaggaagactttcaggcctgacttcataggaattcatccatcttatcatgtggagtttatctcaccctgctgttgcaggatgctatttgcatgtgtccccaggtgatgttttttctttggggagtaggggtttggcttcctcattcatccctcttgctaaaagaggagatagttgatgttgcatctaaagatgctataagacaatgaaagtttgatgttgtacatacctacaagtaccatttttgtgcatgattacactccactgacatcttccaagtactgcatgtgattgaataagaaacaagaaagtgaccacaccaaagcctccctggctggtgtagagggatcaggtccacagtggtgcagattcaaccaccacccagggagtgcttgcagactctgcatagatgttgctgcatgtgtcccatgtgcctgtcagaatggcagtgtttaattctcttgaaagaaagttatttgctcactatccccagcctcaaggagccaaggaagagtcattcacatggaaggtccgggactggtcagccactctgacttttctaccacattaaattctccattacatctcaatattggtaatggcttaagtgtaaagagccatgatgtgtatattaagctatgtgccacatatttatttttagactctccacagcattcatgtcaatatgggattaatgcctaaactttgtaaatattgtacagtttgtaaatcaatgaataaaggttttgagtgt

SEQ ID NO: 11804 - DNA, 589 bp, Homo sapiens
  source 1..589: mol_type = unassigned DNA
aaagctctggtgattcagtagtggacgggactctgctggagcaggacttcagagtgtttgttttcagcctgcttttaaagtgatttgaagagagtggctttgaagtgtgtgccttcggcaaaagaggcatacctccaaattcagctgattactcagctattcaatatcagcgcgactgaagggaacctagccatctccatgaaggggtgcttctccgccagagccagtctccaatgtagcaggtgacaaggcgagcaggaatgagcccaaaccagggaacatctggaaccctcaagggaactgcgaatgcttcgtttttctccagtagaatccccttctgcatccctgtattgagcaactgcactcaccaaaggcagaaaatagaaaggaattggggtgggacatcacagccctaaaaagccctaaaagacactgaattatgaatttatagtaactagtgaaaatgctgcggcttaagtaatgcttggcaaaccatcatgtatagttgtgtctattgatcactgcccaagggcaccagccaagagctgaaggggggccaagatccacctcatgtgctgtctggcagaag

SEQ ID NO: 11805 - DNA, 1577 bp, Homo sapiens
  source 1..1577: mol_type = unassigned DNA
acttcctgagccgggctggctgggtgggaacaggctccttgccgcctccccagcgctggccactaccacactgccgcccgcctgggcctcctttcaacctcgtggtggagccctgcggtttcccagcggagccgggcccggggctgctccctcgcgggcgaggctcacctgtcccggcccggccccctcccgcgccccaggtggttcagggcagggaggagccgcgccccgccccgcgcggtagcagccaacgccggccccaggcgggtgcgctgggagcctgggccgggagccgggtgagggcgccgagaggctcggtgggcgcgggcggcgagatatgccacacttctgcctgctgttggcaaccctcctggactaggctgctcttgttaatcacatggatgttgctgattactctgagtgcaaaccttttcactgttccagagaggagcctgacaaccacattctccttctcaagatataagagttcggaccgcccagcacacaaggtcagcatgctgctcctctgtcacgctctcgctatagctgttgtccagatcgttatcttctcagaaagctgggcatttgccaagaacatcaacttctataatgtgaggcctcctctcgaccctacaccatttccaaatagcttcaagtgctttacttgtgaaaacgcaggggataattataactgcaatcgatgggcagaagacaaatggtgtccacaaaatacacagtactgtttgacagttcatcacttcaccagccacggaagaagcacatccatcaccaaaaagtgtgcctccagaagtgaatgtcattttgtcggttgccaccacagccgagattctgaacatacggagtgtaggtcttgctgtgaaggaatgatctgcaatgtagaattacccaccaatcacactaatgcagtgtttgccgtaatgcacgctcagagaacatctggcagcagtgcccccacactctacctaccagtgcttgcctgggtctttgtgcttccattgctgtgatgccaccattcctaggagaggcagagaccagcctctaaagcacaagccaaaaactgtgtgaacggtgaactttggagtgaagatcaatcttgcacttggtgaagagtgcacattggacctcaaggcgaaagccagtggtttgcttggataaaatgttcccgcatgaggccacaggactgaggatgggaatttggcagggcctgagaagatggtctgacttccaggcttcctggtcaaagagagctacgtttgggcagttctgcagagaggatcctggcaactagtcccacctgactaggcctttagctgaaaggatttcttgacctccttgactgcctcagaggctgccaggtcaaaccctcttgtttatgtgattagctcagagcatctctatgaaatctaacccttcccctcatgagaaagcagttttccccaccaacagcatagtcaatgagaaaggcaactgtacgaagaaaacttccagtggaactaatatgaaatctatttgcaaattatggggggaaataaagcttttaaattatacaatgtaaa

SEQ ID NO: 11806 - DNA, 1248 bp, Homo sapiens
  source 1..1248: mol_type = unassigned DNA
cgccggccccaggcgggtgcgctgggagcctgggccgggagccgggtgagggcgccgagaggctcggtgggcgcgggcggcgagatatgccacacttctgcctgctgttggcaaccctcctggactaggctgctcttgttaatcacatggatgttatataagagttcggaccgcccagcacacaaggtcagcatgctgctcctctgtcacgctctcgctatagctgttgtccagatcgttatcttctcagaaagctgggcatttgccaagaacatcaacttctataatgtgaggcctcctctcgaccctacaccatttccaaatagcttcaagtgctttacttgtgaaaacgcaggggataattataactgcaatcgatgggcagaagacaaatggtgtccacaaaatacacagtactgtttgacagttcatcacttcaccagccacggaagaagcacatccatcaccaaaaagtgtgcctccagaagtgaatgtcattttgtcggttgccaccacagccgagattctgaacatacggagtgtaggtcttgctgtgaaggaatgatctgcaatgtagaattacccaccaatcacactaatgcagtgtttgccgtaatgcacgctcagagaacatctggcagcagtgcccccacactctacctaccagtgcttgcctgggtctttgtgcttccattgctgtgatgccaccattcctaggagaggcagagaccagcctctaaagcacaagccaaaaactgtgtgaacggtgaactttggagtgaagatcaatcttgcacttggtgaagagtgcacattggacctcaaggcgaaagccagtggtttgcttggataaaatgttcccgcatgaggccacaggactgaggatgggaatttggcagggcctgagaagatggtctgacttccaggcttcctggtcaaagagagctacgtttgggcagttctgcagagaggatcctggcaactagtcccacctgactaggcctttagctgaaaggatttcttgacctccttgactgcctcagaggctgccaggtcaaaccctcttgtttatgtgattagctcagagcatctctatgaaatctaacccttcccctcatgagaaagcagttttccccaccaacagcatagtcaatgagaaaggcaactgtacgaagaaaacttccagtggaactaatatgaaatctatttgcaaattatggggggaaataaagcttttaaattatacaa

SEQ ID NO: 11807 - DNA, 1306 bp, Homo sapiens
  source 1..1306: mol_type = unassigned DNA
ctctgctggagcaggacttcagagtgtttgttttcagcctgcttttaaagtgatttgaagagagtggctttgaagattatcgcggaacacctgcccattaatcttgaccctgttaaaacaataactgcctatccagatatgccacacttctgcctgctgttggcaaccctcctggactaggctgctcttgttaatcacatggatgttatataagagttcggaccgcccagcacacaaggtcagcatgctgctcctctgtcacgctctcgctatagctgttgtccagatcgttatcttctcagaaagctgggcatttgccaagaacatcaacttctataatgtgaggcctcctctcgaccctacaccatttccaaatagcttcaagtgctttacttgtgaaaacgcaggggataattataactgcaatcgatgggcagaagacaaatggtgtccacaaaatacacagtactgtttgacagttcatcacttcaccagccacggaagaagcacatccatcaccaaaaagtgtgcctccagaagtgaatgtcattttgtcggttgccaccacagccgagattctgaacatacggagtgtaggtcttgctgtgaaggaatgatctgcaatgtagaattacccaccaatcacactaatgcagtgtttgccgtaatgcacgctcagagaacatctggcagcagtgcccccacactctacctaccagtgcttgcctgggtctttgtgcttccattgctgtgatgccaccattcctaggagaggcagagaccagcctctaaagcacaagccaaaaactgtgtgaacggtgaactttggagtgaagatcaatcttgcacttggtgaagagtgcacattggacctcaaggcgaaagccagtggtttgcttggataaaatgttcccgcatgaggccacaggactgaggatgggaatttggcagggcctgagaagatggtctgacttccaggcttcctggtcaaagagagctacgtttgggcagttctgcagagaggatcctggcaactagtcccacctgactaggcctttagctgaaaggatttcttgacctccttgactgcctcagaggctgccaggtcaaaccctcttgtttatgtgattagctcagagcatctctatgaaatctaacccttcccctcatgagaaagcagttttccccaccaacagcatagtcaatgagaaaggcaactgtacgaagaaaacttccagtggaactaatatgaaatctatttgcaaattatggggggaaataaagcttttaaattatacaatgtaaa

SEQ ID NO: 11808 - DNA, 545 bp, Homo sapiens
  source 1..545: mol_type = unassigned DNA
agtgtgtgtgctggggctggggcggctacatagctgtgactaccagggggtgcagtctctggggaccaccactaccgaggctgggtaccatgattatcgcggaacacctgcccattaatcttgaccctgttaaaacaataactgcctatccagatatgccacacttctgcctgctgttggcaaccctcctggactaggctgctcttgttaatcacatggatgttgttccttaaggttgccagcatgaaagtgcttcagatggctttgagtcctaatcttgtggttctgttcactgaagataagcagcaattttttgattattttattttcctatggattgccaataggtctaaataacctccttagttgtactggcaggaccaagtaaaaagacaagggatgaaaaggagggaaggaaaaaaaggaaagaaagagagaaagagcgaggaaatatgagaaagaaaaagaggagggaaagaggaaagagagaattgtcttgggaaggtgatataggccactaattactttagagctgcaagcctcct

SEQ ID NO: 11809 - DNA, 572 bp, Homo sapiens
  source 1..572: mol_type = unassigned DNA
agtgtgtgtgctggggctggggcggctacatagctgtgactaccagggggtgcagtctctggggaccaccactaccgaggctgggtaccatgattatcgcggaacacctgcccattaatcttgaccctgttaaaacaataactgcctatccagatatgccacacttctgcctgctgttggcaaccctcctggactaggctgctcttgttaatcacatggatgttgttccttaaggttgccagcatgaaagtgcttcagatggctttgagtcctaatcttgtggttctgttcactgaagatcagaaactgaaaaaacaacctgaaagttggcaaagaaaggattctgtggtttttctaagtctctcaagccagtggacagccacggcactcagcataattgggctgattactctgagtgcaaaccttttcactgttccagagaggagcctgacaaccacattctccttctcaaggtgtggtgcttactgcgcaggctgaccagatataagagttcggaccgcccagcacacaaggtcagcatgctgctcctctgtcacgctctcgctatagct

SEQ ID NO: 11810 - DNA, 528 bp, Homo sapiens
  source 1..528: mol_type = unassigned DNA
gtgctggggctggggcggctacatagctgtgactaccagggggtgcagtctctggggaccaccactaccgaggctgggtaccatgattatcgcggaacacctgcccattaatcttgaccctgttaaaacaataactgcctatccagatatgccacacttctgcctgctgttggcaaccctcctggactaggctgctcttgttaatcacatggatgttatgtgaaaggcattgtacagaagaagatgagaatcacagtaaaccaaacaaaggaaatgcagaagagatattttcagctgaatattggaaagtaagattccctgcgagcaggatctcaggcaacgtcaatgaacaacatgaagcctgacacattctaattagtctaaggaaaatggtgacagaggatatattccgtaacgtctcaggaggtcgcctggctccagagagtgtaaaatgccacacgttggatgagatgattatccgagctcagacttgggaaatagtcatgcttctggaccaagtgccaggta

SEQ ID NO: 11811 - DNA, 484 bp, Homo sapiens
  source 1..484: mol_type = unassigned DNA
cggctacatagctgtgactaccagggggtgcagtctctggggaccaccactaccgaggctgggtaccatgattatcgcggaacacctgcccattaatcttgaccctgttaaaacaataactgcctatccagatatgccacacttctgcctgctgttggcaaccctcctggactaggctgctcttgttaatcacatggatgttgctgattactctgagtgcaaaccttttcactgttccagagaggagcctgacaaccacattctccttctcaagatgtgaaaggcattgtacagaagaagatgagaatcacagtaaaccaaacaaaggaaatgcagaagagatattttcagctgaatattggaaagtaagattccctgcgagcaggatctcaggcaacgtcaatgaacaacatgaagcctgacacattgtaggtgccccgtaaatattggttgagtaactgaataaacgtatttagtaacttaa

SEQ ID NO: 11812 - DNA, 515 bp, Homo sapiens
  source 1..515: mol_type = unassigned DNA
attatcgcggaacacctgcccattaatcttgaccctgttaaaacaataactgcctatccagatatgccacacttctgcctgctgttggcaaccctcctggactaggctgctcttgttaatcacatggatgttatataagagttcggaccgcccagcacacaaggtcagcatgctgctcctctgtcacgctctcgctatagctgttgtccagatcgttatcttctcagaaagctgggcatttgccaagaacatcaacttctataatgtgaggcctcctctcgaccacaagtaaaacgtctttgatatactttattagagagtgattcttataaataaaaaattatttggtatacatgtgggtacctgtagttcccacgcctggaagagtatcagaatcatgatgaaaggatttttaactgcatatccctaatcacttctccagagatttaacagtcaagaggctacaccatttccaaatagcttcaagtgctttacttgtgaaaacgcaggggata

SEQ ID NO: 11813 - DNA, 1719 bp, Homo sapiens
  source 1..1719: mol_type = unassigned DNA
gtctgctatcatttaccttatggattcctgtatatgcaaccctgcccatgctgcatattagaaacttctgctcagcttttaaaaaatactggtgttctggccaacttcacttaagaccagttaaattcgaatcttggttggcgtggctctgggcaatggcgtttattaaaagctccccggaaactgaaaaaacaacctgaaagttggcaaagaaaggattctgtggtttttctaagtctctcaagccagtggacagccacggcactcagcataattgggctgattactctgagtgcaaaccttttcactgttccagagaggagcctgacaaccacattctccttctcaaggttttgaaagagttgcaaaatttatcaaatgcaaatgttgactcaaggaatggaactgacagataggtggtccagtgactttggctcaacatgcctcagaaccacggttgatttgagaaatccagtgattcagcacagaggaaaccagctagccgcagtcactgagggaatggggtgcagccaggccagctctgcctgcttgtcattacttacctttcatttgatcaaaaacaatgcaatttactcgcaggtcctggccctacacaacagatataagagttcggaccgcccagcacacaaggtcagcatgctgctcctctgtcacgctctcgctatagctgttgtccagatcgttatcttctcagaaagctgggcatttgccaagaacatcaacttctataatgtgaggcctcctctcgaccctacaccatttccaaatagcttcaagtgctttacttgtgaaaacgcaggggataattataactgcaatcgatgggcagaagacaaatggtgtccacaaaatacacagtactgtttgacagttcatcacttcaccagccacggaagaagcacatccatcaccaaaaagtgtgcctccagaagtgaatgtcattttgtcggttgccaccacagccgagattctgaacatacggagtgtaggtcttgctgtgaaggaatgatctgcaatgtagaattacccaccaatcacactaatgcagtgtttgccgtaatgcacgctcagagaacatctggcagcagtgcccccacactctacctaccagtgcttgcctgggtctttgtgcttccattgctgtgatgccaccattcctaggagaggcagagaccagcctctaaagcacaagccaaaaactgtgtgaacggtgaactttggagtgaagatcaatcttgcacttggtgaagagtgcacattggacctcaaggcgaaagccagtggtttgcttggataaaatgttcccgcatgaggccacaggactgaggatgggaatttggcagggcctgagaagatggtctgacttccaggcttcctggtcaaagagagctacgtttgggcagttctgcagagaggatcctggcaactagtcccacctgactaggcctttagctgaaaggatttcttgacctccttgactgcctcagaggctgccaggtcaaaccctcttgtttatgtgattagctcagagcatctctatgaaatctaacccttcccctcatgagaaagcagttttccccaccaacagcatagtcaatgagaaaggcaactgtacgaagaaaacttccagtggaactaatatgaaatctatttgcaaattatggggggaaataaagcttttaaattatacaatgtaaa

SEQ ID NO: 11814 - DNA, 1100 bp, Homo sapiens
  source 1..1100: mol_type = unassigned DNA
atgcgatataagagttcggaccgcccagcacacaaggtcagcatgctgctcctctgtcacgctctcgctatagctgttgtccagatcgttatcttctcagaaagctgggcatttgccaagaacatcaacttctataatgtgaggcctcctctcgaccctacaccatttccaaatagcttcaagtgctttacttgtgaaaacgcaggggataattataactgcaatcgatgggcagaagacaaatggtgtccacaaaatacacagtactgtttgacagttcatcacttcaccagccacggaagaagcacatccatcaccaaaaagtgtgcctccagaagtgaatgtcattttgtcggttgccaccacagccgagattctgaacatacggagtgtaggtcttgctgtgaaggaatgatctgcaatgtagaattacccaccaatcacactaatgcagtgtttgccgtaatgcacgctcagagaacatctggcagcagtgcccccacactctacctaccagtgcttgcctgggtctttgtgcttccattgctgtgatgccaccattcctaggagaggcagagaccagcctctaaagcacaagccaaaaactgtgtgaacggtgaactttggagtgaagatcaatcttgcacttggtgaagagtgcacattggacctcaaggcgaaagccagtggtttgcttggataaaatgttcccgcatgaggccacaggactgaggatgggaatttggcagggcctgagaagatggtctgacttccaggcttcctggtcaaagagagctacgtttgggcagttctgcagagaggatcctggcaactagtcccacctgactaggcctttagctgaaaggatttcttgacctccttgactgcctcagaggctgccaggtcaaaccctcttgtttatgtgattagctcagagcatctctatgaaatctaacccttcccctcatgagaaagcagttttccccaccaacagcatagtcaatgagaaaggcaactgtacgaagaaaacttccagtggaactaatatgaaatctatttgcaaattatggggggaaataaagcttttaaattatacaatg

SEQ ID NO: 11815 - DNA, 500 bp, Homo sapiens
  source 1..500: mol_type = unassigned DNA
tccccctagggctcctacctcacagcgctcacccaggacagaggaccagagtctgcaccccctccagggcagctccaaccccatatccccaggccctgggttgaggggtgctggcggtggggaggcagggacagtaggtacccaacccccgccccttcatctctcaatgcccccccgccttttcctcaactccccccctccccaaaactcacagctgctccagaggttcctccagtcaaaccctttctggaaacgacggcggcccggcgggtccaaaccacctaccatccccgctcgcgtttccaggctccctacccccgccgccgccgcctcttcttccaccactgccaccgcctcctcttcatctgcggcccaccggcggcggccgccccgaagccccgccccctccatcgcctcctgcatcatcacttccggtaaccccgccggccgccagctccaggagggagaatgggagaggggcaaggagggaacgagtggaa

SEQ ID NO: 11816 - DNA, 857 bp, Homo sapiens
  source 1..857: mol_type = unassigned DNA
aggacagaggaccagagtctgcaccccctccagggcagctccaaccccatatccccaggccctgggttgaggggtgctggcggtggggaggcagggacagtaggctccctacccccgccgccgccgcctcttcttccaccactgccaccgcctcctcttcatctgcggcccaccggcggcggccgccccgaagccccgccccctccatcgcctcctgcatcatcacttccggtaaccccgccggccgccagctccaggagggagaatgggagaggggcaaggagggaacgagtggaagattgcgtcacgacgcacataaagacgtacgaagccgtcgccaaatgacaacggcaacacgacaagaagtccttggcctctaccgcagcattttcaggcttgcgaggaaatggcaggcgacatcagggcagatggaagacaccatcaaagaaaaacagtacatactaaatgaagccagaacgctgttccggaaaaacaaaaatctcacggacacagacctaattaaacagtgtatagatgaatgcacagccaggattgaaattggactgcattacaagattccttacccaaggccaattcatctgcctccaatgggccttaccccactccgaggccggggacttcgaagccaagagaaactgaggaaactttccaaaccagtatatctcagatctcatgatgaagtttcctaatctagaggaaagtttatttctgcaaatgatgagccaactagttattgaatgtaaaccagatggcaaaacacttcttgattaggggcaaaaattcaaatgtcttcttaaaacctccacaattgattctccccctgtgatgtaaactta

SEQ ID NO: 11817 - DNA, 1399 bp, Homo sapiens
  source 1..1399: mol_type = unassigned DNA
tttctggaaacgacggcggcccggcgggtccaaaccacctaccatccccgctcgcgtttccaggctccctacccccgccgccgccgcctcttcttccaccactgccaccgcctcctcttcatctgcggcccaccggcggcggccgccccgaagccccgccccctccatcgcctcctgcatcatcacttccggtaaccccgccggccgccagctccaggagggagaatgggagaggggcaaggagggaacgagtggaagattgcgtcacgacgcacataaagacgtacgaagccgtcgccaactcacggacacagacctaattaaacagtgtatagatgaatgcacagccaggattgaaattggactgcattacaagattccttacccaaggccaattcatctgcctccaatgggccttaccccactccgaggccggggacttcgaagccaagagaaactgaggaaactttccaaaccagtatatctcagatctcatgatgaagtttcctaatctagaggaaagtttatttctgcaaatgatgagccaactagttattgaatgtaaaccagatggcaaaacacttcttgattaggggcaaaaattcaaatgtcttcttaaaacctccacaattgattctccccctgtgatgtaaacttagatatccctagagtttctcagcatctttcttcctgagtggatggcattatccctagaggtcatggaccttacatcctcactgcagtcacctttggaaacaagaccgaggcctgtagaaggaaagcggaaggatgtaagagctgttcatgggaattccattcaccacacatgccagctgatgcaaagaaatttgccagtcactggaagttactgtggctactataaaactatgtaccactctcagaatattcttaggctttttttttttcaagttatagatttgcttaaagtgaggttttttggtgtgtgcttttttgttgtcttttgacccttccagtttccagacaaacttgtcttaaaaagtgcatcattggattgaccatggtttttcatgaaattttatgagatttctgccttaacaaaatgcatatattccttatcttaaagcctgtcattacttaggatgcacttataggatctgaaaagctcactttaaactcatactacattcgttacgagtattttacgttaacataattgaaaagtacaaggtccaagctggctttcaaattatgtctaaacagaaatgggacaaatagacttgaaaatagaagggatttattccacccctgcaagggtagagtcaggtgagagtcccttggtgagtcatttgtacatcagtgtcatttcttcttaacctctgaagaagatgggcatcagaaataaagacaaagcactatc

SEQ ID NO: 11818 - DNA, 931 bp, Homo sapiens
  source 1..931: mol_type = unassigned DNA
gcatcatcacttccggtaaccccgccggccgccagctccaggagggagaatgggagaggggcaaggagggaacgagtggaagattgcgtcacgacgcacataaagacgtacgaagccgtcgccaaatgacaacggcaacacgacaagaagtccttggcctctaccgcagcattttcaggcttgcgaggaaatggcaggcgacatcagggcagatggaagacaccatcaaagaaaaacagtacatactaaatgaagccagaacgctgttccggaaaaacaaaaatctcacggacacagacctaattaaacagtgtatagatgaatgcacagccaggattgaaattggactgcattacaagattccttacccaaggccagtaagtgtgactccggttaacaagtgctgggtacttaccctcatcaacctggttatttccaagaatgtgtaacaagagggcgagtgcttgctgagaagcccagagctgctgtgggaggcatgttggaaataagctatcattgcatgctgccagcccatcacaacaaagtaaaatgtcaatgaatgcatgacgtatcctgcttacatagctttccacgtatggaagggaaaaccagctcacactgtagagctttttctcttttcactttcatcttttttatggaaatgtgtttaattataaaaggcaggtttgttgttactaaaagaataaagttcaaacatgaaaggaatgcataaagtagaaagtaaaaatggtcaaaaattctcatccaggctggtcttgaactcctgggctcaagcaatcctcccacctcagcctcccaaagctctgggataacaggcatgagccaccgtgcctggccagaaatcttttttgtttgttcgtttttttggagacagagtcttactctgtcgcccaggctggagtgcagcatg

SEQ ID NO: 11819 - DNA, 769 bp, Homo sapiens
  source 1..769: mol_type = unassigned DNA
aggagggagaatgggagaggggcaaggagggaacgagtggaagattgcgtcacgacgcacataaagacgtacgaagccgtcgccaaagagtacccagagaaggagaagccagcaaaggagacgacacagacaagacctcagagatcaaaggaagaggccccttaatatcctggaataatgggacccatccccgtaatcagtgaatctcatccacccgcttgccagcttctacccgcagcaagtagaagctaagtcctggctcaaatctcttccctccctccctctcccagctgtcagtgcttttggacttgtgctcaggtgaagtagtatttgaagcttttcatcagttggctcattctttactcaagaataaacctcaagaaacgtcatcagggtcagaatgacaacggcaacacgacaagaagtccttggcctctaccgcagcattttcaggcttgcgaggaaatggcaggcgacatcagggcagatggaagacaccatcaaagaaaaacagtacatactaaatgaagccagaacgctgttccggaaaaacaaaaatctcacggacacagacctaattaaacagtgtatagatgaatgcacagccaggattgaaattggactgcattacaagattccttacccaaggccaattcatctgcctccaatgggccttaccccactccgaggccggggacttcgaagccaagagaaactgaggaaactttccaaaccagtatatctcagatctcatgatgaagtttcctaa

SEQ ID NO: 11820 - DNA, 1695 bp, Homo sapiens
  source 1..1695: mol_type = unassigned DNA
agattgcgtcacgacgcacataaagacgtacgaagccgtcgccaaagagtacccagagaaggagaagccagcaaaggagacgacacagacaagacctcagagatcaaaggaagaggccccttaatatcctggaataatgggacccatccccgtaatcagtgaatctcatccacccgcttgccagcttctacccgcagcaagtagaagctaagtcctggctcaaatctcttccctccctccctctcccagctgtcagtgcttttggacttgtgctcagatgacaacggcaacacgacaagaagtccttggcctctaccgcagcattttcaggcttgcgaggaaatggcaggcgacatcagggcagatggaagacaccatcaaagaaaaacagtacatactaaatgaagccagaacgctgttccggaaaaacaaaaatctcacggacacagacctaattaaacagtgtatagatgaatgcacagccaggattgaaattggactgcattacaagattccttacccaaggccagtaagtgtgactccggttaacaagtgctgggtacttaccctcatcaacctggttatttccaagaatgtgtaacaagagggcgagtgcttgctgagaagcccagagctgctgtgggaggcatgttggaaataagctatcattgcatgctgccagcccatcacaacaaagtaaaatgtcaatgaatgcatgacgtatcctgcttacatagctttccacgtatggaagggaaaaccagctcacactgtagagctttttctcttttcactttcatcttttttatggaaatgtgtttaattataaaaggcaggtttgttgttactaaaagaataaagttcaaacatgaaaggaatgcataaagtagaaagtaaaaatggtcaaaaattctcatccaggctaggcactgcggctcatgcctataatcctagcactttgggaggccaaggcaggaggatcacttgaggctggtcttgaactcctgggctcaagcaatcctcccacctcagcctcccaaagctctgggataacaggcatgagccaccgtgcctggccagaaatcttttttgtttgttcgtttttttggagacagagtcttactctgtcgcccaggctggagtgcagcatgatttctgctcactacaacctctgccttcccagttcaagtgattctcattcctcaacctctcgaataggtggaactacagtcgtgcaccaccacacccagctaattttttgtattttaatagaaacagggtttcaccatgttgcccaggctggtcttgaactcctgagcttaggcaatctgcccaccgtggcctccaaaagtgctaggatgacaggcgtaagccactgcgcccagcccaaatttcttaaaaaaaaaaaaaaaaaaaaaaaatttctcattgtgcagagggtgaacactttaactgttaaatggaaaattgccaatattcaactcttttagctacaaaaacagcaattttatattgtagtggctcaacctaattagtttggtagtatacccttttagtctttttttctgtattcatgtacctacattttctttacatatgtaggattctggatataatgttatactgcgtacttattttacttcatgtcttctgcacatctttgtatgtagctctccctcaatctttttttttttt

SEQ ID NO: 11821 - DNA, 931 bp, Homo sapiens
  source 1..931: mol_type = unassigned DNA
tgttggatgcggcgggagatgggtagagtcagtcagtcgagactcccccagacctggaactggtgctcccacagaggtgggcccggtggtttggtccggcctggcctactggaccagcctgtgctcggtcggccacggctctgctgggctcctggcgccgcctcctcccagcccgccgcgggctgcgcgcttctgtgggtgggggaaggcaggactgacgcagaagagtacccagagaaggagaagccagcaaaggagacgacacagacaagacctcagagatcaaaggaagaggccccttaatatcctggaataatgggacccatccccgtaatcagtgaatctcatccacccgcttgccagcttctacccgcagcaagtagaagctaagtcctggctcaaatctcttccctccctccctctcccagctgtcagtgcttttggacttgtgctcagctcacggacacagacctaattaaacagtgtatagatgaatgcacagccaggattgaaattggactgcattacaagattccttacccaaggccaattcatctgcctccaatgggccttaccccactccgaggccggggacttcgaagccaagagaaactgaggaaactttccaaaccagtatatctcagatctcatgatgaagtttcctaatctagaggaaagtttatttctgcaaatgatgagccaactagttattgaatgtaaaccagatggcaaaacacttcttgattaggggcaaaaattcaaatgtcttcttaaaacctccacaattgattctccccctgtgatgtaaacttagatatccctagagtttctcagcatctttcttcctgagtggatggcattatccctagaggtcatggaccttacatcctcactgcagtcacctttggaaacaagaccgaggcctgtagaa

SEQ ID NO: 11822 - DNA, 460 bp, Homo sapiens
  source 1..460: mol_type = unassigned DNA
cacggctctgctgggctcctggcgccgcctcctcccagcccgccgcgggctgcgcgcttctgtgggtgggggaaggcaggactgacgcagaatgacaacggcaacacgacaagaagtccttggcctctaccgcagcattttcaggcttgcgaggaaatggcaggcgacatcagggcagatggaagacaccatcaaagaaaaacagtacatactaaatgaagccagaacgctgttccggaaaaacaaaaatctcacggacacagacctaattaaacagtgtatagatgaatgcacagccaggattgaaattggactgcattacaagattccttacccaaggccaattcatctgcctccaatgggccttaccccactccgaggccggggacttcgaagccaagagaaactgaggaaactttccaaaccagtatatctcagatctcatgatgaagtttcctaa

SEQ ID NO: 11823 - DNA, 1659 bp, Homo sapiens
  source 1..1659: mol_type = unassigned DNA
gcctggtgtggggacgctcaggtgccggcgtggggccccctcggaggctgtgaatcttttggacccccgaatgtaaatgggagatgagagtacccagagaaggagaagccagcaaaggagacgacacagacaagacctcagagatcaaaggaagaggccccttaatatcctggaataatgggacccatccccgtaatcagtgaatctcatccacccgcttgccagcttctacccgcagcaagtagaagctaagtcctggctcaaatctcttccctccctccctctcccagctgtcagtgcttttggacttgtgctcaggtgaagtagtatttgaagcttttcatcagttggctcattctttactcaagaataaacctcaagaaacgtcatcagggtcagaatgacaacggcaacacgacaagaagtccttggcctctaccgcagcattttcaggcttgcgaggaaatggcaggcgacatcagggcagatggaagacaccatcaaagaaaaacagtacatactaaatgaagccagaacgctgttccggaaaaacaaaaatctcacggacacagacctaattaaacagtgtatagatgaatgcacagccaggattgaaattggactgcattacaagattccttacccaaggccaattcatctgcctccaatgggccttaccccactccgaggccggggacttcgaagccaagagaaactgaggaaactttccaaaccagtatatctcagatctcatgatgaagtttcctaatctagaggaaagtttatttctgcaaatgatgagccaactagttattgaatgtaaaccagatggcaaaacacttcttgattaggggcaaaaattcaaatgtcttcttaaaacctccacaattgattctccccctgtgatgtaaacttagatatccctagagtttctcagcatctttcttcctgagtggatggcattatccctagaggtcatggaccttacatcctcactgcagtcacctttggaaacaagaccgaggcctgtagaaggaaagcggaaggatgtaagagctgttcatgggaattccattcaccacacatgccagctgatgcaaagaaatttgccagtcactggaagttactgtggctactataaaactatgtaccactctcagaatattcttaggctttttttttttcaagttatagatttgcttaaagtgaggttttttggtgtgtgcttttttgttgtcttttgacccttccagtttccagacaaacttgtcttaaaaagtgcatcattggattgaccatggtttttcatgaaattttatgagatttctgccttaacaaaatgcatatattccttatcttaaagcctgtcattacttaggatgcacttataggatctgaaaagctcactttaaactcatactacattcgttacgagtattttacgttaacataattgaaaagtacaaggtccaagctggctttcaaattatgtctaaacagaaatgggacaaatagacttgaaaatagaagggatttattccacccctgcaagggtagagtcaggtgagagtcccttggtgagtcatttgtacatcagtgtcatttcttcttaacctctgaagaagatgggcatcagaaataaagacaaagcactatcaa

SEQ ID NO: 11824 - DNA, 1558 bp, Homo sapiens
  source 1..1558: mol_type = unassigned DNA
tttctggaaacgacggcggcccggcgggtccaaaccacctaccatccccgctcgcgtttccaggctccctacccccgccgccgccgcctcttcttccaccactgccaccgcctcctcttcatctgcggcccaccggcggcggccgccccgaagccccgccccctccatcgcctcctgcatcatcacttccggtaaccccgccggccgccagctccaggagggagaatgggagaggggcaaggagggaacgagtggaagattgcgtcacgacgcacataaagacgtacgaagccgtcgccaaatgacaacggcaacacgacaagaagtccttggcctctaccgcagcattttcaggcttgcgaggaaatggcaggcgacatcagggcagatggaagacaccatcaaagaaaaacagtacatactaaatgaagccagaacgctgttccggaaaaacaaaaatctcacggacacagacctaattaaacagtgtatagatgaatgcacagccaggattgaaattggactgcattacaagattccttacccaaggccaattcatctgcctccaatgggccttaccccactccgaggccggggacttcgaagccaagagaaactgaggaaactttccaaaccagtatatctcagatctcatgatgaagtttcctaatctagaggaaagtttatttctgcaaatgatgagccaactagttattgaatgtaaaccagatggcaaaacacttcttgattaggggcaaaaattcaaatgtcttcttaaaacctccacaattgattctccccctgtgatgtaaacttagatatccctagagtttctcagcatctttcttcctgagtggatggcattatccctagaggtcatggaccttacatcctcactgcagtcacctttggaaacaagaccgaggcctgtagaaggaaagcggaaggatgtaagagctgttcatgggaattccattcaccacacatgccagctgatgcaaagaaatttgccagtcactggaagttactgtggctactataaaactatgtaccactctcagaatattcttaggctttttttttttcaagttatagatttgcttaaagtgaggttttttggtgtgtgcttttttgttgtcttttgacccttccagtttccagacaaacttgtcttaaaaagtgcatcattggattgaccatggtttttcatgaaattttatgagatttctgccttaacaaaatgcatatattccttatcttaaagcctgtcattacttaggatgcacttataggatctgaaaagctcactttaaactcatactacattcgttacgagtattttacgttaacataattgaaaagtacaaggtccaagctggctttcaaattatgtctaaacagaaatgggacaaatagacttgaaaatagaagggatttattccacccctgcaagggtagagtcaggtgagagtcccttggtgagtcatttgtacatcagtgtcatttcttcttaacctctgaagaagatgggcatcagaaataaagacaaagcactatc

SEQ ID NO: 11825 - DNA, 1626 bp, Homo sapiens
  source 1..1626: mol_type = unassigned DNA
ggtttggtccggcctggcctactggaccagcctgtgctcggtcggccacggctctgctgggctcctggcgccgcctcctcccagcccgccgcgggctgcgcgcttctgtgggtgggggaaggcaggactgacgcagaagagtacccagagaaggagaagccagcaaaggagacgacacagacaagacctcagagatcaaaggaagaggccccttaatatcctggaataatgggacccatccccgtaatcagtgaatctcatccacccgcttgccagcttctacccgcagcaagtagaagctaagtcctggctcaaatctcttccctccctccctctcccagctgtcagtgcttttggacttgtgctcagatgacaacggcaacacgacaagaagtccttggcctctaccgcagcattttcaggcttgcgaggaaatggcaggcgacatcagggcagatggaagacaccatcaaagaaaaacagtacatactaaatgaagccagaacgctgttccggaaaaacaaaaatctcacggacacagacctaattaaacagtgtatagatgaatgcacagccaggattgaaattggactgcattacaagattccttacccaaggccaattcatctgcctccaatgggccttaccccactccgaggccggggacttcgaagccaagagaaactgaggaaactttccaaaccagtatatctcagatctcatgatgaagtttcctaatctagaggaaagtttatttctgcaaatgatgagccaactagttattgaatgtaaaccagatggcaaaacacttcttgattaggggcaaaaattcaaatgtcttcttaaaacctccacaattgattctccccctgtgatgtaaacttagatatccctagagtttctcagcatctttcttcctgagtggatggcattatccctagaggtcatggaccttacatcctcactgcagtcacctttggaaacaagaccgaggcctgtagaaggaaagcggaaggatgtaagagctgttcatgggaattccattcaccacacatgccagctgatgcaaagaaatttgccagtcactggaagttactgtggctactataaaactatgtaccactctcagaatattcttaggctttttttttttcaagttatagatttgcttaaagtgaggttttttggtgtgtgcttttttgttgtcttttgacccttccagtttccagacaaacttgtcttaaaaagtgcatcattggattgaccatggtttttcatgaaattttatgagatttctgccttaacaaaatgcatatattccttatcttaaagcctgtcattacttaggatgcacttataggatctgaaaagctcactttaaactcatactacattcgttacgagtattttacgttaacataattgaaaagtacaaggtccaagctggctttcaaattatgtctaaacagaaatgggacaaatagacttgaaaatagaagggatttattccacccctgcaagggtagagtcaggtgagagtcccttggtgagtcatttgtacatcagtgtcatttcttcttaacctctgaagaagatgggcatcagaaataaagacaaagcactatc

SEQ ID NO: 11826 - DNA, 904 bp, Homo sapiens
  source 1..904: mol_type = unassigned DNA
gtcatggagaactcttgggtgcagacaagtggatgattaatgaagtagcatctgaaaaacccaaggaaccaaatgtaggtggagcaacttccctgcaacacacgtcgaagctgctgcagtggctgttcttcccctccccttggaaaggcaccaaaagccagcctttggaagggctggtggactgtgcccttctttcccttcagagaaccagtgtccctgtgactccacccactcatctggccaccgttgccctgacctgccaggagcctggagaagatgaaggcatccgtggttctctccctccttggctacctggtggttccaagtggtgcttacatcttggggcgttgcacagtggctaagaaactccacgatggaggcctggattattttgagggctatagccttgagaactgggtgtgcctggcctacttcgagagcaagttcaaccccatggccatctacgagaacacacgtgagggctacactggctttggcctctttcagatgcgtggcagtgactggtgtggcgaccatggcaggaaccgctgccatatgtcatgttccgctttactgaatcctaatttagagaagacaattaaatgtgccaagaccattgtaaaaggaaaagaagggatgggagcatggcccacctggtcccggtactgccagtactccgataccctggcacggtggctggatggttgcaagctgtagccacctgcatggcccctgcagcactcaccagttgcatcttgtgaatgaaggtgcttttctgcttgctgcttcagtcaatccttttgatgatctcaccactttaagagttccagatggaaaaagacaaaagtttgcttcatccggggatgcaggatgcagaataaaccaaactagttactcaacttgg

SEQ ID NO: 11827 - DNA, 838 bp, Homo sapiens
  source 1..838: mol_type = unassigned DNA
aagtagcatctgaaaaacccaaggaaccaaatgtaggtggagcaacttccctgcaacacacgtcgaagctgctgcagtggctgttcttcccctccccttggaaaggcaccaaaagccagcctttggaagggctggtggactgagaaccagtgtccctgtgactccacccactcatctggccaccgttgccctgacctgccaggagcctggagaagatgaaggcatccgtggttctctccctccttggctacctggtggttccaagtggtgcttacatcttggggcgttgcacagtggctaagaaactccacgatggaggcctggattattttgagggctatagccttgagaactgggtgtgcctggcctacttcgagagcaagttcaaccccatggccatctacgagaacacacgtgagggctacactggctttggcctctttcagatgcgtggcagtgactggtgtggcgaccatggcaggaaccgctgccatatgtcatgttccgctttactgaatcctaatttagagaagacaattaaatgtgccaagaccattgtaaaaggaaaagaagggatgggagcatggcccacctggtcccggtactgccagtactccgataccctggcacggtggctggatggttgcaagctgtagccacctgcatggcccctgcagcactcaccagttgcatcttgtgaatgaaggtgcttttctgcttgctgcttcagtcaatccttttgatgatctcaccactttaagagttccagatggaaaaagacaaaagtttgcttcatccggggatgcaggatgcagaataaaccaaactagttactcaa

SEQ ID NO: 11828 - DNA, 639 bp, Homo sapiens
  source 1..639: mol_type = unassigned DNA
agaaaataggaggtcaagaggaggagaaggggcagagtttcaggtgtcccagatttgcagtgacacgaagcagagaattaggatgggaagaagtgtcatggcttaccagtggctaagaaactccacgatggaggcctggattattttgagggctatagccttgagaactgggtgtgcctggcctacttcgagagcaagttcaaccccatggccatctacgagaacacacgtgagggctacactggctttggcctctttcagatgcgtggcagtgactggtgtggcgaccatggcaggaaccgctgccatatgtcatgttccgctttactgaatcctaatttagagaagacaattaaatgtgccaagaccattgtaaaaggaaaagaagggatgggagcatggcccacctggtcccggtactgccagtactccgataccctggcacggtggctggatggttgcaagctgtagccacctgcatggcccctgcagcactcaccagttgcatcttgtgaatgaaggtgcttttctgcttgctgcttcagtcaatccttttgatgatctcaccactttaagagttccagatggaaaaagacaaaagtttgcttcatccggggatgcaggatgcagaataaacca

SEQ ID NO: 11829 - DNA, 1865 bp, Homo sapiens
  source 1..1865: mol_type = unassigned DNA
gttaccatagcgacgtgcacgcagtagccaggcctgacccgctggtcccttgctggcgggaggaaagaggcggcaccatgagccacgcagtaaccatcgaggagccccaggcccagccgcaggtgtctcaaactcggtaccgggagaggtcgcgggctgggagccacatctcctccaatcgagcgtatgattttctgtacgatccattgtttattgtgtcaagtgagaaagaccatacacaggcaaatatccaagctaccctgattcgcagcagactgagaaaagttcccaggtttaaaaccatgttcagtaacctgatccattatccaagatattctctatattggagcaagtcagatcctgtcccaccatttatcagtcgggaatggaagggacataaggagaaacacagagaagccctccggcagctcaccacaactgacgcttcttttcagatgcctaaagaagtttatgaagatcctgaagttactggaaagaatcgctataaatactttgaaaggccttttctcccattttttcagcagatgccattcaatgttgtttatgccgtatccaaggcagaaccatacacttttcctcctacttctactaagcacctatccatcccttcaaagtctactgtgggcactcagactgattatcgggatgctgacgttcaaacagatccatactctgcagaatatgtagtatgtcaggactcaatccctgagctcttgaccctggctacgcttacttggggtcggggtctcccagcaggacaagctgaggtggagatgatagaaagagcccgcgagaagcgtgcttgggaagcctctctccccgctctgagtgacacctcccagtttgagaagaggaggaaaatgatgaatgaaatggagaggaaggagtgggccttcagagagcaggagattgaaaaactgcaggagattcgcctggaagttctaaaagagctgttgaggaagcgtgaagagaatcagaatgaagtgaatatgaagcacttgaatgcccggtggtctaaactgcaggagggaaaagaggcaaaaatggcaaaaattcagcgcacgcatgtatcaacaatcagaaaacttgtaggaaagagaaagaatatagaagggaagttggagagaagaaatatcatcaaggattattctgattatgcatcacaggtctatggacctctgtctcgtcttgggtgtttcccagacaacaactcagaggactttgtagtaaaaaactactatctcaacacctatgaaggattagtggaacttgagtcatgtctcccagattttgtgacacaaccccaaatcagagctccaaaacctaaagtcattaccaccaaagctggttttctgaagagggcagcaaggttggactatgagttggcagaggttcataaggcactgttggataagaagaataaagttcttgaagtaaagaaaccccctcgcttccttcaaagaaacccaatacctcaacctcggcttccaactccaaccttggaaatgacgtccaatgaagaagaagaaatggaaatggctgtgatctaccttcaaaagttactccggggcagagtcgttcagaacatgatgtttgaagggaaagaaaagcgactggagttgatccaggagttgcgcacctgccacgcactacaagaagatgaaaagctggtgaaaaaagccgagaagcaagtgaccctggccttacagcggcagaggaacttgcatgagcacaaggttttcctttttttgttttcttgttactttcttgttaaattttctcccttgattttatcatcacacagcaccattataataaaaattaatgaaatgatgaaaaagaaa

SEQ ID NO: 11830 - DNA, 4433 bp, Homo sapiens
  source 1..4433: mol_type = unassigned DNA
gttaccatagcgacgtgcacgcagtagccaggcctgacccgctggtcccttgctggcgggaggaaagaggcggcaccatgagccacgcagtaaccatcgaggagccccaggcccagccgcaggtgtctcaaactcggtaccgggagaggtcgcgggctgggagccacatctcctccaatcgagcgtatgattttctgtacgatccattgtttattgtgtcaagtgagaaagaccatacacaggcaaatatccaagctaccctgattcgcagcagactgagaaaagttcccaggtttaaaaccatgttcagtaacctgatccattatccaagatattctctatattggagcaagtcagatcctgtcccaccatttatcagtcgggaatggaagggacataaggagaaacacagagaagccctccggcagctcaccacaactgacgcttcttttcagatgcctaaagaagtttatgaagatcctgaagttactggaaagaatcgctataaatactttgaaaggccttttctcccattttttcagcagatgccattcaatgttgtttatgccgtatccaaggcagaaccatacacttttcctcctacttctactaagcacctatccatcccttcaaagtctactgtgggcactcagactgattatcgggatgctgacgttcaaacagatccatactctgcagaatatgtagtatgtcaggactcaatccctgagctcttgaccctggctacgcttacttggggtcggggtctcccagcaggacaagctgaggtggagatgatagaaagagcccgcgagaagcgtgcttgggaagcctctctccccgctctgagtgacacctcccagtttgagaagaggaggaaaatgatgaatgaaatggagaggaaggagtgggccttcagagagcaggagattgaaaaactgcaggagattcgcctggaagttctaaaagagctgttgaggaagcgtgaagagaatcagaatgaagtgaatatgaagcacttgaatgcccggtggtctaaactgcaggagggaaaagaggcaaaaatggcaaaaattcagcgcacgcatgtatcaacaatcagaaaacttgtaggaaagagaaagaatatagaagggaagttggagagaagaaatatcatcaaggattattctgattatgcatcacaggtctatggacctctgtctcgtcttgggtgtttcccagacaacaactcagaggactttgtagtaaaaaactactatctcaacacctatgaaggattagtggaacttgagtcatgtctcccagattttgtgacacaaccccaaatcagagctccaaaacctaaagtcattaccaccaaagctggttttctgaagagggcagcaaggttggactatgagttggcagaggttcataaggcactgttggataagaagaataaagttcttgaagtaaagaaaccccctcgcttccttcaaagaaacccaatacctcaacctcggcttccaactccaaccttggaaatgacgtccaatgaagaagaagaaatggaaatggctgtgatctaccttcaaaagttactccggggcagagtcgttcagaacatgatgtttgaagggaaagaaaagcgactggagttgatccaggagttgcgcacctgccacgcactacaagaagatgaaaagctggtgaaaaaagccgagaagcaagtgaccctggccttacagcggcagaggaacttgcatgagcacaaggtgtcactggttgaaaaccatttggccggactggaaggaagggcactagcagacatgtttgacttcctgtccaaagagctggtgagactgcaggaggagaggaggatccatgcctttgtcatgctggctgagcgccagcggcgggtacgagaggctgaagagagtggtcggcgccaggtggaaaaacagcgcctgcgggaggaggacgagatatttaaggaggtggttaaagttcaccatagtactataagctcctacctagaagacataatactgaataccgaagcgaatactgcagaagaacaagccagggcagaaatagagaagatggctgagaaaatcaatgacattgcttatgaaatggaaagccgccgaacctatcttcagtcagaggagattgttgctgagttggtttatagttttctgatcccagaggtgcaaaaatactttgtcaaagaaaaagtgaggaacgcacagcggaaacatattcttgcagcccatcagatcatccacagttacacggaaagcatggttcaaaagaaattaactgagggagagcaagatgaggcctcaaatgctgccatgttacttgagaaagaaactcaaaatgagaacaacagctaagattgtgatttttttgtaaaagaagctgtacgaatcatcataaataattccaatagtctgcacttctcccaaggtgtgcactgctcataaacttgccagtgtgtgattcatgagaaaggagatttattttccttaaacatccaataatttaaaatgattttcaataataataatcaaatgaaaaagcttcattctcttcagtgtcttctagatgccctacttaaagagaacattttcttatgtctcatttcaatattttgttaactatgaggatgtgctggtttgttgaatcaaacaaaaggaaatgttgtggaatatttttccaagtagttttggttcactattcacaggacattggcattatctactaaggctgaaaatgtgcatattccatgactcaggattttatctcctagatatatattcaacagaaatgcatgagtatgtgcaccaacaggcatgacaaaaatatttatagtagtggtgttcacaatagtcccaaactggaaacccaagtgtccatctccatcggaacagaaaactatactttggtctgcttctacagtggcacatcaacccacctttgagctttagatctaagaagtgtgttcatgcaacagccatagagatggtgctattgaaaggcaatctgcccatcctgtgtattgacaagcatcaggattccaggaggattcttcctgattcaaagactgtcaaataggaaaaaagaaaacagtaaatgaacaaaaacatcaacatggagtccaagtaatgaatttatagaggaaaatgtatgctactctgaaaacaaagcttatgttagagaatatcttactgtaagaaacaaggaaaattgcagaaacatttgctgagtgtttttaataggagtcaaaaagaaagggtcttttcagaaactgaagtaggaaataataacagacaaggtcaaaaaatagatgcaggctgaaaagaaaaggaagtgggctaagatgggaaaaatataaaaagatttaaaatccagcaacaaaatttacacattcatttggatgcagtgaaaagggcagaaataccacagcagagaataaaattgataatgttggcaacacatttattaagtgatccaacatgggatgggaaggaatgggcaaagagattaaaatgacagaagttagctgtagatgacctatcccacagcaatcggagttcttgaagaagaaaccagaacaaataaaatagaaacaataatcagagtttaataattaattttctgagtttttttttaaaaaaactaattatacaaacttgaaagggttcaccttgccctagcaaaactaggattgggacacctttttttccccctgaggatcactgacaaaaaacactgcaccagtaaggaagcaactaaattttgttttgttctttgaaaaaggctaacctgagctaggtaaaggttatatcattcacttttgaaataaaccatcgagaacacaaaatgacaagtgagttaggttgggctgatgggatagaaggtgggaggggaatgctatacagctgggaacagcagactttctctgaagggccagatggtaactacattagggtttgcgggtctgatggtcgccatcataactgcatactcaactctgccgttgtagggtaagagcagcactcgatgacacagaaatgaatgcacatgactgtgttccagtaaaattttattttaattaaaatcaattcatgtttgaaaaaggatttaaagtagcttctaataaaggacatgtgtaatgaaacttaaaatatgatattttctttaaaaatctttatccttatgtagacttctaaaactatgttttgcatttagacagtcaaggaaaatacaagttgttatacaattctcattgactaattgaagtttactaggagaggaaaactttttcttgataccggcaatcttttacttataatggcttgagttaaaatgctccaacttttctaatttttgcttttgaaaataaaacacctatagtgacaataaaaacacacatttaaagccaa

SEQ ID NO: 11831 - DNA, 4356 bp, Homo sapiens
  source 1..4356: mol_type = unassigned DNA
gttaccatagcgacgtgcacgcagtagccaggcctgacccgctggtcccttgctggcgggaggaaagaggcggcaccatgagccacgcagtaaccatcgaggagccccaggcccagccgcaggtgtctcaaactcggtaccgggagaggtcgcgggctgggagccacatctcctccaatcgagcgtatgattttctgtacgagaaaagttcccaggtttaaaaccatgttcagtaacctgatccattatccaagatattctctatattggagcaagtcagatcctgtcccaccatttatcagtcgggaatggaagggacataaggagaaacacagagaagccctccggcagctcaccacaactgacgcttcttttcagatgcctaaagaagtttatgaagatcctgaagttactggaaagaatcgctataaatactttgaaaggccttttctcccattttttcagcagatgccattcaatgttgtttatgccgtatccaaggcagaaccatacacttttcctcctacttctactaagcacctatccatcccttcaaagtctactgtgggcactcagactgattatcgggatgctgacgttcaaacagatccatactctgcagaatatgtagtatgtcaggactcaatccctgagctcttgaccctggctacgcttacttggggtcggggtctcccagcaggacaagctgaggtggagatgatagaaagagcccgcgagaagcgtgcttgggaagcctctctccccgctctgagtgacacctcccagtttgagaagaggaggaaaatgatgaatgaaatggagaggaaggagtgggccttcagagagcaggagattgaaaaactgcaggagattcgcctggaagttctaaaagagctgttgaggaagcgtgaagagaatcagaatgaagtgaatatgaagcacttgaatgcccggtggtctaaactgcaggagggaaaagaggcaaaaatggcaaaaattcagcgcacgcatgtatcaacaatcagaaaacttgtaggaaagagaaagaatatagaagggaagttggagagaagaaatatcatcaaggattattctgattatgcatcacaggtctatggacctctgtctcgtcttgggtgtttcccagacaacaactcagaggactttgtagtaaaaaactactatctcaacacctatgaaggattagtggaacttgagtcatgtctcccagattttgtgacacaaccccaaatcagagctccaaaacctaaagtcattaccaccaaagctggttttctgaagagggcagcaaggttggactatgagttggcagaggttcataaggcactgttggataagaagaataaagttcttgaagtaaagaaaccccctcgcttccttcaaagaaacccaatacctcaacctcggcttccaactccaaccttggaaatgacgtccaatgaagaagaagaaatggaaatggctgtgatctaccttcaaaagttactccggggcagagtcgttcagaacatgatgtttgaagggaaagaaaagcgactggagttgatccaggagttgcgcacctgccacgcactacaagaagatgaaaagctggtgaaaaaagccgagaagcaagtgaccctggccttacagcggcagaggaacttgcatgagcacaaggtgtcactggttgaaaaccatttggccggactggaaggaagggcactagcagacatgtttgacttcctgtccaaagagctggtgagactgcaggaggagaggaggatccatgcctttgtcatgctggctgagcgccagcggcgggtacgagaggctgaagagagtggtcggcgccaggtggaaaaacagcgcctgcgggaggaggacgagatatttaaggaggtggttaaagttcaccatagtactataagctcctacctagaagacataatactgaataccgaagcgaatactgcagaagaacaagccagggcagaaatagagaagatggctgagaaaatcaatgacattgcttatgaaatggaaagccgccgaacctatcttcagtcagaggagattgttgctgagttggtttatagttttctgatcccagaggtgcaaaaatactttgtcaaagaaaaagtgaggaacgcacagcggaaacatattcttgcagcccatcagatcatccacagttacacggaaagcatggttcaaaagaaattaactgagggagagcaagatgaggcctcaaatgctgccatgttacttgagaaagaaactcaaaatgagaacaacagctaagattgtgatttttttgtaaaagaagctgtacgaatcatcataaataattccaatagtctgcacttctcccaaggtgtgcactgctcataaacttgccagtgtgtgattcatgagaaaggagatttattttccttaaacatccaataatttaaaatgattttcaataataataatcaaatgaaaaagcttcattctcttcagtgtcttctagatgccctacttaaagagaacattttcttatgtctcatttcaatattttgttaactatgaggatgtgctggtttgttgaatcaaacaaaaggaaatgttgtggaatatttttccaagtagttttggttcactattcacaggacattggcattatctactaaggctgaaaatgtgcatattccatgactcaggattttatctcctagatatatattcaacagaaatgcatgagtatgtgcaccaacaggcatgacaaaaatatttatagtagtggtgttcacaatagtcccaaactggaaacccaagtgtccatctccatcggaacagaaaactatactttggtctgcttctacagtggcacatcaacccacctttgagctttagatctaagaagtgtgttcatgcaacagccatagagatggtgctattgaaaggcaatctgcccatcctgtgtattgacaagcatcaggattccaggaggattcttcctgattcaaagactgtcaaataggaaaaaagaaaacagtaaatgaacaaaaacatcaacatggagtccaagtaatgaatttatagaggaaaatgtatgctactctgaaaacaaagcttatgttagagaatatcttactgtaagaaacaaggaaaattgcagaaacatttgctgagtgtttttaataggagtcaaaaagaaagggtcttttcagaaactgaagtaggaaataataacagacaaggtcaaaaaatagatgcaggctgaaaagaaaaggaagtgggctaagatgggaaaaatataaaaagatttaaaatccagcaacaaaatttacacattcatttggatgcagtgaaaagggcagaaataccacagcagagaataaaattgataatgttggcaacacatttattaagtgatccaacatgggatgggaaggaatgggcaaagagattaaaatgacagaagttagctgtagatgacctatcccacagcaatcggagttcttgaagaagaaaccagaacaaataaaatagaaacaataatcagagtttaataattaattttctgagtttttttttaaaaaaactaattatacaaacttgaaagggttcaccttgccctagcaaaactaggattgggacacctttttttccccctgaggatcactgacaaaaaacactgcaccagtaaggaagcaactaaattttgttttgttctttgaaaaaggctaacctgagctaggtaaaggttatatcattcacttttgaaataaaccatcgagaacacaaaatgacaagtgagttaggttgggctgatgggatagaaggtgggaggggaatgctatacagctgggaacagcagactttctctgaagggccagatggtaactacattagggtttgcgggtctgatggtcgccatcataactgcatactcaactctgccgttgtagggtaagagcagcactcgatgacacagaaatgaatgcacatgactgtgttccagtaaaattttattttaattaaaatcaattcatgtttgaaaaaggatttaaagtagcttctaataaaggacatgtgtaatgaaacttaaaatatgatattttctttaaaaatctttatccttatgtagacttctaaaactatgttttgcatttagacagtcaaggaaaatacaagttgttatacaattctcattgactaattgaagtttactaggagaggaaaactttttcttgataccggcaatcttttacttataatggcttgagttaaaatgctccaacttttctaatttttgcttttgaaaataaaacacctatagtgacaataaaaacacacatttaaagccaa

SEQ ID NO: 11832 - DNA, 939 bp, Homo sapiens
  source 1..939: mol_type = unassigned DNA
gacgtgcacgcagtagccaggcctgacccgctggtcccttgctggcgggaggaaagaggcggcaccatgagccacgcagtaaccatcgaggagccccaggcccagccgcaggtgtctcaaactcggtaccgggagaggtcgcgggctgggagccacatctcctccaatcgagcgtatgattttctgtacgatccattgtttattgtgtcaagtgagaaagaccatacacaggcaaatatccaagctaccctgattcgcagcagactgagaaaagttcccaggtttaaaaccatgttcagtaacctgatccattatccaagatattctctatattggagcaagtcagatcctgtcccaccatttatcagtcgggaatggaagggacataaggagaaacacagagaagccctccggcagctcaccacaactgacgcttcttttcagatgcctaaagaagtttatgaagatcctgaagttactggaaagaatcgctataaatactttgaaaggccttttctcccattttttcagcagatgccattcaatgttgtttatgccgtatccaaggcagaaccatacacttttcctcctacttctactaagcacctatccatcccttcaaagtctactgtgggcactcagactgattatcgggatgctgacgttcaaacagatccatactctgcagaatatgtagtatgtcaggactcaatccctgagctcttgaccctggctacgcttacttggggtgagttggtaaatctcctgactattggcagatgacgatgctgataaccacgcatgctgttcaaatggcccatgtacaggcaattgtggtttacagtgttgctatataaagtgtcttagtacagcaacttcatagactcataatttttctgatacttctggtcaaataaagatactatctttttattgtga

SEQ ID NO: 11833 - DNA, 2712 bp, Homo sapiens
  source 1..2712: mol_type = unassigned DNA
gtgcacgcagtagccaggcctgacccgctggtcccttgctggcgggaggaaagaggcggcaccatgagccacgcagtaaccatcgaggagccccaggcccagccgcaggtgtctcaaactcggtaccgggagaggtcgcgggctgggagccacatctcctccaatcgagcgtatgattttctgtacggtaaggaccgccgcagaccttcctccgcgtccgtcgcctcctaggccagatccattgtttattgtgtcaagtgagaaagaccatacacaggcaaatatccaagctaccctgattcgcagcagactgagaaaagttcccaggtttaaaaccatgttcagtaacctgatccattatccaagatattctctatattggagcaagtcagatcctgtcccaccatttatcagtcgggaatggaagggacataaggagaaacacagagaagccctccggcagctcaccacaactgacgcttcttttcagatgcctaaagaagtttatgaagatcctgaagttactggaaagaatcgctataaatactttgaaaggccttttctcccattttttcagcagatgccattcaatgttgtttatgccgtatccaaggcagaaccatacacttttcctcctacttctactaagcacctatccatcccttcaaagtctactgtgggcactcagactgattatcgggatgctgacgttcaaacagatccatactctgcagaatatgtagtatgtcaggactcaatccctgagctcttgaccctggctacgcttacttggggtcggggtctcccagcaggacaagctgaggtggagatgatagaaagagcccgcgagaagcgtgcttgggaagcctctctccccgctctgagtgacacctcccagtttgagaagaggaggaaaatgatgaatgaaatggagaggaaggagtgggccttcagagagcaggagattgaaaaactgcaggagattcgcctggaagttctaaaagagctgttgaggaagcgtgaagagaatcagaatgaagtgaatatgaagcacttgaatgcccggtggtctaaactgcaggagggaaaagaggcaaaaatggcaaaaattcagcgcacgcatgtatcaacaatcagaaaacttgtaggaaagagaaagaatatagaagggaagttggagagaagaaatatcatcaaggattattctgattatgcatcacaggtctatggacctctgtctcgtcttgggtgtttcccagacaacaactcagaggactttgtagtaaaaaactactatctcaacacctatgaaggattagtggaacttgagtcatgtctcccagattttgtgacacaaccccaaatcagagctccaaaacctaaagtcattaccaccaaagctggttttctgaagagggcagcaaggttggactatgagttggcagaggttcataaggcactgttggataagaagaataaagttcttgaagtaaagaaaccccctcgcttccttcaaagaaacccaatacctcaacctcggcttccaactccaaccttggaaatgacgtccaatgaagaagaagaaatggaaatggctgtgatctaccttcaaaagttactccggggcagagtcgttcagaacatgatgtttgaagggaaagaaaagcgactggagttgatccaggagttgcgcacctgccacgcactacaagaagatgaaaagctggtgaaaaaagccgagaagcaagtgaccctggccttacagcggcagaggaacttgcatgagcacaaggtgtcactggttgaaaaccatttggccggactggaaggaagggcactagcagacatgtttgacttcctgtccaaagagctggtgagactgcaggaggagaggaggatccatgcctttgtcatgctggctgagcgccagcggcgggtacgagaggctgaagagagtggtcggcgccaggtggaaaaacagcgcctgcgggaggaggacgagatatttaaggaggtggttaaagttcaccatagtactataagctcctacctagaagacataatactgaataccgaagcgaatactgcagaagaacaagccagggcagaaatagagaagatggctgagaaaatcaatgacattgcttatgaaatggaaagccgccgaacctatcttcagtcagaggagattgttgctgagttggtttatagttttctgatcccagaggtgcaaaaatactttgtcaaagaaaaagtgaggaacgcacagcggaaacatattcttgcagcccatcagatcatccacagttacacggaaagcatggttcaaaagaaattaactgagggagagcaagatgaggcctcaaatgctgccatgttacttgagaaagaaactcaaaatgagaacaacagctaagattgtgatttttttgtaaaagaagctgtacgaatcatcataaataattccaatagtctgcacttctcccaaggtgtgcactgctcataaacttgccagtgtgtgattcatgagaaaggagatttattttccttaaacatccaataatttaaaatgattttcaataataataatcaaatgaaaaagcttcattctcttcagtgtcttctagatgccctacttaaagagaacattttcttatgtctcatttcaatattttgttaactatgaggatgtgctggtttgttgaatcaaac

SEQ ID NO: 11834 - DNA, 475 bp, Homo sapiens
  source 1..475: mol_type = unassigned DNA
agtagccaggcctgacccgctggtcccttgctggcgggaggaaagaggcggcaccatgagccacgcagtaaccatcgaggagccccaggcccagccgcaggtgtctcaaactcggtaccgggagaggtcgcgggctgggagccacatctcctccaatcgagcgtatgattttctgtacgatccattgtttattgtgtcaagtgagaaagaccatacacaggcaaatatccaagctaccctgattcgcagcagactggtatgtctaattcatcagccaaggctacctgatgaacctgaaccatctagtttgcctgactgcattgatcagattgactaatcaccaaatcttcactggattttaggttccacagaaattaccttgccaagattactggagggcaaagcatcttaatacgtgtggctcattgtgaggattaagtcaccaataatgaacagagaacccataagctaattt

SEQ ID NO: 11835 - DNA, 1021 bp, Homo sapiens
  source 1..1021: mol_type = unassigned DNA
agtagccaggcctgacccgctggtcccttgctggcgggaggaaagaggcggcaccatgagccacgcagtaaccatcgaggagccccaggcccagccgcaggtgtctcaaactcggtaccgggagaggtcgcgggctgggagccacatctcctccaatcgagcgtatgattttctgtacgatccattgtttattgtgtcaagtgagaaagaccatacacaggcaaatatccaagctaccctgattcgcagcagactgagaaaagttcccaggtttaaaaccatgttcagtaacctgatccattatccaagatattctctatattggagcaagtcagatcctgtcccaccatttatcagtcgggaatggaagggacataaggagaaacacagagaagccctccggcagctcaccacaactgacgcttcttttcagatgcctaaagaagtttatgaagatcctgaagttactggaaagaatcgctataaatactttgaaaggccttttctcccattttttcagcagatgccattcaatgttgtttatgccgtatccaagtaagtaaccattatttgaaaactctttttcagtttatttattgtttgcttccatattttttcttagaagatagttcactaaatcactatttttcaaattgtggatcacaaaacattagaagggtatgaaatcttctagtgtgtcatgagcagcattttaaaacatgaaacagaatagaaaataaccaaagcatcaagtatatggagggtaagttggtttttgtttataacttttgtttcagaaaaatatatgcatatgtttatatgtatatgatggattatgatataaaatgtatttcttactgttagttgtccatttgtgctgctataacaaattaacagattgggtgatataaataaaataaatttatttcttgaagttctgaaggctgggcagtccaagaagcaaggcagtccaatgggcagtcagtgtcggtgagggccttcttgctgtgtcttcacatgg

SEQ ID NO: 11836 - DNA, 2353 bp, Homo sapiens
  source 1..2353: mol_type = unassigned DNA
aggcctgacccgctggtcccttgctggcgggaggaaagaggcggcaccatgagccacgcagtaaccatcgaggagccccaggcccagccgcaggtgtctcaaactcggtaccgggagaggtcgcgggctgggagccacatctcctccaatcgagcgtatgattttctgtacgaactgacgcttcttttcagatgcctaaagaagtttatgaagatcctgaagttactggaaagaatcgctataaatactttgaaaggccttttctcccattttttcagcagatgccattcaatgttgtttatgccgtatccaaggcagaaccatacacttttcctcctacttctactaagcacctatccatcccttcaaagtctactgtgggcactcagactgattatcgggatgctgacgttcaaacagatccatactctgcagaatatgtagtatgtcaggactcaatccctgagctcttgaccctggctacgcttacttggggtcggggtctcccagcaggacaagctgaggtggagatgatagaaagagcccgcgagaagcgtgcttgggaagcctctctccccgctctgagtgacacctcccagtttgagaagaggaggaaaatgatgaatgaaatggagaggaaggagtgggccttcagagagcaggagattgaaaaactgcaggagattcgcctggaagttctaaaagagctgttgaggaagcgtgaagagaatcagaatgaagtgaatatgaagcacttgaatgcccggtggtctaaactgcaggagggaaaagaggcaaaaatggcaaaaattcagcgcacgcatgtatcaacaatcagaaaacttgtaggaaagagaaagaatatagaagggaagttggagagaagaaatatcatcaaggattattctgattatgcatcacaggtctatggacctctgtctcgtcttgggtgtttcccagacaacaactcagaggactttgtagtaaaaaactactatctcaacacctatgaaggattagtggaacttgagtcatgtctcccagattttgtgacacaaccccaaatcagagctccaaaacctaaagtcattaccaccaaagctggttttctgaagagggcagcaaggttggactatgagttggcagaggttcataaggcactgttggataagaagaataaagttcttgaagtaaagaaaccccctcgcttccttcaaagaaacccaatacctcaacctcggcttccaactccaaccttggaaatgacgtccaatgaagaagaagaaatggaaatggctgtgatctaccttcaaaagttactccggggcagagtcgttcagaacatgatgtttgaagggaaagaaaagcgactggagttgatccaggagttgcgcacctgccacgcactacaagaagatgaaaagctggtgaaaaaagccgagaagcaagtgaccctggccttacagcggcagaggaacttgcatgagcacaaggtgtcactggttgaaaaccatttggccggactggaaggaagggcactagcagacatgtttgacttcctgtccaaagagctggtgagactgcaggaggagaggaggatccatgcctttgtcatgctggctgagcgccagcggcgggtacgagaggctgaagagagtggtcggcgccaggtggaaaaacagcgcctgcgggaggaggacgagatatttaaggaggtggttaaagttcaccatagtactataagctcctacctagaagacataatactgaataccgaagcgaatactgcagaagaacaagccagggcagaaatagagaagatggctgagaaaatcaatgacattgcttatgaaatggaaagccgccgaacctatcttcagtcagaggagattgttgctgagttggtttatagttttctgatcccagaggtgcaaaaatactttgtcaaagaaaaagtgaggaacgcacagcggaaacatattcttgcagcccatcagatcatccacagttacacggaaagcatggttcaaaagaaattaactgagggagagcaagatgaggcctcaaatgctgccatgttacttgagaaagaaactcaaaatgagaacaacagctaagattgtgatttttttgtaaaagaagctgtacgaatcatcataaataattccaatagtctgcacttctcccaaggtgtgcactgctcataaacttgccagtgtgtgattcatgagaaaggagatttattttccttaaacatccaataatttaaaatgattttcaataataataatcaaatgaaaaagcttcattctcttcagtgtcttctagatgccctacttaaagagaacatttt

SEQ ID NO: 11837 - DNA, 3140 bp, Homo sapiens
  source 1..3140: mol_type = unassigned DNA
gacttgtttctaaatcacaattcccaaattattaatttctatggagaaatatgtgttaccatgttatctagactagctggtcagggtatttgcctccccagagacaagtctacttgggaaatcaagtgtatccaaaggctgcttgttaatttaatggcaaatcagttgattttaaagggtggtacagtatagtcaatcatgaatattcttcatcactttaaagatatacctgataaacagatacttataatagcagggcaatattttgttgaactttgtaaaaataacagttccatcatcagcaaacttacaaacttaaggggtgaattctgaagatagctgattttttttttaaccgtgttcaccaattctgagatatcatgtggtttgcatctttctagtgcaccaaatatgggagatggtataaatgtattgcttctttcacttgcaaattggcatagtgcgtatatacaaggtctttcccttgaagaattttttgggttacccaggctcaaaaggagttttgttcataggagagaagaaagtgtgttcagggtgtagtacttgaaaacatgctagactttctttatgaattccacttccgtaagctgacttggaatactcagaaaagaaaaacatcttgacaactgttgctggtagaagtggtagagtaacagggccacatgcacaacagagcatgagctgctgcagagtcagacaatatttaaacttttaaatttgttttccaattaagagattacattactttgccattattctcagcctaggggtagatatgttctatctgttatgctacttgattgtttattttgcagatccattgtttattgtgtcaagtgagaaagaccatacacaggcaaatatccaagctaccctgattcgcagcagactggtatgtctaattcatcagccaaggctacctgatgaacctgaaccatctagtttgcctgactgcattgatcagattgactaatcaccaaatcttcactggattttaggttccacagaaattaccttgccaagattactggagggcaaagcatcttaatacgtgtggctcattgtgaggattaagtcaccaataatgaacagagaacccataagctaatttatttcaatgggataaatttaataatatatgcccatgttaaaagaattcaagtagtataaaagcatatacagtgtgaagtaaattctagccctatcccctaccccctccacataaacagccattgtcatcagtttcttgggcatgtatttaaagatattttacgcatacagcaataacccctcttcttatgctgtatacattgttttgtatgtttttaaaaagagtttacaatgtaattaaaatgctttagaaaagctgatggtataattttgtcctttgcctcccttctctaacattagagaaaagttcccaggtttaaaaccatgttcagtaacctgatccattatccaagatattctctatattggagcaagtcagatcctgtcccaccatttatcagtcgggaatggaagggacataaggagaaacacagagaagccctccggcagctcaccacaactgacgcttcttttcagatgcctaaagaagtttatgaagatcctgaagttactggaaagaatcgctataaatactttgaaaggccttttctcccattttttcagcagatgccattcaatgttgtttatgccgtatccaaatggagtcttgctccatcactcaggctggagtgcagtggcgtgatctcggctcgctgcaacctccacctccagggttcaagtgattctccttcctcagcctcccaagtagctgggattacagggcagaaccatacacttttcctcctacttctactaagcacctatccatcccttcaaagtctactgtgggcactcagactgattatcgggatgctgacgttcaaacagatccatactctgcagaatatgtagtatgtcaggactcaatccctgagctcttgaccctggctacgcttacttggggtcggggtctcccagcaggacaagctgaggtggagatgatagaaagagcccgcgagaagcgtgcttgggaagcctctctccccgctctgagtgacacctcccagtttgagaagaggaggaaaatgatgaatgaaatggagaggaaggagtgggccttcagagagcaggagattgaaaaactgcaggagattcgcctggaagttctaaaagagctgttgaggaagcgtgaagagaatcagaatgaagtgaatatgaagcacttgaatgcccggtggtctaaactgcaggagggaaaagaggcaaaaatggcaaaaattcagcgcacgcatgtatcaacaatcagaaaacttgtaggaaagagaaagaatatagaagggaagttggagagaagaaatatcatcaaggattattctgattatgcatcacaggtctatggacctctgtctcgtcttgggtgtttcccagacaacaactcagaggactttgtagtaaaaaactactatctcaacacctatgaaggattagtggaacttgagtcatgtctcccagattttgtgacacaaccccaaatcagagctccaaaacctaaagtcattaccaccaaagctggttttctgaagagggcagcaaggttggactatgagttggcagaggttcataaggcactgttggataagaagaataaagttcttgaagtaaagaaaccccctcgcttccttcaaagaaacccaatacctcaacctcggcttccaactccaaccttggaaatgacgtccaatgaagaagaagaaatggaaatggctgtgatctaccttcaaaagttactccggggcagagtcgttcagaacatgatgtttgaagggaaagaaaagcgactggagttgatccaggagttgcgcacctgccacgcactacaagaagatgaaaagctggtgaaaaaagccgagaagcaagtgaccctggccttacagcggcagaggaacttgcatgagcacaaggttttcctttttttgttttcttgttactttcttgttaaattttctcccttgattttatcatcacacagcaccattataataaaaattaatgaaatgatgaaaaagaaa

SEQ ID NO: 11838 - DNA, 535 bp, Homo sapiens
  source 1..535: mol_type = unassigned DNA
gaatggaagggacataaggagaaacacagagaagccctccggcagctcaccacatgcctaaagaagtttatgaagatcctgaagttactggaaagaatcgctataaatactttgaaaggccttttctcccattttttcagcagatgccattcaatgttgtttatgccgtatccaaggcagaaccatacacttttcctcctacttctactaagcacctatccatcccttcaaagtctactgtgggcactcagactgattatcgggatgctgacgttcaaacagatccatactctgcagaatatgtagtatgtcaggactcaatccctgagctcttgaccctggctacgcttacttggggtcggggtctcccagcaggacaagctgaggtggagatgatagaaagagcccgcgagaagcgtgcttgggaagcctctctccccgctctgagtgacacctcccagtttgagaagaggaggaaaatgatgaatgaaatggagaggaaggagtgggccttcagagagcaggagattgaaaa

SEQ ID NO: 11839 - DNA, 381 bp, Homo sapiens
  source 1..381: mol_type = unassigned DNA
gtggaacttgagtcatgtctcccagattttgtgacacaaccccaaatcagagctccaaaacctaaagtcattaccaccaaagctggttttctgaagagggcagcaaggttggactatgagttggcagaggttcataaggcactgttggataagaagaataaagttcttgaagtaaagaaaccccctcgcttccttcaaagaaacccaatacctcaacctcggcttccaactccaaccttggaaatgacgtccaatgaagaagaagaaatggaaatggctgtgatctaccttcaaaagttactccggggcagagtcgttcagaacatggtgtgtaggtccaaccgctggccctgcatttctcttttgagaataaatttttta

SEQ ID NO: 11840 - DNA, 554 bp, Homo sapiens
  source 1..554: mol_type = unassigned DNA
aaatccaaatttttttgtggagttaaacaaacttgccaggaatgtgatatttcagatcacttaatcaaggaaaagccgaacctatcttcagtcagaggagattgttgctgagttggtttatagttttctgatcccagaggtgcaaaaatactttgtcaaagaaaaagtgaggaacgcacagcggaaacatattcttgcagcccatcagatcatccacagttacacggaaagcatggttcaaaagaaattaactgagggagagcaagatgaggcctcaaatgctgccatgttacttgagaaagaaactcaaaatgagaacaacagctaagattgtgatttttttgtaaaagaagctgtacgaatcatcataaataattccaatagtctgcacttctcccaaggtgtgcactgctcataaacttgccagtgtgtgattcatgagaaaggagatttattttccttaaacatccaataatttaaaatgattttcaataataataatcaaatgaaaaagcttcattctcttcagtgtcttctagatgccctacttaaag

SEQ ID NO: 11841 - DNA, 454 bp, Homo sapiens
  source 1..454: mol_type = unassigned DNA
tgagctcataaactcatcatcaatcatgaggaacgcacagcggaaacatattcttgcagcccatcagatcatccacagttacacggaaagcatggttcaaaagaaattaactgagggagagcaagatgaggcctcaaatgctgccatgttacttgagaaagaaactcaaaatgagaacaacagctaagtccttggtccaatagaatggaatcttaagtctcaatcaaaaggaatcatggaaggagggttgagatgagagggaagattgtgatttttttgtaaaagaagctgtacgaatcatcataaataattccaatagtctgcacttctcccaaggtgtgcactgctcataaacttgccagtgtgtgattcatgagaaaggagatttattttccttaaacatccaataatttaaaatgattttcaataataataatcaaatgaaaaagcttca

SEQ ID NO: 11842 - DNA, 949 bp, Homo sapiens
  source 1..949: mol_type = unassigned DNA
atcatcaatcagtaagtcccttccacattaagaactaaggctcaaagagaagtataagactaggtctttatatttgtaagttacttacactctagatatcaaacgaaatgtaactcacatgaagtgcttcaatgctgaatagtgaggaacgcacagcggaaacatattcttgcagcccatcagatcatccacagttacacggaaagcatggttcaaaagaaattaactgagggagagcaagatgaggcctcaaatgctgccatgttacttgagaaagaaactcaaaatgagaacaacagctaagattgtgatttttttgtaaaagaagctgtacgaatcatcataaataattccaatagtctgcacttctcccaaggtgtgcactgctcataaacttgccagtgtgtgattcatgagaaaggagatttattttccttaaacatccaataatttaaaatgattttcaataataataatcaaatgaaaaagcttcattctcttcagtgtcttctagatgccctacttaaagagaacattttcttatgtctcatttcaatattttgttaactatgaggatgtgctggtttgttgaatcaaacaaaaggaaatgttgtggaatatttttccaagtagttttggttcactattcacaggacattggcattatctactaaggctgaaaatgtgcatattccatgactcaggattttatctcctagatatatattcaacagaaatgcatgagtatgtgcaccaacaggcatgacaaaaatatttatagtagtggtgttcacaatagtcccaaactggaaacccaagtgtccatctccatcggaacagaaaactatactttggtctgcttctacagtggcacatcaacccacctttgagctttagatctaagaagtgtgttcatgcaacagccatagagatggtgctattgaaaggc

SEQ ID NO: 11843 - DNA, 563 bp, Homo sapiens
  source 1..563: mol_type = unassigned DNA
aatcagtaagtcccttccacattaagaactaaggctcaaagagaagtataagactaggtctttatatttgtaagttacttacactctagatatcaaacgaaatgtaactcacatgaagtgcttcaatgctgaatagtgaggaacgcacagcggaaacatattcttgcagcccatcagatcatccacagttacacggaaagcatggttcaaaagaaattaactgagggagagcaagatgaggcctcaaatgctgccatgttacttgagaaagaaactcaaaatgagaacaacagctaagtccttggtccaatagaatggaatcttaagtctcaatcaaaaggaatcatggaaggagggttgagatgagagggaagattgtgatttttttgtaaaagaagctgtacgaatcatcataaataattccaatagtctgcacttctcccaaggtgtgcactgctcataaacttgccagtgtgtgattcatgagaaaggagatttattttccttaaacatccaataatttaaaatgattttcaataataataatcaaatgaaaaagcttc

SEQ ID NO: 11844 - DNA, 845 bp, Homo sapiens
  source 1..845: mol_type = unassigned DNA
gtcccttccacattaagaactaaggctcaaagagaagtataagactaggtctttatatttgtaagttacttacactctagatatcaaacgaaatgtaactcacatgaagtgcttcaatgctgaataggttggtacaaactcaagtgcgtgaggaacgcacagcggaaacatattcttgcagcccatcagatcatccacagttacacggaaagcatggttcaaaagaaattaactgagggagagcaagatgaggcctcaaatgctgccatgttacttgagaaagaaactcaaaatgagaacaacagctaagattgtgatttttttgtaaaagaagctgtacgaatcatcataaataattccaatagtctgcacttctcccaaggtgtgcactgctcataaacttgccagtgtgtgattcatgagaaaggagatttattttccttaaacatccaataatttaaaatgattttcaataataataatcaaatgaaaaagcttcattctcttcagtgtcttctagatgccctacttaaagagaacattttcttatgtctcatttcaatattttgttaactatgaggatgtgctggtttgttgaatcaaacaaaaggaaatgttgtggaatatttttccaagtagttttggttcactattcacaggacattggcattatctactaaggctgaaaatgtgcatattccatgactcaggattttatctcctagatatatattcaacagaaatgcatgagtatgtgcaccaacaggcatgacaaaaatatttatagtagtggtgttcacaatagtcccaaactggaaacccaagtgtccatctccatcggaaca

SEQ ID NO: 11845 - DNA, 1217 bp, Homo sapiens
  source 1..1217: mol_type = unassigned DNA
atggcatcagaactggcaatgagcaactccgacctgcccaccagtcccctggccatggaatatgttaatgacttcgatctgatgaagtttgaagtgaaaaaggaaccggtggagaccgaccgcatcatcagccagtgcggccgtctcatcgccgggggctcgctgtcctccacccccatgagcacgccgtgcagctcggtgcccccttcccccagcttctcggcgcccagcccgggctcgggcagcgagcagaaggcgcacctggaagactactactggatgaccggctacccgcagcagctgaaccccgaggcgctgggcttcagccccgaggacgcggtcgaggcgctcatcagcaacagccaccagctccagggcggcttcgatggctacgcgcgcggggcgcagcagctggccgcggcggccggggccggtgccggcgcctccttgggcggcagcggcgaggagatgggccccgccgccgccgtggtgtccgccgtgatcgccgcggccgccgcgcagagcggcgcgggcccgcactaccaccaccaccaccaccacgccgccggccaccaccaccacccgacggccggcgcgcccggcgccgcgggcagcgcggccgcctcggccggtggcgctgggggcgcgggcggcggtggcccggccagcgctgggggcggcggcggcggcggcggcggcggaggcggcgggggcgcggcgggggcggggggcgccctgcacccgcaccacgccgccggcggcctgcacttcgacgaccgcttctccgacgagcagctggtgaccatgtctgtgcgcgagctgaaccggcagctgcgcggggtcagcaaggaggaggtgatccggctgaagcagaagaggcggaccctgaaaaaccgcggctatgcccagtcctgccgcttcaagagggtgcagcagagacacgtcctggagtcggagaagaaccagctgctgcagcaagtcgaccacctcaagcaggagatctccaggctggtgcgcgagagggacgcgtacaaggagaaatacgagaagttggtgagcagcggcttccgagaaaacggctcgagcagcgacaacccgtcctctcccgagtttttcatgtacccaagggaatcctctacatcagtgatgtgaaaaaatccagttgcctgaagtcaaagaggtacatcttgatttttgatttgcatgtgcttgagttt

SEQ ID NO: 11846 - DNA, 2646 bp, Homo sapiens
  source 1..2646: mol_type = unassigned DNA
atcttttttcatcttctagctgtagctcgggctgcttgtcggcttggcctccccctcccccctttgctctctgcctcgtctttccccaggacttcgctattttgcttttttaaaaaaaggcaagaaagaactaaactcccccctccctctcctccagtcgggctgcacctctgccttgcactttgcacagaggtagagagcgcgcgagggagagagaggaaagaaaaaaaataataaagagagccaagcagaagaggaggcgagaagcatgaagtgttaactcccccgtgccaaggcccgcgccgcccggacagacgcccgccgcgcctccagccccgagcggacgccgcgcgcgccctgcctgcagcccgggccggcgaggcgagcccttccttatgcaaagcgcgcagcggagcggcgagcgggggacgccgcgcaccgggccgggctcctccagcttcgccgccgcagccaccaccgccgccaccgcagctcgcggaggatcttcccgagcctgaagccgccggctcggcgcgcaaggaggcgagcgagcaaggaggggccggggcgagcgagggagcacattggcgtgagcaggggggagggagggcgggcgcggggggcgcgggcagggcgggggggtgtgtgtgtgagcgcgctcggaggtttcgggccagccaccgccgcgcaagctagaagcgccccagcccggcaagctggctcacccgctggccacccagcacagcccgctggcccctctcctgcagcccatctggcggagcggcggcggcggcggcggcggcggcaggagaatggcatcagaactggcaatgagcaactccgacctgcccaccagtcccctggccatggaatatgttaatgacttcgatctgatgaagtttgaagtgaaaaaggaaccggtggagaccgaccgcatcatcagccagtgcggccgtctcatcgccgggggctcgctgtcctccacccccatgagcacgccgtgcagctcggtgcccccttcccccagcttctcggcgcccagcccgggctcgggcagcgagcagaaggcgcacctggaagactactactggatgaccggctacccgcagcagctgaaccccgaggcgctgggcttcagccccgaggacgcggtcgaggcgctcatcagcaacagccaccagctccagggcggcttcgatggctacgcgcgcggggcgcagcagctggccgcggcggccggggccggtgccggcgcctccttgggcggcagcggcgaggagatgggccccgccgccgccgtggtgtccgccgtgatcgccgcggccgccgcgcagagcggcgcgggcccgcactaccaccaccaccaccaccacgccgccggccaccaccaccacccgacggccggcgcgcccggcgccgcgggcagcgcggccgcctcggccggtggcgctgggggcgcgggcggcggtggcccggccagcgctgggggcggcggcggcggcggcggcggcggaggcggcgggggcgcggcgggggcggggggcgccctgcacccgcaccacgccgccggcggcctgcacttcgacgaccgcttctccgacgagcagctggtgaccatgtctgtgcgcgagctgaaccggcagctgcgcggggtcagcaaggaggaggtgatccggctgaagcagaagaggcggaccctgaaaaaccgcggctatgcccagtcctgccgcttcaagagggtgcagcagagacacgtcctggagtcggagaagaaccagctgctgcagcaagtcgaccacctcaagcaggagatctccaggctggtgcgcgagagggacgcgtacaaggagaaatacgagaagttggtgagcagcggcttccgagaaaacggctcgagcagcgacaacccgtcctctcccgagtttttcataactgagcccactcgcaagttggagccatcagtgggatacgccacattttggaagccccagcatcgtgtacttaccagtgtgttcacaaaatgaaatttgtgtgagagctgtacattaaaaaaaatcatcattattattattatttgcagtcatggagaaccacctacccctgacttctgtttagtctcctttttaaataaaaattactgtgttagagaagaaggctattaaatgtagtagttaactatgcctcttgtctgggggtttcatagagaccggtaggaaagcgcactcctgcttttcgatttatggtgtgtgcaagtaaacaggtgcattgctttcaacctgccatactagttttaaaaattcactgaaattacaaagatacatatatatgcatatatataatggaaagtttcccggaatgcaacaattagcattttaaaatcatatataggcatgcacattctaaatagtactttttcatgcttcattgtttctctggcagataattttactaagaagaaaaatagatattcgactccccttccctaaacaaatccacgggcagaggctccagcggagccgagccccctggttttctcgtaggccctagacggtgttgcatttatcagtgatgtcaaacgtgctcatttgtcagacatagctgtaaatgaaaacaatgtgtggcaaaatacaaagttagttaaataca

SEQ ID NO: 11847 - DNA, 6384 bp, Homo sapiens
  source 1..6384: mol_type = unassigned DNA
atcttttttcatcttctagctgtagctcgggctgcttgtcggcttggcctccccctcccccctttgctctctgcctcgtctttccccaggacttcgctattttgcttttttaaaaaaaggcaagaaagaactaaactcccccctccctctcctccagtcgggctgcacctctgccttgcactttgcacagaggtagagagcgcgcgagggagagagaggaaagaaaaaaaataataaagagagccaagcagaagaggaggcgagaagcatgaagtgttaactcccccgtgccaaggcccgcgccgcccggacagacgcccgccgcgcctccagccccgagcggacgccgcgcgcgccctgcctgcagcccgggccggcgaggcgagcccttccttatgcaaagcgcgcagcggagcggcgagcgggggacgccgcgcaccgggccgggctcctccagcttcgccgccgcagccaccaccgccgccaccgcagctcgcggaggatcttcccgagcctgaagccgccggctcggcgcgcaaggaggcgagcgagcaaggaggggccggggcgagcgagggagcacattggcgtgagcaggggggagggagggcgggcgcggggggcgcgggcagggcgggggggtgtgtgtgtgagcgcgctcggaggtttcgggccagccaccgccgcgcaagctagaagcgccccagcccggcaagctggctcacccgctggccacccagcacagcccgctggcccctctcctgcagcccatctggcggagcggcggcggcggcggcggcggcggcaggagaatggcatcagaactggcaatgagcaactccgacctgcccaccagtcccctggccatggaatatgttaatgacttcgatctgatgaagtttgaagtgaaaaaggaaccggtggagaccgaccgcatcatcagccagtgcggccgtctcatcgccgggggctcgctgtcctccacccccatgagcacgccgtgcagctcggtgcccccttcccccagcttctcggcgcccagcccgggctcgggcagcgagcagaaggcgcacctggaagactactactggatgaccggctacccgcagcagctgaaccccgaggcgctgggcttcagccccgaggacgcggtcgaggcgctcatcagcaacagccaccagctccagggcggcttcgatggctacgcgcgcggggcgcagcagctggccgcggcggccggggccggtgccggcgcctccttgggcggcagcggcgaggagatgggccccgccgccgccgtggtgtccgccgtgatcgccgcggccgccgcgcagagcggcgcgggcccgcactaccaccaccaccaccaccacgccgccggccaccaccaccacccgacggccggcgcgcccggcgccgcgggcagcgcggccgcctcggccggtggcgctgggggcgcgggcggcggtggcccggccagcgctgggggcggcggcggcggcggcggcggcggaggcggcgggggcgcggcgggggcggggggcgccctgcacccgcaccacgccgccggcggcctgcacttcgacgaccgcttctccgacgagcagctggtgaccatgtctgtgcgcgagctgaaccggcagctgcgcggggtcagcaaggaggaggtgatccggctgaagcagaagaggcggaccctgaaaaaccgcggctatgcccagtcctgccgcttcaagagggtgcagcagagacacgtcctggagtcggagaagaaccagctgctgcagcaagtcgaccacctcaagcaggagatctccaggctggtgcgcgagagggacgcgtacaaggagaaatacgagaagttggtgagcagcggcttccgagaaaacggctcgagcagcgacaacccgtcctctcccgagtttttcatgtgagtctgacacgcgattccagctagccaccctgataagtgctccgcgggggtccggctcgggtgtgggcttgctagttctagagccatgctcgccaccacctcaccacccccacccccaccgagtttggcccccttggccccctacacacacacaaacccgcacgcacacaccacacacacacacacacacacacacacaccccacaccctgctcgagtttgtggtggtggtggctgttttaaactggggagggaatgggtgtctggctcatggattgccaatctgaaattctccataacttgctagcttgttttttttttttttttacacccccccgccccacccccggacttgcacaatgttcaatgatctcagcagagttcttcatgtgaaacgttgatcacctttgaagcctgcatcattcacatattttttcttcttcttccccttcagttcatgaactggtgttcattttctgtgtgtgtgtgtgttttattttgtttggatttttttttttaattttacttttagagcttgctgtgttgcccaccttttttccaacctccaccctcactccttctcaacccatctcttccgagatgaaagaaaaaaaaaagcaaagtttttttttcttctcctgagttcttcatgtgagattgagcttgcaaaggaaaaaaaaatgtgaaatgttatagacttgcagcgtgccgagttccatcgggttttttttttagcattgttatgctaaaatagagaaaaaaatcctcatgaaccttccacaatcaagcctgcatcaaccttctgggtgtgacttgtgagttttggccttgtgatgccaaatctgagagtttagtctgccattaaaaaaactcattctcatctcatgcattattatgcttgctactttgtcttagcaacaatgaactataactgtttcaaagactttatggaaaagagacattatattaataaaaaaaaaaagcctgcatgctggacatgtatggtataattattttttcctttttttttccttttggcttggaaatggacgttcgaagacttatagcatggcattcatacttttgttttattgcctcatgacttttttgagtttagaacaaaacagtgcaaccgtagagccttcttcccatgaaattttgcatctgctccaaaactgctttgagttactcagaacttcaacctcccaatgcactgaaggcattccttgtcaaagataccagaatgggttacacatttaacctggcaaacattgaagaactcttaatgttttctttttaataagaatgacgccccactttggggactaaaattgtgctattgccgagaagcagtctaaaatttattttttaaaaagagaaactgccccattatttttggtttgttttatttttattttatattttttggcttttggtcattgtcaaatgtggaatgctctgggtttctagtatataatttaattctagtttttataatctgttagcccagttaaaatgtatgctacagataaaggaatgttatagataaatttgaaagagttaggtctgtttagctgtagattttttaaacgattgatgcactaaattgtttactattgtgatgttaaggggggtagagtttgcaaggggactgtttaaaaaaagtagcttatacagcatgtgcttgcaacttaaatataagttgggtatgtgtagtctttgctataccactgactgtattgaaaaccaaagtattaagaggggaaacgcccctgtttatatctgtaggggtattttacattcaaaaatgtatgtttttttttcttttcaaaattaaagtatttgggactgaattgcactaagatataacctgcaagcatataatacaaaaaaaaattgcaaaactgtttagaacgctaataaaatttatgcagttataaaaatggcattactgcacagttttaagatgatgcagatttttttacagttgtattgtggtgcagaactggattttctgtaacttaaaaaaaaatccacagttttaaaggcaataatcagtaaatgttattttcagggactgacatcctgtctttaaaaagaaatgaaaagtaaatcttaccacaataaatataaaaaaatcttgtcagttacttttcttttacatattttgctgtgcaaaattgttttatatcttgagttactaactaaccacgcgtgttgttcctatgtgcttttctttcattttcaattctggttatatcaagaaaagaataatctacaataataaacggcatttttttttgattctgtactcagtttcttagtgtacagtttaactgggcccaacaacctcgttaaaagtgtaaaatgcatccttttctccagtggaaggattcctggaggaatagggagacagtaattcagggtgaaattataggctgttttttgaagtgaggaggctggccccatatactgattagcaatatttaatatagatgtaaattatgacctcatttttttctccccaaagttttcagttttcaaatgagttgagccataattgcccttggtaggaaaaacaaaacaaaacagtggaactaggcttcctgagcatggccctacacttctgatcaggagcaaagccatccatagacagaggagccggacaaatatggcgcatcagaggtggcttgcgcacatatgcattgaacggtaaagagaaacagcgcttgccttttcactaaagttgactatttttccttcttctcttacacaccgagattttcttgttagcaaggcctgacaagatttaacataaacatgacaaatcatagttgtttgttttgttttgcttttctctttaacactgaagatcatttgtcttaaataggaaaaagaaaatccactccttacttccatatttccaagtacatatctggtttaaactatgttatcaaatcatatttcaccgtgaatattcagtggagaacttctctacctggatgagctagtaatgatttcagatcatgctatccccagaaataaaagcaaaaaataatacctgtgtggaatataggctgtgctttgatttactggtatttaccccaaaataggctgtgtatgggggctgacttaaagatcccttggaaagactcaaaactaccttcactagtaggactcctaagcgctgacctatttttaaatgacacaaattcatgaaactaatgttacaaattcatgcagtttgcactcttagtcatcttcccctagcacaccaatagaatgttagacaaagccagcactgttttgaaaatacagccaaacacgatgacttttgttttgttttctgccgttcttaaaagaaaaaaagataatattgcaactctgactgaaagacttatttttaagaaaacaggttgtgtttggtgctgctaagttctggccagtttatcatctggccttcctgcctattttttacaaaacacgaagacagtgtgtaacctcgacattttgaccttcctttatgtgctagtttagacaggctcctgaatccacacttaattttgcttaacaaaagtcttaatagtaaacctcccctcatgagcttgaagtcaagtgttcttgacttcagatatttctttcctttttttttttttttcctcatcacaactaagagatacacaaactctgaagaagcagaaatggagagaatgcttttaacaaaaaagcatctgatgaaagattttaggcaaacattctcaaaataagagtgatattctggatgtagttattgcagttatctcatgacaaatgaggcctggattggaaggaaaatatagttgtgtagaattaagcattttgataggaatctacaaggtagttgaatataataagcaggtttgggcccccaaactttagaaaatcaaatgcaaaggtgctggcaaaaatgaggtttgagtggctggctgtaagagaaggttaactcctagtaaaaggcatttttagaaataacaattactgaaaactttgaagtatagtgggagtagcaaacaaatacatgttttttttttcttacaaagaactcctaaatcctgagtaagtgccattcattacaataagtctctaaatttaaaaaaaaaaaaatcatatgaggaaatctagctttcccctttacgctgcgtttgatctttgtctaaatagtgttaaaattcctttcattccaattacagaactgagcccactcgcaagttggagccatcagtgggatacgccacattttggaagccccagcatcgtgtacttaccagtgtgttcacaaaatgaaatttgtgtgagagctgtacattaaaaaaaatcatcattattattattatttgcagtcatggagaaccacctacccctgacttctgtttagtctcctttttaaataaaaattactgtgttagagaagaa

SEQ ID NO: 11848 - DNA, 3284 bp, Homo sapiens
  source 1..3284: mol_type = unassigned DNA
ggcaacatggcaaaaccctgtctctacaaaaaaaaaaaaaaaaaaaaaaaaaaaaaaatacaaaaaatgaacctagcatggtggtgtgtgcttatggtcccagctacttgggaggctaaggtgggagaatggctggagtccaggagaaggaggttgcagtgagccgagattgtgccactgcactccagcctgggtgacagagtgagaccctgtctcgaaaaaaaaaaaaaaattcagaggtgaagactgctttaaccagggtggtcaggaaatgtctctctgaggcagtgacatccgggctgacgtgaaagatgagaaagagtcaggcaagtgaacagaagaccagacagccagtgccaagggcctgtcgcaggaatgagcttggtatgtttgggggacagaaagaagggcactgtggccgaagagcagtggatgaggagagagtggccaaagaaggtgtgtaaacaacctgagctttgttttgagaagaacattggctggtatagaaagaaagactttggaggcaaagtagggagcctcggaggctgctgccattgtccgggtaagctgatggtgccgagaccaggtgccatgactggaggtggtgagaaatggtcctatgcaggagacctggagacaccgctagcttgagtcctgaggtggggaggaagggagagggagggatggagccaggctccaaggttttggcttgagcagctgagatggggtggcaagggagcagaggtagggctgacgatcaggagcgggtttttgggccgagtcctctgcagtgcccatctgacacccactggatgcgcagagtgggcagctggctatgagtctggaactcagagaagctgttcgctccggaaatacaaacctggggctcatagccatataaatgtcatttaaagccacgggactggatgagatcattaaggcagaaggtctaggtcgaaagaagagggccaggaccactacctgtaaaatgagccaatgacacctacacccacggggctctcgcgaggtgtcacgtgaacgcacccagcgagccctggaaccaggcagagaatcgcggcagccccgggggcggggcttccagggggcggggtcatacgggggcggggccgagggaccaagcggccgctcctggccggagggcggccgggtcggtgacgtcaccgcatgactgggtttttatgaatgaaaggaatcctgtgagtgagtaattccgggaagctcgccttacaactccgcgcggcctcggccccctgcgccgcccgccccacaacaaaactcagcgcagcgctcccgggcgcccggttcagagcgacctgcggctcagagcggaggggagactgaccggagcgcggatcgggacagcggccgggacagcggcgagacgcgcgtgtgtgagcgcgccggaccaagcgggcccagaagcgggtgaggaacgcgggaccaggaggacggtgcgcgggaccccaaggcggcagggtttctgcgtcccgggatgcgcctggggtgggcgcccgggcccgatccgtcggggctcccggagctccatcgcccggacggctcggggcggggagaagggagcggccgtcccggggacgccgaggacggggccgaggccagctcgggggagtgggggtggagacggggccccttcccggggcgcgggcgggtaggcggcggcgccgggaggaaggggcagcgcaggccggcgatctccgcgtccgcccggcgggggcgggggcgctgtgctcctacgtgactcggtgggaacaggccctggcccggcgcccgcgggcggtgcgtgcgcggtttgtttacgtccgagggcgggcgtgtgttccctggcgggcggcctgggtatcctgcccggtgcgtgcgtgcgctgtgtacctcgggggcgtgtgtgcgtgtgttgtgcttgtgtgtgcgtgtccgcgcgcgcgctccctggggcctgtacaccagcagtgtgtacctcggagagggcgtgccctgggccggccaccggagtaaacgcggaacaaggacccgagcgaaggaagcggacccgtgcgtcttcgcacggggtctgggaattctggcccgggccgccccagtcctactacccggggctgtccgtccccggctctccccggagtttcccagggcctccgccacgtgaccccagtgtttgtctcccgcccagagcccgcgcccgcagccacagggtggggcaaggtatcaaagaccccacccagctgagctaggagtgagggatgtgagccacccccgcttggcaccccggtggatctggtaacaaagtgagttggagcccaggttcttgtccccagattttggggcttcctggggagggaagaaccaagggactctcgttcgtccccagggttgcccatcccctcagtcccatgagaacaggaagggccagaaaaccttgactgcaagggtgcggcgcagggagaggaccacaggcttttagctagtccgggttctggaggctgtacctgctaggtcgtggaggatggggcggagccggtttccgctctcctggtagtttcagttcacaagtgggactggtgagactagactgacctacagctggacgccggaagctagctgaggctctgagccagccgacagaccccgagtgccctcaccctgggccaggcagggtcagtaggcattggggatagaactctgactgcacggagggttaatgagtgaggggtggggcctgacctagccgccacccacccactcacccaatagccctgcagaaagcacctgtttgtcgtagccgcctgcaggatgggctgggggctagagattccttggtcttaatccaccttccccctccacccacccacccacggtctatggaattgtgggaggggagcaattgaacttgctagggtgaggaaccaatgatcttttgactttggatctttgaaccctgggtgagctctgctacagcagcccggaccctcagtattcccatctaccactgggaactaggtaacagccaggatggcaggatggtgggtagaagggggaagctctggaagtctgtgcagacagcgtattttccaggtgaattgtggaagagaaagcagggctgacagccccatgccaggagctgggggtacccaagagtaggtggggtttgagtcaggagggttggggccaggagcacaggaaccagacaggcccaccctcaaagctgggcaggaaacattacaaagtagggcctggggtcaggggatgagggg

SEQ ID NO: 11849 - DNA, 2490 bp, Homo sapiens
  source 1..2490: mol_type = unassigned DNA
acgggggcggggccgagggaccaagcggccgctcctggccggagggcggccgggtcggtgacgtcaccgcatgactgggtttttatgaatgaaaggaatcctgtgagtgagtaattccgggaagctcgccttacaactccgcgcggcctcggccccctgcgccgcccgccccacaacaaaactcagcgcagcgctcccgggcgcccggttcagagcgacctgcggctcagagcggaggggagactgaccggagcgcggatcgggacagcggccgggacagcggcgagacgcgcgtgtgtgagcgcgccggaccaagcgggcccagaagcgggtctgcagcccagagggcaccttctgcaaacatgtctgtggatcccctatccagcaaagctctaaagatcaagcgagagctgagcgagaacacgccgcacctgtcggacgaggcgctgatggggctgtcggtgcgcgagctgaaccggcatctgcgcgggctctccgccgaggaggtgacacggctcaagcagcggcgccgcacactcaaaaaccgtggctacgccgccagctgccgcgtgaagcgcgtgtgccagaaggaggagctgcagaagcagaagtcggagctggagcgcgaggtggacaagctggcgcgcgagaacgccgccatgcgcctggagctcgacgcgctgcgcggcaagtgcgaggcgctgcagggcttcgcgcgctccgtggccgccgcccgcgggcccgccacgctcgtggcgccggccagcgtcatcaccatcgtcaagtccaccccgggctcggggtctggccccgcccacggcccggaccccgcccacggcccggcctcctgctcctagtgcccgcccccgccatgcctcagccacgcccctccggcctcagctccctccccaaagtgcctgagcgccgcctctgtgcccaggtcccatttctctgcagcactggccccttggtgcacacacattcccttcgtgggccctgtcttcctcttgcagccccccaaactgggaccgaatgaccctgggaaggggaacttgggtaggttggggatggggcagaggtctggatctgggatcgcccttggctgaaagtttagcctttttagattgagagatacagagccggcttagagaacagctgttgggggagaagagggcacccctcatcttggaaactgctcttattgtgccaatatgccctccaaaccctcccaggattcaaagctaggtttggctgtctgtgacttacgggaccgtcctgctgagaaattgcactgaagagatgcccccacctctggttgggcctgggggtgcctggccttccgaaactaaaagagtgggtgggaagactagtgaaacccagttcacggatggggaaacaggcctgaggtcacatttcacttagtggttgtgttgggaccaaaacctgggtgtcctcactgctgccctgagtccagccatggttttcagggggacagtggacagggactcagaaatgtggtgggagggcctccctggcttgggagaccgctctctgcaagggagggggagagaagcagagggagagagaaggtgacacggatggaagagtgggaaggagctggcctggctcagccctaggctgtccctgcagccagggtgtccgggggctggccagtcagagaaagggggccatggactgctgtggcaaatagggagacaaggagacagaccctgcagtcctactacagtctggagtggggtcctaagaagaagggtcccacctcaacccctgtcagtgtccactgtggggtgggggctgacccctgcctttgattgtcattctcctgggaagcccagtctcagtccctcccccaacactgtccacactgcccctccccactgtttatttattgcacggatctaagttattctccccagccagagcccgagctcctgctccctgggaaaagtggcgtatggccctgagctgggctttatattttatatctgcaaataaatcacattttatcttatatttagggaaagccggagagcaacaacaaaaaatgtttaagccgggcgcggtggctcacatctgtaatcccagcactttgggagtccaaggagggggatcgcttgagtccaggagtttgagaccagcctggacaacatggtgaaaccccatctctacaaaaaatacaaaaattagccatgcatggtggctcatgcctgtagtcccagctacttgggaggctgaggcaggaggatcacttaagcccagaaggcagaggttgtagtgagctgagatcgcaccactgcactccagcctgggcaacatagcaaaatcctgtctcaaaaaaaaagttaaaaaatattgcccggctcctagaatttatttatttcctgacttacagcaagcgagttatcgtcttctgtattttgtagactttctaaataaagtcaaattctttctttttccacagagaataaa

SEQ ID NO: 11850 - DNA, 548 bp, Homo sapiens
  source 1..548: mol_type = unassigned DNA
ttccgggaagctcgccttacaactccgcgcggcctcggccccctgcgccgcccgccccacaacaaaactcagcgcagcgctcccgggcgcccggttcagagcgacctgcggctcagagcggaggggagactgaccggagcgcggatcgggacagcggccgggacagcggcgagacgcgcgtgtgtgagcgcgccggaccaagcgggcccagaagcggatcaagcgagagctgagcgagaacacgccgcacctgtcggacgaggcgctgatggggctgtcggtgcgcgagctgaaccggcatctgcgcgggctctccgccgaggaggtgacacggctcaagcagcggcgccgcacactcaaaaaccgtggctacgccgccagctgccgcgtgaagcgcgtgtgccagaaggaggagctgcagaagcagaagtcggagctggagcgcgaggtggacaagctggcgcgcgagaacgccgccatgcgcctggagctcgacgcgctgcgcggcaagtgcgaggcgctgcagggcttcgcgcgctccgtggccg

SEQ ID NO: 11851 - DNA, 697 bp, Homo sapiens
  source 1..697: mol_type = unassigned DNA
aaacgcggaacaaggacccgagcgaaggaagcggacccgtgcgtcttcgcacggggtctgggaattctggcccgggccgccccagtcctactacccggggctgtccgtccccggctctccccggagtttcccagggcctccgccacgtgaccccagtgtttgtctcccgcccagagcccgcgcccgcagccacagggtggggcaaggtatcaaagaccccacccagctgagctaggagtgagggatgtgagccacccccgcttggcaccccggtggatctggtaacaaagtctgcagcccagagggcaccttctgcaaacatgtctgtggatcccctatccagcaaagctctaaagatcaagcgagagctgagcgagaacacgccgcacctgtcggacgaggcgctgatggggctgtcggtgcgcgagctgaaccggcatctgcgcgggctctccgccgaggaggtgacacggctcaagcagcggcgccgcacactcaaaaaccgtggctacgccgccagctgccgcgtgaagcgcgtgtgccagaaggaggagctgcagaagcagaagtcggagctggagcgcgaggtggacaagctggcgcgcgagaacgccgccatgcgcctggagctcgacgcgctgcgcggcaagtgcgaggcgctgcagggcttcgcgcgctccgtggccgccgcccgcgg

SEQ ID NO: 11852 - DNA, 2325 bp, Homo sapiens
  source 1..2325: mol_type = unassigned DNA
cagaatggtcaaagaggacctcctgaggaggtgacattgggcaaagacctaaatgatgaggagtcaccatggggctagaacagtaaagagcacagcctgtgcacagctcccgcggctggaaggagccattcaaggaggcctgtggaccaatgtggagagaggaaggtggcaggtctgcagcccagagggcaccttctgcaaacatgtctgtggatcccctatccagcaaagctctaaagatcaagcgagagctgagcgagaacacgccgcacctgtcggacgaggcgctgatggggctgtcggtgcgcgagctgaaccggcatctgcgcgggctctccgccgaggaggtgacacggctcaagcagcggcgccgcacactcaaaaaccgtggctacgccgccagctgccgcgtgaagcgcgtgtgccagaaggaggagctgcagaagcagaagtcggagctggagcgcgaggtggacaagctggcgcgcgagaacgccgccatgcgcctggagctcgacgcgctgcgcggcaagtgcgaggcgctgcagggcttcgcgcgctccgtggccgccgcccgcgggcccgccacgctcgtggcgccggccagcgtcatcaccatcgtcaagtccaccccgggctcggggtctggccccgcccacggcccggaccccgcccacggcccggcctcctgctcctagtgcccgcccccgccatgcctcagccacgcccctccggcctcagctccctccccaaagtgcctgagcgccgcctctgtgcccaggtcccatttctctgcagcactggccccttggtgcacacacattcccttcgtgggccctgtcttcctcttgcagccccccaaactgggaccgaatgaccctgggaaggggaacttgggtaggttggggatggggcagaggtctggatctgggatcgcccttggctgaaagtttagcctttttagattgagagatacagagccggcttagagaacagctgttgggggagaagagggcacccctcatcttggaaactgctcttattgtgccaatatgccctccaaaccctcccaggattcaaagctaggtttggctgtctgtgacttacgggaccgtcctgctgagaaattgcactgaagagatgcccccacctctggttgggcctgggggtgcctggccttccgaaactaaaagagtgggtgggaagactagtgaaacccagttcacggatggggaaacaggcctgaggtcacatttcacttagtggttgtgttgggaccaaaacctgggtgtcctcactgctgccctgagtccagccatggttttcagggggacagtggacagggactcagaaatgtggtgggagggcctccctggcttgggagaccgctctctgcaagggagggggagagaagcagagggagagagaaggtgacacggatggaagagtgggaaggagctggcctggctcagccctaggctgtccctgcagccagggtgtccgggggctggccagtcagagaaagggggccatggactgctgtggcaaatagggagacaaggagacagaccctgcagtcctactacagtctggagtggggtcctaagaagaagggtcccacctcaacccctgtcagtgtccactgtggggtgggggctgacccctgcctttgattgtcattctcctgggaagcccagtctcagtccctcccccaacactgtccacactgcccctccccactgtttatttattgcacggatctaagttattctccccagccagagcccgagctcctgctccctgggaaaagtggcgtatggccctgagctgggctttatattttatatctgcaaataaatcacattttatcttatatttagggaaagccggagagcaacaacaaaaaatgtttaagccgggcgcggtggctcacatctgtaatcccagcactttgggagtccaaggagggggatcgcttgagtccaggagtttgagaccagcctggacaacatggtgaaaccccatctctacaaaaaatacaaaaattagccatgcatggtggctcatgcctgtagtcccagctacttgggaggctgaggcaggaggatcacttaagcccagaaggcagaggttgtagtgagctgagatcgcaccactgcactccagcctgggcaacatagcaaaatcctgtctcaaaaaaaaagttaaaaaatattgcccggctcctagaatttatttatttcctgacttacagcaagcgagttatcgtcttctgtattttgtagactttctaaataaagtcaaattctttctttttccacagag

SEQ ID NO: 11853 - DNA, 2365 bp, Homo sapiens
  source 1..2365: mol_type = unassigned DNA
cgggtcggtgacgtcaccgcatgactgggtttttatgaatgaaaggaatcctgtgagtgagtaattccgggaagctcgccttacaactccgcgcggcctcggccccctgcgccgcccgccccacaacaaaactcagcgcagcgctcccgggcgcccggttcagagcgacctgcggctcagagcggaggggagactgaccggagcgcggatcgggacagcggccgggacagcggcgagacgcgcgtgtgtgagcgcgccggaccaagcgggcccagaagcggatcaagcgagagctgagcgagaacacgccgcacctgtcggacgaggcgctgatggggctgtcggtgcgcgagctgaaccggcatctgcgcgggctctccgccgaggaggtgacacggctcaagcagcggcgccgcacactcaaaaaccgtggctacgccgccagctgccgcgtgaagcgcgtgtgccagaaggaggagctgcagaagcagaagtcggagctggagcgcgaggtggacaagctggcgcgcgagaacgccgccatgcgcctggagctcgacgcgctgcgcggcaagtgcgaggcgctgcagggcttcgcgcgctccgtggccgccgcccgcgggcccgccacgctcgtggcgccggccagcgtcatcaccatcgtcaagtccaccccgggctcggggtctggccccgcccacggcccggaccccgcccacggcccggcctcctgctcctagtgcccgcccccgccatgcctcagccacgcccctccggcctcagctccctccccaaagtgcctgagcgccgcctctgtgcccaggtcccatttctctgcagcactggccccttggtgcacacacattcccttcgtgggccctgtcttcctcttgcagccccccaaactgggaccgaatgaccctgggaaggggaacttgggtaggttggggatggggcagaggtctggatctgggatcgcccttggctgaaagtttagcctttttagattgagagatacagagccggcttagagaacagctgttgggggagaagagggcacccctcatcttggaaactgctcttattgtgccaatatgccctccaaaccctcccaggattcaaagctaggtttggctgtctgtgacttacgggaccgtcctgctgagaaattgcactgaagagatgcccccacctctggttgggcctgggggtgcctggccttccgaaactaaaagagtgggtgggaagactagtgaaacccagttcacggatggggaaacaggcctgaggtcacatttcacttagtggttgtgttgggaccaaaacctgggtgtcctcactgctgccctgagtccagccatggttttcagggggacagtggacagggactcagaaatgtggtgggagggcctccctggcttgggagaccgctctctgcaagggagggggagagaagcagagggagagagaaggtgacacggatggaagagtgggaaggagctggcctggctcagccctaggctgtccctgcagccagggtgtccgggggctggccagtcagagaaagggggccatggactgctgtggcaaatagggagacaaggagacagaccctgcagtcctactacagtctggagtggggtcctaagaagaagggtcccacctcaacccctgtcagtgtccactgtggggtgggggctgacccctgcctttgattgtcattctcctgggaagcccagtctcagtccctcccccaacactgtccacactgcccctccccactgtttatttattgcacggatctaagttattctccccagccagagcccgagctcctgctccctgggaaaagtggcgtatggccctgagctgggctttatattttatatctgcaaataaatcacattttatcttatatttagggaaagccggagagcaacaacaaaaaatgtttaagccgggcgcggtggctcacatctgtaatcccagcactttgggagtccaaggagggggatcgcttgagtccaggagtttgagaccagcctggacaacatggtgaaaccccatctctacaaaaaatacaaaaattagccatgcatggtggctcatgcctgtagtcccagctacttgggaggctgaggcaggaggatcacttaagcccagaaggcagaggttgtagtgagctgagatcgcaccactgcactccagcctgggcaacatagcaaaatcctgtctcaaaaaaaaagttaaaaaatattgcccggctcctagaatttatttatttcctgacttacagcaagcgagttatcgtcttctgtattttgtagactttctaaataaagtcaaattctttctttttccacag

SEQ ID NO: 11854 - DNA, 2216 bp, Homo sapiens
  source 1..2216: mol_type = unassigned DNA
agctgagctaggagtgagggatgtgagccacccccgcttggcaccccggtggatctggtaacaaagtctgcagcccagagggcaccttctgcaaacatgtctgtggatcccctatccagcaaagctctaaagatcaagcgagagctgagcgagaacacgccgcacctgtcggacgaggcgctgatggggctgtcggtgcgcgagctgaaccggcatctgcgcgggctctccgccgaggaggtgacacggctcaagcagcggcgccgcacactcaaaaaccgtggctacgccgccagctgccgcgtgaagcgcgtgtgccagaaggaggagctgcagaagcagaagtcggagctggagcgcgaggtggacaagctggcgcgcgagaacgccgccatgcgcctggagctcgacgcgctgcgcggcaagtgcgaggcgctgcagggcttcgcgcgctccgtggccgccgcccgcgggcccgccacgctcgtggcgccggccagcgtcatcaccatcgtcaagtccaccccgggctcggggtctggccccgcccacggcccggaccccgcccacggcccggcctcctgctcctagtgcccgcccccgccatgcctcagccacgcccctccggcctcagctccctccccaaagtgcctgagcgccgcctctgtgcccaggtcccatttctctgcagcactggccccttggtgcacacacattcccttcgtgggccctgtcttcctcttgcagccccccaaactgggaccgaatgaccctgggaaggggaacttgggtaggttggggatggggcagaggtctggatctgggatcgcccttggctgaaagtttagcctttttagattgagagatacagagccggcttagagaacagctgttgggggagaagagggcacccctcatcttggaaactgctcttattgtgccaatatgccctccaaaccctcccaggattcaaagctaggtttggctgtctgtgacttacgggaccgtcctgctgagaaattgcactgaagagatgcccccacctctggttgggcctgggggtgcctggccttccgaaactaaaagagtgggtgggaagactagtgaaacccagttcacggatggggaaacaggcctgaggtcacatttcacttagtggttgtgttgggaccaaaacctgggtgtcctcactgctgccctgagtccagccatggttttcagggggacagtggacagggactcagaaatgtggtgggagggcctccctggcttgggagaccgctctctgcaagggagggggagagaagcagagggagagagaaggtgacacggatggaagagtgggaaggagctggcctggctcagccctaggctgtccctgcagccagggtgtccgggggctggccagtcagagaaagggggccatggactgctgtggcaaatagggagacaaggagacagaccctgcagtcctactacagtctggagtggggtcctaagaagaagggtcccacctcaacccctgtcagtgtccactgtggggtgggggctgacccctgcctttgattgtcattctcctgggaagcccagtctcagtccctcccccaacactgtccacactgcccctccccactgtttatttattgcacggatctaagttattctccccagccagagcccgagctcctgctccctgggaaaagtggcgtatggccctgagctgggctttatattttatatctgcaaataaatcacattttatcttatatttagggaaagccggagagcaacaacaaaaaatgtttaagccgggcgcggtggctcacatctgtaatcccagcactttgggagtccaaggagggggatcgcttgagtccaggagtttgagaccagcctggacaacatggtgaaaccccatctctacaaaaaatacaaaaattagccatgcatggtggctcatgcctgtagtcccagctacttgggaggctgaggcaggaggatcacttaagcccagaaggcagaggttgtagtgagctgagatcgcaccactgcactccagcctgggcaacatagcaaaatcctgtctcaaaaaaaaagttaaaaaatattgcccggctcctagaatttatttatttcctgacttacagcaagcgagttatcgtcttctgtattttgtagactttctaaataaagtcaaattctttctttttccacag

SEQ ID NO: 11855 - DNA, 2458 bp, Homo sapiens
  source 1..2458: mol_type = unassigned DNA
cgggtcggtgacgtcaccgcatgactgggtttttatgaatgaaaggaatcctgtgagtgagtaattccgggaagctcgccttacaactccgcgcggcctcggccccctgcgccgcccgccccacaacaaaactcagcgcagcgctcccgggcgcccggttcagagcgacctgcggctcagagcggaggggagactgaccggagcgcggatcgggacagcggccgggacagcggcgagacgcgcgtgtgtgagcgcgccggaccaagcgggcccagaagcgggtgaggaacgcgggaccaggaggacggtctgcagcccagagggcaccttctgcaaacatgtctgtggatcccctatccagcaaagctctaaagatcaagcgagagctgagcgagaacacgccgcacctgtcggacgaggcgctgatggggctgtcggtgcgcgagctgaaccggcatctgcgcgggctctccgccgaggaggtgacacggctcaagcagcggcgccgcacactcaaaaaccgtggctacgccgccagctgccgcgtgaagcgcgtgtgccagaaggaggagctgcagaagcagaagtcggagctggagcgcgaggtggacaagctggcgcgcgagaacgccgccatgcgcctggagctcgacgcgctgcgcggcaagtgcgaggcgctgcagggcttcgcgcgctccgtggccgccgcccgcgggcccgccacgctcgtggcgccggccagcgtcatcaccatcgtcaagtccaccccgggctcggggtctggccccgcccacggcccggaccccgcccacggcccggcctcctgctcctagtgcccgcccccgccatgcctcagccacgcccctccggcctcagctccctccccaaagtgcctgagcgccgcctctgtgcccaggtcccatttctctgcagcactggccccttggtgcacacacattcccttcgtgggccctgtcttcctcttgcagccccccaaactgggaccgaatgaccctgggaaggggaacttgggtaggttggggatggggcagaggtctggatctgggatcgcccttggctgaaagtttagcctttttagattgagagatacagagccggcttagagaacagctgttgggggagaagagggcacccctcatcttggaaactgctcttattgtgccaatatgccctccaaaccctcccaggattcaaagctaggtttggctgtctgtgacttacgggaccgtcctgctgagaaattgcactgaagagatgcccccacctctggttgggcctgggggtgcctggccttccgaaactaaaagagtgggtgggaagactagtgaaacccagttcacggatggggaaacaggcctgaggtcacatttcacttagtggttgtgttgggaccaaaacctgggtgtcctcactgctgccctgagtccagccatggttttcagggggacagtggacagggactcagaaatgtggtgggagggcctccctggcttgggagaccgctctctgcaagggagggggagagaagcagagggagagagaaggtgacacggatggaagagtgggaaggagctggcctggctcagccctaggctgtccctgcagccagggtgtccgggggctggccagtcagagaaagggggccatggactgctgtggcaaatagggagacaaggagacagaccctgcagtcctactacagtctggagtggggtcctaagaagaagggtcccacctcaacccctgtcagtgtccactgtggggtgggggctgacccctgcctttgattgtcattctcctgggaagcccagtctcagtccctcccccaacactgtccacactgcccctccccactgtttatttattgcacggatctaagttattctccccagccagagcccgagctcctgctccctgggaaaagtggcgtatggccctgagctgggctttatattttatatctgcaaataaatcacattttatcttatatttagggaaagccggagagcaacaacaaaaaatgtttaagccgggcgcggtggctcacatctgtaatcccagcactttgggagtccaaggagggggatcgcttgagtccaggagtttgagaccagcctggacaacatggtgaaaccccatctctacaaaaaatacaaaaattagccatgcatggtggctcatgcctgtagtcccagctacttgggaggctgaggcaggaggatcacttaagcccagaaggcagaggttgtagtgagctgagatcgcaccactgcactccagcctgggcaacatagcaaaatcctgtctcaaaaaaaaagttaaaaaatattgcccggctcctagaatttatttatttcctgacttacagcaagcgagttatcgtcttctgtattttgtagactttctaaataaagtcaaattctttctttttccacag

SEQ ID NO: 11856 - DNA, 559 bp, Homo sapiens
  source 1..559: mol_type = unassigned DNA
aagtgggggcctagaccctggaaggcaggggactgcgagctgggctggcggagcagaggtgcagaagcaactgagtccaagttgtctggcggcttcaggtggacccagaagacgtccccaactcagggagattcagcctcccgagggggtcactggggtgcctggatgccctcgtccatctcggccttcgaaggcacgtgcgtctccatcccctgccgctttgacttcccggatgagctgcggcccgctgtggtgcatggtgtctggtacttcaatagcccctaccccaagaactaccccccggtggtcttcaagtcgcgcacccaagtagtccacgagagcttccagggccgcagccgcctcctgggggacctgggcctgcgaaactgcaccctcctgctcagcaacgtcagccccgagctgggcgggaagtactacttccgtggggacctgggcggctacaaccagtacaccttctcagagcacagcgtcctggatatcgtcaacacccccaacatcgtggtgcccccagaggtggtggcaggcacggaggtggagg

SEQ ID NO: 11857 - DNA, 2390 bp, Homo sapiens
  source 1..2390: mol_type = unassigned DNA
aagtgggggcctagaccctggaaggcaggggactgcgagctgggctggcggagcagaggtgcagaagcaactgagtccaagttgtctggcggcttcaggtggacccagaagacgtccccaactcagggagattcagcgatcactcactcgctgtacagaatgatattcctcacggcactgcctctgttctggattatgatttcagcctcccgagggggtcactggggtgcctggatgccctcgtccatctcggccttcgaaggcacgtgcgtctccatcccctgccgctttgacttcccggatgagctgcggcccgctgtggtgcatggtgtctggtacttcaatagcccctaccccaagaactaccccccggtggtcttcaagtcgcgcacccaagtagtccacgagagcttccagggccgcagccgcctcctgggggacctgggcctgcgaaactgcaccctcctgctcagcaacgtcagccccgagctgggcgggaagtactacttccgtggggacctgggcggctacaaccagtacaccttctcagagcacagcgtcctggatatcgtcaacacccccaacatcgtggtgcccccagaggtggtggcaggcacggaggtggaggtcagctgcatggtgccggacaactgcccagagctgcgccctgagctgagctggctgggccacgaggggctgggggagcccgctgtgctgggccggctgcgggaggacgagggcacctgggtgcaggtgtcactgctgcacttcgtgcccacgagggaggccaacggccacaggctgggctgccaggcctccttccccaacaccaccctgcagttcgagggctacgccagcatggacgtcaagtaccccccggtgattgtggagatgaactcctcggtggaggccatcgagggctcccacgtgagcctgctctgtggggctgacagcaaccccccgccgctgctgacctggatgcgggacgggacagtcctccgggaggcggtggccgagagcctgctcctggagctggaggaggtgacccccgccgaagacggcgtctatgcctgcctggccgagaatgcctatggccaggacaaccgcaccgtggggctcagtgtcatgtatgcaccctggaagccaacagtgaacgggacaatggtggccgtagagggggagacggtctctatcttgtgctccacacagagcaacccggaccctattctcaccatcttcaaggagaagcagatcctgtccacggtcatctacgagagcgagctgcagctggagctgccggccgtgtcacccgaggatgatggagagtactggtgtgtggctgagaaccagtatggccagagggccaccgccttcaacctgtctgtggagttcgcccctgtgctcctcctggagtcccactgcgcggcagcccgagacacggtgcagtgcctgtgcgtggtgaagtccaacccggagccgtccgtggcctttgagctgccatcgcgcaatgtgaccgtgaacgagagcgagcgggagttcgtgtactcggagcgcagcggcctcgtgctcaccagcatcctcacgctgcgggggcaggcccaggccccgccccgcgtcatctgcaccgcgaggaacctctatggcgccaagagcctggagctgcccttccagggagcccatcgactgatgtgggccaagatcgggcctgtgggcgccgtggtcgcctttgccatcctgattgccatcgtctgctacattacccagacacgcaggaaaaagaacgtgacagagagccccagcttctcggcaggggacaaccctcccgtcctgttcagcagcgacttccgcatctctggggcaccagagaagtacgagagcgagaggcgcctgggatctgagaggaggctgctgggccttcggggtgagcccccagagctggacctgagctattctcactcggacctggggaaacggcccaccaaggacagctacacgctgacggaggagctagctgagtatgctgaaatccgggtcaagtgaaggagctgggggcagcctgcgtggctgacccccctcaggaccctcgctggcccccactggctgtgggctcccttcctcccaaaagtatcgggggctggggcaggaggggagtgaggcaggtgacagtgaggtcctgggggcctgacctccccctccttcccagctgcccctccctgccagcacccccacgccctcattacggctcctctctaacctcctttaccctcatctgtctggaggggagctctgtctgtccgtgttatttattgctacttcctgcctggtctcctgcccccacacctggccctggggcctgtacaaaagggacatgaaataaatgccccaaagcc

SEQ ID NO: 11858 - DNA, 2426 bp, Homo sapiens
  source 1..2426: mol_type = unassigned DNA
cctagaccctggaaggcaggggactgcgagctgggctggcggagcagaggtgcagaagcaactgagtccaagttgtctggcggcttcaggtggacccagaagacgtccccaactcagggagattcagcgatcactcactcgctgtacagaatgatattcctcacggcactgcctctgttctggattatgatttcagcctcccgagggggtcactggggtgcctggatgccctcgtccatctcggccttcgaaggcacgtgcgtctccatcccctgccgctttgacttcccggatgagctgcggcccgctgtggtgcatggtgtctggtacttcaatagcccctaccccaagaactaccccccggtggtcttcaagtcgcgcacccaagtagtccacgagagcttccagggccgcagccgcctcctgggggacctgggcctgcgaaactgcaccctcctgctcagcaacgtcagccccgagctgggcgggaagtactacttccgtggggacctgggcggctacaaccagtacaccttctcagagcacagcgtcctggatatcgtcaacacccccaacatcgtggtgcccccagaggtggtggcaggcacggaggtggaggtcagctgcatggtgccggacaactgcccagagctgcgccctgagctgagctggctgggccacgaggggctgggggagcccgctgtgctgggccggctgcgggaggacgagggcacctgggtgcaggtgtcactgctgcacttcgtgcccacgagggaggccaacggccacaggctgggctgccaggcctccttccccaacaccaccctgcagttcgagggctacgccagcatggacgtcaagtaccccccggtgattgtggagatgaactcctcggtggaggccatcgagggctcccacgtgagcctgctctgtggggctgacagcaaccccccgccgctgctgacctggatgcgggacgggacagtcctccgggaggcggtggccgagagcctgctcctggagctggaggaggtgacccccgccgaagacggcgtctatgcctgcctggccgagaatgcctatggccaggacaaccgcaccgtggggctcagtgtcatgtatgcaccctggaagccaacagtgaacgggacaatggtggccgtagagggggagacggtctctatcttgtgctccacacagagcaacccggaccctattctcaccatcttcaaggagaagcagatcctgtccacggtcatctacgagagcgagctgcagctggagctgccggccgtgtcacccgaggatgatggagagtactggtgtgtggctgagaaccagtatggccagagggccaccgccttcaacctgtctgtggagttcgcccctgtgctcctcctggagtcccactgcgcggcagcccgagacacggtgcagtgcctgtgcgtggtgaagtccaacccggagccgtccgtggcctttgagctgccatcgcgcaatgtgaccgtgaacgagagcgagcgggagttcgtgtactcggagcgcagcggcctcgtgctcaccagcatcctcacgctgcgggggcaggcccaggccccgccccgcgtcatctgcaccgcgaggaacctctatggcgccaagagcctggagctgcccttccagggagcccatcgactgatgtgggccaagatcgggcctgtgggcgccgtggtcgcctttgccatcctgattgccatcgtctgctacattacccagacacgcaggaaaaagaacgtgacagagagccccagcttctcggcaggggacaaccctcccgtcctgttcagcagcgacttccgcatctctggggcaccagagaagtacgagtccaaagaggtttctaccctggaatctcactgagtgccccaggagagcgagaggcgcctgggatctgagaggaggctgctgggccttcggggtgagcccccagagctggacctgagctattctcactcggacctggggaaacggcccaccaaggacagctacacgctgacggaggagctagctgagtatgctgaaatccgggtcaagtgaaggagctgggggcagcctgcgtggctgacccccctcaggaccctcgctggcccccactggctgtgggctcccttcctcccaaaagtatcgggggctggggcaggaggggagtgaggcaggtgacagtgaggtcctgggggcctgacctccccctccttcccagctgcccctccctgccagcacccccacgccctcattacggctcctctctaacctcctttaccctcatctgtctggaggggagctctgtctgtccgtgttatttattgctacttcctgcctggtctcctgcccccacacctggccctggggcctgtacaaaagggacatgaaataaatgccccaaagcc

SEQ ID NO: 11859 - DNA, 585 bp, Homo sapiens
  source 1..585: mol_type = unassigned DNA
actgcgagctgggctggcggagcagaggtgcagaagcaactgagtccaagtggacccagaagacgtccccaactcagggagattcagcgatcactcactcgctgtacagaatgatattcctcacggcactgcctctgttctggattatgatttcagcctcccgagggggtcactggggtgcctggatgccctcgtccatctcggccttcgaaggcacgtgcgtctccatcccctgccgctttgacttcccggatgagctgcggcccgctgtggtgcatggtgtctggtacttcaatagcccctaccccaagaactaccccccggtggtcttcaagtcgcgcacccaagtagtccacgagagcttccagggccgcagccgcctcctgggggacctgggcctgcgaaactgcaccctcctgctcagcaacgtcagccccgagctgggcgggaagtactacttccgtggggacctgggcggctacaaccagtacaccttctcagagcacagcgtcctggatatcgtcaacacccccaacatcgtggtgcccccagaggtggtggcaggcacggaggtggaggtcagct

SEQ ID NO: 11860 - DNA, 542 bp, Homo sapiens
  source 1..542: mol_type = unassigned DNA
gagctgggctggcggagcagaggtgcagaagcaactgagtccaagttgtctggcggcttcaggtggacccagaagacgtccccaactcagggagattcagcgatcactcactcgctgtacagaatgatattcctcacggcactgcctctgttctggattatgatttcagcctcccgagggggtcactggggtgcctggatgccctcgtccatctcggccttcgaaggcacgtgcgtctccatcccctgccgctttgacttcccggatgagctgcggcccgctgtggtgcatggtgtctgacacccccaacatcgtggtgcccccagaggtggtggcaggcacggaggtggaggtcagctgcatggtgccggacaactgcccagagctgcgccctgagctgagctggctgggccacgaggggctgggggagcccgctgtgctgggccggctgcgggaggacgagggcacctgggtgcaggtgtcactgctgcacttcgtgcccacgagggaggccaacggccacaggctgggctgccaggcct

SEQ ID NO: 11861 - DNA, 2341 bp, Homo sapiens
  source 1..2341: mol_type = unassigned DNA
gagctgggctggcggagcagaggtgcagaagcaactgagtccaagttgtctggcggcttcaggtggacccagaagacgtccccaactcagggagattcaggtaacggctgacaggtgctggggacctaaaggctttggcccctgagcaggttggagcctcccgagggggtcactggggtgcctggatgccctcgtccatctcggccttcgaaggcacgtgcgtctccatcccctgccgctttgacttcccggatgagctgcggcccgctgtggtgcatggtgtctggtacttcaatagcccctaccccaagaactaccccccggtggtcttcaagtcgcgcacccaagtagtccacgagagcttccagggccgcagccgcctcctgggggacctgggcctgcgaaactgcaccctcctgctcagcaacgtcagccccgagctgggcgggaagtactacttccgtggggacctgggcggctacaaccagtacaccttctcagagcacagcgtcctggatatcgtcaacacccccaacatcgtggtgcccccagaggtggtggcaggcacggaggtggaggtcagctgcatggtgccggacaactgcccagagctgcgccctgagctgagctggctgggccacgaggggctgggggagcccgctgtgctgggccggctgcgggaggacgagggcacctgggtgcaggtgtcactgctgcacttcgtgcccacgagggaggccaacggccacaggctgggctgccaggcctccttccccaacaccaccctgcagttcgagggctacgccagcatggacgtcaagtaccccccggtgattgtggagatgaactcctcggtggaggccatcgagggctcccacgtgagcctgctctgtggggctgacagcaaccccccgccgctgctgacctggatgcgggacgggacagtcctccgggaggcggtggccgagagcctgctcctggagctggaggaggtgacccccgccgaagacggcgtctatgcctgcctggccgagaatgcctatggccaggacaaccgcaccgtggggctcagtgtcatgtatgcaccctggaagccaacagtgaacgggacaatggtggccgtagagggggagacggtctctatcttgtgctccacacagagcaacccggaccctattctcaccatcttcaaggagaagcagatcctgtccacggtcatctacgagagcgagctgcagctggagctgccggccgtgtcacccgaggatgatggagagtactggtgtgtggctgagaaccagtatggccagagggccaccgccttcaacctgtctgtggagttcgcccctgtgctcctcctggagtcccactgcgcggcagcccgagacacggtgcagtgcctgtgcgtggtgaagtccaacccggagccgtccgtggcctttgagctgccatcgcgcaatgtgaccgtgaacgagagcgagcgggagttcgtgtactcggagcgcagcggcctcgtgctcaccagcatcctcacgctgcgggggcaggcccaggccccgccccgcgtcatctgcaccgcgaggaacctctatggcgccaagagcctggagctgcccttccagggagcccatcgactgatgtgggccaagatcgggcctgtgggcgccgtggtcgcctttgccatcctgattgccatcgtctgctacattacccagacacgcaggaaaaagaacgtgacagagagccccagcttctcggcaggggacaaccctcccgtcctgttcagcagcgacttccgcatctctggggcaccagagaagtacgagagcgagaggcgcctgggatctgagaggaggctgctgggccttcggggtgagcccccagagctggacctgagctattctcactcggacctggggaaacggcccaccaaggacagctacacgctgacggaggagctagctgagtatgctgaaatccgggtcaagtgaaggagctgggggcagcctgcgtggctgacccccctcaggaccctcgctggcccccactggctgtgggctcccttcctcccaaaagtatcgggggctggggcaggaggggagtgaggcaggtgacagtgaggtcctgggggcctgacctccccctccttcccagctgcccctccctgccagcacccccacgccctcattacggctcctctctaacctcctttaccctcatctgtctggaggggagctctgtctgtccgtgttatttattgctacttcctgcctggtctcctgcccccacacctggccctggggcctgtacaaaagggacatgaaataaatgccccaaagcc

SEQ ID NO: 11862 - DNA, 545 bp, Homo sapiens
  source 1..545: mol_type = unassigned DNA
aaggagtctccggggccgggcctcgcgttggctccgggccaccctcagacctgattttgcccctgcagtcgcccctgtgctcctcctggagtcccactgcgcggcagcccgagacacggtgcagtgcctgtgcgtggtgaagtccaacccggagccgtccgtggcctttgagctgccatcgcgcaatgtgaccgtgaacgagagcgagcgggagttcgtgtactcggagcgcagcggcctcgtgctcaccagcatcctcacgctgcgggggcaggcccaggccccgccccgcgtcatctgcaccgcgaggaacctctatggcgccaagagcctggagctgcccttccagggagcccatcgactgatgtgggccaagatcgggcctgtgggcgccgtggtcgcctttgccatcctgattgccatcgtctgctacattacccagacacgcaggaaaaagaacgtgacagagagccccagcttctcggcaggggacaaccctcccgtcctgttcagcagcgacttccgcatctctggggcaccagaga

SEQ ID NO: 11863 - DNA, 575 bp, Homo sapiens
  source 1..575: mol_type = unassigned DNA
atcgtctgctacattacccagacacgcaggaaaaagaacgtgacagagagccccagcttctcggcaggggacaaccctcccgtcctgttcagcagcgacttccgcatctctggggcaccagagaagtacgagtccaaagaggtttctaccctggaatctcactgagtgccccaggaggtaggttccgggggcctcagtgtgccctcctctgggccctccttgggccctggggttggcgtgcatgtccgtgtgtccctgtcaggcgtcaaggtggtctctggtgatgtccgggcctgcccggcagtgctggccttgtctagtctgtcctgttgcagctcccttctgtctgtggccaccgtcctgtgtgtccaaattcctgtggctagggggtggagggaggggtgggaagcgtggggggaacccacatgtcacctgcaggacctcccagattgagggcggacccatgcaggacccatgggggggcacgtaccaaaccaggtatttccaggaatttggaaagatggggtcctgactaggtggttttcacccaaaaaggtattaggggttacattgtg

SEQ ID NO: 11864 - DNA, 559 bp, Homo sapiens; identical to SEQ ID NO: 11856
  source 1..559: mol_type = unassigned DNA

SEQ ID NO: 11865 - DNA, 2390 bp, Homo sapiens; identical to SEQ ID NO: 11857
  source 1..2390: mol_type = unassigned DNA

SEQ ID NO: 11866 - DNA, 2426 bp, Homo sapiens; identical to SEQ ID NO: 11858
  source 1..2426: mol_type = unassigned DNA

SEQ ID NO: 11867 - DNA, 585 bp, Homo sapiens; identical to SEQ ID NO: 11859
  source 1..585: mol_type = unassigned DNA

SEQ ID NO: 11868 - DNA, 542 bp, Homo sapiens; identical to SEQ ID NO: 11860
  source 1..542: mol_type = unassigned DNA

SEQ ID NO: 11869 - DNA, 2341 bp, Homo sapiens; identical to SEQ ID NO: 11861
  source 1..2341: mol_type = unassigned DNA

SEQ ID NO: 11870 - DNA, 545 bp, Homo sapiens; identical to SEQ ID NO: 11862
  source 1..545: mol_type = unassigned DNA

SEQ ID NO: 11871 - DNA, 575 bp, Homo sapiens; identical to SEQ ID NO: 11863
  source 1..575: mol_type = unassigned DNA

SEQ ID NO: 11872 - DNA, 3911 bp, Homo sapiens
  source 1..3911: mol_type = unassigned DNA
ctcctggggacaattcccttttcctttcttcagcctaacccgcggtggccctcgcggagtccggtcagccccggggagcgcagccgggaggggcgtccaaggggcgtctcgcgtctgggaacggccgggcccccagcgggctgtggtcgcggggtgggggccggagcggcgaggccccccttaccgggctgcgcgggccgcccagggcccccgggctgagacggggccggagcggcgccccggccgcccgcgcggggtctcccccatggtgcagcggggttcgggatgtcgaagacgctgaagaagaagaagcactggctcagcaaggtgcaggagtgcgccgtgtcctgggccgggcccccgggcgacttcggcgcggagatccgcggtggcgcggagcgtggcgagttcccctacctggggcggctccgcgaggagcccggcgggggcacctgctgcgtcgtctcgggcaaggcgcccagcccaggcgatgtgctgctggaggtaaacgggacgcctgtcagcgggctcaccaaccgggacaccctggctgtcatccgccacttccgcgagcccatccgtctcaagactgtgaaaccaggcaaagtcattaataaagatttgcggcattacctaagtcttcagtttcaaaaaggatcaattgaccacaaactgcagcaagtgatcagagataatctctacttgagaaccattccatgcactacaagggcccccagggatggagaagtaccaggagtggattataatttcatttccgttgaacagttcaaagcactggaagagagtggagcattgttagaaagtgggacatatgatggaaacttctatggaactcccaagcctccagcagaacccagcccttttcagccagatccagttgatcaagtcctctttgataatgagtttgatgcagaatctcaaagaaaacgaacgacatctgtcagcaagatggaaagaatggatagctctcttcctgaagaggaagaagatgaggacaaggaagctattaatggcagtggaaacgcagaaaacagagagaggcattctgagtcatctgactggatgaagactgttccaagttacaaccaaacaaatagctccatggactttagaaattatatgatgagagatgagactctggaaccactgcccaaaaactgggaaatggcctacactgacacagggatgatctacttcattgaccacaataccaagacaaccacctggttggatcctcgtctttgtaagaaagccaaagcccctgaagactgtgaagatggagagcttccttatggctgggagaaaatagaggaccctcagtatgggacatactatgttgatttcactcttgtcgcccaagctggagtgcaatggcatgatctcggctcactgcaacctccgcctcctgggttcaatcaccttaaccagaaaacccagtttgaaaatccagtggaggaagccaaaaggaaaaagcagttaggacaggttgaaattgggtcttcaaaaccagatatggaaaaatcacacttcacaagagatccatcccagcttaaaggtgtccttgttcgagcatcactgaaaaaaagcacaatgggatttggttttactattattggtggagatagacctgatgagttcctacaagtgaaaaatgtgctgaaagatggtcccgcagctcaggatgggaaaattgcaccaggcgatgttattgtagacatcaatggcaactgtgtcctcggtcacactcatgcagatgttgtccagatgtttcaattggtacctgtcaatcagtatgtaaacctcactttatgtcgtggttatccacttcctgatgacagtgaagatcctgttgtggacattgttgctgctacccctgtcatcaatggacagtcattaaccaagggagagacttgcatgaatcctcaggattttaagccaggagcaatggttctggagcagaatggaaaatcgggacacactttgactggtgatggtctcaatggaccatcagatgcaagtgagcagagagtatccatggcatcgtcaggcagctcccagcctgaactagtgactatccctttgattaagggccctaaagggtttgggtttgcaattgctgacagccctactggacagaaggtgaaaatgatactggatagtcagtggtgtcaaggccttcagaaaggagatataattaaggaaatataccatcaaaatgtgcagaatttaacacatctccaagtggtagaggtgctaaagcagtttccagtaggtgctgatgtaccattgcttatcttaagaggaggtcctccttcaccaaccaaaactgccaaaatgaaaacagataaaaaggaaaatgcaggaagtttggaggccataaatgagcctattcctcagcctatgccttttccaccgagcattatcaggtcaggatccccaaaattggatccttctgaggtctacctgaaatctaagactttatatgaagataaaccaccaaacaccaaagatttggatgtttttcttcgaaaacaagagtcagggtttggcttcagggtgctaggaggagatggacctgaccagtctatatatattggggctattattcccctgggagcagctgagaaagatggtcggctccgcgcagctgatgaactaatgtgcattgatggaattcctgttaaagggaaatcacacaaacaagtcttggacctcatgacaactgctgctcgaaatggccatgtgttactaactgtcagacggaagatcttctatggagaaaaacaacccgaggacgacagctctcaggccttcatttcaacacagaatggatctccccgcctgaaccgggcagaggtcccagccaggcctgcaccccaggagccctatgatgttgtcttgcaacgaaaagaaaatgaaggatttggctttgtcatcctcacctccaaaaacaaaccacctccaggagttattcctcataaaattggccgagtcatagaaggaagtccggctgaccgctgtggaaaactgaaagttggagatcatatctctgcagtgaatgggcagtccattgttgaactgtctcatgataacattgttcagctgatcaaagatgctggtgtcaccgtcacactaacggtcattgctgaagaagagcatcatggtccaccatcaggaacaaactcagccaggcaaagcccagccctgcagcacaggcccatgggacagtcacaggccaaccacatacctggggacagaagtgccctagaaggtgaaattggaaaagatgtctccacttcttacagacattcttggtcagaccacaagcaccttgcacagcctgacaccgcagtaatttcagttgtaggcagtcggcacaatcagaaccttggttgttatccagtagagctggagagaggcccccggggctttggattcagcctccgaggggggaaggagtacaacatggggctgttcatccttcgtcttgctgaagatggtcctgccatcaaagatggcagaattcatgttggtgaccagattgttgaaatcaatggggaacctacacaaggaatcacacatactcgagcaattgagctcattcaggctggtggaaataaagttcttcttcttttgaggccaggaactggcttgatacctgaccatggtttggctccttccggtctgtgctcctacgtgaaacccgagcaacattaaggctttcagggcttttcttggtctttccttaaaaagacttggtaaatttgcatgtcttgtaaatcactttcttcttttgttttcttttaaattaaaaatgatgctattaaatacatctatttctatcttctgcacttttcagtcttcttttgacattaaatttgacagcttaa

SEQ ID NO: 11873 - DNA, 6430 bp, Homo sapiens
  source 1..6430: mol_type = unassigned DNA
ccgggctgagacggggccggagcggcgccccggccgcccgcgcggggtctcccccatggtgcagcggggttcgggatgtcgaagacgctgaagaagaagaagcactggctcagcaaggtgcaggagtgcgccgtgtcctgggccgggcccccgggcgacttcggcgcggagatccgcggtggcgcggagcgtggcgagttcccctacctggggcggctccgcgaggagcccggcgggggcacctgctgcgtcgtctcgggcaaggcgcccagcccaggcgatgtgctgctggaggtaaacgggacgcctgtcagcgggctcaccaaccgggacaccctggctgtcatccgccacttccgcgagcccatccgtctcaagactgtgaaaccaggcaaagtcattaataaagatttgcggcattacctaagtcttcagtttcaaaaaggatcaattgaccacaaactgcagcaagtgatcagagataatctctacttgagaaccattccatgcactacaagggcccccagggatggagaagtaccaggagtggattataatttcatttccgttgaacagttcaaagcactggaagagagtggagcattgttagaaagtgggacatatgatggaaacttctatggaactcccaagcctccagcagaacccagcccttttcagccagatccagttgatcaagtcctctttgataatgagtttgatgcagaatctcaaagaaaacgaacgacatctgtcagcaagatggaaagaatggatagctctcttcctgaagaggaagaagatgaggacaaggaagctattaatggcagtggaaacgcagaaaacagagagaggcattctgagtcatctgactggatgaagactgttccaagttacaaccaaacaaatagctccatggactttagaaattatatgatgagagatgagactctggaaccactgcccaaaaactgggaaatggcctacactgacacagggatgatctacttcattgaccacaataccaagacaaccacctggttggatcctcgtctttgtaagaaagccaaagcccctgaagactgtgaagatggagagcttccttatggctgggagaaaatagaggaccctcagtatgggacatactatgttgatcaccttaaccagaaaacccagtttgaaaatccagtggaggaagccaaaaggaaaaagcagttaggacaggttgaaattgggtcttcaaaaccagatatggaaaaatcacacttcacaagagatccatcccagcttaaaggtgtccttgttcgagcatcactgaaaaaaagcacaatgggatttggttttactattattggtggagatagacctgatgagttcctacaagtgaaaaatgtgctgaaagatggtcccgcagctcaggatgggaaaattgcaccaggcgatgttattgtagacatcaatggcaactgtgtcctcggtcacactcatgcagatgttgtccagatgtttcaattggtacctgtcaatcagtatgtaaacctcactttatgtcgtggttatccacttcctgatgacagtgaagatcctgttgtggacattgttgctgctacccctgtcatcaatggacagtcattaaccaagggagagacttgcatgaatcctcaggattttaagccaggagcaatggttctggagcagaatggaaaatcgggacacactttgactggtgatggtctcaatggaccatcagatgcaagtgagcagagagtatccatggcatcgtcaggcagctcccagcctgaactagtgactatccctttgattaagggccctaaagggtttgggtttgcaattgctgacagccctactggacagaaggtgaaaatgatactggatagtcagtggtgtcaaggccttcagaaaggagatataattaaggaaatataccatcaaaatgtgcagaatttaacacatctccaagtggtagaggtgctaaagcagtttccagtaggtgctgatgtaccattgcttatcttaagaggaggtcctccttcaccaaccaaaactgccaaaatgaaaacagataaaaaggaaaatgcaggaagtttggaggccataaatgagcctattcctcagcctatgccttttccaccgagcattatcaggtcaggatccccaaaattggatccttctgaggtctacctgaaatctaagactttatatgaagataaaccaccaaacaccaaagatttggatgtttttcttcgaaaacaagagtcagggtttggcttcagggtgctaggaggagatggacctgaccagtctatatatattggggctattattcccctgggagcagctgagaaagatggtcggctccgcgcagctgatgaactaatgtgcattgatggaattcctgttaaagggaaatcacacaaacaagtcttggacctcatgacaactgctgctcgaaatggccatgtgttactaactgtcagacggaagatcttctatggagaaaaacaacccgaggacgacagctctcaggccttcatttcaacacagaatggatctccccgcctgaaccgggcagaggtcccagccaggcctgcaccccaggagccctatgatgttgtcttgcaacgaaaagaaaatgaaggatttggctttgtcatcctcacctccaaaaacaaaccacctccaggagttattcctcataaaattggccgagtcatagaaggaagtccggctgaccgctgtggaaaactgaaagttggagatcatatctctgcagtgaatgggcagtccattgttgaactgtctcatgataacattgttcagctgatcaaagatgctggtgtcaccgtcacactaacggtcattgctgaagaagagcatcatggtccaccatcaggaacaaactcagccaggcaaagcccagccctgcagcacaggcccatgggacagtcacaggccaaccacatacctggggacagaagtgccctagaaggtgaaattggaaaagatgtctccacttcttacagacattcttggtcagaccacaagcaccttgcacagcctgacaccgcagtaatttcagttgtaggcagtcggcacaatcagaaccttggttgttatccagtagagctggagagaggcccccggggctttggattcagcctccgaggggggaaggagtacaacatggggctgttcatccttcgtcttgctgaagatggtcctgccatcaaagatggcagaattcatgttggtgaccagattgttgaaatcaatggggaacctacacaaggaatcacacatactcgagcaattgagctcattcaggctggtggaaataaagttcttcttcttttgaggccaggaactggcttgatacctgaccatggtgattgggatattaataatccttcgtcttcaaatgtgatttatgatgaacagtcaccattacccccatcttcacattttgcttccatatttgaagagtctcacgtgccagtaattgaagaatctttgagagttcagatatgtgaaaaggcagaagaattaaaggacattgtgcctgaaaagaaaagcactttaaatgaaaatcagcctgagataaagcatcagtctcttctccagaaaaatgtgagtaagagggatccacccagcagtcatgggcacagtaacaagaaaaatctattaaaagtagaaaatggtgttacacgaagaggtagatcggttagtcccaaaaagccagccagtcaacattcagaggaacatttggataagattcctagtcctctaaaaaataaccccaaaagaagacccagagatcaatccctcagccccagcaaaggggaaaataaaagttgtcaggtcagcaccagggcaggctctggacaagatcagtgcagaaaaagcagaggtcggtcggccagcccaaaaaagcagcaaaaaattgaaggaagcaaagctccatcaaatgctgaggccaaattattagagggtaagagtcgaagaatagcaggctatacgggcagtaatgctgagcagatcccagatgggaaggaaaaatcagacgtcatcaggaaagatgcaaagcagaatcagttggaaaaaagcagaacaaggtctccagagaaaaaaatcaaaagaatggttgagaaatctcttccatccaaaatgactaataagactacaagtaaagaagtatctgaaaatgaaaaaggaaagaaagtaaccacaggagaaacaagttctagtaacgataaaataggagaaaatgtccagctatcagaaaagaggctgaagcaagaacctgaagagaaggtagtttcaaacaaaacagaagatcacaaagggaaagaactagaggcagctgacaaaaacaaagagactggaaggttcaaaccggaaagcagttctccagttaagaaaacactgataactccagggccctggaaggttccaagtggaaataaagtcacaggcactattggtatggctgagaaacggcagtaacctttagtataaaacaaagaaaaacaagttgtaatcttttcttacagcagcatttttccagaaaaagcctttttttttttttcagatattctgaaacagataagtacatgttaatgtgagcctcaagttacctaggctgcatgaagggcctttaggattgctaagaaccaactgtccccctggccggctgccctccctcgctctcaggaaggagctgcatccacatgctcatctgacccgccctgctcaggctgcccagctcgtcttcatgagtgtctgaacaaatgacatatgttgatattaacaatgtggtcacaactcactttgtatttgtgccaagttatctactgtatcatgtctgtttttatcctttttgttcagctgtttccacagtaatgaaaaagttaggtttggcttggaagttgatgatctcaatagcatgttgcatgtttacagagagaaatatgtgagtccttgcagaagaagagactgttaactcatcgttaaagatggccgttgtctcttctaacagctactgatgatgtcccactttaaaaataaaacccccaaacatcactactttaaggaaaaaaaaaatgtagtccaatattgatgctttcttatggctttttattttaatttggctggataagttgtttcaaataactgttaaagatattacttacaattgaatgtttgaaataagaaagtactttaagcaatagagttcatctcctgctgtgttatccaacctcgatgtatacttacagcatctcaggtcaccctttttatttcagttatttaattatgaaaccataaagaagcatgtggaaatagtgtttattgctctttgaagaaaaaccaccaactatttctggatattttggctgtacctactactaaagtcattagtctttaatacataatacatatttgaaaagtaaacatattatatagattatgtgagggacttaatcatgaaaccagtttcacagtccaagtaccaactcttctggtagcaggtgcacaagcttgggtgtttaaaaacaacctgtgtagggtatgcccagcaaatgaggacaaatgtgtagacagtacttactggatcttatttaacttttagctacattaactaactttcttatttaaaaacaagaaagggagactaaacatctgcttaacttgtacacattttcagaattctttttaaaagtctagttaaagatgtttcttagaagttggagactgttaacaacttccataaaatagatccaggtttttcagttccctgaagcagcattcagtagcatctatataaataaaggcaccttctgagaataaaactattttatggagtgtgtgaacacacttgttctgtcacctgggttcatcttgttgtgaagcacattaggtccaggtccttccctctgggagtctgactgtgaaactctttaacccaacaactcaattagcccctgtagataagacatgcttcccagagtgagatttttgaaatccccttttcatccagaactatatttacccacctattgtaactattcaaatagagcaaaattaggaggcttgataaatactaagaatttagtaccacagaaattatttattattttccctgtagtccacaattagtgataacgaatcctatttttgttaactgtgacataactttgatgtcatatgttgtcctatgtggttcttcctaagtaaactctgtactgattatatactgacttagcaatgtggccttggaatgctgagcaaaatgtggatgtactggttgtaaatgtttatatattgtacagtacctttatatatacacttgaggttctgattagagaaagatctgtaaattgctcattattttttatatagatatttaaaaaaaaca

SEQ ID NO: 11874 - DNA, 6508 bp, Homo sapiens
  source 1..6508: mol_type = unassigned DNA
gggccggagcggcgccccggccgcccgcgcggggtctcccccatggtgcagcggggttcgggatgtcgaagacgctgaagaagaagaagcactggctcagcaaggtgcaggagtgcgccgtgtcctgggccgggcccccgggcgacttcggcgcggagatccgcggtggcgcggagcgtggcgagttcccctacctggggcggctccgcgaggagcccggcgggggcacctgctgcgtcgtctcgggcaaggcgcccagcccaggcgatgtgctgctggaggtaaacgggacgcctgtcagcgggctcaccaaccgggacaccctggctgtcatccgccacttccgcgagcccatccgtctcaagactgtgaaaccaggcaaagtcattaataaagatttgcggcattacctaagtcttcagtttcaaaaaggatcaattgaccacaaactgcagcaagtgatcagagataatctctacttgagaaccattccatgcactacaagggcccccagggatggagaagtaccaggagtggattataatttcatttccgttgaacagttcaaagcactggaagagagtggagcattgttagaaagtgggacatatgatggaaacttctatggaactcccaagcctccagcagaacccagcccttttcagccagatccagttgatcaagtcctctttgataatgagtttgatgcagaatctcaaagaaaacgaacgacatctgtcagcaagatggaaagaatggatagctctcttcctgaagaggaagaagatgaggacaaggaagctattaatggcagtggaaacgcagaaaacagagagaggcattctgagtcatctgactggatgaagactgttccaagttacaaccaaacaaatagctccatggactttagaaattatatgatgagagatgagactctggaaccactgcccaaaaactgggaaatggcctacactgacacagggatgatctacttcattgaccacaataccaagacaaccacctggttggatcctcgtctttgtaagaaagccaaagcccctgaagactgtgaagatggagagcttccttatggctgggagaaaatagaggaccctcagtatgggacatactatgttgatcaccttaaccagaaaacccagtttgaaaatccagtggaggaagccaaaaggaaaaagcagttaggacaggttgaaattgggtcttcaaaaccagatatggaaaaatcacacttcacaagagatccatcccagcttaaaggtgtccttgttcgagcatcactgaaaaaaagcacaatgggatttggttttactattattggtggagatagacctgatgagttcctacaagtgaaaaatgtgctgaaagatggtcccgcagctcaggatgggaaaattgcaccaggcgatgttattgtagacatcaatggcaactgtgtcctcggtcacactcatgcagatgttgtccagatgtttcaattggtacctgtcaatcagtatgtaaacctcactttatgtcgtggttatccacttcctgatgacagtgaagatcctgttgtggacattgttgctgctacccctgtcatcaatggacagtcattaaccaagggagagacttgcatgaatcctcaggattttaagccaggagcaatggttctggagcagaatggaaaatcgggacacactttgactggtgatggtctcaatggaccatcagatgcaagtgagcagagagtatccatggcatcgtcaggcagctcccagcctgaactagtgactatccctttgattaagggccctaaagggtttgggtttgcaattgctgacagccctactggacagaaggtgaaaatgatactggatagtcagtggtgtcaaggccttcagaaaggagatataattaaggaaatataccatcaaaatgtgcagaatttaacacatctccaagtggtagaggtgctaaagcagtttccagtaggtgctgatgtaccattgcttatcttaagaggaggtcctccttcaccaaccaaaactgccaaaatgaaaacagataaaaaggaaaatgcaggaagtttggaggccataaatgagcctattcctcagcctatgccttttccaccgagcattatcaggtcaggatccccaaaattggatccttctgaggtctacctgaaatctaagactttatatgaagataaaccaccaaacaccaaagatttggatgtttttcttcgaaaacaagagtcagggtttggcttcagggtgctaggaggagatggacctgaccagtctatatatattggggctattattcccctgggagcagctgagaaagatggtcggctccgcgcagctgatgaactaatgtgcattgatggaattcctgttaaagggaaatcacacaaacaagtcttggacctcatgacaactgctgctcgaaatggccatgtgttactaactgtcagacggaagatcttctatggagaaaaacaacccgaggacgacagctctcaggccttcatttcaacacagaatggatctccccgcctgaaccgggcagaggtcccagccaggcctgcaccccaggagccctatgatgttgtcttgcaacgaaaagaaaatgaaggatttggctttgtcatcctcacctccaaaaacaaaccacctccaggagttattcctcataaaattggccgagtcatagaaggaagtccggctgaccgctgtggaaaactgaaagttggagatcatatctctgcagtgaatgggcagtccattgttgaactgtctcatgataacattgttcagctgatcaaagatgctggtgtcaccgtcacactaacggtcattgctgaagaagagcatcatggtccaccatcaggaacaaactcagccaggcaaagcccagccctgcagcacaggcccatgggacagtcacaggccaaccacatacctggggacagaagtgccctagaaggtgaaattggaaaagatgtctccacttcttacagacattcttggtcagaccacaagcaccttgcacagcctgacaccgcagtaatttcagttgtaggcagtcggcacaatcagaaccttggttgttatccagtagagctggagagaggcccccggggctttggattcagcctccgaggggggaaggagtacaacatggggctgttcatccttcgtcttgctgaagatggtcctgccatcaaagatggcagaattcatgttggtgaccagattgttgaaatcaatggggaacctacacaaggaatcacacatactcgagcaattgagctcattcaggctggtggaaataaagttcttcttcttttgaggccaggaactggcttgatacctgaccatggtttggctccttccggtctgtgctcctacgtgaaacccgagcaacattaaggctttcagggcttttcttggtctttccttaaaaagacttggtgattgggatattaataatccttcgtcttcaaatgtgatttatgatgaacagtcaccattacccccatcttcacattttgcttccatatttgaagagtctcacgtgccagtaattgaagaatctttgagagttcagatatgtgaaaaggcagaagaattaaaggacattgtgcctgaaaagaaaagcactttaaatgaaaatcagcctgagataaagcatcagtctcttctccagaaaaatgtgagtaagagggatccacccagcagtcatgggcacagtaacaagaaaaatctattaaaagtagaaaatggtgttacacgaagaggtagatcggttagtcccaaaaagccagccagtcaacattcagaggaacatttggataagattcctagtcctctaaaaaataaccccaaaagaagacccagagatcaatccctcagccccagcaaaggggaaaataaaagttgtcaggtcagcaccagggcaggctctggacaagatcagtgcagaaaaagcagaggtcggtcggccagcccaaaaaagcagcaaaaaattgaaggaagcaaagctccatcaaatgctgaggccaaattattagagggtaagagtcgaagaatagcaggctatacgggcagtaatgctgagcagatcccagatgggaaggaaaaatcagacgtcatcaggaaagatgcaaagcagaatcagttggaaaaaagcagaacaaggtctccagagaaaaaaatcaaaagaatggttgagaaatctcttccatccaaaatgactaataagactacaagtaaagaagtatctgaaaatgaaaaaggaaagaaagtaaccacaggagaaacaagttctagtaacgataaaataggagaaaatgtccagctatcagaaaagaggctgaagcaagaacctgaagagaaggtagtttcaaacaaaacagaagatcacaaagggaaagaactagaggcagctgacaaaaacaaagagactggaaggttcaaaccggaaagcagttctccagttaagaaaacactgataactccagggccctggaaggttccaagtggaaataaagtcacaggcactattggtatggctgagaaacggcagtaacctttagtataaaacaaagaaaaacaagttgtaatcttttcttacagcagcatttttccagaaaaagcctttttttttttttcagatattctgaaacagataagtacatgttaatgtgagcctcaagttacctaggctgcatgaagggcctttaggattgctaagaaccaactgtccccctggccggctgccctccctcgctctcaggaaggagctgcatccacatgctcatctgacccgccctgctcaggctgcccagctcgtcttcatgagtgtctgaacaaatgacatatgttgatattaacaatgtggtcacaactcactttgtatttgtgccaagttatctactgtatcatgtctgtttttatcctttttgttcagctgtttccacagtaatgaaaaagttaggtttggcttggaagttgatgatctcaatagcatgttgcatgtttacagagagaaatatgtgagtccttgcagaagaagagactgttaactcatcgttaaagatggccgttgtctcttctaacagctactgatgatgtcccactttaaaaataaaacccccaaacatcactactttaaggaaaaaaaaaatgtagtccaatattgatgctttcttatggctttttattttaatttggctggataagttgtttcaaataactgttaaagatattacttacaattgaatgtttgaaataagaaagtactttaagcaatagagttcatctcctgctgtgttatccaacctcgatgtatacttacagcatctcaggtcaccctttttatttcagttatttaattatgaaaccataaagaagcatgtggaaatagtgtttattgctctttgaagaaaaaccaccaactatttctggatattttggctgtacctactactaaagtcattagtctttaatacataatacatatttgaaaagtaaacatattatatagattatgtgagggacttaatcatgaaaccagtttcacagtccaagtaccaactcttctggtagcaggtgcacaagcttgggtgtttaaaaacaacctgtgtagggtatgcccagcaaatgaggacaaatgtgtagacagtacttactggatcttatttaacttttagctacattaactaactttcttatttaaaaacaagaaagggagactaaacatctgcttaacttgtacacattttcagaattctttttaaaagtctagttaaagatgtttcttagaagttggagactgttaacaacttccataaaatagatccaggtttttcagttccctgaagcagcattcagtagcatctatataaataaaggcaccttctgagaataaaactattttatggagtgtgtgaacacacttgttctgtcacctgggttcatcttgttgtgaagcacattaggtccaggtccttccctctgggagtctgactgtgaaactctttaacccaacaactcaattagcccctgtagataagacatgcttcccagagtgagatttttgaaatccccttttcatccagaactatatttacccacctattgtaactattcaaatagagcaaaattaggaggcttgataaatactaagaatttagtaccacagaaattatttattattttccctgtagtccacaattagtgataacgaatcctatttttgttaactgtgacataactttgatgtcatatgttgtcctatgtggttcttcctaagtaaactctgtactgattatatactgacttagcaatgtggccttggaatgctgagcaaaatgtggatgtactggttgtaaatgtttatatattgtacagtacctttatatatacacttgaggttctgattagagaaagatctgtaaattgctcattattttttatatagatatttaaaaaaaaca

SEQ ID NO: 11875 - DNA, 3596 bp, Homo sapiens
  source 1..3596: mol_type = unassigned DNA
cggccgcccgcgcggggtctcccccatggtgcagcggggttcgggatgtcgaagacgctgaagaagaagaagcactggctcagcaaggtgcaggagtgcgccgtgtcctgggccgggcccccgggcgacttcggcgcggagatccgcggtggcgcggagcgtggcgagttcccctacctggggcggctccgcgaggagcccggcgggggcacctgctgcgtcgtctcgggcaaggcgcccagcccaggcgatgtgctgctggaggtaaacgggacgcctgtcagcgggctcaccaaccgggacaccctggctgtcatccgccacttccgcgagcccatccgtctcaagactgtgaaaccaggcaaagtcattaataaagatttgcggcattacctaagtcttcagtttcaaaaaggatcaattgaccacaaactgcagcaagtgatcagagataatctctacttgagaaccattccatgcactacaagggcccccagggatggagaagtaccaggagtggattataatttcatttccgttgaacagttcaaagcactggaagagagtggagcattgttagaaagtgggacatatgatggaaacttctatggaactcccaagcctccagcagaacccagcccttttcagccagatccagttgatcaagtcctctttgataatgagtttgatgcagaatctcaaagaaaacgaacgacatctgtcagcaagatggaaagaatggatagctctcttcctgaagaggaagaagatgaggacaaggaagctattaatggcagtggaaacgcagaaaacagagagaggcattctgagtcatctgactggatgaagactgttccaagttacaaccaaacaaatagctccatggactttagaaattatatgatgagagatgagactctggaaccactgcccaaaaactgggaaatggcctacactgacacagggatgatctacttcattgaccacaataccaagacaaccacctggttggatcctcgtctttgtaagaaagccaaagcccctgaagactgtgaagatggagagcttccttatggctgggagaaaatagaggaccctcagtatgggacatactatgttgatcaccttaaccagaaaacccagtttgaaaatccagtggaggaagccaaaaggaaaaagcagttaggacaggttgaaattgggtcttcaaaaccagatatggaaaaatcacacttcacaagagatccatcccagcttaaaggtgtccttgttcgagcatcactgaaaaaaagcacaatgggatttggttttactattattggtggagatagacctgatgagttcctacaagtgaaaaatgtgctgaaagatggtcccgcagctcaggatgggaaaattgcaccaggcgatgttattgtagacatcaatggcaactgtgtcctcggtcacactcatgcagatgttgtccagatgtttcaattggtacctgtcaatcagtatgtaaacctcactttatgtcgtggttatccacttcctgatgacagtgaagatcctgttgtggacattgttgctgctacccctgtcatcaatggacagtcattaaccaagggagagacttgcatgaatcctcaggattttaagccaggagcaatggttctggagcagaatggaaaatcgggacacactttgactggtgatggtctcaatggaccatcagatgcaagtgagcagagagtatccatggcatcgtcaggcagctcccagcctgaactagtgactatccctttgattaagggccctaaagggtttgggtttgcaattgctgacagccctactggacagaaggtgaaaatgatactggatagtcagtggtgtcaaggccttcagaaaggagatataattaaggaaatataccatcaaaatgtgcagaatttaacacatctccaagtggtagaggtgctaaagcagtttccagtaggtgctgatgtaccattgcttatcttaagaggaggtcctccttcaccaaccaaaactgccaaaatgaaaacagataaaaaggaaaatgcaggaagtttggaggccataaatgagcctattcctcagcctatgccttttccaccgagcattatcaggtcaggatccccaaaattggatccttctgaggtctacctgaaatctaagactttatatgaagataaaccaccaaacaccaaagatttggatgtttttcttcgaaaacaagagtcagggtttggcttcagggtgctaggaggagatggacctgaccagtctatatatattggggctattattcccctgggagcagctgagaaagatggtcggctccgcgcagctgatgaactaatgtgcattgatggaattcctgttaaagggaaatcacacaaacaagtcttggacctcatgacaactgctgctcgaaatggccatgtgttactaactgtcagacggaagatcttctatggagaaaaacaacccgaggacgacagctctcaggccttcatttcaacacagaatggatctccccgcctgaaccgggcagaggtcccagccaggcctgcaccccaggagccctatgatgttgtcttgcaacgaaaagaaaatgaaggatttggctttgtcatcctcacctccaaaaacaaaccacctccaggagttattcctcataaaattggccgagtcatagaaggaagtccggctgaccgctgtggaaaactgaaagttggagatcatatctctgcagtgaatgggcagtccattgttgaactgtctcatgataacattgttcagctgatcaaagatgctggtgtcaccgtcacactaacggtcattgctgaagaagagcatcatggtccaccatcaggaacaaactcagccaggcaaagcccagccctgcagcacaggcccatgggacagtcacaggccaaccacatacctggggacagaagtgccctagaaggtgaaattggaaaagatgtctccacttcttacagacattcttggtcagaccacaagcaccttgcacagcctgacaccgcagtaatttcagttgtaggcagtcggcacaatcagaaccttggttgttatccagtagagctggagagaggcccccggggctttggattcagcctccgaggggggaaggagtacaacatggggctgttcatccttcgtcttgctgaagatggtcctgccatcaaagatggcagaattcatgttggtgaccagattgttgaaatcaatggggaacctacacaaggaatcacacatactcgagcaattgagctcattcaggctggtggaaataaagttcttcttcttttgaggccaggaactggcttgatacctgaccatggtttggctccttccggtctgtgctcctacgtgaaacccgagcaacattaaggctttcagggcttttcttggtctttccttaaaaagacttggtaaatttgcatgtcttgtaaatcactttcttcttttgttttcttttaaattaaaaatgatgctattaaatacatctatttctatcttctgcacttttcagtcttcttttgacattaaatttgacagcttaa

SEQ ID NO: 11876 - DNA, 897 bp, Homo sapiens
  source 1..897: mol_type = unassigned DNA
tccgcggtggcgcggagcgtggcgagttcccctacctggggcggctccgcgaggagcccggcgggggcacctgctgcgtcgtctcgggcaaggcgcccagcccaggcgatgtgctgctggaggtaaacgggacgcctgtcagcgggctcaccaaccgggacaccctggctgtcatccgccacttccgcgagcccatccgtctcaagactgtgaaaccaggcaaagtcattaataaagatttgcggcattacctaagtcttcagtttcaaaaaggatcaattgaccacaaactgcagcaagtgatcagagataatctctacttgagaaccattccatgcactacaagggcccccagggatggagaagtaccaggagtggattataatttcatttccgttgaacagttcaaagcactggaagagagtggagcattgttagaaagtgggacatatgatggtatgtccccaaataacatcactaccacccaaaaaactatctgaacgactggaattatttcagagggaatttgaccagtaaagtaccactttttgaaaaactttttttcctctctgtttttgagaaaattttcttttgatggggagatttgtaatttattaattaaaatgggattaaataataagcaaaaaaaatccatcatattttaaagttgattgtgaacagtatactaaaaatcagccagactggccagtttatatatttcatagtaattcacattcatcatgtgaactcagtgagtatttgttgattgcattttatttgtggttggaattcaaaatctgtactttaaaaaacttacatgtaccttgactatcctggaaaaaagagaatataaaatttggggagaaaacaacaaaaacagaataattggttttcttt

SEQ ID NO: 11877 - DNA, 890 bp, Homo sapiens
  source 1..890: mol_type = unassigned DNA
gacgcctgtcagcgggctcaccaaccgggacaccctggctgtcatccgccacttccgcgagcccatccgtctcaagactgtgaaaccagttcaaagctggagactggatactgacatgttcatgaccttgtgtacaagctgaaagctgctgaaagctacaggccaatggggctctgctttacttctgccttccatatcttgtgtcctgcatcttaatggtggaatcagatttgcatccagaatactagctataaaggagtctggaaaagacagtttttagttttccaacttctgcgtttcaggaaggcatactacaaggaggaagtcgctgagtgatagctgatcctttcccaggcactcatcttcttaaacatagtatattaattacaatttagcccattcttgatggctcattgtcatttctgtgagcttctcttttcataatggcctgtagttggaataatcatagggccaagggattttaacatctgtagtaactttttgtcctaggttagcttgtatctctcccacctcccataactgctgctgagacatctatgtttgatatcatttgacgtcaacctcccctgcaagccacaggcagggagagcacctcacccaaagcaaccagtttattggctggtcagcaacctgtgatttctgtagcttaaaaagatgagtggggcttattgtcttttgaactaagacaaaaaggaaagaatttccaattaagggtgggagcttcagctgagaggttttgaagtgagttggctgtattcttttgcaagaccaattgttaaattttcaagaattttgtgagttgtcaaacagccatttttaagaattaagttgcataataatttaataaaaacaaagataaatactcaaaa

SEQ ID NO: 11878 - DNA, 4047 bp, Homo sapiens
  source 1..4047: mol_type = unassigned DNA
agaaatcaaccttcttttagcgggcgtgtagcgccagcgcgctgtgacgtaatgtgaggggtctcccggcagggctgagctggaccaatgaggaaaggcaaggggccgatttgcctgttctcacgccccaccctcagacctagccggagcaaagtttcacttatagaagggagaggagcgaacatggcagcgcgttggcggttttggtgtgtctctgtgaccatggtggtggcgctgctcatcgtttgcgacgttccctcagcctctgcccaaagaaagaaggagatggtgttatctgaaaaggttagtcagctgatggaatggactaacaaaagacctgtaataagaatgaatggagacaagttccgtcgccttgtgaaagccccaccgagaaattactccgttatcgtcatgttcactgctctccaactgcatagacagtgtgtcgtttgcaagcaagctgatgaagaattccagatcctggcaaactcctggcgatactccagtgcattcaccaacaggatattttttgccatggtggattttgatgaaggctctgatgtatttcagatgctaaacatgaattcagctccaactttcatcaactttcctgcaaaagggaaacccaaacggggtgatacatatgagttacaggtgcggggtttttcagctgagcagattgcccggtggatcgccgacagaactgatgtcaatattagagtgattagacccccaaattatgctggtccccttatgttgggattgcttttggctgttattggtggacttgtgtatcttcgaagaagtaatatggaatttctctttaataaaactggatgggcttttgcagctttgtgttttgtgcttgctatgacatctggtcaaatgtggaaccatataagaggaccaccatatgcccataagaatccccacacgggacatgtgaattatatccatggaagcagtcaagcccagtttgtagctgaaacacacattgttcttctgtttaatggtggagttaccttaggaatggtgcttttatgtgaagctgctacctctgacatggatattggaaagcgaaagataatgtgtgtggctggtattggacttgttgtattattcttcagttggatgctctctatttttagatctaaatatcatggctacccatacagctttctgatgagttaaaaaggtcccagagatatatagacactggagtactggaaattgaaaaacgaaaatcgtgtgtgtttgaaaagaagaatgcaacttgtatattttgtattacctctttttttcaagtgatttaaatagttaatcatttaaccaaagaagatgtgtagtgccttaacaagcaatcctctgtcaaaatctgaggtatttgaaaataattatcctcttaaccttctcttcccagtgaactttatggaacatttaatttagtacaattaagtatattataaaaattgtaaaactactactttgttttagttagaacaaagctcaaaactactttagttaacttggtcatctgattttatattgccttatccaaagatggggaaagtaagtcctgaccaggtgttcccacatatgcctgttacagataactacattaggaattcattcttagcttcttcatctttgtgtggatgtgtatactttacgcatctttccttttgagtagagaaattatgtgtgtcatgtggtcttctgaaaatggaacaccattcttcagagcacacgtctagccctcagcaagacagttgtttctcctcctccttgcatatttcctactgaaatacagtgctgtctatgattgtttttgttttgttgtttttttgagacggtctcgctgtgtcacacaggctggagtgcagtggcgtgagctcggctgactgcaaactctgcctcccaggtttaagcgattctcctgtcacagcttcccaagtagctgggatttacaggtgtgcaccgccatgccaggctaatttttgtgtttttagtagagacagggtttcgccaagttgtccaggctggtcttgaactcctgggctcaagtgatccgcccgcctcagtctcccaaagtgcgaggatgacatgtgtgagctaccacaccagcaatgtctatgcttctcgatagctgtgaacatgaaaagacatctattgggagtccgaggcaggtggattgcttgaggccaggagttagagaccagcctggccaacaaggcaaaaccccgtctctactaaaaatatgaaaattagctgggcttggtggctcatgcctataatcctagctacttgggaggctgaggcacgagacttgcttaatacctgggaggcggagattgcagtgagccgagatcacgctactgcgctccagcctgagtgatagagtgagactctgtctcaaaaaaaagtatctctaaatacaggattataatttctgcttgagtatggtgttaactaccttgtatttagaaagatttcagattcattccatctccttagttttcttttaaggtgacccatctgtgataaaaatatagcttagtgctaaaatcagtgtaacttatacatggcctaaaatgtttctacaaattagagtttgtcacttattccatttgtacctaagagaaaaataggctcagttagaaaaggactccctggccaggcgcagtgacttacgcctgtaatctcagcactttgggaggccaaggcaggcagatcacgaggtcaggagttcgagaccatcctggccaacatggtgaaaccccgtctctactaaaaatataaaaattagctgggtgtggtggcaggagcctgtaatcccagctacacaggaggctgaggcacgagaatcacttgaactcaggagatggaggtttcagtgagccaagatcacaccactgcactccagcctggcaacagagcgagactccatctcaaaaaaaaaaaaaaaagtaagaaagaaaaggactcccttagaatgggaaagaaaaatcataaaatattgagctgatgcctgtatatagaaattaagcgtttctcgaaagctgttctatgttttgctgttattttagtctttattctcttcctttaggtggagaaacaaagtaccaatttgaagggattttttttattttgtcttttggtttctgtcagtagaaataaccatatgtgctaaccaaatttctgtgaagaatgttttcatggttatcattatatctaactataacctcccccatagttatgaagagtaacctgaaatgccactattgtggaaataggataattgtaattgtgaaaaaataattttaaggaaatcttacaagtattacattaaaaagatactatgactgccacctgccatttaccttctaataaccctgccatgtggtttgcagaaagagatggatatagtagcctcagaagaaatattttatgtgggttttttgtttttcgttactagatttcatggatgaggggatatggttgaccttttactttttaatggagcagccagtttttgttaattactcacttgtaaattgtgagattctgaattccttacctgctattcttgtacttgtctcaggccaaatctatgctgtggttcttatgagacttgtatgaagatgccctgatttgtacagattgaccacgggaatactactgccatgtaatctgtatagttccagataatttgtcatgaacattgacagaatgacaattttttgtatttgctttttctccctttaagagcacattcttctgtaaggagaaaggcagcattctggctaaaatgtgtagaaggtaatttactacacttataaaatagtgtgacttttgtgaaaattttgaattagctttcatatgaagtgccttaagtagactcttcatttacttttctggtaatggtttaaatatcatttgttatgcatttttaagatacagttcagaatgacacattgtagtggcaaagataaccaaatgtctggctgtttgctttttgaccatatcaataaacttttacaatctaaa

SEQ ID NO: 11879 - DNA, 2788 bp, Homo sapiens
  source 1..2788: mol_type = unassigned DNA
atagaagggagaggagcgaacatggcagcgcgttggcggttttggtgtgtctctgtgaccatggtggtggcgctgctcatcgtttgcgacgttccctcagcctctgcccaaagaaagaaggagatggtgttatctgaaaaggttagtcagctgatggaatggactaacaaaagacctgtaataagaatgaatggagacaagttccgtcgccttgtgaaagccccaccgagaaattactccgttatcgtcatgttcactgctctccaactgcatagacagtgtgtcgtttgcaagcaagctgatgaagaattccagatcctggcaaactcctggcgatactccagtgcattcaccaacaggatattttttgccatggtggattttgatgaaggctctgatgtatttcagatgctaaacatgaattcagctccaactttcatcaactttcctgcaaaagggaaacccaaacggggtgatacatatgagttacaggtgcggggtttttcagctgagcagattgcccggtggatcgccgacagaactgatgtcaatattagagtgattagacccccaaattatgctggtccccttatgttgggattgcttttggctgttattggtggacttgtgtatcttcgaagaagtaatatggaatttctctttaataaaactggatgggcttttgcagctttgtgttttgtgcttgctatgacatctggtcaaatgtggaaccatataagaggaccaccatatgcccataagaatccccacacgggacatgtgaattatatccatggaagcagtcaagcccagtttgtagctgaaacacacattgttcttctgtttaatggtggagttaccttaggaatggtgcttttatgtgaagctgctacctctgacatggatattggaaagcgaaagataatgtgtgtggctggtattggacttgttgtattattcttcagttggatgctctctatttttagatctaaatatcatggctacccatacagctttctgatgagttaaaaaggtcccagagatatatagacactggagtactggaaattgaaaaacgaaaatcgtgtgtgtttgaaaagaagaatgcaacttgtatattttgtattacctctttttttcaagtgatttaaatagttaatcatttaaccaaagaagatgtgtagtgccttaacaagcaatcctctgtcaaaatctgaggtatttgaaaataattatcctcttaaccttctcttcccagtgaactttatggaacatttaatttagtacaattaagtatattataaaaattgtaaaactactactttgttttagttagaacaaagctcaaaactactttagttaacttggtcatctgattttatattgccttatccaaagatggggaaagtaagtcctgaccaggtgttcccacatatgcctgttacagataactacattaggaattcattcttagcttcttcatctttgtgtggatgtgtatactttacgcatctttccttttgagtagagaaattatgtgtgtcatgtggtcttctgaaaatggaacaccattcttcagagcacacgtctagccctcagcaagacagttgtttctcctcctccttgcatatttcctactgaaatacagtgctgtctatgattgtttttgttttgttgtttttttgagacggtctcgctgtgtcacacaggctggagtgcagtggcgtgagctcggctgactgcaaactctgcctcccaggtttaagcgattctcctgtcacagcttcccaagtagctgggatttacaggtgtgcaccgccatgccaggctaatttttgtgtttttagtagagacagggtttcgccaagttgtccaggctggtcttgaactcctgggctcaagtgatccgcccgcctcagtctcccaaagtgcgaggatgacatgtgtgagctaccacaccagcaatgtctatgcttctcgatagctgtgaacatgaaaagacatctattgggagtccgaggcaggtggattgcttgaggccaggagttagagaccagcctggccaacaaggcaaaaccccgtctctactaaaaatatgaaaattagctgggcttggtggctcatgcctataatcctagctacttgggaggctgaggcacgagacttgcttaatacctgggaggcggagattgcagtgagccgagatcacgctactgcgctccagcctgagtgatagagtgagactctgtctcaaaaaaaagtatctctaaatacaggattataatttctgcttgagtatggtgttaactaccttgtatttagaaagatttcagattcattccatctccttagttttcttttaaggtgacccatctgtgataaaaatatagcttagtgctaaaatcagtgtaacttatacatggcctaaaatgtttctacaaattagagtttgtcacttattccatttgtacctaagagaaaaataggctcagttagaaaaggactccctggccaggcgcagtgacttacgcctgtaatctcagcactttgggaggccaaggcaggcagatcacgaggtcaggagttcgagaccatcctggccaacatggtgaaaccccgtctctactaaaaatataaaaattagctgggtgtggtggcaggagcctgtaatcccagctacacaggaggctgaggcacgagaatcacttgaactcaggagatggaggtttcagtgagccaagatcacaccactgcactccagcctggcaacagagcgagactccatctc

SEQ ID NO: 11880 - DNA, 959 bp, Homo sapiens
  source 1..959: mol_type = unassigned DNA
ggagaggagcgaacatggcagcgcgttggcggttttggtgtgtctctgtgaccatggtggtggcgctgctcatcgtttgcgacgttccctcagcctctgcccaaagaaagaaggagatggtgttatctgaaaaggttagtcagctgatggaatggactaacaaaagacctgtaataagaatgaatggagacaagttccgtcgccttgtgaaagccccaccgagaaattactccgttatcgtcatgttcactgctctccaactgcatagacagtgtgtcgtttgcaagcaagctgatgaagaattccagatcctggcaaactcctggcgatactccagtgcattcaccaacaggatattttttgccatggtggattttgatgaaggctctgatgtatttcagatgctaaacatgaattcagctccaactttcatcaactttcctgcaaaagggaaacccaaacggggtgatacatatgagttacaggtgcggggtttttcagctgagcagattgcccggtggatcgccgacagaactgatgtcaatattagagtgattagacccccaaattatgctggtccccttatgttgggattgcttttggctgttattggtggacttgtgtatcttcgaagaagtaatatggaatttctctttaataaaactggatgggcttttgcagctttggtgagtgaatttcagaagacaaaaaattatttgaataaaattcctaatagtgtatttttaggtaagcttttatttatgtgagaagtagcattttatttcttacctgaggaaaatagttttatatattttaattttctgtcttaaaatcagtttgtttcattcattatctcataaggatggccagaacttcaaggaactgattgtacctgccttttattcaacctaaatgacagactgtcatctctatgaaaatctctagttgttctgaaaata

SEQ ID NO: 11881 - DNA, 962 bp, Homo sapiens
  source 1..962: mol_type = unassigned DNA
gtttcacttatagaagggagaggagcgaacatggcagcgcgttggcggttttggtgtgtctctgtgaccatggtggtggcgctgctcatcgtttgcgacgttccctcagcctctgcccaaagaaagaaggagatggtgttatctgaaaaggttagtcagctgatggaatggactaacaaaagacctgtaataagaatgaatggagacaagttccgtcgccttgtgaaagccccaccgagaaattactccgttatcgtcatgttcactgctctccaactgcatagacagtgtgtcgtttgcaagcaagctgatgaagaattccagatcctggcaaactcctggcgatactccagtgcattcaccaacaggatattttttgccatggtggattttgatgaaggctctgatgtatttcagatgtttcaggttttttgagatggagtctcgctctgttgcccagactagagtgcagtggcttgatctcggctcactgcaacctctgcctcctggattcaagtgattcttctgcctcagcctcctgaatagctggaattacaggtgcccaccaccacgcctggctactttttgtattttgagtacagatggggtttcaccgtattggccaggctggtctcaaactcctgacctcagatgatccacccacctcagcctcccaaagtgctgggattacaggcgtgagccaccacacctggtccatttttagcttcagcatctctactagttctttccccttgcatataaatacttaaggacatagattcaattttgtctttgtttataaatgtgtctaattcatatatttgaacatattttactcaattgtatcaaacataaaaggaaaaagctggatataatgccttgctatacatcttcatatgaatgacttcccaatctaaaaatttattatatcccaaattaaactgttttctcttccactttca

SEQ ID NO: 11882 - DNA, 4019 bp, Homo sapiens
  source 1..4019: mol_type = unassigned DNA
gtgtagcgccagcgcgctgtgacgtaatgtgaggggtctcccggcagggctgagctggaccaatgaggaaaggcaaggggccgatttgcctgttctcacgccccaccctcagacctagccggagcaaagtttcacttatagaagggagaggagcgaacatggcagcgcgttggcggttttggtgtgtctctgtgaccatggtggtggcgctgctcatcgtttgcgacgttccctcagcctctgcccaaagaaagaaggagatggtgttatctgaaaaggttagtcagctgatggaatggactaacaaaagacctgtaataagaatgaatggagacaagttccgtcgccttgtgaaagccccaccgagaaattactccgttatcgtcatgttcactgctctccaactgcatagacagtgtgtcgtttgcaagcaagctgatgaagaattccagatcctggcaaactcctggcgatactccagtgcattcaccaacaggatattttttgccatggtggattttgatgaaggctctgatgtatttcagatgctaaacatgaattcagctccaactttcatcaactttcctgcaaaagggaaacccaaacggggtgatacatatgagttacaggtgcggggtttttcagctgagcagattgcccggtggatcgccgacagaactgatgtcaatattagagtgattagacccccaaattatgctggtccccttatgttgggattgcttttggctgttattggtggacttgtgtatcttcgaagaagtaatatggaatttctctttaataaaactggatgggcttttgcagctttgtgttttgtgcttgctatgacatctggtcaaatgtggaaccatataagaggaccaccatatgcccataagaatccccacacgggacatgtgaattatatccatggaagcagtcaagcccagtttgtagctgaaacacacattgttcttctgtttaatggtggagttaccttaggaatggtgcttttatgtgaagctgctacctctgacatggatattggaaagcgaaagataatgtgtgtggctggtattggacttgttgtattattcttcagttggatgctctctatttttagatctaaatatcatggctacccatacagctttctgatgagttaaaaaggtcccagagatatatagacactggagtactggaaattgaaaaacgaaaatcgtgtgtgtttgaaaagaagaatgcaacttgtatattttgtattacctctttttttcaagtgatttaaatagttaatcatttaaccaaagaagatgtgtagtgccttaacaagcaatcctctgtcaaaatctgaggtatttgaaaataattatcctcttaaccttctcttcccagtgaactttatggaacatttaatttagtacaattaagtatattataaaaattgtaaaactactactttgttttagttagaacaaagctcaaaactactttagttaacttggtcatctgattttatattgccttatccaaagatggggaaagtaagtcctgaccaggtgttcccacatatgcctgttacagataactacattaggaattcattcttagcttcttcatctttgtgtggatgtgtatactttacgcatctttccttttgagtagagaaattatgtgtgtcatgtggtcttctgaaaatggaacaccattcttcagagcacacgtctagccctcagcaagacagttgtttctcctcctccttgcatatttcctactgaaatacagtgctgtctatgattgtttttgttttgttgtttttttgagacggtctcgctgtgtcacacaggctggagtgcagtggcgtgagctcggctgactgcaaactctgcctcccaggtttaagcgattctcctgtcacagcttcccaagtagctgggatttacaggtgtgcaccgccatgccaggctaatttttgtgtttttagtagagacagggtttcgccaagttgtccaggctggtcttgaactcctgggctcaagtgatccgcccgcctcagtctcccaaagtgcgaggatgacatgtgtgagctaccacaccagcaatgtctatgcttctcgatagctgtgaacatgaaaagacatctattgggagtccgaggcaggtggattgcttgaggccaggagttagagaccagcctggccaacaaggcaaaaccccgtctctactaaaaatatgaaaattagctgggcttggtggctcatgcctataatcctagctacttgggaggctgaggcacgagacttgcttaatacctgggaggcggagattgcagtgagccgagatcacgctactgcgctccagcctgagtgatagagtgagactctgtctcaaaaaaaagtatctctaaatacaggattataatttctgcttgagtatggtgttaactaccttgtatttagaaagatttcagattcattccatctccttagttttcttttaaggtgacccatctgtgataaaaatatagcttagtgctaaaatcagtgtaacttatacatggcctaaaatgtttctacaaattagagtttgtcacttattccatttgtacctaagagaaaaataggctcagttagaaaaggactccctggccaggcgcagtgacttacgcctgtaatctcagcactttgggaggccaaggcaggcagatcacgaggtcaggagttcgagaccatcctggccaacatggtgaaaccccgtctctactaaaaatataaaaattagctgggtgtggtggcaggagcctgtaatcccagctacacaggaggctgaggcacgagaatcacttgaactcaggagatggaggtttcagtgagccaagatcacaccactgcactccagcctggcaacagagcgagactccatctcaaaaaaaaaaaaaaaagtaagaaagaaaaggactcccttagaatgggaaagaaaaatcataaaatattgagctgatgcctgtatatagaaattaagcgtttctcgaaagctgttctatgttttgctgttattttagtctttattctcttcctttaggtggagaaacaaagtaccaatttgaagggattttttttattttgtcttttggtttctgtcagtagaaataaccatatgtgctaaccaaatttctgtgaagaatgttttcatggttatcattatatctaactataacctcccccatagttatgaagagtaacctgaaatgccactattgtggaaataggataattgtaattgtgaaaaaataattttaaggaaatcttacaagtattacattaaaaagatactatgactgccacctgccatttaccttctaataaccctgccatgtggtttgcagaaagagatggatatagtagcctcagaagaaatattttatgtgggttttttgtttttcgttactagatttcatggatgaggggatatggttgaccttttactttttaatggagcagccagtttttgttaattactcacttgtaaattgtgagattctgaattccttacctgctattcttgtacttgtctcaggccaaatctatgctgtggttcttatgagacttgtatgaagatgccctgatttgtacagattgaccacgggaatactactgccatgtaatctgtatagttccagataatttgtcatgaacattgacagaatgacaattttttgtatttgctttttctccctttaagagcacattcttctgtaaggagaaaggcagcattctggctaaaatgtgtagaaggtaatttactacacttataaaatagtgtgacttttgtgaaaattttgaattagctttcatatgaagtgccttaagtagactcttcatttacttttctggtaatggtttaaatatcatttgttatgcatttttaagatacagttcagaatgacacattgtagtggcaaagataaccaaatgtctggctgtttgctttttgaccatatcaataaacttttacaatct

SEQ ID NO: 11883 - DNA, 3984 bp, Homo sapiens
  source 1..3984: mol_type = unassigned DNA
gcaggcgcggacaggtaatccccagcgggctgcagggccaccaccctctgtccgacccagccggagcccgacctgcgaggctggccgggcatgtcccctcggcgccctgtgctaccagggccaatctccgcccggagaccggtccctgacgccgggtgtttataagaatggaagtgttgtttccttgcccgattccttcatgctatatctcatgaacctctgtaatcttgggggagagactatatttaatgatgacaaacctgtcaccagtgtagcaacaacagtgtgaggacaaaagcaaataaaaattaagaagcgttcaaatttatattcaacaaggaagtcatttcaatcaacaacttctgctgcattatttttccaagatgaaccgatacacaaccatgagacagttgggggacggcacgtatgggagtgtgcttatgggcaagagtaatgaatccggggagctggtggccatcaaaaggatgaagagaaagttctattcttgggatgaatgcatgaacttgagagaagttaagtctctgaagaaacttaatcatgccaatgttattaaattgaaagaagttatcagagaaaatgaccatctttattttatatttgaatatatgaaagaaaacctctatcaattaatgaaagacagaaacaagttgttccctgaatcagtcatcagaaatattatgtatcaaatattgcaagggctggcttttatccataaacatggcttttttcatagggacatgaaaccagaaaacttgctttgtatgggtccagagcttgtgaaaattgctgattttggacttgcaagagaattaaggtcacagccaccatacactgattatgtatctaccagatggtatcgtgcccctgaagttttactgagatcttcagtttatagttctcccattgatgtgtgggctgttggaagtatcatggctgaactctatatgttaaggccacttttcccagggacaagtgaggtcgatgaaatctttaaaatttgccaagttttagggactcccaaaaaaagtgactggccagaaggataccagctggcatcctctatgaacttccgttttccccagtgtgttcctataaacttaaaaactcttattcccaatgccagtaatgaagctattcagctcatgaccgaaatgttgaattgggatccaaagaaacgaccgacagcaagccaggcattgaaacacccatattttcaagttggtcaggtattaggcccttcgtcaaatcatctggaatcaaaacagtctttaaataagcagctgcaaccattagaatcaaagccatctttagttgaggtagagcctaagcctctgccggatataatcgatcaggttgttggacaaccccagccaaaaactagccagcagccactgcagcccattcagccgccacagaacctgagcgtccagcaacctccaaagcaacagagtcaggagaaaccgccacaaacgctattcccgagcatcgtcaaaaacatgccaactaagccaaatggcacactgagtcataaaagtggtaggaggcgttggggtcagactatcttcaagtctggagatagctgggaagagttggaggactatgatttcggagcctcccattccaagaagccaagcatgggtgtttttaaagaaaaaaggaaaaaagattctccatttcggcttccagagccagtaccctcaggctccaaccactcgacaggggaaaacaagagcttacctgctgttacttccctaaaatctgattccgaattgtcaactgctccaacctctaaacagtactacttgaaacaatcaagatatcttccaggtgtgaatcccaagaaggtgtccttgatagccagtggaaaggaaataaacccccacacttggagcaaccagttattccccaagtcactgggacccgttggggcagaacttgctttcaaaaggagcaatgcaggaaatcttggaagttatgctacttacaatcagtcaggatatattccttcctttctcaaaaaagaagtgcagtcagctggccagaggatccacttagcacctctcaatgcaacggcttcagaatatacctggaacacaaaaactggtcgggggcagttttcaggacgtacttataatcctacagcaaaaaacctaaatattgtgaaccgtgcacagcccattccctcagtgcatgggaggacagactgggtggccaagtatggaggccaccggtaggagtctatggtgtgaaaccctacagcattgctccgtagagtacgtgcaagttccttgaccctgggaaatgtctacaaatgtctatttctactgagttctggaagaaatatgcaaaagtgggtacttggaagggcaaaaatcatcccctattttacttatttccaagaaatgcattttcttagcatcattgcccacagtgttgatatatgggtaggatgttacaaagtattgaataaactatttgccaaagtatgaagtatttgatctacaatttaataaatagtaaatccaataagaacccttaaaaaaaaacaacttccagaaaatgtttagagtgttttagttttcatttgttgtatgtgcccaaatggtttagtagttcttcactttgctgtggttggcttaagaggtttgtcttttgtttttgtacagcagttgggccaacctttgctggctgtcagctgtggttcttatttgactaaggctctgcgctgccattttgtcaatgacagaaagattgcaattatttgtttttctactttgaagctatgggagcgatggtaatttcaatcttgagcaggatatctttttttttttttttgaggcgatgtttcactcttgtgtccaggctggagtgcagtggcactatcttggcttactgcaacctccacctcctgggttcaagtgattctcctgcctcagcctcccgagtagctgggattagaggcgtgtgccaccatgcctggctaatttttgtagtattagtagagacagggtttcaccatgttggtcaggctcaggctggtctcaaactcctgacctcaggtgatccacctgcctcggcctcccaaagtgcagggcttacaggtgtgagccacagtgcccagctttttttttttttttttagaaataaatttatctttaacatagagaatatcaaagttatgccacttgattttagtggacggcttgtgttttgatcttgaccagtacagttcccatgaattcaaggtgacaatcaagcccaatggcttgatgacttcaatagtaaccaagtcaaggttctcttggctggacatcattaagaaagttctggaaactgtgtttgtttgatgctggttcattggacttttcaaattgttttgtttctgtgtccctaccagacacaaagatgaagtgtgccagctggttcccccaagccagctcatgctgctgaccactgactcagctctgaccttcacatttgctctgaagcaagtgcgttcagctgctggggcagtgatatcacatagtacatatattatttccttagtttatttccaaactggtattttaaatagacacttcgaactttgggctactctgtttaaatctgccactttctggactggaccttagtactgtaaattctttttaaagaataataatgttaccaactgctgagatttttatgtattttgtgactttgtaacaactgctattgtaataagtgtcatcttgtgggcattatacaaaggcatattataaaataataatgatatttttgtatagaagagtcaactgttcagatgtaagatgttgaaaaatgttaaaatctaaagagtaatttatcctagtggtaatggttatatgtatttgtacagtttaaattaatgtctcaaagctgtgcagtcttttgttactgggacacttttaaactctgaataggcattaaaaaaaatatggctaa

SEQ ID NO: 11884 - DNA, 3859 bp, Homo sapiens
  source 1..3859: mol_type = unassigned DNA
cgccggagcttcacaagggagcgaacgagggtgtttataagaatggaagtgttgtttccttgcccgattccttcatgctatatctcatgaacctctgtaatcttgggggagagactatatttaatgatgacaaacctgtcaccagtgtagcaacaacagtgtgaggacaaaagcaaataaaaattaagaagcgttcaaatttatattcaacaaggaagtcatttcaatcaacaacttctgctgcattatttttccaagatgaaccgatacacaaccatgagacagttgggggacggcacgtatgggagtgtgcttatgggcaagagtaatgaatccggggagctggtggccatcaaaaggatgaagagaaagttctattcttgggatgaatgcatgaacttgagagaagttaagtctctgaagaaacttaatcatgccaatgttattaaattgaaagaagttatcagagaaaatgaccatctttattttatatttgaatatatgaaagaaaacctctatcaattaatgaaagacagaaacaagttgttccctgaatcagtcatcagaaatattatgtatcaaatattgcaagggctggcttttatccataaacatggcttttttcatagggacatgaaaccagaaaacttgctttgtatgggtccagagcttgtgaaaattgctgattttggacttgcaagagaattaaggtcacagccaccatacactgattatgtatctaccagatggtatcgtgcccctgaagttttactgagatcttcagtttatagttctcccattgatgtgtgggctgttggaagtatcatggctgaactctatatgttaaggccacttttcccagggacaagtgaggtcgatgaaatctttaaaatttgccaagttttagggactcccaaaaaaagtgactggccagaaggataccagctggcatcctctatgaacttccgttttccccagtgtgttcctataaacttaaaaactcttattcccaatgccagtaatgaagctattcagctcatgaccgaaatgttgaattgggatccaaagaaacgaccgacagcaagccaggcattgaaacacccatattttcaagttggtcaggtattaggcccttcgtcaaatcatctggaatcaaaacagtctttaaataagcagctgcaaccattagaatcaaagccatctttagttgaggtagagcctaagcctctgccggatataatcgatcaggttgttggacaaccccagccaaaaactagccagcagccactgcagcccattcagccgccacagaacctgagcgtccagcaacctccaaagcaacagagtcaggagaaaccgccacaaacgctattcccgagcatcgtcaaaaacatgccaactaagccaaatggcacactgagtcataaaagtggtaggaggcgttggggtcagactatcttcaagtctggagatagctgggaagagttggaggactatgatttcggagcctcccattccaagaagccaagcatgggtgtttttaaagaaaaaaggaaaaaagattctccatttcggcttccagagccagtaccctcaggctccaaccactcgacaggggaaaacaagagcttacctgctgttacttccctaaaatctgattccgaattgtcaactgctccaacctctaaacagtactacttgaaacaatcaagatatcttccaggtgtgaatcccaagaaggtgtccttgatagccagtggaaaggaaataaacccccacacttggagcaaccagttattccccaagtcactgggacccgttggggcagaacttgctttcaaaaggagcaatgcaggaaatcttggaagttatgctacttacaatcagtcaggatatattccttcctttctcaaaaaagaagtgcagtcagctggccagaggatccacttagcacctctcaatgcaacggcttcagaatatacctggaacacaaaaactggtcgggggcagttttcaggacgtacttataatcctacagcaaaaaacctaaatattgtgaaccgtgcacagcccattccctcagtgcatgggaggacagactgggtggccaagtatggaggccaccggtaggagtctatggtgtgaaaccctacagcattgctccgtagagtacgtgcaagttccttgaccctgggaaatgtctacaaatgtctatttctactgagttctggaagaaatatgcaaaagtgggtacttggaagggcaaaaatcatcccctattttacttatttccaagaaatgcattttcttagcatcattgcccacagtgttgatatatgggtaggatgttacaaagtattgaataaactatttgccaaagtatgaagtatttgatctacaatttaataaatagtaaatccaataagaacccttaaaaaaaaacaacttccagaaaatgtttagagtgttttagttttcatttgttgtatgtgcccaaatggtttagtagttcttcactttgctgtggttggcttaagaggtttgtcttttgtttttgtacagcagttgggccaacctttgctggctgtcagctgtggttcttatttgactaaggctctgcgctgccattttgtcaatgacagaaagattgcaattatttgtttttctactttgaagctatgggagcgatggtaatttcaatcttgagcaggatatctttttttttttttttgaggcgatgtttcactcttgtgtccaggctggagtgcagtggcactatcttggcttactgcaacctccacctcctgggttcaagtgattctcctgcctcagcctcccgagtagctgggattagaggcgtgtgccaccatgcctggctaatttttgtagtattagtagagacagggtttcaccatgttggtcaggctcaggctggtctcaaactcctgacctcaggtgatccacctgcctcggcctcccaaagtgcagggcttacaggtgtgagccacagtgcccagctttttttttttttttttagaaataaatttatctttaacatagagaatatcaaagttatgccacttgattttagtggacggcttgtgttttgatcttgaccagtacagttcccatgaattcaaggtgacaatcaagcccaatggcttgatgacttcaatagtaaccaagtcaaggttctcttggctggacatcattaagaaagttctggaaactgtgtttgtttgatgctggttcattggacttttcaaattgttttgtttctgtgtccctaccagacacaaagatgaagtgtgccagctggttcccccaagccagctcatgctgctgaccactgactcagctctgaccttcacatttgctctgaagcaagtgcgttcagctgctggggcagtgatatcacatagtacatatattatttccttagtttatttccaaactggtattttaaatagacacttcgaactttgggctactctgtttaaatctgccactttctggactggaccttagtactgtaaattctttttaaagaataataatgttaccaactgctgagatttttatgtattttgtgactttgtaacaactgctattgtaataagtgtcatcttgtgggcattatacaaaggcatattataaaataataatgatatttttgtatagaagagtcaactgttcagatgtaagatgttgaaaaatgttaaaatctaaagagtaatttatcctagtggtaatggttatatgtatttgtacagtttaaattaatgtctcaaagctgtgcagtcttttgttactgggacacttttaaactctgaataggcattaaaaaaaatatggctaa

SEQ ID NO: 11885 - DNA, 3941 bp, Homo sapiens
  source 1..3941: mol_type = unassigned DNA
tcctaggagatgaaacacacaagacgccggagcttcacaagggagcgaacgagggtgtttataagaatggaagtgttgtttccttgcccgattccttcatgctatatctcatgaacctctgtaatcttgggggagagactatatttaatgatgacaaacctgtcaccagtgtagcaacaacagtgtgaggacaaaagcaaataaaaattaagaagcgttcaaatttatattcaacaaggaagtcatttcaatcaacaacttctgctgcattatttttccaagatgaaccgatacacaaccatgagacagttgggggacggcacgtatgggagtgtgcttatgggcaagagtaatgaatccggggagctggtggccatcaaaaggatgaagagaaagttctattcttgggatgaatgcatgaacttgagagaagttaagtctctgaagaaacttaatcatgccaatgttattaaattgaaagaagttatcagagaaaatgaccatctttattttatatttgaatatatgaaagaaaacctctatcaattaatgaaagacagaaacaagttgttccctgaatcagtcatcagaaatattatgtatcaaatattgcaagggctggcttttatccataaacatggcttttttcatagggacatgaaaccagaaaacttgctttgtatgggtccagagcttgtgaaaattgctgattttggacttgcaagagaattaaggtcacagccaccatacactgattatgtatctaccagatggtatcgtgcccctgaagttttactgagatcttcagtttatagttctcccattgatgtgtgggctgttggaagtatcatggctgaactctatatgttaaggccacttttcccagggacaagtgaggtcgatgaaatctttaaaatttgccaagttttagggactcccaaaaaaagtgactggccagaaggataccagctggcatcctctatgaacttccgttttccccagtgtgttcctataaacttaaaaactcttattcccaatgccagtaatgaagctattcagctcatgaccgaaatgttgaattgggatccaaagaaacgaccgacagcaagccaggcattgaaacacccatattttcaagttggtcaggtattaggcccttcgtcaaatcatctggaatcaaaacagtctttaaataagcagctgcaaccattagaatcaaagccatctttagttgaggtagagcctaagcctctgccggatataatcgatcaggttgttggacaaccccagccaaaaactagccagcagccactgcagcccattcagccgccacagaacctgagcgtccagcaacctccaaagcaacagagtcaggagaaaccgccacaaacgctattcccgagcatcgtcaaaaacatgccaactaagccaaatggcacactgagtcataaaagtggtaggaggcgttggggtcagactatcttcaagtctggagatagctgggaagagttggaggactatgatttcggagcctcccattccaagaagccaagcatgggtgtttttaaagaaaaaaggaaaaaagattctccatttcggcttccagagccagtaccctcaggctccaaccactcgacaggggaaaacaagagcttacctgctgttacttccctaaaatctgattccgaattgtcaactgctccaacctctaaacagtactacttgaaacaatcaagatatcttccaggtgtgaatcccaagaaggtgtccttgatagccagtggaaaggaaataaacccccacacttggagcaaccagttattccccaagtcactgggacccgttggggcagaacttgctttcaaaaggagcaatgcagaagaaagcataattaaaccaatcgaaaaactatcatgcaatgaaacttttcctgaaaaattagaggacccacaaggaaatcttggaagttatgctacttacaatcagtcaggatatattccttcctttctcaaaaaagaagtgcagtcagctggccagaggatccacttagcacctctcaatgcaacggcttcagaatatacctggaacacaaaaactggtcgggggcagttttcaggacgtacttataatcctacagcaaaaaacctaaatattgtgaaccgtgcacagcccattccctcagtgcatgggaggacagactgggtggccaagtatggaggccaccggtaggagtctatggtgtgaaaccctacagcattgctccgtagagtacgtgcaagttccttgaccctgggaaatgtctacaaatgtctatttctactgagttctggaagaaatatgcaaaagtgggtacttggaagggcaaaaatcatcccctattttacttatttccaagaaatgcattttcttagcatcattgcccacagtgttgatatatgggtaggatgttacaaagtattgaataaactatttgccaaagtatgaagtatttgatctacaatttaataaatagtaaatccaataagaacccttaaaaaaaaacaacttccagaaaatgtttagagtgttttagttttcatttgttgtatgtgcccaaatggtttagtagttcttcactttgctgtggttggcttaagaggtttgtcttttgtttttgtacagcagttgggccaacctttgctggctgtcagctgtggttcttatttgactaaggctctgcgctgccattttgtcaatgacagaaagattgcaattatttgtttttctactttgaagctatgggagcgatggtaatttcaatcttgagcaggatatctttttttttttttttgaggcgatgtttcactcttgtgtccaggctggagtgcagtggcactatcttggcttactgcaacctccacctcctgggttcaagtgattctcctgcctcagcctcccgagtagctgggattagaggcgtgtgccaccatgcctggctaatttttgtagtattagtagagacagggtttcaccatgttggtcaggctcaggctggtctcaaactcctgacctcaggtgatccacctgcctcggcctcccaaagtgcagggcttacaggtgtgagccacagtgcccagctttttttttttttttttagaaataaatttatctttaacatagagaatatcaaagttatgccacttgattttagtggacggcttgtgttttgatcttgaccagtacagttcccatgaattcaaggtgacaatcaagcccaatggcttgatgacttcaatagtaaccaagtcaaggttctcttggctggacatcattaagaaagttctggaaactgtgtttgtttgatgctggttcattggacttttcaaattgttttgtttctgtgtccctaccagacacaaagatgaagtgtgccagctggttcccccaagccagctcatgctgctgaccactgactcagctctgaccttcacatttgctctgaagcaagtgcgttcagctgctggggcagtgatatcacatagtacatatattatttccttagtttatttccaaactggtattttaaatagacacttcgaactttgggctactctgtttaaatctgccactttctggactggaccttagtactgtaaattctttttaaagaataataatgttaccaactgctgagatttttatgtattttgtgactttgtaacaactgctattgtaataagtgtcatcttgtgggcattatacaaaggcatattataaaataataatgatatttttgtatagaagagtcaactgttcagatgtaagatgttgaaaaatgttaaaatctaaagagtaatttatcctagtggtaatggttatatgtatttgtacagtttaaattaatgtctcaaagctgtgcagtcttttgttactgggacacttttaaactctgaataggcatt

SEQ ID NO: 11886 - DNA, 3767 bp, Homo sapiens
  source 1..3767: mol_type = unassigned DNA
tcctaggagatgaaacacacaagacgccggagcttcacaagggagcgaacgaggtaagcagcaggcgcggacagggtgtttataagaatggaagtgttgtttccttgcccgattccttcatgctatatctcatgaacctctgtaatcttgggggagagactatatttaatgatgacaaacctgtcaccagtgtagcaacaacagtgtgaggacaaaagcaaataaaaattaagaagcgttcaaatttatattcaacaaggaagtcatttcaatcaacaacttctgctgcattatttttccaagatgaaccgatacacaaccatgagacagttgggggacggcacgtatgggagtgtgcttatgggcaagagtaatgaatccggggagctggtggccatcaaaaggatgaagagaaagttctattcttgggatgaatgcatgaacttgagagaagttaagtctctgaagaaacttaatcatgccaatgttattaaattgaaagaagttatcagagaaaatgaccatctttattttatatttgaatatatgaaagaaaacctctatcaattaatgaaagacagaaacaagttgttccctgaatcagtcatcagaaatattatgtatcaaatattgcaagggctggcttttatccataaacatggcttttttcatagggacatgaaaccagaaaacttgctttgtatgggtccagagcttgtgaaaattgctgattttggacttgcaagagaattaaggtcacagccaccatacactgattatgtatctaccagatggtatcgtgcccctgaagttttactgagatcttcagtttatagttctcccattgatgtgtgggctgttggaagtatcatggctgaactctatatgttaaggccacttttcccagggacaagtgaggtcgatgaaatctttaaaatttgccaagttttagggactcccaaaaaaagtgactggccagaaggataccagctggcatcctctatgaacttccgttttccccagtgtgttcctataaacttaaaaactcttattcccaatgccagtaatgaagctattcagctcatgaccgaaatgttgaattgggatccaaagaaacgaccgacagcaagccaggcattgaaacacccatattttcaagttggtcaggtattaggcccttcgtcaaatcatctggaatcaaaacagtctttaaataagcagctgcaaccattagaatcaaagccatctttagttgaggtagagcctaagcctctgccggatataatcgatcaggttgttggacaaccccagccaaaaactagccagcagccactgcagcccattcagccgccacagaacctgagcgtccagcaacctccaaagcaacagagtcaggagaaaccgccacaaacgctattcccgagcatcgtcaaaaacatgccaactaagccaaatggcacactgagtcataaaagtggtaggaggcgttggggtcagactatcttcaagtctggagatagctgggaagagttggaggactatgatttcggagcctcccattccaagaagccaagcatgggtgtttttaaagaaaaaaggaaaaaagattctccatttcggcttccagagccagtaccctcaggctccaaccactcgacaggggaaaacaagagcttacctgctgttacttccctaaaatctgattccgaattgtcaactgctccaacctctaaacagtactacttgaaacaatcaagatatcttccaggtgtgaatcccaagaaggtgtccttgatagccagtggaaaggaaataaacccccacacttggagcaaccagttattccccaagtcactgggacccgttggggcagaacttgctttcaaaaggagcaatgcagaatatacctggaacacaaaaactggtcgggggcagttttcaggacgtacttataatcctacagcaaaaaacctaaatattgtgaaccgtgcacagcccattccctcagtgcatgggaggacagactgggtggccaagtatggaggccaccggtaggagtctatggtgtgaaaccctacagcattgctccgtagagtacgtgcaagttccttgaccctgggaaatgtctacaaatgtctatttctactgagttctggaagaaatatgcaaaagtgggtacttggaagggcaaaaatcatcccctattttacttatttccaagaaatgcattttcttagcatcattgcccacagtgttgatatatgggtaggatgttacaaagtattgaataaactatttgccaaagtatgaagtatttgatctacaatttaataaatagtaaatccaataagaacccttaaaaaaaaacaacttccagaaaatgtttagagtgttttagttttcatttgttgtatgtgcccaaatggtttagtagttcttcactttgctgtggttggcttaagaggtttgtcttttgtttttgtacagcagttgggccaacctttgctggctgtcagctgtggttcttatttgactaaggctctgcgctgccattttgtcaatgacagaaagattgcaattatttgtttttctactttgaagctatgggagcgatggtaatttcaatcttgagcaggatatctttttttttttttttgaggcgatgtttcactcttgtgtccaggctggagtgcagtggcactatcttggcttactgcaacctccacctcctgggttcaagtgattctcctgcctcagcctcccgagtagctgggattagaggcgtgtgccaccatgcctggctaatttttgtagtattagtagagacagggtttcaccatgttggtcaggctcaggctggtctcaaactcctgacctcaggtgatccacctgcctcggcctcccaaagtgcagggcttacaggtgtgagccacagtgcccagctttttttttttttttttagaaataaatttatctttaacatagagaatatcaaagttatgccacttgattttagtggacggcttgtgttttgatcttgaccagtacagttcccatgaattcaaggtgacaatcaagcccaatggcttgatgacttcaatagtaaccaagtcaaggttctcttggctggacatcattaagaaagttctggaaactgtgtttgtttgatgctggttcattggacttttcaaattgttttgtttctgtgtccctaccagacacaaagatgaagtgtgccagctggttcccccaagccagctcatgctgctgaccactgactcagctctgaccttcacatttgctctgaagcaagtgcgttcagctgctggggcagtgatatcacatagtacatatattatttccttagtttatttccaaactggtattttaaatagacacttcgaactttgggctactctgtttaaatctgccactttctggactggaccttagtactgtaaattctttttaaagaataataatgttaccaactgctgagatttttatgtattttgtgactttgtaacaactgctattgtaataagtgtcatcttgtgggcattatacaaaggcatattataaaataataatgatatttttgtatagaagagtcaactgttcagatgtaagatgttgaaaaatgttaaaatctaaagagtaatttatcctagtggtaatggttatatgtatttgtacagtttaaattaatgtctcaaagctgtgcagtcttttgttactgggacacttttaaactctgaataggcatt

SEQ ID NO: 11887 - DNA, 2459 bp, Homo sapiens
  source 1..2459: mol_type = unassigned DNA
agggtgtttataagaatggaagtgttgtttccttgcccgattccttcatgctatatctcatgaacctctgtaatcttgggggagagactatatttaatgatgacaaacctgtcaccagtgtagcaacaacagtgtgaggacaaaagcaaataaaaattaagaagcgttcaaatttatattcaacaaggaagtcatttcaatcaacaacttctgctgcattatttttccaagatgaaccgatacacaaccatgagacagttgggggacggcacgtatgggagtgtgcttatgggcaagagtaatgaatccggggagctggtggccatcaaaaggatgaagagaaagttctattcttgggatgaatgcatgaacttgagagaagttaagtctctgaagaaacttaatcatgccaatgttattaaattgaaagaagttatcagagaaaatgaccatctttattttatatttgaatatatgaaagaaaacctctatcaattaatgaaagacagaaacaagttgttccctgaatcagtcatcagaaatattatgtatcaaatattgcaagggctggcttttatccataaacatggcttttttcatagggacatgaaaccagaaaacttgctttgtatgggtccagagcttgtgaaaattgctgattttggacttgcaagagaattaaggtcacagccaccatacactgattatgtatctaccagatggtatcgtgcccctgaagttttactgagatcttcagtttatagttctcccattgatgtgtgggctgttggaagtatcatggctgaactctatatgttaaggccacttttcccagggacaagtgaggtcgatgaaatctttaaaatttgccaagttttagggactcccaaaaaaagtgactggccagaaggataccagctggcatcctctatgaacttccgttttccccagtgtgttcctataaacttaaaaactcttattcccaatgccagtaatgaagctattcagctcatgaccgaaatgttgaattgggatccaaagaaacgaccgacagcaagccaggcattgaaacacccatattttcaagttggtcaggtattaggcccttcgtcaaatcatctggaatcaaaacagtctttaaataagcagctgcaaccattagaatcaaagccatctttagttgaggtagagcctaagcctctgccggatataatcgatcaggttgttggacaaccccagccaaaaactagccagcagccactgcagcccattcagccgccacagaacctgagcgtccagcaacctccaaagcaacagagtcaggagaaaccgccacaaacgctattcccgagcatcgtcaaaaacatgccaactaagccaaatggcacactgagtcataaaagtggtaggaggcgttggggtcagactatcttcaagtctggagatagctgggaagagttggaggactatgatttcggagcctcccattccaagaagccaagcatgggtgtttttaaagaaaaaaggaaaaaagattctccatttcgtcaacaggtgaagatggctgttatttccctctcagcacaccagtttcccacgttatgaatccaactgcagccgttgcaggacagatagaaacatgttacacacaagcttccagagccagtaccctcaggctccaaccactcgacaggggaaaacaagagcttacctgctgttacttccctaaaatctgattccgaattgtcaactgctccaacctctaaacagtactacttgaaacaatcaagatatcttccaggtgtgaatcccaagaaggtgtccttgatagccagtggaaaggaaataaacccccacacttggagcaaccagttattccccaagtcactgggacccgttggggcagaacttgctttcaaaaggagcaatgcaggaaatcttggaagttatgctacttacaatcagtcaggatatattccttcctttctcaaaaaagaagtgcagtcagctggccagaggatccacttagcacctctcaatgcaacggcttcagaatatacctggaacacaaaaactggtcgggggcagttttcaggacgtacttataatcctacagcaaaaaacctaaatattgtgaaccgtgcacagcccattccctcagtgcatgggaggacagactgggtggccaagtatggaggccaccggtaggagtctatggtgtgaaaccctacagcattgctccgtagagtacgtgcaagttccttgaccctgggaaatgtctacaaatgtctatttctactgagttctggaagaaatatgcaaaagtgggtacttggaagggcaaaaatcatcccctattttacttatttccaagaaatgcattttcttagcatcattgcccacagtgttgatatatgggtaggatgttacaaagtattgaataaactatttgccaaagt

SEQ ID NO: 11888 - DNA, 547 bp, Homo sapiens
  source 1..547: mol_type = unassigned DNA
ctcttaacccgcgcgcgggggcgcccaggccactgggctccgcggagccagcgagaggtctgcgcggagtctgagcggcgctcgtcccgtcccaaggccgacgccagcacgccgtcatggcccccgcagcggcgacggggggcagcaccctgcccagtggcttctcggtcttcaccaccttgcccgacttgctcttcatctttgagtttgtgatgacaatgttccaagattgactgtggtgatggacgcacgtatctgcgaatattctgaaaaccagggaatcataccctttcaatgggggaactgcatgggctgtgaattatagctcataaagctgtttaagaaaagaaaaagataatgtctccccaccatctcactatgaaacatactgctataaatataccatgcaaaggaaaaaagtcggcctcattttttaaaggactcacttgcaaggtgatgcccccagaggctgggtggggtcctgagatctgtcaggagctggggttaaacccatagtgggctttgttctatggacaactgtggacaa

SEQ ID NO: 11889 - DNA, 1112 bp, Homo sapiens
  source 1..1112: mol_type = unassigned DNA
cccgcgcgcgggggcgcccaggccactgggctccgcggagccagcgagaggtctgcgcggagtctgagcggcgctcgtcccgtcccaaggccgacgccagcacgccgtcatggcccccgcagcggcgacggggggcagcaccctgcccagtggcttctcggtcttcaccaccttgcccgacttgctcttcatctttgagtttatcttcgggggcctggtgtggatcctggtggcctcctccctggtgccctggcccctggtccagggctgggtgatgttcgtgtctgtgttctgcttcgtggccaccaccaccttgatcatcctgtacataattggagcccacggtggagagacttcctgggtcaccttggacgcagcctaccactgcaccgctgccctcttttacctcagcgcctcagtcctggaggccctggccaccatcacgatgcaagacggcttcacctacaggcactaccatgaaaacattgctgccgtggtgttctcctacatagccactctgctctacgtggtccatgcggtgttctctttaatcagatggaagtcttcataaagccgcagtagaacttgagctgaaaacccagatggtgttaactggccgccccactttccggcataactttttagaaaacagaaatgcccttgatggtggaaaaaagaaaacaaccacccccccactgcccaaaaaaaaaagccctgccctgttgctcgtgggtgctgtgtttactctcccgtgtgccttcgcgtccgggttgggagcttgctgtgtctaacctccaactgctgtgctgtctgctagggtcacctcctgtttgtgaaaggggaccttcttgttcgggggtgggaagtggcgaccgtgacctgagaaggaaagaaagatcctctgctgacccctggagcagctctcgagaactacctgttggtattgtccacaagctctcccgagcgccccatcttgtgccatgttttaagtcttcatggatgttctgcatgtcatggggactaaaactcacccaacagatctttccagaggtccatggtggaagacgataaccctgtgaaatactttataaaatgtcttaatgttcaataca

SEQ ID NO: 11890 - DNA, 873 bp, Homo sapiens
  source 1..873: mol_type = unassigned DNA
atggcccccgcagcggcgacggggggcagcaccctgcccagtggcttctcggtcttcaccaccttgcccgacttgctcttcatctttgagtttatcttcgggggcctggtgtggatcctggtggcctcctccctggtgccctggcccctggtccagggctgggtgatgttcgtgtctgtgttctgcttcgtggccaccaccaccttgatcatcctgtacataattggagcccacggtggagagacttcctgggtcaccttggtgttctcctacatagccactctgctctacgtggtccatgcggtgttctctttaatcagatggaagtcttcataaagccgcagtagaacttgagctgaaaacccagatggtgttaactggccgccccactttccggcataactttttagaaaacagaaatgcccttgatggtggaaaaaagaaaacaaccacccccccactgcccaaaaaaaaaagccctgccctgttgctcgtgggtgctgtgtttactctcccgtgtgccttcgcgtccgggttgggagcttgctgtgtctaacctccaactgctgtgctgtctgctagggtcacctcctgtttgtgaaaggggaccttcttgttcgggggtgggaagtggcgaccgtgacctgagaaggaaagaaagatcctctgctgacccctggagcagctctcgagaactacctgttggtattgtccacaagctctcccgagcgccccatcttgtgccatgttttaagtcttcatggatgttctgcatgtcatggggactaaaactcacccaacagatctttccagaggtccatggtggaagacgataaccctgtgaaatactttataaaatgtcttaatgttcaa

SEQ ID NO: 11891 - DNA, 831 bp, Homo sapiens
  source 1..831: mol_type = unassigned DNA
atggcccccgcagcggcgacggggggcagcaccctgcccagtggcttctcggtcttcaccaccttgcccgacttgctcttcatctttgagtttgacgcagcctaccactgcaccgctgccctcttttacctcagcgcctcagtcctggaggccctggccaccatcacgatgcaagacggcttcacctacaggcactaccatgaaaacattgctgccgtggtgttctcctacatagccactctgctctacgtggtccatgcggtgttctctttaatcagatggaagtcttcataaagccgcagtagaacttgagctgaaaacccagatggtgttaactggccgccccactttccggcataactttttagaaaacagaaatgcccttgatggtggaaaaaagaaaacaaccacccccccactgcccaaaaaaaaaagccctgccctgttgctcgtgggtgctgtgtttactctcccgtgtgccttcgcgtccgggttgggagcttgctgtgtctaacctccaactgctgtgctgtctgctagggtcacctcctgtttgtgaaaggggaccttcttgttcgggggtgggaagtggcgaccgtgacctgagaaggaaagaaagatcctctgctgacccctggagcagctctcgagaactacctgttggtattgtccacaagctctcccgagcgccccatcttgtgccatgttttaagtcttcatggatgttctgcatgtcatggggactaaaactcacccaacagatctttccagaggtccatggtggaagacgataaccctgtgaaatactttataaaatgtcttaatgttcaa

SEQ ID NO: 11892 - DNA, 705 bp, Homo sapiens
  source 1..705: mol_type = unassigned DNA
atggcccccgcagcggcgacggggggcagcaccctgcccagtggcttctcggtcttcaccaccttgcccgacttgctcttcatctttgagtttgtgttctcctacatagccactctgctctacgtggtccatgcggtgttctctttaatcagatggaagtcttcataaagccgcagtagaacttgagctgaaaacccagatggtgttaactggccgccccactttccggcataactttttagaaaacagaaatgcccttgatggtggaaaaaagaaaacaaccacccccccactgcccaaaaaaaaaagccctgccctgttgctcgtgggtgctgtgtttactctcccgtgtgccttcgcgtccgggttgggagcttgctgtgtctaacctccaactgctgtgctgtctgctagggtcacctcctgtttgtgaaaggggaccttcttgttcgggggtgggaagtggcgaccgtgacctgagaaggaaagaaagatcctctgctgacccctggagcagctctcgagaactacctgttggtattgtccacaagctctcccgagcgccccatcttgtgccatgttttaagtcttcatggatgttctgcatgtcatggggactaaaactcacccaacagatctttccagaggtccatggtggaagacgataaccctgtgaaatactttataaaatgtcttaatgttcaa

SEQ ID NO: 11893 - DNA, 573 bp, Homo sapiens
  source 1..573: mol_type = unassigned DNA
agattccatgggcgtaggaccctccgagccagggcaagaagttgcaggaaaaatggcttctagcagtggaacttcctcatacacgtgatctgtttctgattagagaactgcaggaggtgaaaattgggttcaagctgttcgggggtcttgtctggattttggttgcctcctccaatgttcctctacctctactacaaggatgggtcatgtttgtgtccgtgacagcgtttttcttttcgctcctctttctgggcatgttcctctctggcatggtggctcaaattgatgctaactggaacttcctggattttgcctaccattttacagtatttgtcttctattttggagcctttttattggaagcagcagccacatccctgcatgatttgcattgcaatacaaccataaccgggcagccactcctgagtgataaccagtataacataaacgtagcagcctcaatttttgcctttatgacgacagcttgttatggttgcagtttgggtctggctttacgaagatggcgaccgtaacactccttagaaactggcagtcgtatgttagtttcacttg

SEQ ID NO: 11894 - DNA, 578 bp, Homo sapiens
  source 1..578: mol_type = unassigned DNA
ataagcaccccactttttaagtgtgactggtgacctcgattttaccttctgagtcacagcaccaagacctgtgtatctgtcaaactgagcacagtgggcgagggcgcgctgtgagagctggggagaagacaggtggagagcacagctgttcgggggtcttgtctggattttggttgcctcctccaatgttcctctacctctactacaaggatgggtcatgtttgtgtccgtgacagcgtttttcttttcgctcctctttctgggcatgttcctctctggcatggtggctcaaattgatgctaactggaacttcctggattttgcctaccattttacagtatttgtcttctattttggagcctttttattggaagcagcagccacatccctgcatgatttgcattgcaatacaaccataaccgggcagccactcctgagtgataaccagtataacataaacgtagcagcctcaatttttgcctttatgacgacagcttgttatggttgcagtttgggtctggctttacgaagatggcgaccgtaacactccttagaaactggcagtcgtatgttagttt

SEQ ID NO: 11895 - DNA, 2818 bp, Homo sapiens
  source 1..2818: mol_type = unassigned DNA
agcccgcggagctgagcggcggcggcggcggcggcaggagcccgggaggcggaggcgggaggcggcggcggcgcgcggagacgcagcagcggcagcggcagcatgtcggccggcggagcgtcagtcccgccgcccccgaaccccgccgtgtccttcccgccgccccgggtcaccctgcccgccggccccgacatcctgcggacctactcgggcgccttcgtctgcctggagattctgttcgggggtcttgtctggattttggttgcctcctccaatgttcctctacctctactacaaggatgggtcatgtttgtgtccgtgacagcgtttttcttttcgctcctctttctgggcatgttcctctctggcatggtggctcaaattgatgctaactggaacttcctggattttgcctaccattttacagtatttgtcttctattttggagcctttttattggaagcagcagccacatccctgcatgatttgcattgcaatacaaccataaccgggcagccactcctgagtgataaccagtataacataaacgtagcagcctcaatttttgcctttatgacgacagcttgttatggttgcagtttgggtctggctttacgaagatggcgaccgtaacactccttagaaactggcagtcgtatgttagtttcacttgtctactttatatgtctgatcaatttggataccattttgtccagatgcaaaaacattccaaaagtaatgtgtttagtagagagagactctaagctcaagttctggtttatttcatggatggaatgttaattttattatgatattaaagaaatggccttttattttacatctctcccctttttccctttccccctttattttcctccttttctttctgaaagtttccttttatgtccataaaatacaaatatattgttcataaaaaattagtatcccttttgtttggttgctgagtcacctgaaccttaattttaattggtaattacagcccctaaaaaaaacacatttcaaataggcttcccactaaactctatattttagtgtaaaccaggaattggcacactttttttagaatgggccagatggtaaatatttatgcttcacggtccatacagtctctgtcacaactattcagttctgctagtatagcgtgaaagcagctatacacaatacagaaatgaatgagtgtggttatgttctaataaaacttatttataaaaacaaggggaggctgggtttagcctgtgggccatagtttgtcaaccactggtgtaaaaccttagttatatatgatctgcattttcttgaactgatcattgaaaacttataaacctaacagaaaagccacataatatttagtgtcattatgcaataatcacattgcctttgtgttaatagtcaaatacttacctttggagaatacttacctttggaggaatgtataaaatttctcaggcagagtcctggatataggaaaaagtaatttatgaagtaaacttcagttgcttaatcaaactaatgatagtctaacaactgagcaagatcctcatctgagagtgcttaaaatgggatccccagagaccattaaccaatactggaactggtatctagctactgatgtcttactttgagtttatttatgcttcagaatacagttgtttgccctgtgcatgaatatacccatatttgtgtgtggatatgtgaagcttttccaaatagagctctcagaagaattaagtttttacttctaattattttgcattactttgagttaaatttgaatagagtattaaatataaagttgtagattcttatgtgtttttgtattagcccagacatctgtaatgtttttgcactggtgacagacaaaatctgttttaaaatcatatccagcacaaaaactatttctggctgaatagcacagaaaagtattttaacctacctgtagagatcctcgtcatggaaaggtgccaaactgttttgaatggaaggacaagtaagagtgaggccacagttcccaccacacgagggcttttgtattgttctactttttcagccctttactttctggctgaagcatccccttggagtgccatgtataagttgggctattagagttcatggaacatagaacaaccatgaatgagtggcatgatccgtgcttaatgatcaagtgttacttatctaataatcctctagaaagaaccctgttagatcttggtttgtgataaaaatataaagacagaagacatgaggaaaaacaaaaggtttgaggaaatcaggcatatgactttatacttaacatcagatcttttctataatatcctactactttggttttcctagctccataccacacacctaaacctgtattatgaattacatattacaaagtcataaatgtgccatatggatatacagtacattctagttggaatcgtttactctgctagaatttaggtgtgagattttttgtttcccaggtatagcaggcttatgtttggtggcattaaattggtttctttaaaatgctttggtggcacttttgtaaacagattgcttctagattgttacaaaccaagcctaagacacatctgtgaatacttagatttgtagcttaatcacattctagacttgtgagttgaatgacaaagcagttgaacaaaaattatggcatttaagaatttaacatgtcttagctgtaaaaatgagaaagtgttggttggttttaaaatctggtaactccatgatgaaaagaaatttattttatacgtgttatgtctctaataaagtattcatttgataa
